United States Patent Application Publication US 2015/0240253 A1 - sequence listing, part 3

SEQ ID NO: 9203 - DNA, 1056 bp, Zea Mays
attggattttgcggggctgggcgtgagcgtgtgggctcttgtagcgggggatccatgagcagccaaccctagcttgcctggacgggaactctctacagctgtctttcgcgattctcctcgggcgtgggttttgttgcaggaggtgtttcaagctgcattgagccaccgtgcccggagtttcctgtctcttagtccttcgttcagttgcggatttctttgctgcgttctggagtggaggatcgacgtgctcctttcgtggctgtttgatgcttgttgagttcgagtaggttcgtattcctggttcggaattcagtaaggtcagtttctcgctgcttggaacttgatccgaggtgttagtttaatttctgagatatgatcgggaggggatcagcggtgctgcattttctcgggagattgtacggcgcgcccgaatcctgctctgcactgctgtttcctgaagtgcaaagagtgggtgtctattgtcttgttgcaatgcaactcatgtgcatatccagttctctttctgtccctaatgacttgtttgttttcgggggtatggttgccatggttgattgcgatatatggaaatggagggtggaatttatctctctactatctgctgtgtagtgggccattgctgctgttgacactcgacggtaggatcggccgttgccctatatatttgtgttattaggtctgtataggaggtgatgatgtttgtttaccttattactcgccgttagcgggagcgcgagtgcaaacagttgttagtctatcgccattagactccctattttaaactccactttataaccaatatcgtctacagtacaaaacagtgttttgcacacccgtttacacacccgctggagttggccttagcctcgtcacatctgttctacatttgtgtgcctgaaactctgaacctccctactggttactactcctattcatggtgctgtatttaaaaaaagaatctgagacgtcactctaacttgagaaattaggaatagagaactgctaaatctgacatcgctcataggtcttctgttttct

SEQ ID NO: 9204 - DNA, 400 bp, Zea Mays
cccagaagatttgataaaattctgccggaaaaccatccggccctggagctttgttgtgctccatctgaaaaattgcaccctttacctcttccatggtaaaatcagcagtaagactatcattctcctcgtcagatatctgaggaatatcatctattcgctcatcattaagatgaaaattggaatcctcagccggcccgaacaggtttttgtaataagaagtgatgtgttttttaagctcaacatccccacttattactctgtccccatccagcaatttatagattctcgtcttcctgtgtttaccattagccaccaaatgaaagtatttcgtatttgcatccccttccaataaaccttttgttttcgctctttggtaccatttaacttcttcttctctcaa

SEQ ID NO: 9205 - DNA, 449 bp, Zea Mays
gtctgaggtgtccacgccttcctcattcttctcagtcatttgatttcgttcctacaattaccgaatgcacgtagcacaaacgtgcacagtggttcctttggataaggccccgcaccgtcctcgcgcgacgggattcttccagatggaaacgaataccacatgacggggaagggaaaaggggagcagacaccgtcgtctccgctcagtcgcaatatcgttgacgtcggctacaacgaccatggtggcagccattcttctgtgtccacacctcccccattcgctttgtcgttgcctctccgattgccataggtatgaacattccttttcaccgtaacttcatagatttgcgtcctcttagtgttagggttgtcttccagcctcctgcaatgtgcgctcccatgccattactacacatcgagtagcaatcgccttcctcgtgtttttccatc

SEQ ID NO: 9206 - DNA, 686 bp, Zea Mays
tgtactgtaatttgttgaactgattgaaaaaaatgcaagaataaattactgggcagcagcgatgtcctggatctactcacctatactgtgttgcgttgttgtcttgggatggagactccactgccgacggaggaggagcaatttgaacggcggcgacagacttctgagcacaacggcggtggcgaaataccgagcgagggcgacggaggagcaccaatctaagcggcggcaggggaggagcagagtgaacgggaggagcggccgaaggaatcgcagcagtggctcccgccgccgttgaggaacgggaggagtgaacgggtccagcgaatgggagatgctagcaaaggtgtcagccacgtctttatttggagcaggggcaaaaaggtccaagcaagtgccctcttctctgtttatgcatcgaataggtgataaatgacattttgtcggtaaacgtgtgaggatggtgcactagcgaagcccttgcacataatggcattcgggcgaatcccacgttccataatggcataattccatatttctcgaacagctgggctaggcctaattcggtataggtcagaggtccgattgggccgggcaagttttgatgggccaactgcaaggaatggtcttctcttgttggacccagcttgatttatctttctttctctatctctatctctatctct

SEQ ID NO: 9207 - DNA, 399 bp, Zea Mays
aggtcagcttcggaaataacagacacgtggttaccggcgaatggaagttggctgttgggatcgattggtaggatgatcggaatagcagcactctgtctcttaatcttgggcgccagtgtggtctctcaaacgatgcgggtggatttaggaactcagaaaattggaaagcggcggaggaaaaggcaagaactagggttcaaaattcaagggggaacgccagcagaagtatgggttggcgcgataagtcgagcgcaaagcggcaggccgtaactcgggaagagttgagatcgcataaaagcaagcatcactcgggcattacctctaaaatgctagcgagccaccagatgcatggacagggcgtacaacaatggatcagcaaggaactgcgtcttcattcat

SEQ ID NO: 9208 - DNA, 703 bp, Zea Mays
ctcaagacggaagatctgtcagcgaatatgtgcacaagttcacggaattagcccactacacgccagatgacgtcagtaccgagagcaagaagatggcccgtttcctgaagggactcaggccagaactcaagacaattctagctagccaagacttcctcagtttctctcacctgtccaacaaggccatgcaagttgaaagggcaaaggaggaggaaaaagggcatctcaaaagaaagttccaagtcctccgggctcagcagcaagaccggcaccagaagactcgatcatttgggttaccacccaaggggccaaacttcagtagaccagctggacccactccgtcacgattcagccagcaaagtcagagctctttccattccccctcagtggcaagcaaccaacccccggcaaatgcgtgttggcactgtggtgatcccagtcacttcaagagcaactgtccgcagctgaagccaccaggacccgcctactccaacttgatgaatggccccaagaatacctcagcatccgcccccaaggcgccctccaccgtcagccagcagatcaaggctccgtaccaaggaaggacacgagtaaatcacgtcgatgcccaggaagctcagcaggctccgggagtagtgctcgctgagttccttgttgaatttactctcgctaccgtacttttcgattctagagcatcccacac

SEQ ID NO: 9209 - DNA, 435 bp, Zea Mays
ttgtagcccgacacactcacaataggagatgtccaaagatcacaatgtattaaatcgaaattatttgtagttcgagaatttgaggaaccaaaagggagtctagtgtgtcgaccgagctgacacgcatgacataaatggtgactatcatctttattacatgagatggctttggagcgaatgagtttggacaaaacttcatgcccaagatgcccaagacgacggtgccatagcgaggtgggtgcagcaaggaatgcggaggtgctggtggctggaggaaaaaacgggtagaggtcgccagagctattgcacctggcgatcacgttcctggtttccaaatccttcacagaaagaccaaacggatcaaattcgatggcgcaattattgtcggttgtaaaacgacgaatggaaatcaagttcttaattatgtgaggtgag

SEQ ID NO: 9210 - DNA, 590 bp, Zea Mays
ggcgcatgcaaggtattacgcaatgcaagtgaacgagaagcagttctaatagaagcatgaccagtatgcagaatatgcaaacctacgtcgttgcccacaggaactttgtcgccaccagtgtattgttcccggacagctaagcggtcaagatcatgggtgatatgatcagtagcaccagtgtcgtagtaccaattcaaatcaatcttgtaagacgaggtcgcaaccatagctgacctagaggggtcttcatgataagattcatccatatggtgccaacatcaaatagcagtgtgaccttcttttccacagatctggcagaatgggcgctcggaggggccatgatgatcaccaaaggaacgaggagcatcactgcgagagggataagaacgacctcgtacacgaccgtgaccacgagagaggccacgaaaattacccccgtgaccagcaaaatgagcagacgacccgatgtgaagttgctgatcagactgatgcttgagcaggcgagcttcaaacatcattagatgggcatatacatcatatacatcatcaagagtgagggcatccttcgttgtcagcagactccgtatccc

SEQ ID NO: 9211 - DNA, 398 bp, Zea Mays
tgggaggtcaagtgggtgctcgccggagtccaagaaccatggcggagaggcgccatcacgtggaacggagcccctgcgctgccatcctccagtaaaatcatctccgaatcccctccctcatcactaggttgcgtagccatcctgcatactcgacctaggtagcgctgttgatgggaatcgttcatcggagggaggtgttgccgtggtgatggctggaacctgcagagagtgcggagagttctgcctgagagagagatgtgagtggtgattgattctcgccttggctatcggttcggccagggggacccactcgggggaaatcgcggagctcaagaaggttgtgtggggcacctacggctgggggaaagccttgccgccacggggattccacgccggag

SEQ ID NO: 9212 - DNA, 489 bp, Zea Mays
tgtatatacaaaatgtagatatgacaaaggcccaagtagccaagcccaatactgaccctacctaagaagtatatatccatgtgccaacctagtaattgttactttcttcccttcccaatctgaaccgtaggaccgtagctcatagtccagccgctacaccgactaactccatcactctgctacattagtactcgaacctctagacagtgaccaagccctcaagctccaacctccaaacttcttgcagattctcttaggtgctagggttgaagggactgcataaaattattgcctacttgggagttgacctagtggctatcgcctaggaatctaggggccttgccttagttgccacatgcctcaaagtagaaggtccatgccctaatggcctatccatatcgtcatcggccactcaaggagctagaagctgcagtccaccgttggctaccttagaaggtagggcatgtccataacgctagtgaaacagag

SEQ ID NO: 9213 - DNA, 833 bp, Zea Mays
atctagtaacgctctccccagactatctgagaaccctgctgactcgataaagagccgccctctaccccaagcccctcctgctcctgctcctgtcgacctagcaaccatgatgtatcagcagaatagacttctagaggctctagtgaccactatcactgctcaagctcaaggaaatcaaggcaatcctagacctgtactcatcataatggcaatggcagcgtcattgcggatttccaccgcttgcaaccaccaaagtttgggggatctgacaacccgatcgaggcagatgattggttgtgtgagattgagatgaagcttgaggtcatccatgccgatgacagggacaaggtcttacttgcggtgcagcaattaaggggacaggctcttgcttggtggcaaagttatcgagaggttaatgaagatgtagttgtaatgggttgggctgattttgtcaagatatttcgagagtagcatattcctagcagtatgatgaagcttaagaaagatgagttcagaaagcttcgtcaaggcgccatgtccgtgttagaaaacattcacaagtttacagaattgtctcgttatgctcctgaagatatcaatgatgatgagaagaagcaggaagcctttcttagtggccttaactctgagattaggaccattgtggaagtcactgtccataatgactttaatgccatggttaacagagcaatcaccaccgaaagaaacaaaaaggcggagttcaatgagcgcaagcgtcggtttgagagcaagaagccccaacagcctgagaagtttcagagaactcagtttcctgctcactcaagccaccggag

SEQ ID NO: 9214 - DNA, 775 bp, Zea Mays
ccttgatgaccttctcaaggaatttggggacactttagaaaaggagttcggaagtaccttagaaagcgctcgcgtgtagtgcgacttgtggtaattgcatgcttgtaatgaactggtgtaatgaatataataacttggttgaaaaaaaattggcatatgcataatagtaactctctccccctggcagatggcttcggataaaaccatgcctaccgcctccgggattggagcagggtttcccctaggagctgaaggaggagccgatggagaagggagtgagacccaccttcgcgcacctccggagctgccattagatttagcccaagttctagccaaccaaacccgactcattgaggtcctcactagaagtctggagaatcaacgcccgaatggcggaagaccacaggacaggatgggagattttctaaggctcaagcctcccacattcgctggatccagcaatcctctcgatgttgatgactggctgcgcacgattaaaaggaagttagaagccatcggatgcctagagaatcagcgtgttcaattggctgctcatcaactttccgggatggccctagcatggtgggataccttcagcactgccgtcagagatgctacctggatagagtttgaaactactttccgagagcaccatgtgccccaagggatcgttcagctcaaggaagatgaatttcgggaactaactcaaggtggaaggtctgtcagtgagtacgtgcacaaattcacagaactggctcgctacgcgcccgatgac

SEQ ID NO: 9215 - DNA, 526 bp, Zea Mays
cgtgactgcgtgagcgtgactgcatgagtcgaagcgccgggcgccggccgacggtttcgtgcagaggcgtgggcgcgtggctgatgtttggcgggctgttgggtaattgctgggctgctgtggactctctctgttggctgatctgggccgtacaagttttggttgtttggcgacttccgctagctagtctagtacaactgtactagcagacaagcagtactctgctgcgtttttgtcttatcccgacatggcaacgcctgttccaacaaggcgtttccaagatcaattccgcacgaggacagaagcccgcccacagaaacaacacgatcaaagtgttacaaaattaccggggacaaaaattaatttaataatacaacataaaatgtagagatcaagataatatccatcaggggcggagcgcccgttatggctgtgtatggctcacgtcataccttgttttgaccattgccatcatcgcatacccgtagccatagcaccgtcgcacgcacagtcgtgaactcatgat

SEQ ID NO: 9216 - DNA, 484 bp, Zea Mays
gctacacacaaccctacggactcgtatgccgaatgaacgggacagtacgccatgctcagagtacggctacacacgaccctactgacgacatcagaaggactatgccaaccaagagcaacgaaccatgctctcgctagcagaatacaagtcttcactgaaaggtgctgtccttgagctataaaagggcaggatcccttccatctacacaagtacactaagtaatactacgatcagcactacactaaactagagcgtgatcctgaaccagtataaaccctctgtctcaacccacgtccaagtctcaacgattcactattcggtgtgagtccatgctagcatctctaccgaacacaaatcttattgtcccttgtttctggaaccacaacgggaaccacaacatgcatgtgtctttgtgtattgtataggattttgagcaatttgttcatcctagctaaccaatatagcatggcttgccctaaactta

SEQ ID NO: 9217 - DNA, 884 bp, Zea Mays
ctcttttcctcccggggggtgaggtttttaatgaggcggagccatgtaatatgcctgcaaaatcccccgcaaaaacaaaaactcagatgcaacatgtcgaaaaagaccgcatcgacggtcttcggcattcgaccactctgaagtcactgcgagaggcagcacaaactaccctcgtgcgcgacactctgcgcaaaagtcacctaagggtgcagccagaatagcacaacaagtgtgttaatcgaagtctcttatttaaaagacactccgcgcaaaagtcgcctaagggtgcagccggaatagcacaacaagtgcgttaatcgaagtctcttatttaaaagacactccacgcaaaagtcgcctaagggtgcagccggaatagcacaacaagtgcgttaatcgaagtcttttatttaaaaggcattccacgcaaaagtcgcctaagggtgcagccggaatagcacaacaagtgcgttaatcgaagtctcttatttaaaagacactccacgcaaaagtcgcccatgggtgcagccggatcaacacaggcgcgcgaatacggccaacaggccacatcatacaaattacagttacgtacactcggcgagggcatcatatattacatcgactcaaccttcgggatgatacccatctccctgtaattgaacagcattatcctcaattcctcaccctcaaaaagatttcgcagatccccttcacctatgctcgccccaatcgacgaggacaacaattctcgtttgccaacctggtctactcgaagacggccacgctccatccccatatgatggtgcctaagactttgcgaaaatgcacccacactgtgcttcgacaccacccttcgctgcctatacccagtactcgcactagga

SEQ ID NO: 9218 - DNA, 382 bp, Zea Mays
gttgtccattagggggtacatgatgagaagatgcttgagaagctagcgatgcaagatgtggaaagtgtcaccacactcggctgacaagtgcgctagggccgtcgagggtcgagcatggcaatcggccccacaagctgaggctacccaaatgggtgcagcaggcgccgttgctcagggcagcatcaagaagaagaagaaccacggtggtgagaagccactgtacggcgctccaatcgctgctgatgtggctggggatcagaatgcatgtggcacacactcacgccagtagggtggtgacagcgggtcgtgccctattcattcgaccaagttcgcaccgccgtgcatcacctcttcccttcggttcacctatccttgctccccg

SEQ ID NO: 9219 - DNA, 596 bp, Zea Mays
actggcgaagctaaccgagcgactggcgtggcttggaagtggctggagggagctggccgcggtggccgaggctcgggcagtgatgatgggcgaaggagagctcgtcggagttggagttcttgctcgaggcgtgaggcagagtgaagagcagaccgttgcgcacccgaggtacttataggcgccctcgggcatggctaggcgcaggcgcgggggacaggagctgaccgtgtgcggcgcgcgcgtagagggcagccagtgcgcggccgagcgcttgagcacgcgatcgaacacgtggaagtgtgattctgcccgagttcaaacgcctgttgaccgacctaaacgtgcatatcttgccaagggtcctgtgtagcgtctcttcaccgtgccaaggtcttcctgtcgtgtgtgagtcccgagtgaagatatggcctgggtgagaagatatgatggcctgaagatagctctgtcaccactgcccaaaccgagacaaaacctgtgtcaagtcgtgtcaaacgattttggtttgatttcaaacttctccagagtgttcctagggtattttggcgctactttgatatttggactttatggattcg

SEQ ID NO: 9220 - DNA, 639 bp, Zea Mays
ttttttagtgggtcgtacccttctcaatttcagggtatgtaatttttattgtgcgtttgaataatgaattacatttggataatgtgttcgaagttgtcatttggatctgtaataacaggtgccgttctgctttatttcgagccattcatgatccaaatgtattgcaacgcataacacaaactaaacatttggatctgcaatagccagacacagatcactgcttaatgcttcaattcactgctgctgcctccaatatacacttggaattggcgggctaatagatttcgggactcccttccatgttgctacatttggggggaggaaataggtctaaataagaactttgtaaatttagaaacttgattgaaggaactgttatagcagttttttttgttaatattcccgtaaaccaaaataaaggatgcatttttgggaaagctgctctgtcggccggtagggctatagaaaagagaaacaagcctttcgaacaaaagatataactttttagagaaggttagcttatacatgcaacccatattgtgcttcccctggccactttccggatggttaagagcaatacattttaaaactaagcacaaaaaagtggacatagcaggctatgaagcaggacatgattgc

SEQ ID NO: 9221 - DNA, 716 bp, Zea Mays
gctaatctctggctgcgaaacgaagaacataagcaagaactttaaagtactcaaagttggggtttcacaaatcacgactaataacaacgactgttcaatgacaaattgatctaaagcaagacccgagcctaacatggacatcgactactgattatatggtgtaagggtcgtcacacctcttggacaggccccataacaggctcttagatgataagtggcccaactgaccaaaagacgtgacatagcattgtaacagtttctagacgttgcttgtttctatgatttccgttaactccggtggaatttaaacctcaaaccaaagacattaggtagcttatagctttctatccatggatcgtcaaaaaccaagtccgtatgcgtcctgagtatccgttttactgcatgctggtcctgaaggccgatgcgagttagcctaggcctccggctggtcttggacgtcctcactggtctttcccacctctacaccttttccgatgtacttcatgaccctcttcaatattactaaacaagataacatcatcagatagcaatctattctcaaaactataaaaaatatcgcttaagaatgagctcacctctaaattttattgtcgtatttgagcttgggacattggaccttgcgtactggttggaccgttggagggtcaatgtcctcatcacttactgctctgctaaccggaaaaaaccaaaatggt

SEQ ID NO: 9222 - DNA, 389 bp, Zea Mays
ccggagggtctacaaataaccaacgacgccgagggccatcgcatcgtcaacctcatcatgactgaagattggtgggccccaataaccctgttcctgcaaggatattaccactcaagtgacgtcaacgaggccaagcgcctcaagcactgaagccgggactttgcacttattgagggccagctatacaagaaggggggtcagtcaacccatgcttaaatgcgtcaccgaaaccgaaggcatccagatcctgcgcgaagtccacagcggaacttgtggctcttactcggggcctagggccctcgctgccaaggtgatccatcaagggttctactggccagctttaatctgtgccgcgaatcgagtcacgaggtcgtgcgaagcctgcaaga

SEQ ID NO: 9223 - DNA, 444 bp, Zea Mays
gttcaagtcattaagaagatgctcgaccaaaagggggataagtacaaatgcttccgtcaggacagcaagggagttctatggtttgaagaccgattggtggttcctaaaaatctagagctcaggaagaaaatattggatgaagctcacctttccagattctccatgcaccccggcagtaacaagatgtatcatgatctcagatctttgtactggtggaccaggatgaagagagaaattgctaagtatatatccgaatgcgacacttgccaaagagtcaaggccagtcatttgaaggtagcaggaaccttgcagcctcttcccataccatcttggaaatgggaggacctcagcatggattttatcgtgggtttacccaacacatcccaacatcacgattctatttgggtcatcgtggacaggctaactaagacagctcatttcttg

SEQ ID NO: 9224 - DNA, 482 bp, Zea Mays
gcaaaacacatgcgtaaataaatcgtaagcctgcctctagctgccttggcatttgtgcgtcctggcaagccctcaccgtcaatttgagccataggtgagcatgccatgatcttcgacctcttcctcccccgaagtcattcttaaactatagaggttatgaccttagcatcaattaagacaacttttcccatggccatcatttgcccaataaaaatatgcaaggaacacctcgcttaaacaattttcatataataagcataaccaagtttctagaagcttctacaatattcatgataaaccttaatcataagcaagacaactttctaggaacaaccatggataaccatgatgtacatagccttctagaattccctacactaatcatggtaagtcacgaagcctagatatttttggacctctctagaactatggtgatgtgtcttggtaaagtgtccccccatgaaaggtggaggtgacacatg

SEQ ID NO: 9225 - DNA, 440 bp, Zea Mays
aaagagacagttgatcacatctttattcactgtgtccttccgaaatatgtttggggaagaatgaaaaatattgctggttgggaccgtgtccctaggtctgtagctagtatgtttagcaattggggagtgggatcctcccatgctgcttgttctttccatctctttattgttgccgggctggtttggtccctttggtgtaacagaaataagatggcgattatgaaaaaatttcctaacaatacgacaacgatcatatatgagatcatgtctttcttgtagagctggagcgtgctactcaagacaagggaacatgcgatgatggaagatatactggactcagtgaagaagtggttacagcaacatcattcggttgaggaaaattgcagtgacattggagtgatctgaagtggaagatgtcccttctttttgtcccaggcgtg

SEQ ID NO: 9226 - DNA, 1229 bp, Zea Mays
gcggccagctggatgttgcgcgcaagctgttcgacgcgattcgtgacaagagcgtagtcgcttggaacgcgatgatttcagggtacgagcagaacgggctcgctggaagggcgatcgaggtgtatagggagatgcaaatggccggggaagctccagattccgcgacgtttgtggccacgctctctgcctgtgcgcaggctggcgctttggacttgggacgtcaggtggacaagctcattgtttctgagaggatggagatgaatgtggttcttggtgctgcacttgtgaacatgtatgccaggtgtgggcttgtgaacaaggctcgtgagtggttcaatatgctccaggaacgcaatgtggttacgtggacctccatgattgcaggatatggcatgcacggacatggcggcgaggcagtcaagctattcaatttgatgagacagcaagggccaccacccaatgatgtcacttttgttgcggtgctgtctgcgtgcgcacatgctggattggtaagcgagggccgggatgcttttgcttcaatgaagagtgtctacggattggtccctcgtgttgagcactattgctctatggttgatatgtatggaagggcaggacttcttgatgatgcgatgcgatttatacatgattcgatacccggagagcctggacctgaagtttggacagctatgcttggtgcatgcaagatgcacaaggatttcaatcttggagtggaggttgctgagcgattgatcgccctcgagcctgagagtccatctcaccgtgtgctgctttctaatctatatgctttgtctggtaaaatgaaccatgttgagaaggtgagggatacaatgattaagagaagattgaagaagccaataggatatagcttgattgagattgctggtgttgctcatttgtttcgcatgggtgagaagtctcaccccaaaacttcagagatttaccaatatttggagaaactgatcgaaaagattactgatgttggttatgtgcctaaaactgactcagtgttgcatgagttggaagaagaggaaagggagtttgcattaagataccatggtgaaaaactggctgtagcctttggactcatgatgacttctgggtgcaccactccaatcaggataattaaaaacctgcggatatgtgaggattgtcatctagctatcaaatatatgtcagccgtggagaatcgagagataattgtcagagat

SEQ ID NO: 9227 - DNA, 696 bp, Zea Mays
catcatctcaattccaattcgcaccttgcgttgataggaatagtgcaccgttgggcgtgctcacctcgcaccggtgaccatgccgccgcggtacccgggcgccacctctgcgcaagtccgggggttggggatggagggtgcgtcgtcggattgcgagtgagcgatggagttaggcctctgcggcgtcgggtgcgtcattcaccggcgagtgccgccgtgtggatgaacaggggagctgtccgccgctttggaacaatagcgcggggagagagaagtgtgaggtccgccgccgcgcggtgagctctgctcgcctccatgctccgtcgttgggggattgtgcgtgcgccgtccgattgcaatggatggcgtggattaaggacaacgtacgccatcggatcgtgatcgcacgcgttggaatgatcgcggcacatcaaaatctggggcgctgatcgaccatcgtgcggctcagacgagatcggggcttcttgtgatctcggccctagaatttagatccaaccgcggggactgcgtaccggttcggggtgcactgatctaatctgcaccgtccggggaagatcggatggccgagacgcaatgataccctttcggcctgtgagttttgcatatgagtcctcaagttcgcaaacaatcaacccgcagtccacactgggaatactgagtcttgggaaaattgtg

SEQ ID NO: 9228 - DNA, 566 bp, Zea Mays
ctgtcctcccagcgatgatgtgcatcacggtgcccacgagggccatcggcaagcggcgaggtagcaggtggccgccccccattgatccatatgctccgagaataccagcatgatgatgaacggaaggcaacacacgatgatcactgtcgacgtggctaggcacgcgagatatatcagcacgcagcgcatcaacagccgattgggctgcgaccactgagtgctcgacaaaaggcctccaagactcaagcacagcgacacgcttggaaagcgacctatctacttcttcgatccgttcccaggttctcgactggaactcagccaccttcgactcgaactatgtcgacaacgccttggccacctccatgggcgagacagcgacacccttctcctgaacctgcttggtcaaggtgttgatggaggcagcattgcgagcaacggtgcacttgagcgcttctcaatgacgatcctaggcgtccaaccgattgcagatctgctgcaacaactgagcttgcgttgccatggtcttcgcctatgcttccaaggcacccgccacgcctgaaactgcc

SEQ ID NO: 9229 - DNA, 520 bp, Zea Mays
ttcgcttatggctgggtcccactctccaggggggaaggacttcttcctcaacagaacggcggtgctgcccggggattccgagctcgcgcatgcgcctacgaaaccgaagccgaaattcgtggaacactacctgcccgggctcggctccctttttcccaggttataaaaccgtgccgcatctctcctctcatccctcgtcgcgaaccaggtgagacttgcgccaccatgggcaaatcggacagcaccatagcggcaatggagggccaccaccctcgatctcgcgaagggcccatggctgggtcgtggcgtgcctctccgatgggcgtagggtctggtagaagcctccaagatatctacatgttcggaaactgccacggggtcgtcctgattcctcgctacacccacctcatcgccgtgaatcgcactgctcgtgtggacagccctgtcggcctcttcattctcggtaaggaatccactacctgcttcgtcctcatccaggaatcgcgtggcacatgcccct

SEQ ID NO: 9230 - DNA, 595 bp, Zea Mays
tagtcatgggtacccaagatgtaaccatagatgtcatcctagggatgaactggctaaccaaatatcaagcaagccttagctatgacaagaggactgtgaagttagtgtccttatcgggagaggaagtgttagtggagttggtcttgtctggaccaaggaaagaaagttgtcaccaagtcaccgcccatattaaggaaattgagccatcacaagcatcaaagtagtatcagagttcccagatgtgtttcccgaggatttaccaggcatgccacctgaaaggaaagttgaatttgccatagagcttatacctggcaccgcctcaatttccaagagagcctattgagtgtccggaccaaaattggtggaactcaagaagcagattgatgagttgttagagaaaggctacatcagaccaagtacttcgccttgggccgccccagtgttatttgtggagaagaaagatggtacaaagagaatgtgcatcgattacagatccttgaatgaagttactatacaaaacaagtacccctgcccagaattgaagatccattcgaccagttgagaggaaccagtgtgttctcgaagatagatctga

SEQ ID NO: 9231 - DNA, 1962 bp, Zea Mays
ccgcagtcgggttccatataatgcttcaaaaggagaaatgccagtagaagagtgtggagatgaattataccaaaactgcgccactgacaaccactggctccactgagatggacacgcatgaacaaagcaacgtaataatatctccaagcactgatttacacgttccgtctatccatcaaactgtggatggtacgcagagctcatgcgaagacgaacatctgccagacgaaataactcttgccacaactaactgagaaagattttgtcacgattagagataattgactgaggcaacccatgatgtttgtagatatgatcatgaaacaccctggccacagacagagccgtgaatgggtggtgcaagggcaagaaattagcatattttgtgaaggtatcgaccaccaccaaaatgcatgtataattctgggaccgaggaagagcttcaataaaatccatcgagataatttgccataaagcaatcgggacgggtaatggttgtaacagccccggtaacttggctcgatccgcctttgcctgttggcacatggtacagtgactgacaaactgttgtacaacatgcttcatgccctaccaagcaaagagctgcttaagccgagcatatgtcactggcattctagaatgtcctccgactgctgaacagtgaaatgctgccaaaagcttctgttgcaaatccaaatcagcaccaacccagattcgattcttgtatcgaagtattccatccttccaagagtggtgtggaaccgctgttgagtctacaaccaatttggtgatgagctcctgagcaatcttgtcctgcatataagatgatgccacttctgcaatccattgtggagtagcagaggataccgcaagacataaagctgaaacaactgggtgtcacgacaaggcgtctgcagcactgttatcagtgcccttcttgtatataatgcgatattgcaatcccaaaaggcgagtaaacattttcttctgccatggagtatgtagacaatgttcatctaactaagccaaacttcgatgaccagtatagatgtgaaattcctttaactgcaaataatggcgccaatgatccattgctaccaaaatggccaaaaactctttttcatatgtagacaatccctgcaattagggtcccaaggctttgctaaggtaggcaataggatgttcagcctgcataagaaccgcacctacacccaggccactagcatctgtctccaaacagaatggaattgaaaaattaggcagggccaatactggtgccaacaccaatgcttgcttcaacgcttgaaaagatgattcatgtgtcagagtctagatgaacaacactcctttcttgagcagtgtggtaagaggcttggcaatgatcccaaagtggcgtacaaaacatcgataataccccgccaaaccaaggaagctacgtagctccttgagggatgctggagtagtccactcagccactgccttgattttgtccggatcagtggccacccccttggctgaaatcacatgccccaggtaagataattgattttgagcaaaatagcacttggaccatttcaccttccattgatcttggagcagcaactaaaaaattgcccgaagatgctccaaatgttcctcaaatgtggagctatataccaatatgtcgtcaaaaaataccaaaaacacctttacgcaacaagggggctaaggtagcgttcattgctttctggaatgtggctggagctctagttaatccgaatgccataaccttaaactcataatgaccagaatgagtttgaaaagccatcttgtgtgtatctgaagactgcaacaatatttgatgatatccagctgtcaaatctaaactagaaaaccaagaagcttgtcccaactcatccaacaattcctcaatcataggtataggaaaaacagacttacctgttagtgcattcaaatgcctaa

SEQ ID NO: 9232 - DNA, 390 bp, Zea Mays
agagagcctagcaatcaagaaatgtggtagagaagttagtgattactaaaacagtaaagtggcatgagaatcaaattaacatcaattaacaaggactatctcccttcaccactccatatgtatcatggagtaaatcaatgttgtgatggcacatgacacatttcaggttggatggcctaataaataagcaacactatgagtaaacaaacaccttgactgcagtaatgacatccaccaatacaggactgttgtgcatatgtgttatatttgcagcaaacacaatatgacgaaaaaacaatcaacagttggatacccgtgtctgcttctaggtatacttcagaggttgaggtgtcctaaaaccatttccatagaaactgaaagaagtgtttc

SEQ ID NO: 9233 - DNA, 1077 bp, Zea Mays
ataacaaagttgtagagctattataaaggaatagctttgctgcagatattaagtcttggtaccatatgaaaatttggagctgttttgatccgaagatgggctgtcagataagctttttactgaatcaggcgcactgttcaccgatcttcagaaaaattgcgccgacgataagaatgccacggcggtagggataggtcgtcggcggccacggtaaaaggcttttgcaacgtggcattaaaacggggaggtggcaagccccggttaatcggcggccaccgtgccatcaccgtggttctgccgtggctaagctcgtcgtacctcccttgcgcatcgaccgatcaggataagacctcgccgcctgccgataaccgtcgtgcgccacgtgctaacgcactttaccacgtcaccgtagctcagcttgcgatgatagctcatcgtcggtgagttcgccacggcgtaggacaccaagacactgcgccagtaactttctatttcctccgaccaccagcactgctcggccaaattgagcaccaccgcgtaagccctctataaattgatggccgggcctgctgcgctaggtcatcacgaagccgaagcacccgttctcaccctcaattaaccactgtagccggagaattcccctcttcccccaattcggtcgactgcgccgctgtgaatcgcctgctcgcggctagctgattccaggtccatcctcgcccttgttgttcgtgtttcagcacccacatgtgcttgtgatcgttacctgcccagcccttggagcttgacttcacctaatcaaccggaacacctcgatctgagttcagtatccgcggtcaccgtggtcaggcatatcgtggcccgaattagtccaattagagcatgttctagggtcaccttgggtcggttatgcctcccctgtagctagactaggcaaccatcgccggtcatggccagcccgtgcggcgtcagtgatgaacggtgagcacaccgtggccagggacgtttgtggaggagaaatagaagtacgagggcatttctgcaaagtgtcagcgactgttttaaatagtgtttggactc

SEQ ID NO: 9234 - DNA, 757 bp, Zea Mays
tgcgggatcgatggctgacgaccaacgacaagggtgcagcgacacacaccacgaaccaggaagagccgaagacgacgtgcgtgaacctcacggggattcgcggcgtggactacacgccagggcgaggtccgagaacgccgacgaaattctggacgtcgagaacggtggatcaaggacgagcgccagggagctcacgcatggggctgacggggagctgagacgagcgcgtgtgacaaagctcagcgccaagctgctgctgtggagggtttgacaccagcgtggacacgagaaccacaaccagcacgcagcgactcaagctagaacaccaagacagcggagaaaacttccctgaactaaccttgagacaactgaataagaaggcaaggcaggcgtccctgagctcaacaaggatacgatgaacaaggactctgagggtgttattggatgcatgggcaaagttacatggctcttcttacaggctccacgttggttcacagcatggcaaatcagttcacttggtcgatttatcccagccaaaatatcatacctgtccacaacactacaggagagggaacagataagaacttcagtgtggacatgctttaatgggaccagaattagatattttcagcagggggtggggcctctacaccccttttttcgtccaatacttatctctgttagtgctcattcgtggattacagcagggtgaagagatcttttcttcagcttcgatctgattctagattcagtgaac

SEQ ID NO: 9235 - DNA, 952 bp, Zea Mays
ttaaattcttagtttttaatgggacctagttaaccaggcaccaaaaaaatttctcacagatcttgatttagataacccacagcaccactgtaccaacctccaaacaaactttgtgaaatggcaatcgataaataagtgttgtatactctcattggctgtacaaaaaacacatttcttattaccatgccagtttcgctttgctaagttgtccttagttagtaccaccccttttataagataccacatgaagatcttaatttttaaaggaacctttaacttccacaaagctttattgtaaaaaacttatggattgtttagaagggcaccatacatggattttacagagaacaagcccgaactagtcaaattccatttgagtacatttttctcattagtaagctagatgttaactaagcgggaaccaaagaatgccatgaaacaagattgtgtcctactaatgctcttcggaaagaaatgtttaatggtatagtttcaaaaacattagctaccgtatcactctttttgcatactaaattataaagggaagggtattggactttaaagggttgattttctatccaaacatcttcccagaatctaatttgttttccctctttgagaataaaagacccaagacctagaaaggtatcctttaccttcataagtcctgaccagaaatgagagtcacctggcttcctggacacttgagatatggtcttatttcttagatatttctttgtcaaaagactttgccagagtcccgtcttcattaaacaacttaaaaagccatttgctaagcaggcacttattttggatctcaatgttttgaatacctaacccaccttgttctttaggttggcaaatgatatcccatttagctaacctgtattttttcctatgttcttccccttgccaaaaaaaatctagatcgatagtagtctattttttcgag

SEQ ID NO: 9236 - DNA, 735 bp, Zea Mays
gatgtggctgcgggggagacttctccgcgtgtggtgggtgctgaggatcttacgggtgcgaggactgggtgtaggcggcgaagggcggtggcgaaacggagagtgagtaaattgtcgcgaagtgataggcatcatcgtggtgagatggagggtggttgtcttcgtgtggatgggactggcaaacgcgaattgaggataatgctgttcaactacagggagatgtgtatcatcccgaaggttgagccaatgtaatgtgtgatgccctcgctgtatgtatgtaaccataatttgtatgatgaggctacgttccttcgttgatccagccgcgcccgtagtcgacttgtgcacggggtcttttggaaaagtcttcgattttgcgcacttattgtgctagtctggctgcatccgtaggcgacttttgcacggagggtccggctgcacccttaggtgacttttgcacgaagagtttcttggagatgacttcgattttgcgcacttattgtgctggtccggctgcagccgtaggcgacttttgcacggagggtccggctgcacccttagacgacttttgcacggagagtcttttggagaagacttcgattttgcgcacttattgtgctggtccggctgcacccgtagacgacttttgcgcggaatgtctttgacaaagactttgattatcgcacttgcgctgttccggctgcacccttaggtgacttttgcgcggagtgtcgc

SEQ ID NO: 9237 - DNA, 349 bp, Zea Mays
caaaatagatgatacatgaacgcaggtggtagaaagggacatcggaggacttaccggacctggcaatgcgtcgaggaggggacgtgagctcgagctcgcacacagaggacagggtagaatgggaacagagtcgattgtcctcgttctctggggaactccacagacactggcgtacacacgtgcttgaacaaaacagagtacgcgcaggctccccatttatcttcatcggatacatgctgacccaggcgaagtggaggtcgtgcagagaaggaagcgtgtgggagtggaggtcgtgggcctgagtagggtaggggggagtccgctaactcgggatggaataggtcgtggg

SEQ ID NO: 9238 - DNA, 451 bp, Zea Mays
agatgaactacttcccagggtataacattgcctgtcatatccaggactaatggattactgttataacgaggaaaaaagttgtacatgatggtactataatttaggccatagcaaacgacattttgtactgaaagtataaccaatggctagagtaattataacattcattttctggtcaggatgacacaataaccgaatataaaaagtatcagtacaaatatggtgaaaattgaacgaaagcactcacttatacacattagcacgaggatcaacaatctgcacatgatggtgatcttggaagtctgatggatgtctaaacttgctggctatgtttgatggtgatttggttgaagtttgtgacctcatgttctcggaaggccgcatcctcaattgctctgaagattgcaaacttccattttcaaacaatgggtctgcaaagtgcaccaacctg

SEQ ID NO: 9239 - DNA, 748 bp, Zea Mays
gagagaggcatgatgatctaaataacattggttattggatttgagtgggtaagagatagcaggtttatccagctatctgaactattgattttgaaggtgtgttatgtgtgcgtgcaatttattcgttagatttaggggaagttatgagtgtggaggtgattttgttggatgaattttacaaagtttaaacgggtaggttatattgggggtataaaatagtgctttgcagagctctagtaaattgtgaccgaacagtggagacccaaggctgttgtgccattgccatgcggcacctgcattctgcggcgcgtccatgagtcccggtgtggtgagagccgtgtgactcggtgtgggtattaggcagtgggtacatgtctcaacagttcaacaccacccatgctgcgcgcttgtcgcatccaaggtgtcctttcggccaccgctgcggctgctaatgggggaggaccggtgggccaccgacaggctgtactgtacatgtacttgtctttgcgcagttgcgctcacaagtctccgcactatgcacaagaagaaagaaagaccggccggacaccgccacacggatcgaaacgtgtgtgccccattgatccgatttcggcgcccgctctaatccaccaccatcctcggcgcggcgcgcaggcacggggactgaaccctttgccagtgcctcttccgggcacgatggagataaggttgccgatgaggctgcatcttgtggctcggtttgaccgag

SEQ ID NO: 9240 - DNA, 456 bp, Zea Mays
gaggggcactggggccagcggatgaaacagtgtgggggaacctgcatatggaaaaacaaatggtggttgatcagagggcgccacaaagttaggatcatggagaaaatccaactcaggaagggaggcagtgggggcagggaggtattcgagaatgagaaaatcgtctcgtcgaagatgatgtaatagaagatcaagagatgatgagttgtgagggcaatacaccagtaccctttgtgatcagaggagtacttgaggaagatacaacaaacagagcgaggagcaaccttatgggcaaccgtggtagaaaggttgaggtagcatgcacacacaaaaacacaaagatggtcataggatgccgaagagaacaaaaaggggtgtgggcgctcgatgatggaataagtcttgagcatctagaggacaacagtcgcttttgactgtcctctgtagtcctttagc

SEQ ID NO: 9241 - DNA, 754 bp, Zea Mays
tgagggtgtctatcctcacttctgacaactacaatttaacatagaggaagtgttataacagtagtctaactagcctaagcactttgtaaaaacctaggctaataaccgagtgattcatgagtatttgggtgtctagagctacaagaatagagtcacaaaaccacggtgaagggtggacctagattgcttggacaatgacggggggtcgcggtggccaagagaactctgatgaacaatttatggctactcctagtgtaatctagtgaagggaggagcgtgataggctcagtacctgttggtgcaccttctggtgctgagtagagacacgtggaatgaccgagggtgagtcatcaacggcgaggtggtatgacgtgggtcgaagcatcgtggtctggggagacggcgttggtggagctcctgcatgccggtgaagctcgtggcaccgaagtagaggacgagatacctcacagaagattcgaaacgatagcgatggcactggtggcgaggagagggagttctagtgcctggaggctcgagttgtggtgagtagagatcgtggttgggtcctatttgtagccgggcgccattgattgggagggaagggtgagggcggtgtagctagggaggtgatgatgactgctgagacgttctccacgttgatgaacgccattacgaggggatcaagcaaggataaggtgcctaagatgtcgggtgaaacctctgttttcgggtgacgggtgcgaggaggctggcc

SEQ ID NO: 9242 - DNA, 420 bp, Zea Mays
gggacgtcttggtacgcaaagcgtttaacacattgtcctggagtagtaacttgacgtgaccgctgggcgtaatcatattgcccaagcagttgaccttagtccaaatggtgtcatgttacacgaagcagcgtctgctgcctaactcgccttcaggcgatttgaattgcttattgaatacttgcgactgttcggtgggcgtggtaggagacgaacagttgccactggcctctataaatagcctgtttgctcctctgttgtttttgcacatcctctgatcgtctgttgtttctttctcaaccttctcttctttttcatctagccatgggcaaggacaagaaaggtcagggctcgccgcgtcgctccggcgacaaacggaagcgtgaacggagtcccttgtcggaggacttcggtgactccgag

SEQ ID NO: 9243 - DNA, 863 bp, Zea Mays
ctgaagtctagtttggtgcccatagcttgctgaaggctcatccaaaattttgaggtgaactgtgttcccctatctgacactatcttccgtggaataccatggagtctgactatctctttaagatatatccgggcaagggtggctcctccgaaggtagttttcactgggatgaagtgggctaccttggtaagacggtctattatcacccagatagagtcattccctttttgtgtccagggcagtccggttacaaaatccatgcctgtttcctcccacttccattcgggcactagaaggggttgcaataagcctgcaagcttctgatgctcggccttagttcgttggcaagtgtcgcaccgggccacatactgtgctatctctttcttcattcctctccaccaatatctggttttgaggtctaggtacatcttggtggtccctaggtggatagagtaggctgagttgtgagcttcgtcaagcaggacttctcgtgcctccccttttggtacacacaatttttgaactaaaggactccttcctcatttgtcctaaagtccggaagtggttccttgcgagccttttccataagacctgctgtctcagtgtccaggcgttgagccttgcatatgaggtcttctagcattggcttgacttctaggctgccattgtctcccaaacatgcattcagctgagctaattctttcttccaatcttctaagaagttggttcctttcttcccgaaaggttttcggctgagggcgtctgctaccacgttggccttcccgaggtggtagtggatctcaaggtcataatctttgatcaattacaaccatcttcgctgacagaggttgaggtttggctga

SEQ ID NO: 9244 - DNA, 568 bp, Zea Mays
gtatgcatgtatgcatgcatgcatgcatgtatctgagccctgggctgccaatagctaggggaagccctagcctaatgttgtcatcatgtctagctataccaggtcccggatgtccataaaaggagcctaggacatttttgactccctcaccccaatgcacgggtgagttgcgctcacccacgcgcgcgatggctgcggttccacgagagtgttagcctctcccatcctacgcacgacgacgcttctcaagagcatcgcaggcccccctcttctcatgggctcgctttttctcctcgtccttcttcttctactactgctttgtagccaaccgacgctgccccggttagccgcatcttgtaggatcagaggtagggtggttcggtaccctcataacccctatagatggatagaaggacagattgagacaaagaaataagggcgaatgtagaagcaaaaggtccaggactcaccggggatacatagccctgctcggggcgcattacgacagggatggtataatccgccttccccatcgccccccttgattcgcttgaggagctcgttggtg

SEQ ID NO: 9245 - DNA, 271 bp, Zea Mays
gtagatgagaagagagcacaggatgcaagggaatgggaggcggctagagccgagaaacagatgttggataatcttgctgatcgtctcaagggaagcgagtgagaaaaatgatactataattttgttagtacaatttatttatcctgactttgctaacttatttttctcattatatttgcagagattggatgtggcgtaaactatatggcagatgaggcacatgcaagatatgttcaggaaaaatggcgacaatggagctgatggaggagga

SEQ ID NO: 9246 - DNA, 706 bp, Zea Mays
ggctgaggcttgaggggctctaggaaggggatcgctagagatgtcgggaaaggtttcaagtgtgttcctaagatggttaggttttggaagccacacttgtttctgaggaggagctctcataggttcatcaatcacaccatctctcacaggggtgacaagcttagcagaggtggttttgataagcttgggagtgggtgaagggttctctgaaggtgtcaaaccactgcactcaccaaccttccctaagcgagcaacactcccatccttagtagcaaagcctaactctggtccgccagttcccctcttgaattgactaaccatcatgcccaactgcggctcactgcacgacacccaactcaagatatatcgaaggtatgtgttttcttccctgattcttgtcttgtcgtgtctgcaagactcaagggcagattacaaaccctcacaaactgcacactgcgcagatgcaggggcactcactgagctagccttctcaagaaaagctatcctagctctctctctgctagctcagactgcaagccaggacaaacggtacatgcacccaataggatagacctagatctcagctcatcacgctcatctagcaaggtggagtacttggtctgcaaagtggtgatgttcgacatgtgtagagcgcactcatcacattcagtctcgtcggacacctcaactgaagctctagcagact

SEQ ID NO: 9247 - DNA, 559 bp, Zea Mays
attgcattttggttgatggaaaatgctgaaacacctttgggcgttttagattttaatttttgatagcattcctttttgaaggcgtaccctccagcgcgctgcatatatttttgatagcattccaatcgcaagagtaccctccaacagaatcgcaatgaacagagacattataggcagcattcctttttgataggtgcatatatttgttttagattttaatttttttacagcaatatggattttaatgccattgggaggacattgggtgcaagatcaattgagcaaacttgtgacagcaagtgagaagagcacaacatccgttgagtctttggcaagaaaggaggacattgggtgctccattagagatatcatggcattggtgaaggagtgtggtgcagttctaggaacaaaagaacacttcatagcatctcaagtttttgtcaagagggcagagagggaaatgtttatgactttggacacactggaagaacgcttcaactggcttacaatgaaacatgattgggtcactaggatgattcactaggatctgtaatttttt

SEQ ID NO: 9248 - DNA, 493 bp, Zea Mays
gggcaggaggagcaggagcatggcttgacaagggaagatcagcgggaacaatctggagagcaccactcagggtaacctcagccccaccagcagacagcagtctccttgcgtctacttctgaagctgaaggcccttcaaccacctccatgggagtcagataactcggactagtgtctttgcatgggagactgccctctaaggtcgatgatgcacgagacaccactcgggttacctcttgcccggtagaaccaagcaatggaagctcaccatctaggacctctgaacagacggctggggtatcatcttcaggaggctccgatagtatgtcttcaggaatgacttcttccagtgcttgatcaaaatctgatattgaaagcccctgaagactaacaagtgccgacagagctggagagggaatatcgatgccccccttgctgcctttgtagaaacgattgttcttgtggatcaatgggatttcttcttcttcctcctc

SEQ ID NO: 9249 - DNA, 803 bp, Zea Mays
ggcatgatgttgaatgacatggcacttgcaaagaactggaacctaagtcgcagctgtttcatgtccttgatctctcccaaatgtgcaaaaatcccacaaatgcacccgacaaagaagaaaatatagcataccaaatctggatatccatgaggtagatcaacaccactggtaaccagagcataaacaccgcaaaacgattgctttggccaaataactcatgccaagtgtactggattccattcatcgtgtatatctcttttgtggggtttacaagtggcctgatttggagaaaatagctgaaggcaaacttcacggcgagcaaaagcacccaaaagatggagtacttgacattgtcaaatgttccctcacgtaggtcagggcataattgatcttccaatttgtcttctccaatttgtttcgcacccaaggcacaatgaagagcacgatggcaaggacctcagggataacaaacgctgcaactgcatcgaggaagctcctcatctgtgaatcagctgctgacgaccactgcccattgtctgtcctctggttctagaccctcttgtataggacagcgaacgcaacaacccaagcagctgcaacaacgaccttgagcaccatgcacacagcaagcattcggccatccctaaatgtgtggcggaactgtgtgccgatgtccagtagagactggaggaactggagcgcagcccaggtgatgaaaacggtgaggacgcgcacctgtgtgtcagtgtgtccttggactctaagccacgggatgagagcagatcatcccacggccacttggc

SEQ ID NO: 9250 - DNA, 429 bp, Zea Mays
ggggtctcggtgcaagagtttataagactcagagaaccccaggcatggacggcgggttgattcgtatttttcccgagggctctttagcaaatagaacccgcgaaggggtaagatctaaagtgagccgcatgatctaaagtctatggcctagattagatcgcctaaaaccgaaccggtatgcagccgtagtccttggatctgaatccgacggtcacggtttaatgaacccgcgatcggatttctaccgtacatcgcgagatctacggtccgagttcttcctagccgaagaggtagctaccatctaatcttggccgcccatcatcagatcaacggccacggcgcatccgcactactgacggccacccacggcggtgctccccgagccgcggcggcacccatggccggcagacctaaatccccgcattcctg

SEQ ID NO: 9251 - DNA, 443 bp, Zea Mays
attggatgctggaatacctaacggagccgagggtgtgctcaatttatagggctcttgagtggtggacggtgaatttgaaggaaacgcgcgacagccggagaggaggggcactagcgcagtgatttgtggcaattacgggataagaagccacgacggtcactggttaatgatcacaactcacggcgatgtggttaatggctagaggcgtggcacaatcgcggtgaagggcgcaaactctggtgacggccgcaaggccacgtcgccggtgcaagtggtcgaggaacagcgaggccacagtagcccgaactcatccgcgacttgatctttttcacgaccgatcgcaatctacttcccagtggcacgaatcacagcgaccagcgcgaatctaggcgcacggttcaccggcggtgaagttatctgatcctgggatattttcagtattg

SEQ ID NO: 9252 - DNA, 621 bp, Zea Mays
taggagcttctaaaggtccagcttcagcaatagtgtgggccatgctggcgtcgtcagttttccttgaatctttagcctctgtgctaagagcttcggtagaggtaggagctgatgttcttatggactccatcacaacgtctagcacactagccattctccttttccttggagtcgctgcggggatgcttgatggcttcggcagttccgttgcgcacggtggacataatgccttcaactgttctaccatcttctctagttttggctcttcagttggatttatactagcctcgactggcatatagcgaccttgttctgtgacaggaacaaccccttcacttagcttcggcacatcggccgtctcaatgcgcctgggtcagcgtgtcaaaactttaacctttttcgacctcgacacactagaagttgctgaggtagcagctttcctcttcttcccttgcttttgtgtgggatagtagtagtttgggtacacaaacccgataacatcaaacaccctattcaatctctttttgccccgagcaccgaaggcagttgtcatagcttcatcttcgaccttcgagtatgctccaagcagctcatcgctagttgcctctatagcatctagcc

SEQ ID NO: 9253 - DNA, 595 bp, Zea Mays
aggatattgaaataaggaaagaaatagaggcagaaatctcgcaacagagagaagagacagaaactctgaagaaagcaactctgatgctccagaatgagctcgattggtacagataccaatggaataagaacgccaatgcattgcaacaggcaagcaagcagaagcgccttttggagcatcgcatatcagagttagactctgttgccagccacttaggagagagcatgagagcgtccgattccctcgtgctctcgctgaagttggagtacagtaaagtgaagcgggaacgggacgatgcggtcaaagaggccagggacatgcgcatggagaaagagctcacagaacctcgtgcctatggagcaatgagctctgagttctccttggcggagttggagcaggctacccaggcattcagcagctcgcttaacattggtgaaggcggatttggatctgtctacaagggtctcctccggagcaccacggtagctatcaagatcctcaacactgaaagcttgcgtgcccaatcacagttcaagcaagaggtaaaaacgcttcttttgctgccttgtagtatagccatcgatgagttttgttg

SEQ ID NO: 9254 - DNA, 464 bp, Zea Mays
gccaagcctttgactactttgttgaagaagaaacaattcctttggagtgaggctgcgactgtggcttttactgctctgaaacaggccatggccagtacccctgtccttgcattgcctaatttccctgaagtttttacagttgagactgatgctagtgatattgggttgggtgcagtgcttatgcaaaaggacagcctctagcatacttgagcaaggctttatctgagaagaacaaacatttgtccatctatgacaaagagtttctggccttgattatggcagtagaaagatggagatcttatttgcagtaccaagagtttgttattcttactgatcatcaaagtttgtgttatctggaaagtcagcagctgcaatctgatctccagaggaaggctatgtctaaactcatgggtttgcagttcagaattgtatatcgaaaaggaagggagaacttagctgctgat

SEQ ID NO: 9255 - DNA, 294 bp, Zea Mays
cttgacataatttatatttagtttccacttgaaatccttccatgcatggcatgtacgaataaaaggaaaataaatcataaatcccaagaaatgatgcaaacaggatcaaacaatctcgagaagtcaatccttactcatagatttcaaagcgaccttcttcacactgagggtatgggtttcatcccttggcatgacaaatttctttgacacatcctcccataggtttgattttaccactgtaggcacttttcgccaatcctttatcctaatatcaacacgcatgcgtgctatata

SEQ ID NO: 9256 - DNA, 625 bp, Zea Mays
tggatttcaaaataaaaagaaaacaaaagcaaaagaaaaagaaaaaaaagagagaggaaaccccacctgggccgcggaaacctttttttgggcccaactcagaatcactcctgcgcggcccatctcgtgtgcgcgcaccattcaactgacgggtggggcccgcttgctgtctcccggatgcgcgtgaacacgcttgtccctctggtgcgtgggacccgctgtcaggagcttccccgacctcagtgctcaagcagacttcgcgccggggctgggaaaaaatccctggattatcgccgctggcgttgggtggtcgttacaacatgcgccgacctatgcggatgggactgggtgcataaataacgcgccgctcggagccttgaccccatcaaacgaacccatgcctagcaccactgtagactgccagatctcgacggaggagaacgccgctgccacgcccagctatctatcgcgccaagactagtccctgtcggtgtcccgggtggatctccgtgacgcgtggggggggggggggggtcgccggggcatctcgcgggggtacggctctcgggaattgccgggttacgtgccggagccgctcccctccgttgagccgcaccgcatcgtg

SEQ ID NO: 9257 - DNA, 431 bp, Zea Mays
ctaaaaaggcctcagtctacatgcgtttatccggcaaccgaataaactgagacttgagactctgcggatgcagctgcacgcatgcgtccaccgtccaaacgaatggaatgaacttttgatgagctcacatatttgccataagttcacaacaccatgcttgcggttatagatggttaagtgagctatgctaaatggactgaagcacggtacgacccgtaatgcttcagtatggtacgtgcatgatttacatactgcctgattggatgcctgctcgcaggcgcgcagactcatccgaggttggctggccacatgcggttgtttcaggcgtatgtaagatgaagccaaatgaccttaaaatggcttgctttgcatctgttcatacagattgtctctcccgcgtgcaggtaaccaaacagaagcacatacaagat

SEQ ID NO: 9258 - DNA, 830 bp, Zea Mays
cgaaaggataccctctcttctaatcacagccgctaattccagattctaaaatcagtggttgtcttctctctctagtatgtcgtacgatagcgcagagctccccgcgacggcgctccatggccgaaaaaccttagcagagactcgactacaccattctaggaatgattcgatgctacacctagaggagatttaggctaactgatgggggatcaatacatcggctaccgtgtgcccccacaccgatgcccccacacgggcggcgctgaaacatggacccgagcatggcagcaattctgcagtcggtgagcacaatgatttggtgctgccatggtactattcaatggaaggaataaggcgaggtagagaggaggtcgcaccgaggacgatgacgaggaggacgctggcatggtggggcgcagatttgtgaacatgccgcacccccgatgtgaaattagacgaacgccggtcagcattgcgagtggctacccacacccgcacgatcccggaccatcggtgaacccgcacgcaccccaattgaagcgtgcaacggaggttgtggcgaagagcagggcggcggcgagatcgtctccacttctctcgcttttcctggtgctacaacgattgtggttgaggctcggagcggacgaaatcgtggtctagaaatccacctccccatttatgaacttggagccaaggcggtcagctggtccgcgcatgccgcagacggttcccaccatccgattgacgcgggcgcaagggagaagaaggtaccccccacgatccggacccacacgtaagcgccgatggagatgctgagcagcgggcccgca

SEQ ID NO: 9259 - DNA, 604 bp, Zea Mays
gcgggttgattactgctttcttcggggactctttaacaaaaagtacccgcgaaggggcacgggtgattcctggtcgtccgattagaaacgggtggcccagattagaaggttataactctgaaccggtattcaacaatagccgctggatcccatatctacggcttggatccaaaataaccgagatcgaatcgtatccataggattgcagatctacggtccacgcataagggtacccctgatctaatcatggccgttcgtaacacatccgacggtgcacgaacctcctcctaccctcagaccgtgcacggcggcgcggccaacccgcggaggcgccatggccggcggactcccaatccggtgccaggaatgccctaactcaccacaatccggtgcaaaacaaagaggggacggtagagggattaatagtggtgatcataccgagaatcaggtcaccaagagctacgacaacggtgcacggcagagaatcaacaccggcgagaatttagccgttcaattcgaacgccccgctgcctgtggtccgcccggttaggcccctgatgcccacaagtccgtactccgaccccgccttccgccaatggcacgc

SEQ ID NO: 9260 - DNA, 410 bp, Zea Mays
caggaagcgaagggtactccaaccacaaccagtatcgatgtcttcgaccggagttgccggggcatcggagcgaagggccgcactatttaaaagtgggctcattgcagccttgcgaaggcacccccattggctcgtacggttctgcatgacgacagtcctagcgaggtcgaaggctcgacttcgcagagtgaagggcgccgcgtacgggcgaaggccacaccgttcaatggtggggcctaggctgcgctctatctccttttgggccgatttgtaagccatcctcatggtaggtttcatagtatgtctaatcagattgtacttctcgtcactgtaatgaccccgtaagggggaatattctgggtgtagcaggtaaccgggggcataacagtacttagaggatccattcacct

SEQ ID NO: 9261 - DNA, 546 bp, Zea Mays
gcagcccaaaacagcaattaataaatttcagcttctatataattcaagaattgccgcgttctagagacttgaattattctaacactttgacatttgttagagttaaaataaccaagtgagaactaacaagtagacttactaatttttatccgtgtcatttcgagcactagaagtaccatactcaattaacaacgcattctctacgataatcaatatcgaagcgtttttcacccaatagtttgcattttaacttagacatcacatgagcactaatacttttcatccgtgaccatacccatacgcatttagactacaacaagcaaatcatcgtgactacgagcttaactaaagtcatctaacaagttgattagccagagcaacaacctaggccgttatacaacatactcgtcggctagcccattattttcgaaatccgagacacaacatgtatataacaatcacttaacgtaatcgactcctgcttaacacgagttggctaatgacgtgactatttcccaattaccaacatacaccacctttcgccat

SEQ ID NO: 9262 - DNA, 334 bp, Zea Mays
cagccactacttcaaagtgtcttgctatcagaaattaggaggcatgcatatgagaatttcctgatacctttggaatagtcaaatcagcagatgatgaaacaaggggcggctgactggatacaatgttcttgttcagtgtactcatagaaatcttagacctctccccaagaagaccctgctgcctatgttgcaaaggagaagaaagaggccttcctagttgacttgggatggtacccatcagtcagggggcgagggggaggatggaggggacgacaacggggcggcgcagaggccgcacgcagcgaggcagaggcgatggaggggcccgtgcttg

SEQ ID NO: 9263 - DNA, 493 bp, Zea Mays
gtgctaaaacacaattaaaaagagcaggagtagacctgggatcggctggccacggagcgcggaggattatgctcaccggcgtctgagaagggggaaatttggtgtcgcgacgggctctagtgaaattaggaggtgagattggggctacacggtcgcaaagtgctactgattcactgggtacacttaatttggggagaggaggaggaggcagtgcgaattttggcttcaatcatgctcactgatgaagttgtgagtgcctcgccgtggttcatggtgctatttataggcacggtcatccggctaacgatccacggccgcggattgcattgttcatgcatggttaccacgtaaagaagaggcacagtaagggggaagcgaggcatgagcgacacggcggcggaagtgatcgagccacggcgaccgccagtggaatatctccggccacgcacggctaggtttgtgggatggtgccacgtctgaagttatctccccg

SEQ ID NO: 9264 - DNA, 1130 bp, Zea Mays
gacgttaggatgtctctgttggaatgtgaaaaataggagaagcagaactgtagactacactctttgtagagagatgtttgaaataaatgatgtgatagaaaacaagattgacggaacgtgaaaaataggagacacaaaactgtaaatgacactctttgtagagaaatgtttgaaataaatgatgtgatagaaaataggattgacgatatgctcgagatggttggccttagtagtttctatcatcctcatccctacaccctacccagatttaaagcttataaagctatttaagagtgctcttttagcatacaacgtaacatggttggatttaaagcctaaagctatttaagagtgctcttttagcataaaacgtaaaatggttggctgggattaaatgtctctccatattagaccgtctttagctgttcatccatggtcatcatccaaatcattgtttttgccctagatcatactctgtttctccacaacttaacagtaaaaagaatctaatgtgcttcctccacaccatcttcttgacccgtcgtctccatcccttgtgctaacttgacactttcgggctaccattgtgatgtcccgtctttaccctggccatggaggccttgcctttttttccacgctcatgactcaccaccaccaccaccaccaagcctatctgctgccgccaactttccagattatcgtgttcttcacatggacctttaaggatctgttaatggtctgtttgaaagagctttaagtctgaaaatcagattgcgctgaaaaaacatgtttgagagagtttcatggtatatctactaggtcggcccaatatataattgcagcccatgagtcagcgtggacccacgcgtcaatctcctcgtctctccctcgtccttcccgtctctctcacgtctccctcgtccttcccgtctctctcacgtcgagatggagatggtcagatggagttgatggccatggaggagaagagcgcaaggcgctgagccggtgggtggcacgtcgaccacgaacgcagcgcaatgggagcgacgcgccgtgtccgcgagcttagccgccgtgcaggcaagggcacaacggccacgagcacataatgctcgtgaggtgtgacgtca

SEQ ID NO: 9265 - DNA, 563 bp, Zea Mays
ggaaccttcaggcctacgatccttaagtttagtccatttttgcgaaatcaaaggtctgaagccttgatggagaagccagttattctcaaagaaaaaataatgggatttattaagattattctcaccagagtcaagcacaataggacaatgatcagatcccactctagttaatcctttagagaagcaaagagggaacctttcctcccactcagtagaaacaaggaacttgtccaacttaactagcaccggattaacttgattattagtccaagtatactgaggccccctggcaatttctcgcagcttgtagtgattaataaattcattgaacatgttcatgaggttctaatcgatgttctgggaattcttctctttcctattccttattagattaaaatcacccccaacaccataggaagggtctccctttcacatatctccgacagctcttgcaaaaaactagcagactggtggtgctgagcaggcccgtaaacacacaacaccacccaacggtaattgctgaatttatttctgatcgtagccttaatagcaaaattgaaggt

SEQ ID NO: 9266 - DNA, 466 bp, Zea Mays
caaatttgctcaaatccaccgcagcgttcgtattaagctgatgaatctgaaccttgaacttctcgagcacattaagcagaaaattatgacacggtaggcgaagactagcaagaaataagtcctcgaagaccaggactttgttgtttggcattggcgtagtctccgctcccacagcgtgaccgtatccagcagggaaataccctaggttctccatctccctaacccttcgcggcgaagtcttcaagcggcccaggtcgtaattttcccagcctgacccaccagagagcggaaccctagcagaagatgagcttagactatcttcagcggttccccctaaatttgcacccctatatcccactacagcgtcacatcagcacactctcttcctctatatcttctccctctgcagcggttctccctataccattcctttataccccactataaacataaaatatcaatttcc

SEQ ID NO: 9267 - DNA, 378 bp, Zea Mays
gtttgttttgatgagagtctcctctagcctgagaagcgtctcgccttgttccttgttccttctcaacagcttaatcaagagcgctttgtcttctttgttgagatgggtgtagaaacggcgaatctcctcttcttccacatcatcggtctcattttccctgtcattactattagtggaagcaaaacaggaaaatgtaccttgtgatgatgtagactcctcatcctcatattctccctcatcattgcttttgtctccactatcattgttagcaataaagcatttattactagtggaagacaaacctgttgatgaggtggattcatcgtttgatgcccatcgttcttgttcttctctcttgtacaagttagtatcaccagc

SEQ ID NO: 9268 - DNA, 1080 bp, Zea Mays
caatagaagtggctccaaagctgcatttagatttcttgacaaataaactgttggtgcgaagtaaagtcatcactgctctgacatgttgaaggtgggttcactaggacggactgtatatcaatatgtcatcgaagaaaaccaacacgagcgtcacaacaggggctacagtacagaattcatcaagctctggaacgtcactggtgcattggtaagaccaaatggcatgaccaaaaattcaaaatgatgatgatgtgtacaaaaggttgtcttctcaatgtcatccttgtgcatacggacctgatggtaccctgaacggaggtccaacttagtgtagaatcaagctccatggagttcatctagcaacttgtcaaccactggtataggatatttatccttgatagtgtgttcattgagggctctgtaatcaatgcaaaaacgccatgtattgtctggcttcttcactaggaggaccggggctgagaatgcggatgtactgtgtcagattataccacggcgaagcatatccgcacattgagcttctaattcatccttttgcaattgggtgtaacgatatggacgaacagctgctggtgcagtgcctggtttcaggtggatcctgtggtcacaatgtctggctgacggtaatgactgtggttcctcaaagacatcctcaaaggactgccgcaagtgatccatcatgtgcttgggttcagtgctgatgctacatgtggttggtgtagtggtgtctgttcagacggaccccaaacccttccacagtatgcaccgaccttcatgccagaaggccatgcaaaggtcctggagatcccataatactagtctcaatgttctcaggaatgctgtccctagaatgatctcaaatgtatccaagggaattgcatatgcctcaatggtgaacttctccctgttgatgtcaatggctgcgcgacgagttactccctggcaaaaaactggctctccatttgccaccttgacatggcaacctggtgtgggttccaaagtaaccccacactgttgtgccgccttgcagttgatgaagttatgtgttgaacccgtgtcaag

SEQ ID NO: 9269 - DNA, 636 bp, Zea Mays
gaacgagtaaagatcttggcgcccggatcaatttgggtccggccgcggctaggttccccggaccacttgctcatcggccgatcgggataaacctcgccgtcattggccgattaccgccgtgcaccacgtgctaaagtgttagaccacgtcgctgcgaatcgcgtctcgcatgcacggtgatcgcaaggtgtactgccacggtgaaagccactaacccgagcaccagtgatctcccacctctccgacagccgcgcgtctcaagcccaaattcatcggccaccgcttagcaatcctataaattgatggccgggtctgatgcgccatgtaatcacgaagccaacacaccagctattgcctcaaatcattcaccaaagaccgcgaatttcttacttcccccaatcctgtttctaccaccgcagagacaccctcaccgcggcgagcttactccaggttaattcaagctccctgatcatttgttctagcatccttaagttctcctcaagctcctcgacccctctgattgaactataccgccatggatcatcgggaacacgttgttcctttgattgaccacgctgtcaccatggacagagcaaggtagaccgccgttcgtgaaattggttgaggggaaatgtg

SEQ ID NO: 9270 - DNA, 552 bp, Zea Mays
tacacatcgatgttccagacggggcacttccccaacctgctgcaagaagtgctgcacgcgctaggaacttacgtccgccccctgtaagaaacaaggcgagtgagcgagcctccccgggcttgctactacatcactcgcatccacgtcagggtgatggatgcaggggacaggggattcaggactctgtctgctcacaagtccctgacaccagtgtccacctacgctgcctcggtcagcgatgctgccagacggaccctgtggtcgctcagccacacctaccggcagcagctgtagaacacgaggttcaggcatcttccttagcgtctgagtggaggaagccagaccaacatcgtcccaggtgaagctggtgaggatcgcctcaacaccctagctggtgtagtggccggtctcaacaccgacctggacagtgccaccctggatctctctagggtgcacttggagctggagaatgcccatgccaggattgcagccctggaagcccaacttcatggactggatccgcccgaagctcacgtccccgccatggcgttg

SEQ ID NO: 9271 - DNA, 301 bp, Zea Mays
gtcgggatgatcctatggcaacaccgtcgcggcctgtggctccatcgtcggggtctccaccgtggagaagacggcgctgtcgttcctgggatcgggttgatgaagaagggccgctggccgttggatcgggttgaacgactcagattagagcacagcatatccgttgtaggtttttatctggacagttggattccgatcgaacgactcggcgatgaagtatggcgtggggtcgatcggccgttgattcaggatccaaaggccagcagcgcgtaccggttcacttaatgggcaatgtaatctg

SEQ ID NO: 9272 - DNA, 428 bp, Zea Mays
cagcatcaagatgtcgccattcgaagcactgtatggacggaaatgccagacccctctcatgtggtccaacgtagggggaaaagcactagaaggacctgcctttgtcaaagaggcagaagagaaggttgcactgatccgcagaaggttactcgaagctcagagtcggcagaagagttatgcagacaacaagtggagggaactctgatttgaggaaggagacttcgtctacctcaaggtttctccaatgcgtggtgtcaggaggttccaagtaaaaggaaagctagccccacgtttcgtcggtccctatcccatcattggcagggtaggatccgcagcataccgcctggaattaccggaatccatgtccaacatccacaatgtgtttcacgtatcccagctccacaaatgcctgcaagcaccagaaagtc

SEQ ID NO: 9273 - DNA, 401 bp, Zea Mays
ttgatgtacgaatccgaagcaatgacgccgcaagaactgaaacatggatctccatgtgcaagctccacagctacccccgatgtcgatgagtcaacctccaaggaccttaccgatggagaccgtgttcttgccttgacaacactgaacaaataccaagcgcagacgaaggcatggagcgacaatactgtcatccccaaagaattcgaggaaggagacctagtcctcatcagaaccgccagaacagagtctcaaggctaactcgagcccaaatgggaagggcccttcattgtcaagacaaaacgtcccccaatgcctacagactcacatctccatccggcgaaaacctagagcactcatggaatgtagactacttacgaaaattcttcgtctaggcctttgcg

SEQ ID NO: 9274 - DNA, 611 bp, Zea Mays
ttgggaatgaagacttcaggtggtcatgaactgttatgtcgaccttttgtccaaggatactctaagggtgtgcttgttgacgattggtgtcaccttccattgccctgtacctgtctccttggagactgaagagtatttgaccctaggggcaggagttggtattgtatggctataatgtgttgcaggcggaatgacataatgcagttgggatgaatgtggaaattgtgcatacggtgcatcccctgctctatgtacacagaaccagatggtccgggataaggtgccagacagttcgtctagactctagactgtccgacgtgagtcgacggatggtctgtgactaggccaaggagtccgggttatacctggactatctggtcatataagacaccatctaggtggcatgcacaaagatcagtgtggggtctgatggtctggtgaaggatgtcggacggtccatgaggtggccagacggtttgtgataagacccagatagtctgcccatgcctagagccgatcctttgttaggtgcgagcgacgatggttgtggctgtgaacgtgttcgtcagtataccatataatggctgggtttgtgaggacccctttgtagc

SEQ ID NO: 9275 - DNA, 718 bp, Zea Mays
cttggctgaggtcaaagaggcaatgggcttgtactctatccattttgtgaatttgtcaatggcaaccagtacgtgagtatggcctccctaacctttcttgaaaggtccgatcatgtccagcccccagcatgcaaatggccatgttacaggaatggtctgcagctgctgtgcgggtaaatgttgttgctttgataagaattggcaagcttcacatctttggactaactcaacagcatcactcttcgttgttggccaatagaaaccagatctgaaagccttcccaaccagagtttaggacgctgcatgtactccgcactgcccgacatggatttcatctaatagtttcctcccaatagccgagtgaatgcacttcatgaggactcctgccgcacctcttctatacagtatgccccctatgagggtgttgtgtactgactgccttgcgatgcgttctgctgtcgtcttatcatccggttcttcttcattttttatgtacctgatgatgggttctctccagtcattggggtccgactctggttggctaaaggtgttgcactcttccatatgatctgagaggatacttggttgtgatatttcttggacgaagatcccgggtggagcctgggcccaactggatcccagcttcgacaacgcgtctgctgccgcgttgcggtctctttccacgtgatggaactccaatccttcgaatttgtcctcc

SEQ ID NO: 9276 - DNA, 363 bp, Zea Mays
cagcactctatcgttcaccctagcctccatacaccatgcaatgcatcatgtcaataagctatctccagcaatctctctatctcacctcctatcacgttccctattttatctacactctataaacagtggcaaaacagtgttttgcacgctcttatacacagtttgcttaagggttgataggtgcatacagatagatagttggtaacgaggacatcaatactatacatacaatatatggaccaataacgtgagcacgtatacgatagttgtgggtaaagttgggcccagcagcactctatcgttcaccctagcctccatacaccatgcaatgcatcatgtcaataggctatctccagcaatctc

SEQ ID NO: 9277 - DNA, 713 bp, Zea Mays
ctctgccgtgtggggcccacggtcagggtggtcttcgactcggtctgttgcgacatccgcgccgtctcctcggcgttggtttcaacagaaatggcgaaaaactcgcccggatcctcatccattctgccgtgtccttggggaggtggactccgcctgcggggggggggggggcataaaacccgcagcgacctcttgcctcgcctctctgattccctagtcgagccatcatcctccccctttgcgaattttgaggaagagacgccgccgccatggaaattgttttccgtcttcgcttaaggcgcaagctcgggtcagtgggcttccttggggtacgacggtgatcattgtggcgctcgcgggtggaagaagcctttggtgctgccccaatttctcaccagcaccaacaattgccacggaaccacacttcgtcgtggcctggggactgcaccgcataaccaccggtaagattgcccccattgagttcgccgtaatctccactaccgattgatcatcaccgtgttcggggtagctcgccaaatcgttgatccgtcgttcgccggcgcgctcacaacagtggattggcccggcagcgccaccgcgtctggttgcggcttggggaagacgggggttcggccgttggatgatgaaggaacgacgtggattacaataggtgtacccatccgctcagttggctctcgaccgttgatttgcgc

SEQ ID NO: 9278 - DNA, 1865 bp, Zea Mays
catatatacaaaattctagcatattattaccagtgttttcttagacggaaaacggtagacggacggtgaggagctgtctaaggtttagacgtgtttagacgtgtttagacggaattaaacggcctaaacggtatgttactgtagcatagtttcagcaggataaaaaagattttttcctaaccttttttgaagcaaacatgaagcttttgttgtccttgtcccaatttgagatatgtacctgaaaaagaagcgagatttgttagtatgtgcccatgtgatatgtataagggcccataggacataacttacattttatgacattccaatcatttggattgacaatagttccatactcccaccctatgtcatcgctattccgcttaagtggttgcttgtccactgctggttgagctgatggattggaagccgccgatgacatcctacatgttgcaatgcacaatcaatcatttgcatgaagtacactgtctgaccctactagccatgttgtacactatctgaccctactagcattaagcctaagccatgaactaacatttaacgacaagaaatagagagccatgaagattgaagcatgaactactatgcataatcaggagcaaacagcaaactataaaatagaggaagcaagaggcatccatacctggcaacaaacaaaggatggggagtccctgcttcagcttcctgctagcgcgccccctctatccctgggcgtgcgtgcctctcttccactgcagaaccactgctgagatgagaggagattgagaggagaggagaaggaggagccctgggcgagcagaggagaggagggaggagccctacctgggcggctgggtgagcagaggagaggatggaggaggcagcgccggcggctgggcgcgcagaggagaggaagcagcgccggcggctgggcgcgcagaggagaggaagcagcgccggcggctgggcgcgcagaggagaggaagtccctggcggccgtgcgtcgtgcagatggataagggtgcagaggcaaaaaaaaaaaaaaaacacgagggaactctagctttggcgcgaaaaaggcccgccagaggcctggtttcagtttccccgcgtaaaataacaccatactctaaacgggccttaaaacggcctgaacgccgtccaaaaccgtctacaagccgtcccgttcagcccgttcaggccgtttagacgccgagttgaccgtttagacggttgacccgtttaggaaaccgcccaggccctaaactggacggtggggtgccgttcaccgtttagaccggtctaaacggccgtttaataccgtttaggataacactgattattacatgcctggaagtggggtctttgtttcaggtggctggagcagccacccctctgccctacacctaggaccagccctgggtctgagtggccaaccctctggcccacccccacccccaggaccagacctcgaaattatttgtgcttttcccatattcatgcctggctaaaattgtaagctaaaaggggcttgagacctcactcaactttggaatttctagtcacaccagagtcgatcgacatgactttaagggcggcccactgtgtttagttaccaaaactgtgaattgcttggcacctgttttagtgtggactaaaatggtagatcttatttttaggcctacataattgagttccgaaatatgtattccttgttggcgatgtttatgccacttaatatttttgtatcatgtgcttgtttgaaacagctaatcttctgtagtcaacacatgtcactgacttgctcctcttgcgtagaggctaactggcaaatggtcctttttaggcactggcgatgtctcaaatca

SEQ ID NO: 9279 - DNA, 978 bp, Zea Mays
gccttacttcccagccggggcgcgcgaccccgcatcatcatcagcgtcagattcatccctctgaacttcaggcgtcctatgcacatcagtcctgctgctagaggaagcacttggcctctgaatggcattgctggtagtcctggagctgttcagggcatccgggcataacttcgaaggatcaaccttgcagaattcagctccaagcttcttgataatcttgtgagaaatggagggtggagagatacgagcacagcaggagcatttttcccaatcccagagcagcttttaagacccctggccttctcctgaagtctagcactccttttgacctcagtgtcgacaatgattggctatttcttcctgttgacggattcagcaggtaagggggactgtggctccacatgggaatcctgactaggagggggcaggcacttggagggaatcttgatcgagacagtttccatgctgggctcaacgaaggcagagatagcaccagacaataaaaatttcttggcccattcaaaggagtccggcctcaacagcaagcccatgaagaaagcagcccacacctttggaacaagaactaagtctgagttggtggggaacaaatcagcccaagaagaaaggcgctttctagccaggtagtcttcatatgcaggatcatggttgggctgctccaagtgttgcatgaagcccacattgatgttttcctcaacttgcatgttctcctccccttggtcgttgtttccctccaaaagcatacccgctgggggaaaggctggcagagcaagaactgcatccacaggttctgggacttccacctgagggaaatggatctcttgcgggataatgacatcattgaagagacccatagactcatcggagggtagatcttcaaggcctgagagctgataactgaattggtcctccacattattatcatttggcactggctcaggaggttgaacttgttgggct

SEQ ID NO: 9280 - DNA, 571 bp, Zea Mays
aaggaagtgttgtagcagaattcggcccatggaagccatttaagccactctcttggtctatcccctgctaggcaccgaagatacatggtaataattcgatttaccacttctgattgtccatcagattgggggtggaaagctgaactcatgtgcagcttaactcctgctagctggaacaattctgaccagaatgtgctagtaaatattgtatctctatcgctgacaatggagcatggcaacccatggagacggacaatgttatcaaagaaggcttttgctaccgatgctgctgtgtaagggtgtcccagagcaataaagtgtgcaaacttggagaaacggtctacaactgtgagaatcaccgacttgccgcccacctttggaaacccctcaatgaattccatagaaatatcactccatacttccgaaggtactgatagaggttgcaggagaccaccgggatggagatgttcagttttattgcgttggcagactgaacaacctttgatgaattccttaaccctctgtaatgcatgaggattatagaatgacgaccggaacctgtgaattgtct

SEQ ID NO: 9281 - DNA, 951 bp, Zea Mays
gcggcgtaataatgttcaagttatcttcccagaatctgtgttgcccgaagcccagaacgatggcagtggcaccggcacggttcaagccacgcgtgaatcagttgcatcggcttcatctgatgttgcagtcggttcttccataaaggataaagcaattgctgcgctgcccacagaattggctgagatggctaaggatactaagagaaaggcttgatcttcggacccagggtgaaaatatggattttggccagacattgcaaagaacgagatggttcagtgtattttttgccaaaaagttgtaccagcaggaatcaaaaggttcaagcaacatattgctggcgggtttggtgatgtagggaagtgcccaagagtgcctgaagtggttaggaaggagatggcagtctactcgaagaagaatgcaagaaataagatggtttttttagataatgaagaggaggatgtagaagggggtgaggaacatcaggaagatggtgatgcaagagaagtaccaagttctggcacaacaggaaaacaagtgaagaggaaattagctcaatctactattaagtcattcatggtttctggtccagttaaaccacaaacccaaaagcaatgcaagtcggttagttccatgttgtgtaagacaccggaggaagttgttgcagaaaggaacaactccaagtgttctcaaactactcttgatcatctcacaaagaaggacaaagagtcaaaacagattgttgatgatcatgtggctaacttcttaattgagaatgggataccattcaatgtcattaattcaagaagttgggaaatcatgcttgagtctattggtcagtacggtcctggttataggtcaccaacataccatgattgcaggggcaaattgcttgatagggctgttggaaggacagatgaactcaggaagaaacatgaagatacttggaagga

SEQ ID NO: 9282 - DNA, 481 bp, Zea Mays
gcacgcgccggttcccattccggggccggcggccaactcccttgctgccgtcgccgcagcaccctctagccctggcgcgtcggcttctatcccctccttgtctcctcccgtgtcccatgtagccaggggacgatccaagtctctaaggtggggtgacctcagtccggcctcttcggatggcgtgacgtcgctcgactcccggccttccttcaaggacgtgctggtgagaccagcgaatcctttgccgcccagccgtgcggtagtccatgagtcagccctggcagctggaacgtcctcggcgctggggaaggtgaaccatcggcgaccttgccctcaccccctgtctacaaagcggcggagtcccaggcaggctccccactctacaccggctttccgcccagctccaaattttgatgatcaaggatggacaactgtggaatccaaacaaggtagaagacgccggttgagggcttcacgacgc

SEQ ID NO: 9283 - DNA, 296 bp, Zea Mays
ttcgaccaggtcatgtaccctattctccgtgattgcgtcgagctccacccgcaggccgaccgtcacgtaccaggacccaccgtcttcctccatgttgtcatcccctccctggcatcgagccttcgttgcccacttcccctcctaatggccctgtcggagctcctcccttggtcgtttccgcacacctcgtggtctcgccaccctctccctctcccgtcgactccggaacctccttccacaacactcctaccactcccccgttattccaccctcatccaacacacccctcacatccc

SEQ ID NO: 9284 - DNA, 942 bp, Zea Mays
aaagaatcagactaattatagtaatccaacaagggaaagtaatcaggctaattatagtaatccaacaccccccgcagtctgaacgtggtcagctacagggaaaaacattcagactggacctgaactccgtgaacaccgacgaaggcaatcctttagtgaagatatcagcatactgagaggaagtgggaacatgcaatacgcgaactgcaccggccgcaacacgttcccgaacgaagtgtagatcaatctcaatatgcttcgtacgctgatggttcactgggttcgaggagaggtagactgcactaacattatcacagaaaacaacagtggcgcgcttcaggggaagatgcatttcctgaaggagctgtcgtagccaggtagtctcagcaactgtatttgccactgcacgatactctgcttcagcactggaacgggacacagtaggctgacgcttggatgaccaggagacgagattatcaccaagaaaaacagcaaaccccgaggtcgaccgacgggtgtcaggacaaccggcccaatcagcatcagagtaggcaaccaatgtggagacatccgtgggacgaagatgtaggccatgatccagtgtcccatgcagatagcgaagaatccgtttgatcaacatgtaatgtggttccctaggatcatgcatgtgaagacaaacttgctgaacagcatatgaaatgtcagggcgagtgaaagtgagatactgtagtgcgccggccagacctcgatagtgagtcggatcggtgacagattgaccctcagtgccagaaagcttgccactcgtgtcaacgggagtagaacatggcttacaatctgtcatacctgcacgttcaagaacctcaagaatatactgccgctgagacagatgaaatccatcagcatgtcgagtcacggtgaggcctagaaaatggtgcagggggc

SEQ ID NO: 9285 - DNA, 498 bp, Zea Mays
atctttgaccaggatattagtctactagttgcatgacccaaaaaatacaatagtaaatgcatagaataccctttccagcaatcacacaggacagctcagagcaaatctagcagctggcctagcctgccccagccagttgcagccgtcttgcattgcatctttggcagcaggcaacatatgagacctaactacagtctacaggccacagatctgcagatctggaaggaaaaccacatcagtccagggaggaagcatctcaagctcacctccatatgcatgcaggtgcaggcaggcactcattcattgaagctcacatgctacacacaggacacagctgagccaatggtaccatcggcaggtcaggttgaattgagttcgacagcaagacaaggatgaagatgcacagaatctctctttctcatcagggagggagcgaccgtcctctaagtattatattaagagaccgaaccatgattctggccaaaaaaaaatccccga

SEQ ID NO: 9286 - DNA, 729 bp, Zea Mays
gtgaaggaccagaagaaaagaccacactaggtcgtcggtccattgtgtaccaccctgaaggccccaccggtaagtgttgttactgggtagatatttgggtgcatctgcccaccgagcttcaccatgctgtaattaccccacgccacagaatattcctaggatgtagcagctaaccgggggcacaactatatttaggcttacttggccccgattgccctataaatacctccgtcttgtagtaggatgggacatgcacaatgagatactattgttccccaacctaatgttttgtcgttcattgccatccatatgcccctgagtgttaaggtccacctgtcaggactcaacatttgacgcccaccgtttgtgcgaagactaaacccacgatgcctcccaagaaaaacacctgggccaactcctcacacaaggattaggcagcgaatgctgccctcaccgctagcgcaaaaaaggcaaggttgttttctctgacgacatcccacaaccatccacaaacaatatcccccaagccgccaccgagctagaagacaaaaaccaccaacccccaagcaaaaatggttgtaatcccctgtgccaagtgtccacacttccagctctgaaatcccaaatgactcaccaccccaacccacatagccacccctacaaatacaaaatatggccagacttgaccagaaacatgtcattagtacccctaggcttcgcaccaacaac

SEQ ID NO: 9287 - DNA, 275 bp, Zea Mays
taaaactcaacaatgcgctgaatgttgcggtgtaacctagccatgaaacatgcaatggtttgctcttcatcttcatacacattggctctaatcatggtcttctccatctccttataatactcctcaatagagaaacttccttgcctcaaattctgcaatttaccaaaaagaccacaccgataatgcttcagtacaaaacaaattctcatttctcgcttcatctcttgccaagtagcaataggctcctctccatcttcttcacaatcacaaagaag

SEQ ID NO: 9288 - DNA, 397 bp, Zea Mays
caatgggccaggcgtcccatatgggctgtcatagatacattccaacaccctccctcagtctaatcgggagtgttacgaacgcaaagactggacctaaaatcagtaaataactgtacaggtaaccctttggtcataatatcagcaaactgaagtgacgatggaacacagagcacccggacctgtcctaaagcaaccttctctcgtacgaagtggatgtcaatttcaatatgcttcgtgggacgatgatggacggggttggcagtcatatagacagcactgacgttgtcacagaagatgattgttgccgaagagatgggtgcatgaagctcctggagcagctgacgaagccaacaagtatcagccacatcgtgcgcaacagcacgatactcagcctccg

SEQ ID NO: 9289 - DNA, 1105 bp, Zea Mays
ttcgaccgtgtcagataaaagagacttcgcacctttaaggtgatcatacttgacatttgtgccattagggtgatgtcgcacatttgtgcatgtccggctgcacccttaggcggcttttgctcggatgtcttatagtagatacttcatatcgcgcacttgttgttcatatccggctgcacccttaggcggcttttgctcggatttgtcttatagtaaagacttcatatcgtgaacttgttgtgcatatccggctgcacccttaggcgacttttgctcggatttgtcttatagtaaagacttcgtgtcgcgcacttgttgtgcatatccggctgcacccttaggcggattttgcttggatttgtcgcacacgagggtagtctaggctacctcttgcggtgactatttatacgttgaatgtcgaagaccgtcaatgcagtctttttcgacacttatggtaatgatgcttgctggggttttttgcggggcttttcggcggtatattacatggcgccgcctcgttaaaaatctcaccccccgggaggaaaagagtgcgggcctgaatgacattgtttgaagaattacaaaggtgcttgggccttggatcttaaattaaaaaatttcagagattatcgatgttgcatgagtgttctaagtcttcgtcggatgacgttgctaacctgtaagcacttggggatgcctttgtcttgactatgtacggcccttcccacttcggctctagcttgccccgggactctatcctggtggtcctcataagtactaggtcccctttgttgaattctattgggacaacagtgttgtcacgccatgctttggtctggacctgatacttgttgagggcctacagggcgaggacacggtctccatcgatgagatctttggaggttggttcgtcgacgtcggggatggctgattcgtttgtttagggggacccgtgctttaactcttgcggcgtcattgcttcggatccatacatcaggcagaagggtgtgaacccggttgctcggcactctgtcatattcagcacccatatggcttcgggtaattggtctacccatttgccctttttgtcgtcaaggagcctttt

SEQ ID NO: 9290 - DNA, 552 bp, Zea Mays
cggacggcgggttgatttgtgagaaggacaggggctctttaataaaagtgtcagcggcgaaagggtacagttagatctcggccgctagatctgatctgagcggcccagattagatcgggattttaagtgaaccggtacgcatactggaccgtcagattgaagatcaatggcccaggttttaaatactgaggtcgatccgcactcgtcggatcaagatcggacgccccacaacgattcggctgaagcgatacggggattctaatcctagccgttcatcaagatccaacgacggcaaggttccccccgattaacggtcaggatgagccatggccgagacgccatcctacatcaaatcgcgatcgcgcaatcacgatctgacggctgttcacatcgacttacctcaacccttcatcgaggatccgatggccctcacccttcttcacgcgaggcatctggcaactgcgttgtggctgttcccagcccgcgacggtgtccgccggccaggagcctgtgcagccccggtgatctccaccctgcccgatccgcagccgc

SEQ ID NO: 9291 - DNA, 490 bp, Zea Mays
tataaatctagaacccttgagctcctcgccatcaatccgagtcatcggaggcgtctgaaactcagccatcgttgtgaacgcgcaaagtgattagagatcggctgatgtcatggattcacgttgctatcaccgtcggggcctcataggtaggccatggagcggcgacgggagctagggaaggtgcaagggcaattcatcgggcgcgagggaccgtagaacggtggcaattgctcgccggacttcacaatctgccatcgttcgtggacagcgcgctaccacctcaaacaccgatgtgagcttccactgtgtggttcgcttttgtgtctgcttcatgtagaggcgatcggattgtgttttggggctatggtacacgggataaaacaacctctggccatgacgtcgccacgcagtgctctgcgtcaccgtgctaggccttaggaggggagggtgatggcctagatgccatcaatttcggatgggcgatcaagat

SEQ ID NO: 9292 - DNA, 281 bp, Zea Mays
atcatgcatcgtgcagtcaccgtgcccatgcccaaaccaccagtccaaatgattggttgaccacttttgccgccacaccacaccaacgactcaaattttatgtggagcccacgcatccatgcctacctcactccatcactcctgcaatcattcctactaagatcggccattagtatcagtacggtatatatgtcatttgtttacttcctagttttgctttcccgccactatatatactcctgcatgcaaccgctccatgcaacagcagcaaccactttctc

SEQ ID NO: 9293 - DNA, 340 bp, Zea Mays
ccacccctataaatataaaggggcacgtccgattgataaccccaaacacatttcaatcgaaccgatctactttatttacctttctttatcattcttatcctaggagtagatgtaacgtagctttagttgtagtaatccgcatatctatctccatccctattcgactatatgtcatctagattcgtcttgattaccctgtcgaccccaaagcgaccctaggatcttacccctcctgggggcaagatctagttgtccattcaagatactctatctcgactgtcttaacccctagacactctacgtcgtatgggaacgtcctaggtgcgatgctgacccggtg

SEQ ID NO: 9294 - DNA, 490 bp, Zea Mays
ggctccctctagtcattggggtccgacttaggttggctcagggtgttgcattcttccgcttgatctaagagaatactcgggcgtgatacttcttggacaaagatcccgggtgggacctgggcctcaccggaccccagctttgacaacgcgtctaccgctacgttgtgctctcgttccacgtgatggaactccaaaccttcgaatttgtcctcgagctttcggacagttgcacaatacttgcccatagaattagccgagcaatcccagtctttatttatctggtttatgaccactagtgaatctccgtacaccattaacttcttaatgctcagtgacacgacgatgttcaacccatggaccagtgcctcatattctgctgcattatttgatgctggaaataatagctggagtgcatacttgagtcgttctcctccaggagtaatgaagaggattcctgctcctgctcctgctccctgcaacttcagcgagc

SEQ ID NO: 9295 - DNA, 750 bp, Zea Mays
ttgacgcttgccacgtaaagaccatggcatacaagcgcgagctgaccagcttcgtgttgacagtctaccactagcgaccatatctttaaggtcgccaatttgtgatacgaacaaagaactacaacctcaagttcttgcttgatcggcagttgttcacaatcccctagcatcaatggttcaacaaactatttgggttcaacttcactgttgagtttcgactagggtgcctcaacacaatgtcatacaccctatcatgtcatgacacagaggagtgcatagtgccagccacctccaagccctcctagttgctcgacaccatacgctgggaggtcaacatcgacccgacattcgttaatgcccacgaccagatcaccataggagacctaccccctaacaccatgatggctcatcctgcacaacaccaagatcttcctggtggcatcctccacacgcttcctcagatgctccaactagctcacaccgccagccacaaagggaaacaaaagatgctacaccgccttcgtgccgacttccacatcaaacgtgagcacaccctggtgcatgtattcgtccatgcatgcactatgtgtcaacacaacaaacatagaccatccactcattcaggctgatccaacctttggatgtgttgtcctaggtgtgggtggacatcctctcttaatttcacttagggccttctgcaggtgcacgacaaatcagtcatctaaccgtcatagattgcttctatgaata

SEQ ID NO: 9296 - DNA, 687 bp, Zea Mays
aatccattgttagatcttgccatgcaccttgagggattagcaagggctaaagaagacctggggtgtgaatcctctctgccttagcctgttgacacactacacattgcttaataaagcacaccacatcagccttcatgcctttccaccaaaacaaccttctcactctgtgatagttggcctaacccctagaatgaccacccacaatattattttgcaaggtatcaatgattttagtcctcaaggcagaattgttagccacccatatctaatctcccttcctgatgacaccttgctgcaatgaaaatcccccttcattgggactatgtatagccaactggcccaacaacacctgagcctcttcatctgtaacataagagtttaccacctcctgaatccaaataggttttacatccgctactgattgcaaagccatgaaatgtcccaccctagatagagcatctgcagcctaattttcatttccctttttgtactcaatttgaactacagtcccatcatttttgtcatggccttcctttgcaattatgaatgtaacacctggttctccagaaaaatcagggccttatgatctatcctgatgatgaactcagctctctgaagataagttctccacttctccactgccatcaataatgccagaaacttcttgtcatagatagacaatccttt

SEQ ID NO: 9297 - DNA, 471 bp, Zea Mays
gcaagactactattgctatcaatttcattacaaatctggccagccaaatccatttctgtcctacgggacattgtcaaaccaagctaaggttgatgctcgggcctgcattgatgagaatagacttacatacattttgtataaccaggatagattgcgaatagaaaacttgcaaggtatatcagatgctgttagcagaggttgcataaatggtgatgaaatggggaaaacaattgtacttccagcttcacatatcggtggaagacgatatatgattcaaaattatcatgatagcatagccatatgtagagtccatgggccaccagattttttcgtaacattcacatgtaatgcaaagtggcctgaaattgttgaaagtctttatcactctggccaaaaaacttcagatgcacccgatattgcagtaagaatattccacatgaagttggaggagttgttacaagacataaaatc

SEQ ID NO: 9298 - DNA, 823 bp, Zea Mays
cggcgcctctcctcacggcgatctcaccaccggagagtttgtgctcttcgtctccaacctccccagcgggttggcgctgtcgatctcgtctttcttcgtgctgctgctggaggagctcggcctccaacctcagcacttcacgccctgcttcatccttcaggcggccatcatcgcctacctctgcaagatgtccgtgggggcgacgcttcttcctcctgcattcggtttcaaggatgttcatcagccttgcggaggtggaaagcgagatgagctgcggctccatctttcgcgtgagcttcaccagtgcctcatggcttcggtgccgcctccaacggtgatcgctggcccgactgctgaagacgccgcccaggaggtcgtacaagacgtcgtggagatggcagccgcacgcttccagcgtgaccctactgatgtcgagtaggtcatacctataaacataagctagggcctcgcttgaaggtggatgtaataactttgtttttgtaaggtacttttgagtactacttatcaagtagtattagcacttatatgcatactatttgtccctgttgtgtgtggcgttgccgactccttcctggtacctagcccccctgggatgtaggctcgacgtgtcgaggctggataccagcatacctaaaagagttggcaacgacccccaggaggcagcctcgactgggacctggacctgaacacagcttcgactagggagcgttagtagcacacccataggacccatcgcctgatactagccatcctttgatgcaggcacgagacctgcaggatttagtctgggaagccaagttgt

SEQ ID NO: 9299 - DNA, 393 bp, Zea Mays
gcggccatcaccgctgtcacaccgtcttggaggattccacaaggacagcggccacgaacttccaactcgactccactggcgtctggtagtttatacctgcagagtagagatggaactaggattccgcttgaaggcggatgtaatacttttgctttttgtaaggtacgtttgagtactatttatcaagcagtattagcacttatctgtgtaccacttgtccctattgtgtgtggcgtaaccgattcctccttggtacttggccccctgggatgtaggctcgatttgttgaggctgcagaccagcatacctaagaaagagttggcaatggcccataggaggtagcctcgactgggacctgggcctgtacacagcttcagctagggagcattagta

SEQ ID NO: 9300 - DNA, 399 bp, Zea Mays
atttggattattttgcggctttggatgtggctgcggcggaggcttctccgcgtgtgatggatgctgaaattcttcccggtccgagtgttgggcgtaggcagcgaagggcggtggtgaagcgtagggtgagtgaggtggagggtggtcgtcttcgtgtggccagggctggcaagcgagaattgttgtcctcgccggctggggtgagcgtaggtgagggggagttgcaaagtctttttgagggtcaggagctgagtataatgccgtttaactatagggagatgggtatcatcccgaaggttgaaccaatgtaatgtttgatgccctcggtgtacgtatgtaactataatttgtatgatggggttgtgtgccttcgctgatccggccgtgtccgtaggggac

SEQ ID NO: 9301 - DNA, 700 bp, Zea Mays
caaaaccatcccttagtgtgacgtcctggtccacacggttctggttccacatgccaaacgtgccggaggatgttggagttgtgtcgtcatcatgcgcggtggtggtgcagtggatgaccaatagcatgcagtatatcacgatggccggaggcggcggcggcggcagcgctaaaactctaatgcattaatggggagagtacaggtctaggcgaacgcatgcagtggtgcttcatgcttgcagagatgattgtggcagagtggatgatgctcgggaatggggctgtggttctccaagttctctagagcagatccatagcggtgggcgcatgcccaagcatgagcatgagcagggaatgacgaaggaagctatgacggggctggatctgcgcttggccatgacgatcgagaggcgtcatgcagcagggggaacacgaccaggaccagcgataatgatgagtgagcgtcggtgacgagaatagagcgcgtgtgagaggtagaagaaaggacgtacgtgcatacatatatgtggggagcgagggcatgcgtggcaccatgcacgtgacgtgccaaccgacaaccgtaatgaccagagctacagagcacggtcaactagttatgcatgcatggagccctatggtcttgctaccctgcacgtgaggccacatgtgacaatgtggataagcggccaggctcgatcgag

SEQ ID NO: 9302 - DNA, 357 bp, Zea Mays
gtgagcgtagattcgttgacgttgaaaacgacgatggtttgaccgtgactacgaagattgcatgtaagcagcttcgttacatgcctcttatacctcggttgaaacgtttgttcatctccaagaatacagctagacacatgaggtggcacaaagaaggggtacgtgagaatccaaatgtcatggtgcacccaggtgatacagatgcatggaaggcactagatgcttttgattccaactttgctgatgaagtgcggaatgttcgctttggtttggcaacagatggtttctcgccattcaatctaactgcaacgtcctactcatgttggcccgtctttgctgttccatacaaccttccac

SEQ ID NO: 9303 - DNA, 508 bp, Zea Mays
cgggaggcgaaaattaatgggttgggccgggctcagcaatggcgtttcaggctgagaccagcccaacaaggatgaggcctactagtacgttgctgggcttgctctttgggggggtcacgttaaggcggcaactgaattctggttaccctacaggctacaggctacagggaaaggaagatgcaatcacggtgtagtatatggctttggatctgcgtctgcgtctgcgtctttcgtccctgcgtcaacggtagaacaccgactcgcatgcattttatgtcacgtcacgtagcacgatcattgtaactgcagttcccgagccctttatgcagcactttactcctttatacccagctggtatgtggtcttttgcagtatgcagcagccagcatctttagttacagtacttctttacatctttggtgaatccatgctcctcatctttttccttttacgtagtagagagcctgagcagaccaggtaaggctatctccagcagattccttatcac

SEQ ID NO: 9304 - DNA, 581 bp, Zea Mays
aaaaccaggagaagctccagcccattctctgtgctctgcagaagttacacactgagggccttaccgccacgggggtcgtcaccgctatccaccgctggagggtgctcccattggtagagtggcggttgcggctttcggagatgaagccgggggttgatttggagggttcacggatgtcctcgacctccctctccaccgacgacctcctcagacgggtagcgggcacggtagggaggctggacgcttgcatccttagccaacccccgatgcgtcccgaccatgggtatgtgtccctggtaagtgtccaaccctccttctgttttgtgccgtgtttcttacatctttagttcttactgttgggattttcgttcgtccccaggggttgaggaattttaaactctcccggccaccggtcccggaggacgcagcgggtcgggccgcgtgtaggctcgccgcggagaaggacaaggagaagaaggacgcggaaaaggcctgagctcgcgagaggatgcgagctcgggaagctttggagaaacgccgtcggaggcaagcaagggacgggctcccgttggagccgtcgc

SEQ ID NO: 9305 - DNA, 376 bp, Zea Mays
gtagcagcttcgatggcctcctttgcagaggcaggagttggtgcccttgttgactccaagatagcatccaacacgctagccatccttatcctcttgggagttattgcaggaactttggataccttcggcaactccgactctcgtggcgggctcaagatttttggcagccctgccgactcctccagttctggttcttcgaccgttttctccttggcttcagcagggcgctttagctctttggatggctcgtctttctcctgtcccattgctttcggcacttcagtcgattctcccttagcaccggcaggagcagggtattccagctcagcgacggaagaggtcccctcggcaagcttcggcaccctggccgtttcaa

SEQ ID NO: 9306 - DNA, 559 bp, Zea Mays
tcaccacgcgttcccgggcctccttccttcctaggcagaggtctgtgccgacgcgtggccggggacgccttacgtaagccaccaggtggcgcctgacataagcctctcgcatgggccccgctagcattaggtgcgagtgggatgtgcacgtgcccatgacaggggcaggtgacgtaccccctcgattaaatgcacgcgtcacgcctagtctgcaacgcatgggatacaatgttgcccacacgttagcaaggcaagaccattgactcaatgtgccacttgggcaccctttattatgcctctactgttcctcgtgcgttaccaaggcatgaggagacaagcgaaggagacaggacgccaccgtccatacacccctacgcaccgcaacatatcacactacacaacaacctacaccaaggcctgcgcctgtgttcctattagacggggcaagaggatgccaggagcctacacaacgaccaagaggagatacgcacccagaagatgtagcaccgccagctctacttgatgcctcatgcttcgtattatagtaactcctaggccc

SEQ ID NO: 9307 - DNA, 322 bp, Zea Mays
tccgcccctagactgggttggcaaagtacgaccaccatagaaccggcctccggcagaagcacctcttccaccacgccacgctccagcacggccctgtccacctccccgacgtccaaaaggacggcctccgccaccataaccaggatggaacactggttgggatccaccgcgtccaaagtcagtgttcagtcccataccagcgacatatcctcccgtgcccccaagctgctgctgaccggtggaaaaacctccagcgccctcggactgatgctggccgcgactgcctccacgccctccagtatcaccaaccggcgccattgcg

SEQ ID NO: 9308 - DNA, 597 bp, Zea Mays
gtggtcaccctaagttaagtaagcgtgagcatgtcgcaccgtcttaagtcactaccgacttaagtcgattgctccgttaacagggtatagtggtcaccctaagttaagtaagcatgtagatcgataataaatagttcgagagcttttgagaatgaagtctttttattgatgacgtacttttccaattacagaatacaatgctgccccaatagcttttgaaatctagctaggggtaaaacttcctgaggtgatctatattccatgaattccctatttccgtgccatccatttgagtaagtcgatacgatcctggccgagtgacttctgctatcatgaatggcccttcccatagtggcaacagtttgtgtcgtccttcccccgttagaattcgacggaggaccagatctcccactacgaaggatcgatgtcgtatggccttatcatgatagcgcctcagagtttgttggtacctggttgactggattacagtattcaatcgttcttcttccagcatatcaatatcctccagtctagtagcttcagctttagctatgttttcaaagatcagccttggtgccccaaacctgagatcagcag

SEQ ID NO: 9309 - DNA, 523 bp, Zea Mays
ctttttgctaatgaactcatcactaaggtagatgtgttgatgtttgctttaactattcaggaaaagttacttaggattgcgacacgtgagaggagagagagtacaaatgcaagtatgagtctactagagcttctatggtggtgtttgataagactaaatgtgatgcttgtgctctaaacatgttgaacattaccacattgtagaccagatatgtcataatgctagatgagcacgatgagttacaatcaagatctagcttatttggtgtgtgtcagtcgtgtcctggtttgtagactaagatagcggagaagaacgctaggatagcctcgtttgagacgggtggctcaattagtgcacctgtacctactcaatgtacacattgtgagggtttacatttagatattatttcctacaaacacatcaagactcacactaaataagaaaacacatacgtttagtcagtcttgagctaggtgtctactaatgagtcctagttgggcatgatggccaaccaattcatgag

SEQ ID NO: 9310 - DNA, 669 bp, Zea Mays
ccttgtaaatacatccttgcatgcagttgcaccctttgttcacttcagacagccaaaccaccagaccttctaaaataaacctacagactggcaaagcaagaacacattcagtgaaccgatcagctagcagaaacacagtcttcacacaagagccatgaacttctccaaaaagaacaaaacctcgagagcatttcctccaacaaagttgtaccaccagcttgaggagaacactctaaatcactccagaaagcgttgagaaatctcaacattaatttttccaatacttcaattcactactatgtcgcttcctcctccatcgatgctcttgaagctgaaaatccaagaatgcacctcctctagcttcttctccaacatgatttgctcatcttcagatagcaacaccttccatttctgcaaaaacgaaacaacatcacggaggagcacaaaagggttgcatgggaactctttctcgaacatcatcttatttctattacgccataaggcccagaccatgcctgcaagcagaaataaacgaaaaagataagccctcttaggtttcgcttcaatccagaagcagaacatctcttccaccgagctgggaatattgttccttccaaaaacttgcctcaaacaactccacacaaaatatgccaaggagcactgaaagaa

SEQ ID NO: 9311 - DNA, 546 bp, Zea Mays
cccgaccatcttttctgaaatgtgggaactgggtagctcgcctcagagcgaggcacgaagctgtaacaactgaagttgttgtgatattgctccttttcgatagccttcgtctcataagacagctcatggatgttgtagaaacattttgcatttggttccagtccctggctcctcatggcccatataaagatccccaccttgatgatagcttcgggagtaagttgatgaaggtaaatttcaaaggttttcaggacttcgaccagcaatttatccagagggaactaaagccctgccttcataaagcttctgtaaactaccacttcgtcagcttcaggcagagggacattactttcccctccagccctcacaattgagatatcacgaaagtacctccccctcattgcatcaatatgcccttgtttaatagttgatttcccgaagacaacatggcttggtctccagggctgatcttcggcatcttcattcccactttctacatcgaaactttcactatcgctggagttctcagatatcctagccaacatc

SEQ ID NO: 9312 - DNA, 1347 bp, Zea Mays
tgcaggtcctgttgcatgaatcaaaggatggaagataccagatggtgggtcctacgggtgtgctcctaaaacttcaaaaccaaagctgtgtgcaggtcgaggtctcagtccaaaggtaggtagtctcaaattgtagagactacctcctagggaccgggcaaccaattttctttggtatactggtatccagcctcgacacatcgagcctacctcacagggggccaagtaccagggggaagttgatgacgctacacacagcaaggacaaataacatacaagataagttccaggtttacttgattaacggttcttaaaatttgttacaagaccaaaagttattatagccgcctcccagcggaatcctcgccttgtccttgtagattcagctactcagcgtcggcaggatcacgctggaagcgcgcggccaccatctccacgacatcttgtacactctcccgggcggcgtcttctgtggcagatactggaccatcgatcatcggtgccaaggatatggcagggtcgtgactccggaagcacgtcaggacgtattcaaccaccgtccggcagagcttgctgccctctgcctcaaggcgggccccgaggatctgatccaggcgtggaaggcgatcagcggcggagtccagcatcgggagggcatcggagatcgacaccggcagctccgacactgcgatggggctcatccctattggcaccagtgtcgtgcttgcctcgccggcccactcggcaatgtgctgaaccccgacgcggtgctctgcctggagatcttcaagggccttcctggtggcctccatcgcctggggacccggcgccgcctgcgccgcattgaactggtggatctgctcctccagcttcctctctttttcctctgctttgagctcgtgctcggccagcaactcgcctcgcagggtgagcatttcttccctgaaggcgagatctgtctctcgcctagcgaggtccgtctcccgcctgtccaaggactgctccttcgccttaatgttttcctccacgagggcggcgtcgctagccttgccctcgagctcttgctgccatttctgcagcctttccacagccttgacctgctgggcccgctgggcttccagagtctggtccagagcactcagcttggcctggtactttgtcgtgagggcctccctctgggacacggcctcctccctcctggccactttcttctccctctgggacgcctccagctccctggcgcacaccctctggaggtctctcttgtactccttgtggtcccgctcgagttgggaccgatcggaggtgaactatcaggatgctgtcttggtgcgctcagtggcggaa

SEQ ID NO: 9313 - DNA, 828 bp, Zea Mays
accgccttaagtcattgccgacttaagccgattgctctgttagtagggtatagtggtcaccctgagttaagtaagcgtgagcatgtcgcaccgccttaagtcattgccgacttaagccgattgctccgttagtagggtatagtggtcaccccgagttcaagtaagcatgcaggttgacagtgaacaattcgagtgcctttgaagtctttttattgatgatatatttcccagtttacagagtacattgtcgtcccaatagcttttgagatatagctaggggtaaaacttcctgagatgttctatgttccatgagttcccaatttccgtgccgtccatttgagtgagacgatatgatccaggccgagtgacttctgctactatgaatggtccttcccatagaggcgacagtttgtgccgtccctcccccgttagaattcggcggaggacgaggtctcctactgcgaaggatcgatgccttatggccttgtcatgatagcgcctcaaagtttgctgatatcgggccgactgaatcatcgtattcaattgttcttcttctagtacatcgacatcctccagcctagtagccttagcttctgctatgttttcaaagattaaccttggtgccccaaacttgagatcagcaggtagcactgcttccgaaccatagaccatatagaaaggtgtgtttccatgcagagcccgactaggttgagttctcagactccaaacaacatacgacagctctctgatccactttcctgcgaacttttcattcttgtcgaagactttctttctgagtgcttccaatatcatctcgttggctctttc

SEQ ID NO: 9314 - DNA, 725 bp, Zea Mays
gaaggtctaaggctgattttgtcctgagcaaggcccataggagggtagtactagagtggaccaagatgttaatgttccctaatgggtatgcaactaacctgtgtagggggtgaacttatctactatgagagtcctagggatgaagagtcatgactaccacatatggattgaacgaattcttccggcgatggtttgaggctatgtccatgagcatgtatggctagtgcttgcagagttgagctatttcttccaccagctttgtgcaaaggagttatctcggactttgattgcagacttggaaagaatggcacctgcggtattgtgtaagttggagaagatctttccacccagcttcttcaatccgatgcaacatttgattctgcatctctcgtatgaggcacaaatggggggcatgtagggacgttggtgcaatccaattgagaaaatgtctaaagactatccaaaagaagtgtagaactaaatgcaacatcgagacttccattgtagaggcatacatagtggaggaggtgtcaaacttcacaacaactcactatggagacaaactcccgagcgtgcataatccaccctctcattacaatgatggcaaaaataaattgaatctcaaaattttttgagggcaacttgaaagcacaagtggttcgaccaccaagatcttgcgacacaaagagtggtgtcatatcatgctatatctgttgaccaacctt

SEQ ID NO: 9315 - DNA, 567 bp, Zea Mays
aacaaacccatctctgttaaccaaaagtattctccaactatagctctattagtttgttgcagcagtccaagaccaaaaatgcagggatcaaaagttacagtgccccaaacagcttccaaactcactaaatctcctagcaatagtcaactaaatgagtcctctctcaagtgtgacagagaacctttggagacacattactcccacttttatgtagcaccagcctagcactgcttaaataagtttgttctcctagatatggtcttccatttttctgtaaagtcttctgtccaaaattaccaggatttggaacaatagagctccaaacagagcaccaaactgtaaattcaggttttagtgatctgcacaaaaattcagtttgtgcacactaacagtccattttcagtctactttttctccactttttgtgtaagatcatatccatcacccataaagacatttgtacaccaacttatggtattcaattcctctatagaaaccatagttcaaaaccttatggattatgcacaaggaagctccaaagtctgtcacaatcactgaaattcagac

SEQ ID NO: 9316 - DNA, 583 bp, Zea Mays
ggcaaattagcaacaatctgtacacgatctattagcaccatttagcaagattaaatagttaatgggcaaataatttatcaaatatctgattaataattagtcaatttattagccagtttgtttggagatcaagatgctaaaattagcatgcaaactatttgccaaatgaatccaaacagggcggccatagtacatagattcaaccgaagaaaaccccccatcattttcatcacctaaatttcaacggactgaatttggcacaggttttcttgcactccgtcagcctcattgctggctcgacgtagagtcacgagacgccatctcgcgacctagctagcaacttacttaggcatcttgcattcttgcttatcagatgagtctcccatgctactaatcagtaaccaatactggaatgtggccgtcaaagccatacatacacacgaagatgctttgatatacgaatgctgcagtcagccatactgcccccgccaaagtctgaaagcgtaggagccatgtgcgtgcgcgtgattgaattcagggatcagctgtccctctcatcaaagaaaaaggaaagacatcgtat

SEQ ID NO: 9317 - DNA, 610 bp, Zea Mays
caaggatgggccgcaccacgacggcggggagcgtggcggctgccgagggagagagtgagaaagcgaggcggcgcaacgcggtgggaattggatgggacttaggagagggaggtgcttcggagtgactgagtgagcaagacgggagagaggttggggaggggagtgaggtgagagggagaggatacaactttgctcacagaggcatttgactaagggacagggcttcgcttgtcgaggtcctagctcgtcggatggccacgtgctatggctccgctcgccggacctccgctctacctcgcttgccgaggtcctagctcgccggatggccacgtgctacggctccgctcgccggacctccgctctacctgctttgcacgactggatgcaggcaatggggaaagagaaaggatatgtgcgggtgagtcaattgagagtgttgcttgcctgtttcaataatacaagagagagaatgttcacgtgcagcggagagaaaaaaccaaagcagtggacagtggtgcactgtgcgacgtgcgagaagccgagaacaccagtagcgcgggccacgcgtcggccgggcggagagcgtgcgagcgcgaagcgcggagggagc

SEQ ID NO: 9318 - DNA, 347 bp, Zea Mays
agcgattgcctaatctcgatcgcacacaaccgatccaacgacgcaagaaacgccgccctacccgagtcatgaacagcgacaccgctgccccctccacgatggcaccatcaccagcggacggccaaacgacgcaccagcggcccaaacacagatacgagtggtgcagaacgaagctagggacctaaggaattcagcagggtcatcataccggaggattgtgcagcgcagagagccaatccccgacgtgctgcggctccgcggcagatggaagactccggcgaacaattcacgtcgccccgaggctccgcagttcgaattgagggctcttgcagcctcactggttcccg

SEQ ID NO: 9319 - DNA, 439 bp, Zea Mays
tgtggttcatgcatcttgttcatgcattctatcctcacaatatactgctctttaaatatcactcactgttcattacaaaattccctcctacttaaatattcctaaaagcaatgacaactcatgttcatcccctcccacccaaatatttgtatctgcactgaaatactcttatataccatgacaattcatattcatcccctcccaataaaatacatgtatctacaactagttttataacttgataagatattggagacaaacaaaacataccacagttgtcttagataatcggatcaattgtccgtacataagaagagtggagatgtaattagagtggacatggcgttgctaatatgatcgtttgcagcttgcggtcactgtgggggacagatatcccccgggtccactagaaggcaagaaggcctcgcaaaaggctttg

SEQ ID NO: 9320 - DNA, 431 bp, Zea Mays
atagtatttacctgtacaaacatgaaatacaaatgttaaatacttaagacataaattaataccgtattatacaaaagtacaacatatttatataccttccggtggatgggggaacctgtccgcataagttatcaaagtatcttgtaatactcttgtgtcatgtacggatcctagccatcctgtgacaacaaatgtgaacctcatatcgaagtcacaaacggccattacattctgcgatgcgtaaccgtgccagccaatatatttggcttgctccaaggccgggactgtcgctagaaagtgactaccatcaattgctcctatgcaatccttgaagtgtggccaaaacctcgcctctcgcaaacgaggatgaatctcgatgaaatttgggtctttgggcttgattatgtcagatgacatcttatacagtgcat

SEQ ID NO: 9321 - DNA, 743 bp, Zea Mays
gcaaggttcgggcgaaggttgcggaattgcgtgctgagtgcgcagcacgccactatctggatggtggttctcccgcccctatcgggattctgtacccttaccgttcaccgccccgtggtcgtttcgactatggtaccccagactgcaggacccagatagatttggatccttagatcaacagagttggagtctgtaataatgcttagttcagtgtcttagtctagtcagtcttagttagagttattttgcttactttatgttggatgcttgttatgatggacatatactgaagttggatctttgtaatgattgtcaccaaggtgtggatatcccctgcaacttggtgtagttattaataaagtcagttatttagttgggtaatccatttatttccactttcctctttatttgagaagctgtcagtgaagatggtcaattgcttagtgctatgaagattttctatacatctttttatatgctgaaagactgcaaagtcagatttgatatgtgtgtgtgattcctacagatgtctgagaacaggcgcagaggtgcgaggcgtgctcagcatgaacagcaggcaccccaagaggaggcagccccgcaacagcatttgttaccgccaccaccgatgaccattgagcaaatgttcttgatgtagacccaagcagtccaggcaattggtcagaccttagcagctatgcagcaggtgcaacagcagccaccaccgcctcagcctcaagtgc

SEQ ID NO: 9322 - DNA, 331 bp, Zea Mays
cctcgacgttaacctcagcaacaagggcacgacggtagcacgccaagaggtagaggtccccaacaatacatgaagttttattgtgtcttccatggcgaggactcagatcatccaactagggattgccctggagaccaaagaaactaaagagcacatggctagggccacccccgcaaacaatcaatgagccatcactcatacctactaccccaccaatgtcaaccccagcagcaaaattacaatcagagagccccacaacacccacaactgcaataccaacaaatattaccacccccaccccttaagcaaatcaacaagcctgacaactccc

SEQ ID NO: 9323 - DNA, 484 bp, Zea Mays
gagccgatcatcaggtacataaaaaatgaggaggaaccagacgacaaaaatgcagcagaaagaattgcaaggcaatcagctcattataccctcattggggaaacgctgtacagaaggggcgcatcgggagtcctcatgaaatgcattctctcagccacaggaaagcaactgttagaagaggtttatgttgggcaatgcgggatacacgcagcatccaggaccctggttgggaaggtcttcaggtcgggtttctactggccaacagcaaagagtgatgcagccgagttagtccagaagtgtgaagcctgccagtacttgtcaaaacagcaacatctaccagcacaacaactgcaaaccatacctgtaacttggccgttcgcgtgctggggactggatatgattggacctttcaagaaggctcaaggaggatacactcatgtactggttgctatcgataaattcactaaatggatagagttcaaac

SEQ ID NO: 9324 - DNA, 867 bp, Zea Mays
ctctattccattttgttattgacatgctcgtatccttacatttttaatacctttatccctcgatctaaagtacttatccttgtacctttattgcctatttaaacaattcagtttatgtgtccatgaccttcttgtcttctgagatcctttcttattttgttgttaagtcgctatctttcggcaatttatattgcccttggtcttagtatgctcgtatccttggaatcttgcatactcttatattcttacgtatgcttattttcataccccaataactgttcaagacatttcagttaacatgtccttgaccacccctgtttcttaacggtccatgagcgatcattttatgttgcccatccttggtgatctcgttgttcctttataacttctctcgataatgagttcttacttcaaccattctattgcaccctcacctatgttacccttgattgttttctccactttgccactacacgagtcttgccttaactctatcatttgtcatgacttttgttattaacaccttcaccttagacacctctatatcttacttgaggtttatcttataccggcatttaaaatcttctccctttccatctcaatttgagcattgtactttacctactttcccttggtcgtatcctcttctttgtcacctgcgagtttttaacactatcatttgttgtgtttttgtttgttatttcctttacccttctcatcactctatcctgccttgtgattacattatgtctgttatctaaaatcttcagtcttctatctcaatttgagagtggtgttttacttatatcacccttggcaatatcctcttcttcaccgcgtgtaagccttgatgtaactccatttttt

SEQ ID NO: 9325 - DNA, 357 bp, Zea Mays
ggattttgttgagggcctcccccatcgacatcttacaatacattttttgtcgtggtggataggtttgcgaaggtagctcgtttttgacctctaaagcatcgatttgctggtgacaaagttgatcgtttgtttcttgatcatattttcaaactccatgtgattcgtaccaccattgtcttggaccgtgatataatattcttgagcaaattttggcaacatctcttcaagttaggtaccaaattggtctcgaggatgatgtatcaccctcaaactgatggacagtcagaaagagtaaaccagtgccttgaaatgtatcttcagtgtgcaatttcttcctccccaaaagactggtcatct

SEQ ID NO: 9326 - DNA, 407 bp, Zea Mays
caaaaatctgcttaatgggaaccgaagacccgccttcaaaaagcttttgtaaacaaccacctcattttcctcaggagcaagggcggtgctgtctcctccaaccctcacaatagacatgtcacgaaagtatcttcccttcatggcgtcaacatgattttgcttaatagtcgactttctgaagatggtatggcttggtcgccaaggccgatcttcggaatcttcatctccactttccacatcaaagtcatcactgtcatcagaatcttcagataaatccgccattatctcctttgtggtcttctctgtatttgtttttgacatagattcataaaacccagcaataaaagggtccacaaccttcttctcctcggccacctttgtcacctcagacaccttcttctcctcag

SEQ ID NO: 9327 - DNA, 412 bp, Zea Mays
caacattctttccatggcctttggatattcatccacaccgaatttctgcaacactattctagagaaatttggccaatctcccaagtctcccctcaacttcagaatctgcagccatctagctgcatttccctccatgttcatcgacgccgcaggtaccttcattgcatctgggacctgatacatgttgaagtagtcctcacatcgattcaaccaaatcgccggttccttgcctccaaacttggggaaaagcatcttaggtacatgttgttgcaactcccttcctcccggatcctggttcggcatggctcctcttctacctcctgtatccgatgactctggtcccgtgccaacatcctccatctctctcgccatagcttccaacctcatcctggccaacgccttcccattctcc

SEQ ID NO: 9328 - DNA, 288 bp, Zea Mays
gctggctcgggcagagatcacgggtcattcgcattaactccatcgcacgtcagtgtggtcggcccctacatacatcagccgactcgagcccacacacgggccggaggcacgtcatgtcgaaagatctgcacgagaatagagggaaaagatctccatctactaccacagttaaggctccatggtgtacattacttaacacaagttcgctatgcccacctgtcggggctcaacacctacgtatgtgtcccacttggactataaaagggagggcacatgctgtcacaccgg

SEQ ID NO: 9329 - DNA, 567 bp, Zea Mays
cttatttaagaatatagatttctaaataatctagttgtcatgagaatttggatcataatataaagttccagaaagcacgcttacatctaagatctgcttgcacagcagttgaaggacccttgaaatgggctctcaactcgaccgttgtcgagtcatgaaaatagacctatgactcttcacgtgctatcgatctcgccaatggggatgaaggaagagtacaccatttcatgaccgccgccaccgccatatatctgacatcgcagtcacacccggtcctcgcctatgtgctgtcccgcctcctattgttgcttgctctgaggacaccatgctccccgtgggcgccggaaacgaaaaacatctactcgataacacacacaaaaactggaacttgacacaatgttttatgttgcagacaatctacaacatttcagttcttcttcacattttattgtagtgaaacatgcaggaactgaatgcacccgactacccaagcaaaccttgtgtcgtgcacaaatacgtgtccatccccacatcgcacaacgtgttctctcggtcgcaaaatgaaac

SEQ ID NO: 9330 - DNA, 827 bp, Zea Mays
agcgaggctctaaatcattcggtccacggagacagcgcagacaacggaagaacatacatgttcccggtgatctagggcaacttaactcaatcgaacaggtcaagaggcatcaggagaacctaaggatgctgaaacaagagagcagggagcacgaacagacctggagcacgctgaccacggtgagatcactttgcgcggtgctcgagattgatttggaggaaatatgaaattggcgagctcgggtgagcaattggaggcacgacttggtggctttggtgcttgactaccttacggacccgaaggcacgttcaatttataggcttcgggggcagtggcgcgtgaatttggaatggcgcggtggcggccggagaaggagagttgcactagtacgagcgattagtggctttcaccatggcagactcaccgacgacgagctaggactatagagcggtttacggtgactcactgcgacgtggtaaggcgtcgaggcacgtagcctgtccgaataacggcgaactccggtgatgccagcgcgattaaccacagcgggacacggtgaccggtccggccagcgaccggattcaccccgcgctggatattctcaccatgctcgaccttatccatacttcccgtggcacgaatctcccaagtgagcgcgaatcgcaacggcggatcaccaacggcgaagggtgatgaattttgggatctttttcagctactgtacaatggaatcctcattcagagcgcttgacagaccaattcgcagggcctagatctcaaatttttacatgacaacttgttaatctgcatgtaacaaagttgttgcc

SEQ ID NO: 9331 - DNA, 656 bp, Zea Mays
caggtggaaagagccaacggtatgatactggatgcactcagaaagaaggtgttcgataaaagcgagaagcttgccgggaagtgaatcaaggaactaacatatgtggtctggagcctgcgaacccagccaagccgagctctgcatggaaacacactgttcttcatggtgtatgggtcagaggcagtgctaccagccgatctgatctttggggcgcccaggttgacctttgaaagcatagctgaggcagaagcaactaggctagaggacatcgacgtgctggaggaggagcggttaaatatggtaattcagtcggccagataccagcagaccttgaggcgctacctttgacaaagttgcgtggcatcaatccttcacagtgggagacttggtcctccgccgagtactaacgggggagggacgacacaaactgtgaccaccatgggaaggaccatttgtcgttgcagagctcacacggccaggatcctatcggctcactcagatggacggcaccgaagtggggaattcatggaatattgagaacctcaggaaattctacccctagcaatacctcgaaagtctcagggacaagttgtattatgtaggcagaatgtttcatcatcaataaagctttcatcttccaaggcattcaagttctt

SEQ ID NO: 9332 - DNA, 581 bp, Zea Mays
tacacaggtacaccgaagccatcaggggcttcaggagaaggttccatctaagacatgtctgaagcattcataactcggtgtaggacaaagaaaagacgacccaatctcagggtcaaccaggccaataagaagcaagctctcagtagcagccctctcataacatgttctggccacctgctgcaatagggggaaggggaggccgaagcttcagtggcaggttcaatgcacctccaaggaagtcattttgtttgttttgtggtgaggaaaaaggccacacaaaaagaatctttcaccatacaatcaacaagcaaaagagcttgcttcgtcagccagtcaaccttcccagtcgaaggaggtgttcagtacatcttcgtattgttcaccttatgttctacaatatgtccagtcccaatcacaagagccaatgatgcatctaactatggcctcaaatgtttcgagtaaccctgtgatcagcgcatggtcgttgtctgcttccttcatcataggactgcctccctatgatcaggttctcgctggtcacccaagttcctagtgcaagatttgcaataaagggatagaag

SEQ ID NO: 9333 - DNA, 527 bp, Zea Mays
gaaggccagggtagacggtctgcatgaaaattttggctgctataatttcgcgtatcgcaaggatacgaaggctccggttctcagctaccgcaccaaatggccaaccgactagaagagtgaatggttttatatcaaggccgatgagaagaagagggggaaactgatgatgatggtcatgtgcccgctggttttaagcttcggaatgaccagacctttgtgcaacatgcagccagggtcagcatgccagctggccgcagtagaattcagggtggtggctgaacaaatcagcactagggacctggtgcaagaatatgacctggccaacaggacatcttcgacgttgagtgattggagcatgccgaaggtaaagggaacaaagaagaagtatgaacttgttcgattgccttatcgttttaagtttgagaaacagtttaaagagccttgccaagaatggctagagatgattgaaactatgtgcaatgaatttttggggaactataccaaaaaagaagaccaactaatgacag

SEQ ID NO: 9334 - DNA, 304 bp, Zea Mays
ttaccacggtaagacaccccatttaccatggcacgatagctccttccttgagaagatgacgatagccgacccccacctcggcctataaaagggggaggtcgtccagaacacggagagacgcatacacatagaagagacgcacccgagatggaggacacacacactcgatgaaaccagaagacccggaggccggagccaaggcacgagccaccacgatgtccaaggcttagcttagaactccagtcctttattcttcaggtccacccacgcataagagaccagggagctcctccgtctctcaccc

SEQ ID NO: 9335 - DNA, 492 bp, Zea Mays
acacttttgacattaatccacttgtcactccagaaaaaaggtgttagtgccatcaccaatctcagtgacaagaacagaggagaagtaggctttagctttagttggaacctggaaactgaacaggaagatcaacccaaggacgggtaggatcaatccttttcaaccacaaccatctcaccctgagggcccaacagagctcaggaaagctggaaattcccaagccacccaacttcaagggtctacacacttagggaaatcaatagacgtagcagtataaacaaacatcccagtcttgctcgggtacaacatccttaggaaatttggtcttcacagtcttgctcctctacatgatgacacaaacttcttgctgtggtggaagcgaatttcagtgattgtgtcagacatggcaaggaaaggagcgaatttcagtgagcttggatgatctggaagctcagggacagagtggtgtttgatgggatctccctcagtatc

SEQ ID NO: 9336 - DNA, 512 bp, Zea Mays
accaagagcgggaggagatacgtcaagagagaagggcgtaacagtaacagcaacaagcacccctgcctccacctccaccaccagttccacctagggataagcaccgagagtttatgagtcacaaaccaccaaccttctctaactccgcggacccactacaagcagatgactggctaaagtctgtagagaagatgctcaacatagctcagtgctcggacaaagagaaagtgctctacgcatcaggtcgtcttactggtcccgctacggattggtgggatgcgtactgcgccgctcatgctgccatcgacacaattacctgggcagaattctccactcaattcaggaattaccatattcctgctgggctgatgaatattaagagaaaggagtttctatccctcaagcaaggaagtatgtccgtgagtgaatatagggacaagttcattcagctatctcgatatgctcctacggatgttgaggatgatgagcaaaagcaagagctttttctggac

SEQ ID NO: 9337 - DNA, 549 bp, Zea Mays
gttggataatcttgctgatcgcctcaagggaagtgagtgagaaaaatgatactataattatgttagtacaatttatttatcttgactttgctaacttattttgctcattatatttgcagagattagatgtggcgtaaactatttggccgatgaggcgcatgcaagatatgttcaggataaaatggcgacagttgagctgatggaggaggaggaggatgacacatctagattgagttagcttatcgctctcgcagaggcaggattacttgaagaagaagaggacgacacatcaaggttgagtgagctcatcgcactagctgaggcaggattacgtgctcaagaggaagaggatgagtttatgtctcaggccgccgaagaggtagaggcggcttattacaagaataagtttgatgaggctaaggctgaggatgagatattcttccaagctgcagatgaagcagaagccaattattacaagagaactgttgacaagtgtgatgcaggacaatgcagcaagtggaatgaggttgtcgttgaggattgcgcgac

SEQ ID NO: 9338 - DNA, 564 bp, Zea Mays
ctttgttacagatggattaacatgttatcacatacaaattagagaatgaagctctccaaattgtgctgtcagaacttctgatgaggattaccatggtacagtgaccagaaaagatctccggtgccgtgagctcaacgccggtgatctgccaccacaattcacgcctgtctgggagatttgtgccacgggaggagtagataacgtcggggcggggtaaaaatatctggtagggggatgaatccagtcgctagccggaccgaccgccgtgtcccgcagcggacagcgcgctggcatcaccgaagctcgtcgttttttcggccgtgacacgtaataaccacgcctccgcgtcgtatgggtcatggtaagccaccggttattgaccgcagaccagttcccttttgtgtgccacggtgatcaagccactgtgaaaaatcctagccggataaccgtgatctcaatcccaaaattcttgtccagttcgatcgagacatataaattgtggatgccctctactctgcttcttagatacacgcccaacccatccccagctagctcctatcatgc

SEQ ID NO: 9339 - DNA, 860 bp, Zea Mays
ggagaataaagatcttgaagatctaatggcaaacatgtatcttgatgcacaagaggtcagttctgtttctggtagtgatggagatgaaaatgcagtgaaccattagatcagaatcactaaaagatctaggttgtactccttttcctttaaggtttcgtccctatatagttgaaatgaagttttatttaaaggttttaacgaggcacctatgtaacatctctttttaaagcttggtgatccaaacggttgtgaaatttagtccatcacttgttgttactgatctaaactatccttgttgtcttgctgatttgttgttatccagctgttatgaactatgattcctttagtcctgctatggaactgttcttgctgctgtttttctgaaatctgaactatgcaactgttgaatgtattatgggatttcaatctgaatttgattcctgtaattatgttgtttctgaaccatttttatgttgtttatgcattcccggcatctgtcgttctgcgtatgaagcagacactgggtaagcccgtcatggactagcacgacccggtccgctggctcggcccgacccgactaagtggtatagtgcggtgcttggaccaccctaaaggcccacgtgctgacacagcacggcccaccatttaatagtgccgcgcctcgacccgactaattatacacggtccatgacgagctcgggctgtgctagcccagcacggcccattggccacctatacctctctccatcatcttttcttcctctatccttgccgagtaaagaccatcttgatgttgctggaggtgttgaggttcaactttgtactaacctttaaaatcttgactgtacactggaaaccca

SEQ ID NO: 9340 - DNA, 462 bp, Zea Mays
tcctcggtaacagggagacctaggctgtccacctcaacgtcgtgttccgcctgttctccctaggggatctctccgtcagcgagtattgtcgacgtataaggggatggtcgattctcttcgtgattttggcgagcccattcgcgatcgcactctcgtgttgaacattctgcgtggtcttagccttgctacaaccacctgaaggatctcaacaagaggacagtgtcttttccctccttcggcaacgtccgcaacaagcttctcctcgagaagctcaccatggaggctgagtcctccacccctgccatgtctctctacgcctcccccccccccaccgacggggacccctatgcgccctacgaccgcttccaccactagagcccctggctatcgccagcttcgcaagggtggtcgtgggggctctggctccacccggggtgggccttccgagcatggcggcggccc

SEQ ID NO: 9341 - DNA, 415 bp, Zea Mays
taattatcaccgccgacagtcacggtttcgaaatcgcctcttcgtatttgcatgggaaggcttacctcggtttgtcccttccctagtccccaccccactcatgtgttgtgttttttccttttttaagaagtcttcccacaatataggtgcaagagttgtctcagttatttcttcccggacctcagtcatgttggatccatcatcactgtttgtctttttatttatttgtattactaactttactctccctagacaaggaattgtaaaatagcacaatatttttcttttgtacctagagcaatggatccataatggcaccacctcaacatggcatctctagactaactggaccatttatgtttgcattacctggaatgtggattggaaatttggaattgatttttttacatcaaag

SEQ ID NO: 9342 - DNA, 407 bp, Zea Mays
tgaacatgcatggccagcctgccagcctgcgcagaaagccgtaatgagatggtgattgcattgcatgcgcgctgcctgccgtgccgccaccagcacgaatctcgtgcacgcgccgcgcgcgcggcatgaatacggctctagccttttccactgtcgtcaaatgtctacccagcgaggatttccccaaaccatctcctccaccggctaactcattgcacactagcttgcagttcatacgtgtgctctcgaacagtgagcacgcgatcgccatagctcttgaacagtagtatactacagctcagttaaagaacgcagtctatggctgtattagcatggatatacgagccccctgctcgctagcccactgcccattgcttgcatggagcatggtttttcgagccatggcc

SEQ ID NO: 9343 - DNA, 1044 bp, Zea Mays
ttcttacaaccattggattcttaaagggtgccccaactattagcgtgcacggatttaatatctatcataaaaatcgccttattttggtgagcttcctgaccccttgcattggttcactttgtttaaggatgcataaacacaaaagataagatttacacgattatctctgtctgaaatcttactgcagccatttcatagagttctgaatacttcaagcagcaaaggtagaagcgtctctggggtgttggaggtagacttcatcaagcccactcatgacaaacaggactttgagaagtcacagctgttccagaagctgatcaaccgcctgaaggagatgactaacgagtactggtaagttccaggttcttgatatctgttcctcccaatttccaaaacctattagcaccagttcttacttcgcctcaaacatcaccatgtaaatgtctcgattcttcctcagggaactttacagtgacaagattggatacatgaaaaagccacgcgtgagtgcagctcctcttcctcctccagtaatgctgccgatagcaaatggcactgctgaaccatcagataggagcgcacctgctccgacgcaacccttgaggtcgcacagcaactacttgaatgcagttccaatcgcctcagcgccccctggttttcactcagcacctgtcaaagcagagagcgttgcaccaggagcgcatatgggctactccccgtcctcgctaaacgcgcagaccatgcaagtcaacgggataaaatcgccttccatggtgcctgccaccgattcggtagacacaagaaaaaggaggaacgacgacactactactatgacggtcgcgtttaaaaggaaggctacgcaggatttggctggcagcagctgtgctactgatgaggctagtacagacaacattgctgttcgtccttgctactaccttgttgcattggtgcactttgtcgccttgatccttatgcaatctttatgttgcattgatttctctagacaaaacaggtatccgggtatatggggatgggagagcgaga

SEQ ID NO: 9344 - DNA, 731 bp, Zea Mays
caactttccccctccaatatctcactaactagtggatgatatctttcaacccccatacaagagagttagatcaggaagaggagaaggtgttgtgtatagaaatctcagcaagatcgaccatggatttgagactacacacgtgagaagaagggcagatgaaccatggccacgtgttggacacgagctggcactcgagagcacgcccaacctgtgccccctgtcggacaccaccgtgtccaagccacgcccgcacctataaaacctgctttgacccccagtaacactccccgcacatccttgaactcaccccgaatagctagtcaccagaatttcgccattgaacctagctccgccgcccaccgttctccccgacgcacggccaccgtggccagagctcaccgctccaccccagccccaactgagacatccattaaactccttatgccctagaaaagctccccagccattccccgagcttgctaccgcgctagtgccaccgccatcgttcatcggacttggttgctctaccggtgaacgtggaccggcctccatagcccacctcagttcgattccttcggtagatcgcaccaccgccatgcatcctgtaaagatccccaactggtcaaatcgagctctaccaccaccattctgctagaacacatgccaccgttgagctccaccgcctacgcatgcggacggagcgacttcgaccaccggcgtgacccttgcga

SEQ ID NO: 9345 - DNA, 377 bp, Zea Mays
aaggcttctactggcccgctatgatttgcgccgcgaatcgggtgacgaggtcctgcgaagcctgccagaaattttctccacgctcgggaaacctttcgcagttcacatagctcatcgcccacacctggcctcttcaacgctggggcctggacattgttgggccgcttcccacggcccaagggaacctcaagttcacctttgtcgccatcgagtatttcaccaagtggatcgaggcaagagcagtatccacgataacagcgaagaccgcccagaaattcttttggcaaaacattgtctaccgattcggagtcccttccgagctcaccgttgataatggcaaacaattcgactgccaagacttcagggacttcttcttc

SEQ ID NO: 9346 - DNA, 487 bp, Zea Mays
agcacatccagtacactggccatccttttcctcttgggggtcgctgtaagacctttttgtgccttcggcactgtcacttctgccgaagggcttagaacttctaaaattttcgtcccttcgactcttgtctcttcaatattaaccaccttcggctcagctaatttggctgagggtgccttcggcactccagccggctcttcaatcttttgcgtggggggagcaggttctttcgcttcagtagccgaagaggtctcaccgccaaattcaggcactatggccaattcaatatagcgcggtcggtgagtaagaaccttcacctttttcctcttcggcgcgggctcgcttggagcagctgaagcaacatcctttccagaagttgcactctttctcttctgcccccatggcgggtagcggtagtcagggtacataaatccaatagcatcaaaaactctatttagcctcttctttttttcggctcccgaaggcc

SEQ ID NO: 9347 - DNA, 639 bp, Zea Mays
aagatatccctcagcatcataatgacccaaaaaagatggtatagaaaatttaatcttagcataagggtcgtcaggagcacgattgttattaccttgctggcggtgtggcataccttctgtgttttgatgaagacggcgacgtaggcgcaaatctctggtggttgcctcatcataattaccttcttcatcaaacatcgcatcatcgggaagacgtggacgaggaggtggtggtagtggtgcttgttgttgcgtctctaacacagcaagtctatcgacgatctgggacaatcgtcgatccaacctctcgtaagtcttgccaaggttcatgccaatgaaggcatcatgcactgacttgtggaccgtctcctccatttgctccttcaggagcttgttgtttgcctcaagatcttggcggctaacacattcatcgaagtcagtagggatccttgcttcttcttcgtcgcctgccatcaaaacacaaaaacaggaaacaaacggtgatggttatccctaataatttcactacacgctcctctcaggtggaacacaggaacacgctctattgtatcttaccaagctcttacaagtgtctgacgaaatacaagcaaaggatggtacaatcggaggctggttcgtgat

SEQ ID NO: 9348 - DNA, 635 bp, Zea Mays
tgctgtagtgcacagcaatcagcaactcaatatttaacaaactagcagtttgaactaactcagcaagtcactaagtcagcaagcacatactgacaaacatagcaaaatagcagtttcaacttccaagttccactaagtcaacaagaagcaatgtattatattattacaagtttttgcagctaagtaaaatagtaagcagcagcaagcagtttgtaggcgtccacatccaacaagaaaccaagcagctccaggcaccaggctccatcgctccagctcaaatgctcaatcaacaacggtcgattcatgttcgtcctacaaaataataaaacaatgatcgagtcatgttcttcaatgctatcttgattaaggattattgaataagtcacaaattcacaaagcaacaaataaacagtaccgcgtcttcatcttggtcatcaagacaagtcatcaaagcacccacaatagttggaggagaccctgcattgcaaaaaaaactcagaaattggttgtttcatgtactatgcaagaaatcaaagaacatataaaaattagatcacatacctaacatgtcagcacgggaccaagcctgcatacacatgagtgcttccaccattgatggtgcaagcctactacgg

SEQ ID NO: 9349 - DNA, 681 bp, Zea Mays
ggtcgagctacccgcagtattctggagcctactatccacactatccagggtgacaggctgcacatctttattcctggcatttggtgtggaagccgtgttgccctaggaactagaatatggctccccgaggactaaggcttacgatgatgtatgagcaactacagacgcacaactcatcatcgacctgctcgacgaagaatgcgacacggtcgtgattcgctccaccaagtatcaacaagaattgttacgctaccataaccgacaggtgcgtggcagatcatttaacgtcaaagacctgatgttgcaaagggtaatgaccaccaagcacaaacataagctctcatcgcggtgggagggaccttacatcatcgcccagatcatgcgcccgagagcctactgtctcaaggacaacgacagaaacctaatgactaacgcgtggaacatcgagaacctaagaagattttacccatgagtaagcgaactcaatcccctcgtcttcatgatcgagaaagcaaaacatgctgacctaactgcaacgtcctgcttgaggactaggagagaagcaccccaggatgcattgccaagactcggaagatcgaccacgacaaaactcaacattcgcaaaaagaagcaaattcggaaaataaatctccacgatcaagtgctcacccatacaaataa

SEQ ID NO: 9350 - DNA, 337 bp, Zea Mays
tgcgtactcgtgtggccgaggctgcctggctgtcgcgtatttatcgtagtggatgacgcgggggcggcgatggtcctaggcaccatcattccggctatgccgacccatggctttcgtagcctaaggcttagggcagcttgtcgtgtagtgccctgcaggaggtctgcgcactcaggcctagcccgataggccatgagtgcaccgcaaaccgagggacgtgcgagccattaatacgtcgcagtccgggggctcataggtcatgatttctatgcaggccgaggggtacgtatgttatgaatgggaagcgaaccagcgcccacattatggcttggcgcta

SEQ ID NO: 9351 - DNA, 498 bp, Zea Mays
tatggttgctatagcaagattgtagccaaatcatagggcaacaactttgttacaggtagattaacaagttgtcatgtaaaaatttgagatttgggcgctgcaaaccgctttgtcagaacaactgaagcagcccctgatggtatagtaacgaaaagatcttctggtttagtgaacctcgccaccggcgaccccacgctcggattcgcgccaggtgccacgattcatgctcaacggagtacagataactgctcggggtaagaaatattgcattgaggatgaacttaggccactattccgcgctggccgctatgtccgcctgactcacggccagttcagataagctcgccagagttggccgcctgttgattggttgccacgtgcctaggtactgtaccacgtcgcagtaacgtgccttggcgtgtccgttcatcgccggtaaccttgccacggtgaaagccacgcacctcttgcgccagtgctctcccctctctccggccg

SEQ ID NO: 9352 - DNA, 876 bp, Zea Mays
cacgcaaccgctactgacaatgctatttttgtggcggcttcgaccgtggctgccgatgacgattcgtttggctctgtgtctaagtgttttgagtctgatgattctgggagttcgattgcgtggacggaggagtcttcagatgaggacttggattattttgtagcattagatgtggttgcagcggagcattcaccgcgcgcgaaggattctgaggggctcccgggtgcgagtactgggtataggcggcgaagggcggtggcaaaacggagagtgagtggattgtcgcaaagtggtaggcgtcatcgtagtgagatggagagtggtcgtcttcgcgtggatgggactggtaaacgagaattgctgtcctcgccgattggggtgagtgtaggtgaaggagagctgcgaaatctttttgagggtgaggaattgaggatgatgctgttcaactacagggagatgggtatcatcccgaaggttgagccaatgtaatatatgatgccctcgctgtgtgtatgtaaccaaaatttgtatgacaaggctgcgcgccttcattgatccggccacacccgtaggcgacttctgcacggtgtcttttgtgaaagactttgccctttacgtacttattgtgctgttccggctgcacccttaggctactcttgtacggagagttttttggaaaaggcttcgattttgcgcacttattattccggctgcacccttaggcgacttttgcacggagagtcttttacaaagacttcgataatcgcacttgatgtgttgttccggctgcacccttaggcgacttttgggagagtcttttacaaagacttcgataatcgcacttgttgtgctgttccggctgcacccttaggcgac

SEQ ID NO: 9353 - DNA, 363 bp, Zea Mays
cgggagtagtgctcggtgagttccttgttgaatttactcccgctaccgtacttttcgattctggagcatcccactctttcatagccactagttttgtggagaaacatggcattccctctactcctctagggattcccttggtcacctgaaccccagggtccgaccttctatgccagctcaaatgctcccaagtcagaatccatttaagtggggtagtattcttggcagacttaaccgtcttgccatccaaaggaattgatgtgatcttagcgatggattggttaactaaacacaaaggtatcatcagttgcgcagacaagacagtcctcctcacagaccaccaaggaaagtcagtctcttgtc

SEQ ID NO: 9354 - DNA, 650 bp, Zea Mays
gacagggatgctaaaacagaagataggagggcatgatcagacctgtgaagagctgaccgcggcgagctcacacagcacgatgttcttgaccaatttgggggaagtctcaaattggggagttgtagtggatgattcgaggtgagagctggttcactggatgcacaactacctagcggagctgatggcacgctcaatttataggattcatgaaggattcactggatgcacaatttttggagaagacgcgcggtggcaggagaggggaaagagcactggcacaaaggattcgtggcattcaccatggcaagcttaccggcgacgacccagctatctaaagcggcttagtgtgacgtggtaaatggcctgaggcgtggtgcaaccatggtgaagggtgcaaactccggtgacggccgcttggccacatcgccggcgcaagtgggcacgacataggacggaacagtgcttcaagctcatccgcggtgaagatcttttcaccccgaggcattatctgggcaatagtgggcacgaatcgcatcgccggcgttaatcatagtgtaaggtcaccaacagcgatattctctacacctgaagatcttttgctattgtaccatgagaaatccaattcagagcctctgtccgacgaacttgca

SEQ ID NO: 9355 - DNA, 320 bp, Zea Mays
accgtagaattttgatccgagggctggggcgaacacgcgtcatggtgaactcctggtcttggatccctgatcgcacggtcaaaatagtgtaccgtttcgtgtatgggaaatctaatcttgaccaccgattactgatcgtgtggtcgtgatcccgcgatccctctgcgcccagacctttttgcatatgagtctctagattatttcagaatgaacccgccgtccctgtcaactattcactgtgtcttggcgatcttgcgggatagcccctgcgttttctggaaaatgaggcctagtccagaaatcgtttaaattgaataaat

SEQ ID NO: 9356 - DNA, 1392 bp, Zea Mays
tcttctggtcaacattgagatccgggcaatacctgcccatctttgggggatcgagatggcggaacacctgctcaacggccattgcttaattcaaggtcttcttcccggccatgaggttcctgtcgacctgtccgtgctcaaattgactgcatggtgtgccaagccagatgatattcctgcttctattggtcttcatgtggaagaaccgccggtcgctgttgttgatgcctcctcatctcctcagacgttagtttatcccatctcagtgaccgtttctcgcggtggatccgccgatgttgggcccgcctatgtcaccgtcgttgaacaactccgatgaggaccttgagtgggatcctaactggcggcgtaggcattggttcacttgtccatctttctttgtttgggcactggtgcatgcgcggcttaggcccaggacccatgtatctacgactaatggcggaccagttgatgccttggctcctccgatcgcctcggatgttgagctggtggcgcctgggttctcgccccctcggctgatgctgctccggttgtggtaattgattccactctcaccgcctcgtttcccgccctgccccacgcttttaaggcaccagaagtttgggggcctttgggagatttattggaagcagtcgtttctccgactaatggcggaccagttgatgccctagctcctccgatcgcctcatatgttgagctggtggcgcctgagttctcgcccccatcggctgttgctgctctggtgatggcaattgattccactcccaccccctcgattcctgccctgccccatcggctgttgctgctctgatgacccctcgggtgccgctacgacatctgcagttatgtcaccagattttttgaattgtgacatcctggcatgttctttaactgttgctacagtaatggcgccattcatttcgttcataactcctacaccggttcatgctgcggttgaggtccatgcctcagttaagtctgcatggttccaggctcctggtgtttcttctaatgcattggtcgagcacttgttgggaaatttgaccgtgtcagctcaggacttcggaatgcctcagattgagaagtgcgttgatggtttgggtgctgtgggtgcagtggttcttcactccccagcattaccttctgttcaggtctcccgatctggatctagcaaaatactgaaagtctatcacagaaggattcggcccaagcttcagcttcaggaggttaatacctgtgacatagctaacaactttatcgagatggtcaccaaacccctatcaactattttgtcgacaccagcatctcctaagccgaagaccagaaagaatatttcaccaaattttgttccaagaagatccaggcgtgtggcca

SEQ ID NO: 9357 - DNA, 897 bp, Zea Mays
atactattctatactattttatagatgcatgaagaagtataaggtactaatgccttagcttaaatgttgcatgatagagaaaaagattgtgaaaacgaaaaggtcagaaagaagttcacgcatatgttagaggaccagaaaacaacattgtatcatattgtaagtaggggctcaagtagttgcattgcgcattgcaattgttgtaatggaaggtagcaaatggtatgtctcataagggctttcatgatctattaaactcatgaaaagatgtttctgaagggtaacaaatttcccactacaacatacaaagcaaatgatgttatttgccttgtagatttggaagtgcaaaatatacatgaatgtcctaatgattgtatcctatatcaaggtgagtattacgagaaattggaagcatgtgtggtatgcaaagcatcatgatataagataagacatgatgaccctagtgatgttaatgggggaacctagaagagagcgatccattgctaaggtcatgtgatactccctataataccaagtttgaagcatttgttttgaaacaaataacatggaaaatgatgatgtggcaccaaaaagaacttaaggatgatgatatgttgaggcaccccactgatgggtcctagtggagaaaagttgagagaatgtacctagctagagttgtagaggatgcgaggaacataaggtttggtttaagcatggatgacatgaatccttttaatgaaatgagtagtagtcagagcacatcatggcatgtgactagctttatgtatgtataacctaccttcctgtctatgcttgaagcagaagtttattacgatgctagggcttatataaggcacagtgcaaccttgcaacaatattcatgtgtacctaaatcca

SEQ ID NO: 9358 - DNA, 627 bp, Zea Mays
ttcaaccatggagtatgtgaaggaggctccacgtgtgatgccagttatagaggcatagagccattggttagttcctgggctctggtggatgaatgaataagagcacaacagctgcaggtaggctgaactgaggaacatgttagttctagaattctgatctcaagctactgaactactagaatggaaagtgtggtgtagaattctgcaataccatcatcatatcctggctatcggtgggtaggaggctggcaacggacctctacatagcgagtactccagtgtggtcttgtattgattctgtctatagatcaaactctattttctggaaaggcctggcacccttttttctacagcaacaccttagaagactctttgccgtgctcgggagaaagacaagatgccctgtcattggcatttctacaattatatctgcatgaggggatataggaaacactttgctcatctaccatctctattattatgcttgtgatgtactgcctatactatgctaacatgacatggccaagctatcatccttcccttgttccctctgacatgcgacaacccatcccatggtcaattctgtgcttgcttgattatttgagataaaataaatttggctgaaaa

SEQ ID NO: 9359 - DNA, 402 bp, Zea Mays
tagctctgttaagtcatcgcgaagccaaagcatccgctgctacctccgattagccaccagagagctccaatttctttctctctccaaatcagttttccgcacccgtgaacacctcgtcgtggccagacgcctataggttagttcaagcatccttgcttgatgttctagcctccattaagtcccctgctactcgtagacctgtttaattgagctagactgccctggatcgccaagaacatgtcgaattgttctcggtttccgccgtcatcgtggacagaaagattctgacctggattagtgcaattgatggaggggaaatggtcattaggagtagaatttaatgccatccacaccggagcaccggtcattgcgtatcttggcaggtacaggctcgccggagcc

SEQ ID NO: 9360 - DNA, 532 bp, Zea Mays
gcaagctgccggcaacatgatgtcgctggtacctgcagaggtctgcttctatcttcggtaggccaacacttttggagagggttctaacaattttggcctcggtgcgattccgaaggcatcttagcttcccttcgttgaccccaccaaatagcatagcccctgatttatatccgcaagatatggcatattttttcaattcttctttttcggcgtctgttaactcttgtccaagcaaatcttgaaagttaaaatctccttcctctgaaatttcatcaatctgctctttccccttttcagttgccgtgttcaccgcagccacagcagctttttcttcagccattttcagaagtatattatcaataacctcaagtgtggtttccaggttcgaatcttcggtggtcccggcttcggccccggtagcttcggcttcgccggtttcagcttcagtggtttccactccggtagcttcggctgcggcgccttcggcttcagtagtctcggcaaagacattttttgacaccgtcgccggtgg

SEQ ID NO: 9361 - DNA, 615 bp, Zea Mays
cgcgatggtacagtgtactgatcagatcgccagctcagagacctcaccgccagcgaccacgcacgcggattcgtgctatcaccatgattcacgcccgaattaaacgcgtatagcgatcacggggtgaaagatcttgtcgcggatgagctgggatgtattgtgtgcttgatggttcatcattgcacaccggcgacgtggccgagcggctatcaccggcgtgttcgccattcactgtgacggcgccacgtcttaggaagtttatcgcgtcggtatgagtcgtagtgaccatccagtgaccgtcgtagttcagtcgctctgcgattgccacggtagatcgccgtcgtgactcattcccctctcggtcgctagcacaattcgtccaaatcaaacatcaccgctcaagcacactacaaattgagcacaccgacgggtccgtagggtaatcaagcactgatccaccaagccgtgcctccaattactcaccagcaagccccaatttcggatttcccccaattcggtccaaaatcccgcaccttacaacctcgccgtggtcatcctactccatgtcggcgcatgccctctgctctttcgttccagtgtccttgtgtttccctg

SEQ ID NO: 9362 - DNA, 411 bp, Zea Mays
ttaaattttaaccataatttagcaggagatagagccccaccttcttgtcattccatctctgtaatctcttcgctgtctctttaagtttcatgcctagggtcaggaaagggcaaccaaccggttggacagaagaccaagcatcttggacaacctcctgaaaccctccaatttggtccaaaataaatgttaggagctattacatattcgattttcgggtctagctagcatacttcaagttgatttttcatcttcaactcttatgtttaaagctttgcaacacggatcttcatgactcaatcttcttagacaatttccgactttagcttatatcctagacccgaaacttactccattcatcacattttattaggtcttatgagcttgttgttgctttacatttccatgtaggtt

SEQ ID NO: 9363 - DNA, 522 bp, Zea Mays
ctgctgtggatttggtgagccgactggaaatgatccttagaggcaacgtatcaaatattggtgctcctgttgcctattctacttggaatctgccaccttccatgtcctttttcgattttgtgttcaatcctcttgctagtaacagtggtttgggtcttagagtgcgaccctctctcgaagaagttgaggttctggttgcttctcttcccaatgatgaaaggcaagttcactttgagatgcctatgagtccaagtgatgcagagataagtgctatgctggacatgttggctgaggattcatctgactcggtccctattgaaacaatgactgtcgcgaccatcccagagcctaaaaaaccgtggatactcgaaggcctaagggtactcgcccgaaacgtcttcgccaagtcagtcatccagctgctcctgccgaggggaagaaaaataaaaagagacggcttcggcgagtgtcgtgcttggatcatgatgctggcccttcttctcctgctgctgaagaagtgcc

SEQ ID NO: 9364 - DNA, 351 bp, Zea Mays
ttatgatcattgatatcttgtctaccaagtcctctaattttccaacaataaccatcaatctatcaaacatctcttgtggcccctcattttccaatatgacaaaccgattgagcttggccattaagagatcaatcttggattgtctaactttgtcaactccttcatgaggatcgtgtagagtatcccaaatatcttttgctatttccatcccaatcactttgttgtactcatctacactaagtgcactcaacatgatactagtggcttgagcatttagatggatccttcagtactcaagagttggattactaggatcttgtggttcttccttcccacttctcacaattccca

SEQ ID NO: 9365 - DNA, 430 bp, Zea Mays
gtcataataggggagccgagtcaagccctacttatgtgtccacatatgctgctcaccatatcccacaaaaccacctgctggattggacacgagcccctctatctattgacgaatttcagcaccagtcatcgttccaagtgggcggtctgtcactacgacaccttccataaagttcttgatgtataggcggaatggatgatcgggagggagaaattgtcgatgtttatcgaacaatgaatatttgccatccatctttaaccaaatgaacctaagagcttccttgcaaactgggcatgggaacttaccatgaacacaccaggcgtagaatagcctatacgccggtaagtcatgcatggagtattggtaccaaacaagcattttgaagtttgtcttcgtaactcagtcatacgtccataccccttcctcccaa

SEQ ID NO: 9366 - DNA, 442 bp, Zea Mays
cagggttatttttttgacaatggggcataatagaagacccacgggcaaaggcagcaaaagccagccaacaagcgaccagaaataaaggctacactaggcatcctaaacaataacgagcgcactcgatagagaaggaagcaacctaacgcgcaacagaagcaccacgccgtgtccagatatcacttagtacataacagcactcctgaggaggcaaatggaacacacccgacgaatagcaaagaaaatggacagctggctaaagaatagaccaccagccaaggaccacatctagcaggtgatagggggctaactcccagaaattcgatgatccaccggtctccagccgaacgcccgacacaaaacgtcacttgtcatccttctgataagcttgcttccttgttccaccatcctttttccttcttttttctgtcggagggccaag

SEQ ID NO: 9367 - DNA, 321 bp, Zea Mays
gtttgaacaactaaaatatctggagggttacttggacacaaaattagttaggcggttgtctggacaatgttccagaggaggatgcaaatttcattggttctctaattcatataccaactttccagaataatacaaagaaggcagtgcatcaaattagcagccctaaaaaacactaccgttgtgccattaaactgcctcatggaagtttaaataaacttagtgttggagcttggtactttatcttattagtagtagtcttgttagttgttactattgttttgtatagtgttgtatgccactataggattactgatatggttg

SEQ ID NO: 9368 - DNA, 760 bp, Zea Mays
gaaatgctgtgttataccaatactcagccaaggacagccactgaatccattttgacgggcaagcatggacaaaactccgaaggaaggtctccaaacattgattaacgcgttcagtctgcccatccgtttgagggtggtaagatgaactcatccgtagagtagtaccagccaaccgaaacagctcttgccaaagtttactagtaaaaatccgatccctgtccgacacaatggaatgtggcagtccatggagccgataaacggaatccacaaataattgagccaccttaagagcagtaaatggatgcgacaatggaataaaatgagcatatttggagaacaaatcaaccaccaccagcacagtattagcaccaccagagcgaggaagaccctctataaaatccatactgacaatctgccaagcatgttcaggtaccggcaaaggctgcaaaagtccaggataacgactcctgtccggcttagcttgatggcagactgaacaattcatgacataaaacttgatttgatttttcattccagcccaggcaaacaactgtttgatacggcgatatgtcactggaaaacccgaatgtccgcccattggaccatcatgtaaggctctaatcacttggagttgcaaggtctcattagcccccagccagactcgacctttgtacctcaaaatgccttgagacaaggtaaaattaccctgagaattcctagttactgacagttcagacaacaactgttgtgcatgtgcatc

SEQ ID NO: 9369 - DNA, 669 bp, Zea Mays
ccgagcgcaggagcacgctcatggcttgacggtcatgcgccctcttggggttgatccctggactgatcacatcccagatctccagcgcctcaaagttacactgcattaacatcgcccactcggagtaattatcacgagtgaggagtggccacatcagtgaactctccttcacgccgccaccggaacctgatgcttgattcatggtgttcaacggttgtcgtcgagggagaacgcgcttcttcttcgctggttcttgaggagggctcaccgatccgtcgtattgcatacaacctcggctctgataccagaatgttggaccggatcgacggcgaacaacgcaaagaactcagtgtagcgcagtgtcgccggagcgcgatcaccacgtctgaacggaagagaggacacagttgtattttctgttgccgcaactgcgcaaccatgcaaatgcattcaactaggaattaaaacacccggatccgtcttccccgttgcacttagctactgcaagacgtgccgtaatttcagcaacgtccgcgacatgcacggcgagctaagtcgcagcggaaaaaacgccctttgaagcggtcacggcgaggactgagtgcactcttcagtccgcccatgattctacgccgaattacaaatatgcacgcgcaatctaaaacaaac

SEQ ID NO: 9370 - DNA, 415 bp, Zea Mays
tttgcacagaaaaacagttgtacctaggaattaggggtacttacctggattaatggacatgtttttgcagccttgctgcacgttcccagcttcttaccttcagcccttcaccaaacataacagaagaggtggaggagcagcagaaaaatagcaaaggagggagagggaagaacgcctggaatactggattattgggggaagagaagggctgtgctgacctggacgattggggaagagcctaagaggacaatccggcaggcggcaacaacagacttggataaagtggaaatgcagcagctcccgcttttttccctcctctgtcctctccacagcagctcccaccacttttccctactctcaaatgcagcagcagctcccgagcagataaagtggaaatcccgccactttatttccc

SEQ ID NO: 9371 - DNA, 459 bp, Zea Mays
ctgagctgcggctccatctctttggctttgatggcttcggtgccgcctccaatggtgaccgctggcccggctgctgaagacgccacccgggaggtcgtacaagatgtcgcggagatggcggtcgcgcgcttccagcgtgaccctactgatgtcgagtaggtcatacctgtagacataaggctagggtctcgcttgaaggcggatgtaataactttgtttttgtaagatacttttgggaactatcaattaaatagctcttatctgtatgatgcttgttcttgttgtgtgtggcgttgtcgactcctccttggtacttggcccccctaggatgtaggctccacgtgtcgaggctggataccaacatacctaaaagagttggcaatggcccccagggggcagcctcgactgggacctagacctgaacacagcttcggctagggagcgttagtagcacaccca

SEQ ID NO: 9372 - DNA, 564 bp, Zea Mays
gcttaccaattttgtcgcgcgtccgcctccttccgtggctcgtcgtctgcgcacctgcatcaccggtatggagtacctgcgccgttccgcccatattccaatttcattttgcacttggtagttgacgtagtctctggagctttgcggcgtggtgctctggcgggccatcaccgtcgctcacgggcggcgccgccgtgctcaatccgtggggggaagacgctctctgggtcgtccatctcggatgtgtggctgcgattagagctaggataatccttcggtgcttgtgatcctaaccgttggtaagagatccagtggtagatattcgatcatcgcggcgggtattgcgggttgtacgatttaaatccagcggccatcgcgcgctcactggttagctcagctaagtgatttgatctcggccgtggagatctgattgggcggctaagatccgtgggtaccccttcgtgggtactatttgttaaagagccctcggatttttattaaaataacccgccgtccataggaatagtgcgatgagtctgggaaattctttcgcgttagcccctg

SEQ ID NO: 9373 - DNA, 744 bp, Zea Mays
ttactactgtatcaaaacgcagtacccacatggttatctctaaatcgtgtgctaaggaacttcagcaacgggtctggacccccatgggcaggtcccaaacccccatgcacgcagtctagacaccctgtaaggtccatgacctctacgtatataaatcggacccccgagtagggatctggagccccccatatggggttcaagtcgccaacagcggctcccggtgctctagggcagaacattcccccagactctactctggacccaagcaggggtctggtgacaccacgtgtccgctggaagcatggtgcaaaccttcgcatggaagcaaagcctcagcccgcattagatgcaaggcggccacgatgtactccgaacgagcgcacactgctaggcttgtgacatgcctctgtgaccaccacacacgttaccgaggcgcactgtagcatggtagcgccacacacgttaaatgactacttagagcttggcgtgttaccaaggccgctatgccacacgtgcatggaagctaccatcatgaagcgtggttcgatcgggtattgagtccgctacagtgaccggccggacatgataatgcaggtgactgcacacgcacctatgcacgtcagcatgcatgtctacgctgcaatctataccagagtctccactcgtacgctaacgagatggggcgaaggagaagctagtctagaaatctgcacgacgaccaagagaagaactttatttgtcaac

SEQ ID NO: 9374 - DNA, 667 bp, Zea Mays
gcaaactgtgttatacgcagctggcatgcttctacgtcatttccaagagcaagagacagcctcttgatgccgaagcgagactagatagggcattggatgataccattaatatcttctctttcgaccaggtcattttttacataaaaccactcttgcatccaggaccctggccacctcttccgaaacgttggaactggataactcacaccggagcgaggcatgaagctatagcaaccaaaattattatgatattgttctttgcgagtggccttcgtctcgtatgacagttcgtgaatattgcaaaaacatcttgcatttggttctaacccctggctcctcatgacgcaaataaaaatccccattgtgataatagcttcggggtgatttggtggaggaatattccaaaagtcttcaaaacttcaactaacagtttatctaaagggaaccaaagccccgtcgtcatgaaacttctgtaaacaactacttcgtcagcttcgggcaaaggggcactgctatctcccccagcccttacaatagaaatatcccagaaataccttcctttcattgcatcaatttggctttgtttgatggttgatttcccgaagatagtatgacttggtcgccagggtcgatcttcggcaccttcgtttccactttctatgtcaaa

SEQ ID NO: 9375 - DNA, 693 bp, Zea Mays
gtagagatggggggataaaagtgggcgaggatcagcagaggagagagagaatacaaagaccagatgtcaacaaatctgcctgtccttgcacgtagtttagatacaaggtctcgttccattcccttcctcagaggagagagagagagagcaaaagagagaggcagtaggcaacgcccccacagaggcagagagaaagccagaggcagtagtaggcagagcacataaccaaacaacacccatccaaaaaccccaaaaggaagagagaaaggagtgagaaaaccacgcagtcgtttgtccagacaaaacaagaacaagaacccagcagcagtacgcacttcctcctcctcctcctcctctctctctcgctctctctcctcttgctctcgctccctctcgctcccccagtccgcctccctggcccatcagatccaattccttccccgacccccatcccggatccgccgcaattcctccgtgcgtcgagctcgattgctccccgcccgtggaatttgctcctttctcccgcaagaatcccacctcggccggcgacttggggggacctgccaaggtttgggcgcgcgctcctgcttggcgtagcgggccatgggcgtgctgttgccagctaggctgttcgtgcgccggatgctcagggttgtcaggctcaacccgttgcagcgcagcgccaagagtgga

SEQ ID NO: 9376 - DNA, 483 bp, Zea Mays
gtcaggttggtttcaagaaaacctgagggttcttccgcaagtttgtcgcgaccgaaggggtatgccgaattcagggtcgtccgatctatcccttgcggtctagattagactatgaagaggtatgagatctcagccctcatatctaaatcccatggaacagatccaacctacgaaaaggtaagcagcgttttaatcccaaccatcggatccagccctacggtccagattacaccagcacgtaaaagggaacggcgagcgtttttggccctcggatcgtcgatccatggtccaagattctttcgcccccgatcaatccaggtcatccatatatggattgacggccaggaggtagtggtggttgttgttgtctttccaaccgttcttgcctcatttcttgacgcatctcaagtcgttcctgacgtatttcctggcgttcttgccttatctgattttgcatttcgttcattgtgtttgtcatttgtt

SEQ ID NO: 9377 - DNA, 1313 bp, Zea Mays
gtagaaggaccaacgtcttgatccaggcacgacagtcgtcgaagacgcctctttttcttcttctccttgataggagcagtctggtggttcactcggcatgaacgctttgggcgggcactttcaggtttctggatctccacctctttgccaaattcttgtccagtcgtgatggccattggctcagtgcgggtagagtcagacgattccccggccagcaggctaagcacggcgtccatctcatcatcatcggtgctagctggcatttcaaagtgagtttgcctctcagccttgggaagactccaaagtggagcaatcaaggcctcaatgtcctcgagagagggtcgcactctatgacccgggctaccatcacgagcaggagggttggagacaaattcagagaatgacctatttggtggcaggttccatgcagaataagctacaggagcaccagcattcgagactctacccctcagaatctttctgtttgtaacccgggtagaaccactgatgctggtatataagtaagcggggtaaattctgtccttcaaaggttgaatgttttttaagacgaaatcaacaaccacaacttgagcggtcagacccccatccttcagcaagcagatctcatcaagtagagccttagcctcggttatctctggaaaggtgggagattctatccagcaaggtgtgcgaacatttggttgcctctctgaccgagggggagagatttgcaatgattttccatgatgaaccactcaagacaccatcctttaatactgtccttgagggcaatatcaagatactccactttcctcccctggcgaagctctaaacttgcgccgccaacaagctgatgctgcccccagccatcccgggccgacagtgataaagatactttcagagtccgaagtgggggagaatcccaagaaaagcctcgcacagatgtacgaaaatggcaacttgtagaattgagttagggttcagaagggtcaaatttaactcataaaaatcaaggaggccgcgaaaaaggggagatgggaagagcaagcccacacatgagaaatggaacgtaaacaacagattcatgagtatcctttgtcggaacagtgacatcgcggcagatccaccaagaacaaagctcttttggaagcaaaaccgcaatctcaacaatatggagaaggtcggattcagagatgacaaaaatgtggttaccagcgaatggaagctggctgttggggtcgatgggcgagatgattgcagcagcggtgctctgcctcttccgcttcggagccatcgcgattttttgggcaaga

SEQ ID NO: 9378 - DNA, 315 bp, Zea Mays
atcgcgaagactatccgcgcagaagtcgcctaagggtgcagccggactagcacaacaagtgcgaaaaaacccgaagtccaccgcgaagaccatccacgcagaagccgcctaaaggcacagccgaactagtacaacaaaagtagaaacgacagcatcaaaccgtccacgctaagaccaactataatcacaccagcacagcataacaaaacataccagacaaaatacacaacgccttcgcaggcacaggcaagcgagggcactcgacttcatcatacaagcctttacacttatacacgcgaaggcgccacactctac

SEQ ID NO: 9379 - DNA, 518 bp, Zea Mays
gtgatcgatgagcaagggggtacggtgaaccttatctgcgcctgcgcccgaactaatccagtgccgagatttcaatccatcgtgatcttacccgcgaacacgaatcacagcgacggcatgaatcacggcggagatcatcggcggcgaaaaaaaactgagctggcggcatgatccatttcggatcactgtaccatggcgaagcccattcagtcagtctgtcagtctataattagggtgaattttctctcaattttatgtagtaacatgattgtcactctttagaaaagttatagctctaggatccagccataatcttggtatagcaaccctaggcaaattcttgctcgatcatacttgaattcgtgcccaaagttcttgcagttgcactgttggtctgaaattcagacaccaaacagcctgacagcccaacttgggtgcatttttctccaatttcttcataacaaccatgcttactatcttaagcaaagttattctcctttgataggtctacaatgttg

SEQ ID NO: 9380 - DNA, 380 bp, Zea Mays
gtggagcactactatctcctttggggcatctgactgccccgaaaacattgcaggggctggcatactaccgctcatcaccgcccctgtcatcgccaacatgaagctgcatcatgtgctgattgatggtggggcagggctcaacgtcatcagccacgctgcgttcaagtagctgtagatcctagggtcccgactgggaccctctcgcccattctctggagtgggccctcaaccggtgtatccccttgggagcatcacactcccggttacattcgggaccgaggagaactttcgcactgagaacgtccaattcgacgttgcggaggttaacctccctttcaatgccatcattggcaggctagcttgtaccggttcatggccat

SEQ ID NO: 9381 - DNA, 515 bp, Zea Mays
cccttggttttgctgaggccaagtcgcacacatatttgttcatctaccagtgtgttagtgacactgtgtacctcctattttatgttgatgacatcgtgttcattgccttctcttcgggcctcctacaccggatcatcaccgcccttcaacatgggttgaccatgaaggatttgactcatcttcaccactttctggggattgttgttgagcgtcgctctgggcctatttctccagcagcaacagtataccctagatatcctcgagcgtgctggcatgctagattgcaagccctgtttgaccccggtggacacgcatgccaagctctctggtgactgtgctcctatgagtgaccccactgtctaccgcaactttatcgacactcttcagtatctcaccttcaccaggcccaacatcatgcatgttgtccaatagatctgtctctacattcatgatccctgtgattcacactggagcgtgatgaagcggatccttcggtaccttcagggtattgttaa

SEQ ID NO: 9382 - DNA, 579 bp, Zea Mays
ttacaagtgatgagcttcttggagcttattccaaggcagaagataatgcactatctgcagccttcggaggtcgaggaaaaaagagaataaacagagttttcgacgccatcggcttcgtataccctgactaccgctacccgccgcggggacaagggaaaaagaggaaaacttctgcttcggacagcccagataggcccatgccgaagggcaaaaattgaaggttcttacccaccggccgcgttacattgaatcggtcgtggttcctgagtttggcgcagggacatcttctgcttccaaaagaaaagaaactgcttcaactacacagagtactaaagagctggctgtaatgctgaaggtgcctacggccaaggaagttgaaacgaaggttgataaggttgatgagccagaaattgaagaaataacgaaaatgccagatattttgagcgctccaacaagggcgacggtaccaaaggtacaaacgggttctatcgtgactcctaaaaggagaaggatggtaaatgtattagatgtattggaaacaaccgactccataagtcccgctcccacagggaaggttgc

SEQ ID NO: 9383 - DNA, 314 bp, Zea Mays
ctttcttgaggatgtctcaagcagcgcttcgacggagcatgacctagactctgacgaggtggaagaaagagtctacttcatggcctcaccgccacgaggcaacaacgagggggcagactcgggatccccctccaggaggaggaataccagcgccagtgtcaggcacgtatcctcgcccgtgaagccaccctccgtcagcagcaggacgagcttgacgcgctcgtccagaggctcgaccgagtttacagaaacatcgagcaaagatgcctcaaggctgaacagcctcaggcaaaaaagatctacgaccaaatcac

SEQ ID NO: 9384 - DNA, 333 bp, Zea Mays
tggtctgcagttgctatgctggtaaatgttgttgttttgacaagtactggcaagctttgcacctctgaactaattcggctgcatcactcttcgctgttggccaatagaatcctgacctgaagaccttcccgactagtgtcttggatgctgcgtgtattccacactgcccagcatggacctcatccagaagttgcttcccagtagatgagaggatgcacttcatgaggacgcctgatgcaccctttctatataatgtttccccaatgagtgtgtagtgagctgactgtctggcaatacgctcgaccgcatttttgtcatccggttcctcttcat

SEQ ID NO: 9385 - DNA, 491 bp, Zea Mays
caactcacaggctcgatcgcggttacattagagagctctggccacggcaagatgcctcatggcggcgagggtgatcgatttgggggaaattctgaattctctggctatggtgggtggattgaggtgagcagtggtgcactgagcacgtaacaagagggcagaatagagagggcactcaatttatagaggccagctacgggtgctatgaattttggacgaagatgggttcacgatggtgaagaggtgagtcaccagagcttgtctaccgtgccgctcaatggggtaagggctcgaagcagtaattggttgtccaccacgacttactatgacatggtacgatggcgtatggcgtggcacgatcagagtaaatggcggtcatgacggcggtggtcgtgcgaccatgtcgccggcaagtgggtacggccagactggctcaatccactccccctcacatcttttcatcctcgcggtaacatctcacccaaattgag

SEQ ID NO: 9386 - DNA, 502 bp, Zea Mays
cgctcatttcctccatctacatccgcctgtcttttcctcccccaacagcgcatcagcgaattcatcaaagccactatgagcccacgacctcgagtacctactgcgacaaagctccaccgtaacctcggaccactggccaggaggacgatgtgacctcgacccttagcgttgttgtgaccccgacgttgtctagagccgcgatctcgaaccaccgtcttggaggttggcatggcctcgacccgattgctgcaacaaccacgacttgccatccactatcgcgacctcagaccaccgtcctggaaggtgacaacctcaacccgcagcactaccgtgactccaacttgtcgtctagatctccattgtgaccacgaccagcataccacatcgtcgtcgtccagctatggttcctcgtctcacctccttgcttcatcgtcgtctccggtccacttctcctgtttgatcgttattgttcttcgccatgtctgcaaaaattaccgctttt

SEQ ID NO: 9387 - DNA, 507 bp, Zea Mays
tgctaaaaagcttgtccacggtgagagtctcatagttgggtgactcaatgatcgctgataccttgaactcccaaaccctccgatctagaacatgtagcaatttcagcactctctcatgatcatcatagggaacttgtgccttgttggcacacttcttgttgtcaatcgactgtaactgagaaaacatcatatcaattgtctctccagccaactacacaaaattcttgtactctcgctagtacttctcaaagagtctagtctttacatgatcattgccctcatggaatctctcgagggtggaccagatctcgtgagtcatagctagatgtccaactcgctcaaactcagccaaagaaaggcacgagaataaagcgtttcgagctacgttgttcgattcaaggaactccaactgaatcagagtaatctgagcactcgtagcatcgaacacagcatcgagaccgacctcctagacatggtacccaatactttgaagaaacatagacatgc

SEQ ID NO: 9388 - DNA, 380 bp, Zea Mays
tggtgcccaaattgtcgagttagaggtttaattcgatcgatgccgattaagtggctgaaaataactagtaaagaagttgtagatgtaaaactagaaactagtatgcatatgtcctcgtatgatgttgtggtctaaatgtgtatggttacggtcgcgggtaaaaagtagtagtactcatgtgatgtctaatttaaaacgcaaattgttgggtgattatcatggagaatgcgtgttaattggttgtagtaattttagtgcactaaatgacttgaataaaatttgcaagtcaaattgttggttctaatttgattgtcttaactcgaacaaatagtaaagcgttagagtaattcaagtctctcgaacgcggcgattcttgaatt

SEQ ID NO: 9389 - DNA, 783 bp, Zea Mays
cgaaaaacctgtaaagagcccttagcactattcgcttgtgtcactgacatttacaccgagaccatcccctttctttttctttacaacgccagatccacgacggtggatggcgacaagccgagctccggcgagcctgtaccagccaagatacgcaatggccggtgctctagcttgactgacacctaattctacccctgacaatcgtttcccctcgatcaattgcaaggttctagctcctactctctctacccacggtgacagcgtgatcaacggacacaccaaagcgttcctggggatctagcgtgatctagttcgattggccgggctgctaagcatctacagcacacagggatgttgaaacgagagcgaggaaggcatgatcggacctgtagagagctagccacggtgagctcactcaaagcggagttttgactgaattgggggaactttgaaattggagcgctctggtggacgatctgaggcacgggctggtgcgttgggtgcatgattacctagcggagctgatggcacgctcaatttatagggcccgagggcggtggctcatgaatttggcatggcgcgctggcggccggagagaggggagagcactggcgcaagagatgcgtggctttcaccgcgacaaggtcactagcgatgaacggacacgccaaggcgagttactgtgaaatggtaaagcacctaggcatgtggaaactgatcaacaagcggccaactccggtgagcctatctgaaccggccgtgagtcaagcggacatggcggcc

SEQ ID NO: 9390 - DNA, 406 bp, Zea Mays
gttgagtgcacaattacatagcggagctgagggtgtgctcaatttatagggcccttgagcggtggcccatgaatttgagatcgcgtggtggcggtcggagagaaggaggtgcactggcgcaagcgattggtggtatttaccgtggcaagctcaccagcgatcactggatgggataaggtgactcactgcggtgtggttaaagcaccgaggcaagtggagcaaggttgcgtggtggctaactccggtgagcctatccaaagcggtcgtgactcaggcgggtacggcggccggagtagaatagtggccggagttcatccacggggtgatatttcttacccctctatgttatccaactacgccgagcacgaatcactgtggcgggcgcgaatccgggcgcacggtcacc

SEQ ID NO: 9391 - DNA, 703 bp, Zea Mays
gtgtaatctagtgttgtccaaacgggccagcccaccggacagcacgtggcccgacacaatagaggcccggcacgagcaccgcccggcccgcttggagccgtgcctgggccggcctggcacgaatacagtgccgtgcttgggcaggcatgccggcccgcagtgcaggcacgggcctggcatgataaaggggctgacctggtaacagcccgcttaagccgcgcgccgccatccccccacccctctgaaacctaaacctaatctgttcctctctcctctcactctcagctcttgcatctctcccacactgccgctctcggatctcgccatcttgacctccgcctctctcttccgctcccctctggtcgcctgcccccaatctaaggcatacgccagtcggcggcaagcctatgcctctccctcgtcgacggatccgacgctctggtgactgattctctcgggtctcagcctccgcctctccctcgtccgctcccctctgcttgacggctccgcctccaatccgaggcatacatcggcgagcctgtgtcggtcatcgacggatccgtcgatctggtgactggtactctaatcatcctctcctatccctccggcaaccctctcggtaaccctaatcctcaatctagtcactttggtcttcgtgtctcctctcctctcgttgccttgtcagtggatctggtgctccggc

SEQ ID NO: 9392 - DNA, 649 bp, Zea Mays
ggcgtggatcatgcgcatgggttggtggatcgtatggcttcccttgatggcgtgaatcgcttgccggctgcacagtccgccgtggttcctgctcgttgtagcacgacttctctgcgccatcattgctagtaaggtgcccagggccgtgttcgccgtcattactgctttgcgtagcattcgtcgaatcagggtttgagcgactgggcgcgtgggggaggagtccggtgagcggcgccggtgcatgcagggtcactgctgcgttcagctgctctggcgaggaagaagagtagtagccgcagatccataaaccaacggccggattggaactagggcgtactgcttcgtggattgatcctaggtcgttgaccacagatcaaacatagtacattagaactcttttttattaaaatcctaccgtcgaacttagatccgatggtcagcccttcgtaccagttcacagtatgttttgggccatcgattgttcatcgagcagctctgatgtcttggcaggactagatctaatcccgatcatatgttagtgatctaacggtcagggatcaggaataccccttcgcggcgtcggtttttcataagagcccctccacttttcaagaatcaacccgcggtccagatagctcttagtctagga

SEQ ID NO: 9393 - DNA, 544 bp, Zea Mays
ctacttaggggcctagatgcttcatagacccataggccatgagtggggctgaggcctaggacctgtaggtcttgagtgggaggtggatcgactctttaccatgtcgtggctcggtgccaggcgtagttaatgcggcgtgcacggtattgatggcgagagtagtccttcggccagacgcagaatccactcgagtggctccttgtccatttgtcttaccccttgccaggtttcgcctcatctgaccccagtcgcgctgtgcaagggtcatctgggggtagattcacttaggcgggccgctccctatcttcccaccgacttgttgccccttgggggccaagtgatccgatcccccaacaaagctcatcgttctctctatcggggataaattctgctttagacgtcttgtccacaatatatattaactttttgtgatgtcttttatgtttttgtgaacgataagctgccgtcatcaaatacactgcccccatgggcgtagaaccaacgcttggcgtggtctggccattcatgattttgtgcaataaca

SEQ ID NO: 9394 - DNA, 405 bp, Zea Mays
gcgacggggtcgggagctgtcgcgtgggcgagttgggccatgaatgatccggcccattagcctccccttaaccctagccgccctcccctaatcccctctctctagccttggacgccaccccctctcactcctccacccatttgcagccgccacccacctcccctccatcaaaccctagccgcccctcctcaagcccttctctccaaggtgccattcctttcccgctcggatctacgtcgcgttggtgcaagtctccctgtggtttttggtggagggaagaagaagcgaggaaaggggaaggattcaaggtgatttttgtgtttgtatcttgtttaattgtgctgcaatccaatcgattatatgtttatctatgcgaatcggtagaggtgctgtccagaaattttg

SEQ ID NO: 9395 - DNA, 777 bp, Zea Mays
cggagctgcaagaggtgctcactgtcctagagcgcatggccagcgacatgaaggagctcgtcgtgttcctgagctgctaccctcccacgcgccgcgaacctcacagcgggcacctgcggttgaagaaccgcatgttcggccgtgagtcagagcaggagaggatcataggcttcctgctggaaccagagcctgcacgcgcggaatatttgggcgtgctcccagtgataggccgagcaagaatcggcaagagcaccctcgtcgaacacgtctgcttggacgagagggtgcgcagccatttctccttgatcgtattcctcgccgaaagcgacaccaaggacggcaaacaatctcctcatctgggagacgacaacgccataatcaaacaccaggatctcggttcggcaggaaaatcactggttgtgattgagctggccggcgacgtggatgagagcacctggtggagaagaacgctgcccgcactgagagcacgacgaatcgcgccggtgagtaaagtaatcgttacaagccgatcggagaagattgcaggttttggaacgacacaggctcttgagcttaaacctttgccccgagaagcctactggtacttcttcaagacgatcgcgtttgggagcaccgatgccatggatgagccggagctggaatccatatgcatggagatggtggacctgttgaacggatcattcatagcggccaatttgtttggtggctatcttagagccaacccttgtcctcggttttggcagaaggttctcaaag

SEQ ID NO: 9396 - DNA, 641 bp, Zea Mays
tgcccacccctaccgcagctgtacgcctagtgacaattgaagtagtattgtattgcgcacctgccagaaatgcatgcctgcctggtggggcccggcatgcccaggcgacagacattctgatcccggagctgcagagaggctgagcggattaggattagtggatctcaccagcatttgctgagtaatatactactactactagctagttcgtcgatgttggagcccgagtgatcacatgtgattatgtgaacgtgatgcttatctggttcgtcgctcggacgatgtcgttctctcgtgatgagcttgggcgtcgcgtctcgcgcgcttccggataaacccgcgggtgacgggaactcgaacaggtgctgcagcgccgacctgctgctggctgcaagttgcaacgtgcatgcatgaagatgaagcagtacttgggcggacggacacttgtgtttgtttattgcatcgcactgtaaagtactcctgtactgtactgtagtacatgagaacacggggagggaatgttggttcgctggtcaaacccgccgccggcacttttctcggtcgaggggacgctggtaaaaaaaaaaacaatgaaactatacacatgcatgcacgctccctggatggatggatgtttcgct

SEQ ID NO: 9397 - DNA, 793 bp, Zea Mays
gccaatacgcagacgcctcaacaacctgaccgtactcgccgccgcgttctcctcgcgccgccgcgatagttccgatttacccgaacctgccctccccataaaagttgtggcgcagggcgcccaccgatttgattcaccagaagcaatcccacgccaacgtagccaccgggtgagatacgcctaggggtatgagcacggggtgaaagcaggccgccgctgtggattctcgccggcggtgagaatcgaccccccccccccccccacagaacagcacaacggtgttccgggccctagctaggttgtgtgaggggttaatcgggtggaaggccgctgttgacctgggaattgctcatcgtggttggagaaagccgtgggtgacgcgaattgcgtcgaagctaggtgccaccgcccccaatttgaggtaaaaccactctcatccacttcgtcccactccccgatgcgcatagcacctttcggaggaagttttagggcactaaaacaggagcaccacgcccaaccgggactgctccgccgtgggcataccgttgctgccaggtgttatattctggaggaaggagaaagcaccgtgaccgtagataggaaactcagtggttcagatctgtagcaggatacccattcgtgggtgtgatctgggcgatcgggggctagagtatgccgtgggggctagagtatgctgtggggatcagacatccgttgatccatgatccgaaggctgttatcgcataccggttcggtcctaatctatgtgcatcggtttataatccgatggccc

SEQ ID NO: 9398 - DNA, 533 bp, Zea Mays
gaaacttgttacgcaaaaattgaaggaaaacacctctgaagatgctctgtcagaacaactgaagaagaccctgatggtacagtagcaaaaagatcttctgatttagtgtatctcgccgccggtgaccttacgccgtgattgacgtcagtcgtcgcgattcgtgtgccctggtttgcggataacggctggtggtgaaagatctcaacgcagggaaggattggagccttatcaccggactattcactgtgccacttgccgcgcgattgactaaggtgtcctcgccggagtttgtcgtctttcgtagccacgccacgtacttagaagagctaccacgtcgtagtagataaccgtaggttgtctgtccgtcacctgagatattaccctggtgaacgccacggtagtttgcgccggtgactcacccctctcttcaactgtcggtctccccctttcaaaattcagggccaccaccctcaaacactataaattcatggtgctgctagctccgcaaggttgtcacaaagccagagcatcca

SEQ ID NO: 9399 - DNA, 292 bp, Zea Mays
aagagaaacagtaataagcacagggctccaaccaatgacgaatgtgtactcttatctattgtgagctatcctgtgtatttgagaaaaagaattgggaatatgagaccttttccccatgctgcgcaaagtaagctcctgatgcaggagaatccaatgcaagacagtactccattttctcataaacatcctcaagaaaatgagttgacactggatgtgttcttccttcaacactgatcacggggcattctccaaaatatcgtgcaaataggcttgaatcaaccgttgcagacct

SEQ ID NO: 9400 - DNA, 1124 bp, Zea Mays
atgcaaatatcttccacacatcgggactaaagtatccacggaacattactggcactagtctttcaatcaaaatgtgatagtcgtgactcttcaacccaacgagtttaccagtgtcgaggttaactgctcgttttatattagtcgcatagcgatctgggaacctcaactttttcaaccattgaaatatctcctctcgctcttgtcgtttcagacaataaggatctagtggccgactctcagatccacttggattttttctaagctcaaggtgcggacgatcacaaagttcagctaagtctcttcttgcattcatgttatctttggtttgaccggtgaagtcgaagcacatgcttatgatgctttccgcaacattacattcttggtgcatcaaatctatattatgtggtaacagcaatgccttcgtgtaaggtagctcccagataaacaagatgtgcgtccaattgtgttctttaccatacccttgaaaccgacctcctacgcccggttttaggtcacgatgttgtctcatggtattttcaccagtttgccgctttggtggcccatctctaaccctcttgccttttcagaatgactttgtatcctttctaaaatgatgattattgggaaggaggcgtcggtgaacatcaaaaatgtttccttcttaccatgttctaacctatatgcttgtgagtcacccatacatatcggacaacgcagtatgccatggacacaccaaccagaaaaaatgccatatgctagcagatcatgaattgaccatagatatgatgcgcgtagagtaaaacgacatttcagatgactatcatatgcctcaaccccctgccacaacatttttagttcttcgatcaacggttccataaatacattaattttcgttataggatccttcggacctggaacaataagggcaagaaacatgacctcttccttcatgcatttgttaggagggagattgtagggcatcataaaaactggccaacatgagtaagaagtaaaattattggagtaaggagtgaatccgtccgtcgacaaaccaagacgaacactcctagggtctcttgcaaattctggatcaaaacggtcgagagcctgccaggcctcgccat

SEQ ID NO: 9401 - DNA, 616 bp, Zea Mays
ttgattcgtaaaacttacggggtctctttagcaaataggccagggcgaaggggtatcgggctatttaggccgttggatcacgcgcggacggcgcagattagagcacatccaaatccaagcggtatgcatcagagaccgccggatctgtgatcgacgggcatgatttgattaaacacaggccacacaaccgtcgattcacggcccggatttaatgagcgaaggggtacgctcgcacctaatcctatccgaccgccgcggcatcgatggtctggatcaaaatttgtcacaatctaatcatagccacaccttggtcgatcaacggtccaagggcttctcctacctcccggtcgccatggacgagggagcagtggccggcgacgacgctccctggccggacctccctcccccacacacggctgcacaaactcaaatcctacgggtactacgtgatgggaagacgcaggtgaacaccaaggaagaatcttaccaagggatgggagggcacagagacccaacgatggtgaatggcggcgccgcagtgattctttggctccggcgagcaaatccctacaccgaagaaggcccgaaagtcaagcaatcaacgcgcgagctcccg

SEQ ID NO: 9402 - DNA, 464 bp, Zea Mays
agaacctgaccacgctcaacgtgtacagcaaccgcctcaccggcgcgattccaagcgagctcggggagctcgccagcctcaaggtgctgctcctgtacggcaacgcgctctcgtcggagattccccgctcgctcggccggtgcgcgtcgctggtttcgctccagctgtccatgaaccagctcaccgggtccatcccggccgagctcggagagctacggtcgcttcggaaactgatgctccacgccaacaggctcaccggagaggtgccggcgtcgctgatggatctcgtcaacctgacatacctgagtttcagctacaactctctctccggacctcttccggcgaacattggatcgctccagaatcttcaagtgctcgtcattcagaacaactcgctctccggccccattccggcgagcattgccaactgcacttcgctgtacaacgcgagcatggggttcaac

SEQ ID NO: 9403 - DNA, 522 bp, Zea Mays
tacgaagttgtccgcttcactagcttctccaattgaaggcaacgcatcattgggctgacaagagcttcagagaattgctagaaccacttatggatatgcttcacaagggaaatgggatatccaatactacatatgaggccaagaagatcgtttgtcaacattcggtttgcactgagcatagatggcatgaaacaatctggtaacatgagtagctcacatagtgtgtggcatgtgttgtcaactatccacaactttccaccctggttgtgtaataagaggaggtacatgatgatgtcagttttgatctctggtccgcatcaaccaggtgttaacatcgacgtgtttcttaggccgcttattgatgatttcaaaaaactttagaaagaagagggtattagagtatacgatggtttaagaaagagtgtttcaacttatgttccatgttgttcaccaccatcactgatattctaggacatcgtagcgtgtctgggcagagcaaaggagaaaaagactacttttaat

SEQ ID NO: 9404 - DNA, 302 bp, Zea Mays
ggagcagtagcattcatcctcgctatgttctgccctagggtacactagctcgtcctagaggaggacagtgaccagctcagtatgcaacataggggactccacagattccacacactcgtcaggctgcccccactagcacctcggcgagacctacaggacagggtacaatcaccacatgcttcaagtgtgatcaggttgggcactatgcaaatgcttgtccgaagaggattcccagtacacccgtccaaagcaagcaaccaactccaacatctggcaagggattcagcattgctagagtcaac

SEQ ID NO: 9405 - DNA, 433 bp, Zea Mays
gtgagttctccggtgaaattgaatcgagtgcttagtcgctgaggtgcgggatgtggtgaagaagcggagtccaggctcaatttataggccgtcgaccggaatcggaggaggagcgcggattactgatcgcgctggcgagctcaccgtgcggcagaatccagtgatggcacggtggccgccgattaaccgggtcttgccacctcagtgattctccgccacgtcgccgaggatcttttaccgcggccgccgacccatcccgaccgccgtggcattcttatcgccggcgaggtcctgatccttatcctctggtactgtaccattacaaacccgattcagtgtgccagacagcccaagtttagggttaaatttctcttaattttctgtggcaacaaacctagagttctgcagcaaagttgtagatcaaagattcagc

SEQ ID NO: 9406 - DNA, 461 bp, Zea Mays
cgccgccggtgatctcgcgccgtgatcgtcgccgccgttgcgattcgtgctcagtgaagtgcatataactgctcggggtaagaaatatcgcgttggggatgtgctcgggacactgtttcaccctggccaccatacccccttgccttacggtcagtctagataacctcgccggagttgtccgcctgccgcgcgatggccacgtgccttgaagctttaccacgtcgcagtaagccgctttagatagctggttcatcgccggtaagcttgccacggtgaaagccacgcatcccttgcgccagtgacctcccctctctccgatcgctgcgcgttttctcaaaattagccaccaccgccgatggaacctataaatttccgccctagtgagctccgctaagtagttgtgcgtccagtgaaccagccctcacctccaatcatcccccacagctccccaatttgtgatt

SEQ ID NO: 9407 - DNA, 560 bp, Zea Mays
ctaattgatagtgttcttgttcagaatttttaattatgaagagaagcggagacatacgatctctttttgagaaagcaacaaagaaggcggctagtgctcctttgaaccatgcgacacctccggttgaaactactgtgggacaacaaaatcaagaagaagatagagtagaagttgaagaaattgcagatccttcgtcgtcaccgtcgccttcgttagtgtcactgccaatgcctgcatcaaatcccccggtgtatgacatcaatctgattccatatgatccaggtgaaaggctgcccattgaaaattatcatgttaatgatcaggatgcaatccgtagagcatatattactaaaggtccttgcaaaccttatatacatgattttccataccgaaatattggagatgcacctcgtcgattcagtttaacatggttgtataatcatgaatggcttgaatatagtatcaagaaggattctgcattttgctttatatgctacttgttcaagaagggcagtgggtcaaatgcatttgttgttgatggatggaataattggaatata

SEQ ID NO: 9408 - DNA, 922 bp, Zea Mays
cttgctcttcctatttctcccttcttccgcggtcttcttgacttttacaatctaaacctgactcatctgaatcccaattccatcttgcaaatttatatctttgtacatctgtgttaggcctacctcggaattcttccccacttcggtttatggaagtacttgtatcactgtcgacctgggatggctggggggcagtacgagctcgtgggtggtgcgagtttggagatgcgccgtgggaggaaaatagaataccttgacattcctctcaaggacaacattaaaggttggcgccttgagtggtttattgtggaaaaccacggcaagtccctccccccctcggtcggggagatagtcagatgtgcgcactccgagttggattgagtctcctgctgccttggaagttacagaagctagggttctgcttgctgaaatctatctgctgaaggagagaggtctgaccaccgaggctgtggttgctgactttgtttttaagaatatccagcccttgaaggacagagcatacccagcatacttgtaccgtggtgttaccaacttgactcgggttaccaataggagaattcctgccgcggatctggtgagccgactagacatgatcttgagaggcaaagtatcaaatgttggtgctcctgttgcctactctgcttggaatctgccacctcctaagtcctttttcaatttcgtgtccaatcctcctgctggtgacagtggtctgggtcttagagtgcgaccctctcctgaagatattgaagtcctggttgcttctctttgtgatcttcccaatgatgagaggcaagttcattttgatatgccagcgagtccagatggtgcgaaaatagatgttgtactcgatatgttggctggagaatcttctgactcggcccctgctgaaacgaaggccgtt

SEQ ID NO: 9409 - DNA, 752 bp, Zea Mays
tcgtgactgcatctctcgaccaaggttggcgtcgggcaagttgtgactgcctctctagctagaggttggcctcgggtgagtcatgactgtgtctcttgcccgggactggcttcgggagagttatgactgcctctccctccgaggttggccttgggcgagtggtgactatgtctctcgctggggtatggccttgggagagtcgtgaatgcgtctcccgcccagagatggtctcgagtaagtcgtgactgcctctcctacctgggtttggcctcgggcgagtcgtgactacgtctcccacgtagggttggcatcgggcaagtcatgactgtgtctcccgccggtggttgccctcgggcgagttgtgactacgtctcccgctaggggatggcctcgggcgagtcatgactacctctctcacacatggatgacctcgaggtgagtcgtgactgcctctccctcgcgaggttggccttgggcaatgcgtgactacccctccgacccgaagatgatctagggcgagtcgtgaccgcgtctttcactcaaggtttccctcggcgagtcacgactgcgtctaccgcctgaggttggcctcgggcgagtcgtgactgtctcccgcccggggttggcctcaggcaagtcgtgactgcctctccatcccgaagttggcctcgggcgagtcgtgaccgcgtctcctgcttggggctgtccttgagagaatcgtgactacatctcctacccgaggctagcctcgg

SEQ ID NO: 9410 - DNA, 558 bp, Zea Mays
tctctgtggcttcgtttctcagcctgatgacctctgatcgaaggttgctgagagctatagtgcagctctcgtcttctgtgttcttttgcgccctcagggcgttgctaaggattaagccctgcaagaaagaataaaggattagcgtgagaataaaagacttcatttccaagtccataagcttcaaagttcacttctgtaccttcagactattgtatgcgaggctgtccgcgaggtcagccttcgtcatggcgcagaggccagctttgagcttcggaaatcccatacttttggccatctcccagtagatggataacactttgttgtccaggaggcattacaggaaatcatctttgttcgttccgttaaacactaaagcccccttcgggtacttcagctcctgggcatagtgtttggcttcaaaaacttcttcttcggataatctttttcccgaagcatgtcgaataatatactcaagatcttcggccggtgcttcaggagtaggggatttggcttttttgtccacattctcctctagagctacactaatatctggagatt

SEQ ID NO: 9411 - DNA, 774 bp, Zea Mays
actctgtgagtccatctaattacatgtgtgtacatgcacatgccaacttcgatccctttcaaagattattatgcgtacatgagcacacccatgtcctttactggatatgcgcctgcagtcaggtgtgctttgcattgaatctttgtagcccttctattcttcatcctccccacagtggtggcatttggataggcagtgcaagtgggatcaggatatgtgatgctgagacagttaaagttatgatgaagaatcaacagaattgcagtatgattcggaaactagtttcagaagttagactatgggttagcctctcaataacttagttttaaatggtctacgttgacatgtctttgtctaaaattttattggtacttgcattatcaacctaccaagaaataaagtttgttctgttttttctgctcctttgatctctttgctaaaattcatgcggtgatctgtgttccaggccaatcaagaggttgaacagagctgtgcaggtgagcatgcattcattatattcccacagttcatattctttgcggtactacatctatggtagatttagtcgctgctgccatacatcagatgcccagatcttcttcaggcccttcgtcggcgaggagtatcacaaggtacgccaatcgcttggtcttatcttcctgctctgcaaaaacaagcacgcaaacccaatttactatgttacaccccttggcttccgatgaggtggccgaggtgtgaggctgacggtggcgctggtagtccgcaaggaaccgg

SEQ ID NO: 9412 - DNA, 566 bp, Zea Mays
gccggcgatgcgattcgtgcctatgggcgcgcggataacaactaggggtgaaaaagatcttaccgcaaatgaggtcgggtgctggccgtcgtacccacttgctctgtggccagccgaaatgatcctcgccggtgttggccgcttgccatttgtgcgccacgtagtctatggtgttaccacatcgcaatagaccacatcaggtagcctatccatcgccggtgacagtgcctcagtgaatgccacggtagagcgccgcggtgactcatcccctctcctcgaccgccagcttctattcttaaattcggtgccaccattcatggactctataaattgatgccctagtgagctccgttaggttattacacacccagtacactagtcctcgcctccgattagtcattgtagctcgcgaatttcaagtttcccccaattcggctctccttgccgccatgaacccccgcgtcgtggaccgccgtctctaggtccgttcacatcctccttaccctcgtttcagcaccctttcttgctaaggatgcttatcggcccaaccaattgaactagaccac

SEQ ID NO: 9413 - DNA, 871 bp, Zea Mays
caggttggcaatctatggaaaaaaccctgaaccctaaataggacggatagaacatatcaatggattgcagtgaactgcgcccaacaatgggtactatcttctgtattaaaaaaaatcatccctcccacaataaaaatgtagaagcaattgatccctaccatttagattagttctctttatcctaaccgtggaatcattgttcaggtctagtgacgtttatgaactaaaacaaggccatggatccacggtcttcgaacacataaactgcagctatgcttacaaataagtcaaacagaaattgatattgacgttaccttagcttaattggaggttggaaccgaacctagaatcccagttgaacttggatccgaacaccttgacctcgacttgatacgaaagtctgtaggcggcaatgaagacaataatctgttactaggtcgttcataccttcgaagattaagtggatctactggacttgagggggaggggtgtggcggaccgaaaggaaacgcggaggagaagacggtggggacggcaatgggaggaggaattccgtacctgcgtacaccggcggcgatgcgttcggtgcggaccgacggcgctccgttcgcttcgaggcggaaccttcgcgacggagtcagggcggaggtgtcactgctgcaacgaaggaaacgctgaaggaaacgcggaggagaagacggtggggacggcagggaggagggattccgtaccggagtacaccggcggcgatgcgttcggtgcggacctgcggcgctccgttcgcttgtcggcggcggaggagcgttgcagggaaccctagccttttcgcgtgggcttctcacggaagccaaatgagcgccgcttcgcgagg

SEQ ID NO: 9414 - DNA, 465 bp, Zea Mays
ctgtcgagtcacgctgtgctagaaactaggtatccaccagcacatgtctaaagcgtcgaatcctggtggcagtgtctctatgaaggtcaaatagcctccgatactcagccaggggttgtaccttggtctcatcatgctctcggaaacgaggtgaagaaacaggtggagtagtgaagggagtgggagtgggggaagcaggcgtggtggaagctattggtgtagcgagggtagttgtaggtactagagtagataaggctggagtggtagtggtggctggagcagagggctgtagtgaggggtcaagtctagctggagtggagcgtaaccaaaatgactaatgtctgacaatgtaagcaatttgatcagagccaatatgcatttgtcctccctgctctactctctcagccgatgctgctgcaaccgctactcgaatagctttatcaagtttgcacttcttcttgcctc

SEQ ID NO: 9415 - DNA, 522 bp, Zea Mays
atcgtattaggggagtgctccgcattcgtttaagtagatcgggggggtcattagtgttgctaatgcgccgggcggaattactggtcatggcgccgccgtggaagaactcaactccggcgactggcgaggtcggggagcgcgacgggagattgtgtgccgtcggatccagagcgaaggttaggatcagttcgtagcataccctttcgtgttacgtaatctgggccatcgatctgatgttgtgcggcccagatcaaccttatagttattgaatcacaggaacggatcgtgtccgtagatccgtggatgtgcgcttgggatcttgtgtagacgtggcttgatctcggacgatgatcccggacccaagggcctgggttgcatacaggtataggcgttggcagatctaatcgtggacgtaggtcttaatccaacggctgatcgcgaccgatacccctttggcctgccatatttacgcatgaaaccctctggtcctaagaaaataacccgccgtcctagtaccctgcg

SEQ ID NO: 9416 - DNA, 556 bp, Zea Mays
aggccattacccagggctaggggagcagcagcattcatcctcgctatgctctgtcctagggtacaccaactcgtctagaggagggcagcagtcttaccagtgccttgctcagcagacacctcaggccacacctcagactccatgtcctcgtcaggaagccccagctaacaccccagcgagacctgctggtcagaacactactactggcactacatgcttcaagtgcggtgaggttgggcactacgccaatgtctatcctaagaggaaccccaacactccagcttgagatagtaattagggcaagcagacttagactccagccagcaaccgcgggtataatattgtcagggttaatcaaatcagtgttgaagctgttgttgatggttctaacatcgtcattggtacgttcttcattaatttcatgctagcttctatacatttttattctggagcttcacattcattcatatctacttgttatgttaatgccaatagtctaccttaccttgctatgcgtagacctatagtagtcattacacctaaagggccttttgag

SEQ ID NO: 9417 - DNA, 629 bp, Zea Mays
aacgcacaccaactcacccctacagtatacaagcagaccatgactccaccctcccccaggcccgcacacgctcgccaatacccgcatcgcctccaacaccctccgcacgacacgccccagccagcccccgcttctcgcgttcgcgcggattggctctcgcaacgaattgccttcgccagcaaaccatgaccttcgcgccagtcgccagtcttcacgccatctgcaacctccatgccatgtcagttgttgtgtcccacccgcccactccacaacagactcccgcccacttctcacgtcgtggtactccacccgtaaggaggacgcccgcctagataaggttgcatcggcttctcccgtagccaccactgctgaatggcgattgattccgataattggtgggagctttcctcactaacctaaccgtccaacaactcacgatagagtgtcatcccgccagacactcgtccacaagctcgacgacgcctaaatgaagctgacgctgaggttccacctcgctgccacccccgcaatgtcgacatcggcctcaggtccggatttggacccgtagtagtagcagcagccaccgccattcccgaccacgaggtaccatcactagcgatggcgtcgcc

SEQ ID NO: 9418 - DNA, 804 bp, Zea Mays
gccgagtcacgcgaggacaggtgcgctcgcttctagatcctctctcatcattacataattaatcagggcgtggggcacaggaggagccaaatatcttagcattatcccctcgcctttgtttaacctgtctcctatctctggacatctatctgtctctcttctccctccggcctccattccaatcccagctgtcgactcggctggagtttcagatgaagacgcgtgcatgcgcgaacggattcagttaccatctgattgattacccgcaccattctatcctgaatcatcgcgtacgttaattttagttgagcggttgtttagttgactgtacgaaaggaacgatgactgcgctagaaatggccatagctggtcggtcagcctcgcgtgggattggatgtgtgagtgcagtaaaccaatcatgtgcttagtatcttcctcctccttttcgttttaactactactatgtccttttgcagtggagcgcgtacgtatgttcggcgatttgtacttatgtactaactacgattaactgcatgtgtacgcaggtcaggccgcccgattggagcacatgattgaatgattgattgttcagctcatgcatgattgccaaagctgagagctgaagctgacgtgtgtggtcctgtgacagatgcagagaaccactcgtcgtctgattggacttgtgtcacctgcaggtgtaaaatcgccagaacagaacaagaaggcagccaccagcgcagcgcagcgcacgctgctgcctttcttcttctcattccacgaacgaaatagaaaccgcaagctggg

SEQ ID NO: 9419 - DNA, 598 bp, Zea Mays
ttatcctcgatctgcgtcgttcaacgtcttgaacgccgtctgcgcccatgaattcctggggaatagcgcatgcaatagaccgggtcacaccttttttgcgtcgctcgagtggcgtgctggtgctttgatttctctacataatagggatgtatgtctttctcagtacatttagatctactgttctatattgttcatcggaagagaacgcgtgctagccgcctagccctgcactgtagccgacggctactcagccacacgcgaggaatggagccggtcaaccaagcggttagcgcgtcggaaacgctcctgcttccaaaacggtcgcgcgtccagtcaagcgcctggtagaagcgctattatcttccgtgaaaattttgcatgtgtgcatgcaagactcgactgagtagatgaaaattcaaagtgtgccagaccctcgcccacctcctcccaacgcaggcaacccaggacctctgcatgtgatggcaactagcattcgctgatctgcttgttctataagcagttgctaaatcatttaacctaatatgtagtccattatttagtctccgtatatctttcaccgtttctttttatttataca

SEQ ID NO: 9420 - DNA, 493 bp, Zea Mays
actcccactccgatggcgactaggcgaaccaccggcgggaccccatgtcccccggcctacggagctgaagcctgccttcttccataaaccattctgggtcccccacgagtccagacttctgacaggtttatccaagagtgaccaaggccaaggatgggggctccttcgtcaaatgcagatggaaacccgggttcgggacctaatcttacggaagtaccaaaccaaattagggctccgcaacactccctagctaggaaggacccttcaaggtaacgggaatactccgacccaagggcgactgtctagctacgactgaaggagtacctcccccggtgctggaacatctctgtaagttctatctataaagcaggtctgaggggtcgagttgtttcccttttgtaactaggtagcgcatacgtgtacgccaacctagtggggtctatccccataaacccggcatgttggtccgcacacatgcatgataagttataaa

SEQ ID NO: 9421 - DNA, 480 bp, Zea Mays
gattcggtccagcaggggggaggagagagcttttccctttttctttttactttctaatttctatttcccatttttcccctttttcttttgaacaaaatattttgtagatactctaagtgtttagaaaatagaatctaagtgaggtgctttgtgatcaaacaaaatgtatgcatatgatgaaagaaaactagtggaggtcttggaattaaaggatgaagggaggggaaaggggtagattagggtttcaaacctgggttaggatttttgggatgctacagctagcgagccccactcgctagcccccacggccctaccatgcccatggctgctgcgttgctgcagccaccccaaccatgcacgtcgctctagtgctgccgccctgaccttgccgccgtgctgtcagacatgcttcggtgaactgtctgcgagccgctgccgtcactgtcctttttcctctggctagcgagcgtccatctgttg

SEQ ID NO: 9422 - DNA, 469 bp, Zea Mays
ccagccccgacaaatctgtcaatgcggacacgatgccccatcgttgcttggggaacgaagaggagaaataaagtttcggccaacccacaacaaccattaagcggcaagcaggggaggccccgctgccaacccccgagactatggcatcaagcgtcatcatagaccaagcaaccaagaggtggacacggtggaaccatccccacgccacttgtggatggagacatggagatcccgattgccttcaatcaacatgatcgtccaggcaagatctagcatcccagaacttacccccttgtcgtcgagcccatcgtcggaacaaaacgcctctccagggtcctcatgcacgggggagcgcccttaacgtcatgtacgtcgaaaccttcgatgccccaggaatcgcacactctgcgctacgctgattcacgacatcttgccgggctttggtgccagtccgctcggacaagttgtt

SEQ ID NO: 9423 - DNA, 320 bp, Zea Mays
gctatattaaagtgctgggttgtagaccttgaagtgatacctcagtgcagaaagccactccggcaagacctcgtgcacccgcctgagcacatgccagccacttgtcacaatcacaacaaaatgaatgtcccaccatgagccaagttaccctaccaacctcaggatgttgcgactacactgtgacgacgttgccactcacaatacgccgatcaagactccctccattataaactgtcgttcctccgcctataaatactgatgcccttaccagggaacctcacagtccagccaccatctcattgtcgcctccacatccgaac

SEQ ID NO: 9424 - DNA, 409 bp, Zea Mays
gtcgattcttcaaccaggattcacagcgggtgcgtggcggatagctcgctgtggcgagtagaaattttcccttccgctaactaagctgaagtactactgatcatcagtagttagtgaccgagctggcgtacgtgaaaaacatatctaatccgcccggttgattaagcagattagttaaccaaacgaacgtgcggccgggtaggtagctatagcaggaagtacagatcacatttggtttcaagaagggttcagcaatagtagagtcgccaagcaaaaaaatgaaacaaaacacagcctaattaacgtgcccatggttgtatacccgcagttcgggtgtagtgttagattattgaatctaggtcctaacaatttgcagagaaggcctcgagttctaagatttagtacccac

SEQ ID NO: 9425 - DNA, 698 bp, Zea Mays
tgagagtcaagagtctgtatgtctttgaaaatgaaaactttattgactatgaagtcctccaattatatagtaccctgctagggataaaatcttctaagatgctctatgttccatgaattccccacttctgtgccatccatttgagtaagccagtatgatcctggccgggtgacctctgatacaatgaatggcccttcccatagtggtgacagcttgtgtcgtccttcccccgttagaatttggcgaaggaccaagtctcccactgcaaaagatcagtgtcgcacgactttatcatgatagcgcctcaaggtctactggtatctggctgactgaattactgtgttcaatcgctcttcctccagcacatcaatatcctctagcatggtagcttctgcttcagctatgctttcgaagaccagcctcggtgccccgaacctgatgtcgacgggtagcactgcctccgaaccatagaccatgaagaatggggtatttccatgtagagctcgactaggttgagttctcaagctccagaccacatacggtagctctctgatccactttcctgcaaacttttcatttttgtcgaacactttcttcctgagtgcttccagtatcattccattggccctttccacctgaccattagctcttgggtgcactactgatgcatacttggtctagatactccgttgttcaca

SEQ ID NO: 9426 - DNA, 329 bp, Zea Mays
ctatagtgtctgacagagacaaggttttcaccagtgccttttggaaaaatctattccaacttatgggagtgaagttgttgatgtccactgcatatcaccctcaaactgatggtcagagtgagcgtgtgaattagtgcttggaaatgtatctcaggtgtgttgtgcatgaccaacctaacaagtggaagagctggctcgctttagctgagtactggtataatactacttaccattcggtgctggagtgtacacccttcaaggtgttgtatgggtatgaagcaccattgctggttacaccaaaactgttgggaattgaagatagggagata

SEQ ID NO: 9427 - DNA, 426 bp, Zea Mays
gcctgactggatcccagcttcgacaacgcatctgctgctgcattgcgatccctttccacgtgatggaactccaatccttcgaacttgtcttccagttttcgcacagctgcacagtatttgccattgaatcggtcgagtagtcccaatccttgtttatctggcttatgactaccagtgagtcgccatataccatcagcttcttgatgccgagtgatactgtgatggtcagcccatggaccaatgcttcatattctgccgcattatttgatgctggaaacaacagctggagtgcatacttgagttgttcacctctaggagcaataaagagaatccctgctcccgctccttgcagcttcagcaatccatcaaagtacattctccacacttcagtaacttctaggctatccgggacctagtgctcagtcc

SEQ ID NO: 9428 - DNA, 1208 bp, Zea Mays
actttggctgacaatagagaaaataccaatatactttctaactgcagcaccctctgtacagcttacaacattggcagcatcgtaaagcatcacaaatttaaagaaagataatcactgaaaggttgcaactgtgtcccacaccatagaaaagataaaaatctgccctatgcaccatatcatatatgttcttcggtgatgatctgacatgggtcagttctattcgatgcttgacactgagaccatggtttgcttgcatccatggacatcttttgttccgcttgtcgatgttttatgattgagaccactacacttcactgcaaccatggagagtaacacacccctagtgttttgaaatagaagcattatcaactaacattacgtcactccaatttgtaatgcatcgaatatattctctgataattcttgtgcatcaatccaactccttccagtatcctttcttgcacgctgggtgtcgaatacagtgcgattccagtatttctcatcccacatgtcaactgaagcatgaatgcttgataatataatgtatgcagaataatcatgtggtgtaatttccagaatcttcttagctgctattcttcctaaccccaaatttccgtgaaccttacatgaagctagcaaagcttcccacaatatttgatctggttcataaggcattgcatcaatgaagtccattgcatcacaaaatcttccagcacgagcaagtagatcaaccatgcaggtataatgaaccatcttgggttccaagttgtatttttccttcatttcattgaagtactcacagccttcttttacaaggcccattctgctgcaagatgatagcaggccaacaaaagtgtaagcatctgggcagatcccctcttcttgcatcagatcaaaaagctgaatggctgccacctcactgccatgctgtgaaaaacttgtgagtaatgcattccatgtgacgatgtctctattactcattgagttaaatatcttcaatgcaacctgaacacttccacaattagcatacaaggttacgagtgcattctgtacagaattatcatcatcaatacctagcttcagagtcctcgaatggatttgcaacccaacagcaagatttgagatgctagaactggctcgtagcacactagtgatgcaaaatactggagatcccaaccctttccggagcattttcctaaagaataaga

SEQ ID NO: 9429 - DNA, 848 bp, Zea Mays
ctctgaagcactatcatgataaggccatacggcatcgatcctttgcagtcggagatcttgtcctccaccgaattctaacgggggagggacgacataaattgtcgccactatgggaaggaccattcatagtagcagaagtcactcggcctggatcatatcgtcttacacaaatggatggcacgaaaatagggaactcatggaatatagagcatctcaggaagttttacccctagctagattttaaaagctattgggacggcattgtattctgtaattgggagatacaccatcaataaaatggcttcattttcaaaggcattcgaattgttcattgtcaatctgcatgcttactcgactcagggtgaccactataccctacaaacggagcaattggcttaagtcggcaacgacttaaggcggtgtgacatgctcacgcttacttaacccagggtgaccactataccctacgaacggagcaatcggcttaagtcggcaatgacttaaggcggtgtgacatgctcacgcttacttaactcggggtgaccactataccctacaaatggagcaatcgacttaagttggcaacgacttaaggtggtgtgacatgctcaagtttacttaacccagggtgaccactataccctacaaacggagcaatcgacttaagtcggcaatgacttaaggcggtgtgacatgctcacgtttacttaactcagggtgaccactagaccctaccaacggagcagtcggtttaagtcggtagtaacttaaatcggcatgacatgctcgcgactattcgattcagcataagcacatttgcgaattgcttagggcgatctctatgcccc

SEQ ID NO: 9430 - DNA, 397 bp, Zea Mays
gccgattatcagaggcaacagggggcctggcgcaagattccacatacataggctactatacattggactgcgggttgattcccatttttcccgagggctcatatgaaaacacacacccgcgaaggggtatgggaagattcggaccgttcagatcagatccgagggccaggatcggatcatggccgcagcaaactgacaagcgagtgcatccacccgatcgacgatcgacgactgcgatttaatgtcgtgaagcgttatcgctgcttctaatcggagccgctactagaagatccaacggctcccatcgccccgtctactctctcgcctacccgtcgatttagaccaccggtgccatggatacccggcgtggtggcgccatggccggagagccccaaat

SEQ ID NO: 9431 - DNA, 668 bp, Zea Mays
agccagtcatttatgttgggttagtctagagccagggcgggatccactcgagtggttccattccgacacgcacgaccttgcttgtcaggttccgtcatgcctgaccctaggctaggtgccgcgggttcgaacaggggtgggtcctttcagagttgacatatttgcctcttctaactgactaacatgccccaatgatcagggtatctttcctcagcatgctcactgaccagtgggtcttagggtccgagggtcattctctcgacagtagccccccatgtccccaggggggtatctccctctagtgtcttctcttctttctcggtttggctttgtaaagcctcaacgagtatgtcacctacccaccagtcatggtagtcctagatgtcatcagcatggttctagttgtcaaacaattggagcttctagccatcactaggccctcccaagaacactcgaggcccaacacatcttctacaatgtatgatgaatgttgagagccccatgtcccctctagggctatcaatggctccaaccctaaagtagaggtcatcatcggtcatatgtgtgagttggatgatccatggaggttgagataagattagagtctataagccctcttgttaatacctgtcggtactctgaaactagggtaccccttactactgtat

SEQ ID NO: 9432 - DNA, 353 bp, Zea Mays
gttttgcgtgatgcacgtttatttggtaaccttgagaagtgcaccttcagcaccgatcgtgtgtcttttcttggatatgttgtgacatcgcagggcattgagatggatgaggcaaaaattgttgccatcacgagctagccacttccaaccacggtcacgcaggttcgaagttttcttggtcttgtaggattctacaggcgatttgtgcgggatttcagcaccattgcaacacctctccatgagttgacaaagaatggagtgtcgtttcgttggggaccatcacaacagcaagcctttgatgccctcaagtcgaagctcacacaagcaccactgctgcaacttcctgattttga

SEQ ID NO: 9433 - DNA, 407 bp, Zea Mays
aggcgagccggtgccggtgacgatgatcccacgaccatggatgtcgccaggacatagctgatgccggaggaggaggcgctccggctctgcaccggttgcgtccacttctagacttccttgcctcgcttgtcacctgcaggaaggtacgcccacgtcatccccaccccaccccttcattgtcccttcgttatgaatctgcatcccctcacctccacaatgttgcagcgatgcccagcttggaagaatttggggatgaggagcccacgtcgcaacgttctagatagcgaacaaacgagggcaaaagagaggaaaatacatgttctgcaaggtctgggctacaccacgtcttcacctgcggtcacacctcgtgcctaagactggttaggattcttgacaatggggtagtg

SEQ ID NO: 9434 - DNA, 386 bp, Zea Mays
cggcgcagcagcgcgcggctggcgtggcggcgtgcgcgctccatttggttggtggtggtggtggtggtggtggtggctggtgggggtgggtagtgcgacgcgaggcgaggcgaggcaggcgcacaggaatgggaagtggcgagtcccgccccggggtgggagaggactcggcttccgttactgccgagaagagcggcgtgcctgggcctggggcctggctcagcgaccgatttggttggctagtaatgcatcatccggtccggcggcgagggaggcgatgaggtgcaggagcagctgtcacagcctgcctgactgcgccaagctgccagtacagtggaggtggagtcagcacgcacaaggaaaaacacgggatgggtgctttaata

SEQ ID NO: 9435 - DNA, 508 bp, Zea Mays
caaacagtgctcctctatcagacacaatagtcctctggattccatgcaaacgcactatttggtcgatatagatctctgcatacttttccgccttgtgggtggtatgtataggcaggaaacgagatgtcttggttaacctatccacaatgacccaaataaaatcatggtgccgggaggtgtttggcaatcccacaacaaaatccatgcaaatgtcctaccacttccaagaaggaatgggaagaggctgtaaggtacctgctaccttcaaatgactagctttgatttttttgcaagtgtcgcactcagatacatacttagctatctccctcttcttcctggtccaccaatataaggatctgaggtcatgatacatcttgttacttccagggtgcatggaaaacttggaaagatgagctttgtctgatattttcttcctgagttctgggtttttgggaacaaccaatctgtcttcaaaccatagaacacccttgttgtcctgacgaaagca

SEQ ID NO: 9436 - DNA, 663 bp, Zea Mays
ccccataatcgaactcaggctggcaaaaccataaccagtcctaggtgcacaacatcgccaatcagcagcagactagagacacaactcgtcatcacgaataccctgcgcagcagggcctcagcggaaacactagaggcaggggtagaggccgaagcccatagcagcgaaggttctattgccttttccatggcaaagactcggcacatcccaccagggactgccctaaaaccaaagccataaaggatagaatggccagaaaccaactggctgacaaccaaagagctatcgcccacacctaccatccccaacaatataactagcaccaattccacaatgagcattaccatccccactagcaaaaccacaacatataccagcaacaccaagaaatcccagctctaccgcctccgccaccaccacatcacgaaaatcaatggcctccaccaccagcactgaaacaagaggactttgtcgatcaaccctattgaggggtcgttcatatgatcgtcggaggatccaactccgagttcgacataaaacggtagaagaaagaatggtatcgaagggtcaatcatgtagccctcaccgggccagttgttcaaacaaagtagtcccatataccacttacctctcgatgcaagagacgtcgacctctgcagtgca

SEQ ID NO: 9437 - DNA, 568 bp, Zea Mays
ccgtagcacagcagaagcgcgacccgggaggggccactcttcttcgaccgcgggaggacgaaacggagaagaaaaccaaccaccactaaagctggaacgcgacgagcacggaagagaccagagacgggagaggaacgacacgaaatatgggaaagaatgagcaccaatgaaatctgaaggaaaccctaatatcgtacctttaatctcccccgctccacgcgacggcgcatcccgacggcctctatgggccgagcccgacgcagaaacccccgaggaccatccgatccagcgcgcgagagggagagacgacgctagccccacgacactcgataggatgcggcccatggagctcggacccagcaacgcgggccgacggggaactggaggaagacgacaaagggatacctggacgcctaacctttttttccgactaagttagctatcctgaaatattatttgcggctaagtgatgttaacaaatgatgcagatacaaatgtccagatggtttttgaaccaccttgctactaacaaattaatcttgctactgagcggataatatatcaccac

SEQ ID NO: 9438 - DNA, 445 bp, Zea Mays
gtcgatgttccaggagtgctccaggtcttcgccgtttggcgttgcgagcctgtaagcgctgggggaagctttcgtcttgacaatgaaggggccctcccacttgggctccagcttgcccctggactctgtccgagctgttcggacgagtacgaggtccccttcgctgaattccctcgggatgactgcgtggtcgcgccatgcttttgtctgggcttggtatttatttagagcctgtagggcgaagactcggtctccatcgatgagatccttcgaagtgggctcgtccacgtcggggacggctgacggaactgttcgcggggacccatgttttatttcgtgtggggtcatggcctccgatccatataaaaggcggaaaggagtgaacccggtcgccctgcactcaatcgtgtttagcgcccagaccgcctcgggtaacagatcggtc

SEQ ID NO: 9439 - DNA, 347 bp, Zea Mays
gcaggcgcgcgacagaagagcgagtagagcgatggaaaaggacgaacggtccaacagaatgtctagaagtgggaaaaaaacgtcaagacatgtatttaagacagagaaggtagttagctactaactgatggcgacgacgagaacgagatagacacgtgccgtacagtgcagagtgcagacggaggaattctcgaataaaggccgtgtgtgtacgtacgcgcgttccatgtgtgtgtggatgattgggcttgggcacgtacgagtgtacgacggcgacgggaaaatgtttgaaggagagacaccccacggcatgcacgagagaggttgtccgttgtcgtacatacgtg

SEQ ID NO: 9440 - DNA, 342 bp, Zea Mays
agaatagctgtctagggcaagcttccaaaatcagcagtgtgtcatccgcgtattggactatcggaaaatcttgaccacaattctctggcaatggtaacttgagcaggtcttgccgccgcgctttatttatgatgctctgaagtagatctgccgcgagaacaaaaagaagaggcgagaggggatcaccctgcctgaccccacgcttgcagtgaaaggttttcccagggacaccattaagaagaactgaagacgtgccagaccgaagaatatccctaatccagcttatccatctgggcccgaagccattgtgcagcaatacctgaagaatgaactcatgctcta

SEQ ID NO: 9441 - DNA, 849 bp, Zea Mays
gcgagacgcataggcacaggagcaaatggagcggcatgcagctggctgtgtgtggagtggacgagcgggaaacatccatggaggggaggcggttccgccatgcgcggcatgcggcaagacgcacaggcacgaagtgcacgagcgggggcatggttgtgcaagagtctatactattaacttaatagatagtagagattgtagttaatattcttttattacatgtgtgttgcacgtgcatttccactagttctagtaatttcctatatattaaagtggggcgcaaaggtcccatctggtgcgtccacgtcatttgtgttttctcggccctacaatcgtccttcaacgtctttgatttaagtgtgtctccatgggaacctttcggatgaagctcacacctttttcagccactccctcgaaacgcgagcgtcgctacgcgcctcgcagccctcctcatcggtgactccggcccccacgagggcggcttgccgtttctcgccgcgcgcaccattgccgaggttcgtgacgctgtgtcccaatggtatatttgcttggcgcgccacgcggccatcgatgcgctccatgacagcctcctcgccatcggctgcgtggaactcaccgaggatgctggttgcttgctgctagggatggacagatttgggcacgagagagagtctaggctgaagcttgaaggaggagggcgagcatggcagtggcggctgtggcgctgtggagtactatcagttcaaaggctcctttctccttttgccccctaagccattggtatgtctcccctcctcatccttgtcgtctccgtctacatctacgtccttctcgcttcactcccaattc

SEQ ID NO: 9442 - DNA, 561 bp, Zea Mays
ctatttctctttctccttttctataatctctttttcctttaaacaaatatttatctagatttcttgggtgtcaaaatattctatgtgaagttctactagcaatcatggtgtatgcatatgatgaagggaatgttctatgagatggggtcttaggacaaataagggggggtttaggagtttagggtttctaaccttgggatcaaaattgggatgttacaaacctaccccacttaaaagaatctcgccctcgagattcagactgggtttgagaaaaggtaagggtattccctcctcaaagagtcctcactctcccaggtagcctcctcttctccttctctactccactgaactttacagagtttcacttctgagtttcgagtctttcggatggctgaatcaagaatcttcactggcttttctcggtactgcatatccttctgaatctgaattgtctcttcttcgatgtgactctctggtactttcaggcatttgcggagctgagatacatgaaacacattgtagatatctgacatggattctggcaattgaaggcggtaggct

SEQ ID NO: 9443 - DNA, 376 bp, Zea Mays
gatgcagaccaccttcatgatgtcaaacgttctagatgtcccctcatgtaattcgatagaaaccacaccttataatcccatatgcaagcagccaaaacccaataccaatgtcaccaatgctttagcaatcccctcctccactccaatgaataccatacagcctcgcaaaggtatgaaaatgaacacaaaaggaaaaaatcggtatgaaggcaagtggaatggtaatatttattacaccatcgtcgacaccagtattgataaatgcaagggcaccaaaaaatcaatttgtagcaatgacttcatggtctctagcaaaaatcctaagcagacctttgaacaacatgattccatcataaagggaaagcgaaggtttaat

SEQ ID NO: 9444 - DNA, 446 bp, Zea Mays
gtctttcccaaaacagttcggacgttaagatcgaacatctaccgcagcgaaaagacagtattacggatgatccggtccctgagaccggaaagtccgccatcacacaaagaccatctgattcatctgtgggggacatgatagaggaattcagagatcttgataaactaggacagggatttacatcggccgatcctttggaggagtttgacataggagatggtaacactccaaggccgacttttgtaaacaagaccctggagaccgatcctagaaatgagatgatcggtctattgaaagaatattcagattgttttgcttggaattacactgagatgcctggactaagccgagagatcgtcgaacatcggctgcccattaagtccggtttcaggcctttcaagcagaaagctagaacctttcgtccggatcttctcccacgaatcaag

SEQ ID NO: 9445 - DNA, 533 bp, Zea Mays
tgacctgggtgcttttagctctgagattccatagcaaggtggtagaggtttgttttgtgatcataattggttaggcttggtcgacctggttcaggtgggcagtagaatgttggactcgataaacttcagtgtggatttttaactataagccagatctttatgcacagttgatggcggttagttttggcctgtggtgttgtggatatgtgagggtgtctgtggggatgtaaggatagaccttgagttccaaatatctaagcctaaggaagtttataacttatcagacagttgctgtcctgctataatatgagtcctgcatagtgagatggacagacactgcgtgtcctgtttcatgcaactcctaaccctcggtgtgtgcatagtgagatggacagacactgcttgtcaccgttcttatttctgttaccgtggccaccagtgtagtattgttcttcctgtcttctcatgcccctgatcctaaaccagcgagtcctttatccctctctatcttcgtgctcgtaagagctttgctg

SEQ ID NO: 9446 - DNA, 807 bp, Zea Mays
gtggactgacatcaacttcaagctcaattctgagcatgatccagtgctcaactaagtttaatccctatagtcgaattgtagctggtttgtatctctgaaactttgctacagagagtggagtgagttactagagaaactttagagaaatttggacctaaaattgctctgtcaggttcatctaactgaacttcctccatggtacagtgctatcgggaggatcagatcgccagcgcaacggtcctcaccgccggtgacctgccgccgcgattcgtgctgctgttgccgcgatttgggcttggctaagttggatagcactttgggtcacataaatatcctcgccgtggataactccggccataaacaagtccggccaccgtaccgtgtatgccgcggtggaaagttcgatgggctcgccggtaaaccgtcgtcgcacggccttatgccacgtatccgagcaccccgtcgtatcatcgtgactccttactgctgtctcatcaacgccggtgaggttgccacggcgggggacacgaagtcgcgacgacagtgctcttccttatctccggccacccgcacggcccggccaaattaagcgccaccgacgaagcttcctataaattgatggctcgggctacgacgctaagtcatcccgaagctatagcacccgctcccaccctcgatcatccaccagcacgcgcgaatttccagttctccccaaaccagtctccgccgccgtgaaacccaccccaccgtggccgaaccgctctggtaaggctctgcccaaatcaaatgttgtttccgcaactccgt

SEQ ID NO: 9447 - DNA, 697 bp, Zea Mays
gtcagtgtgaaacggtggggaaagggggatttggtttcggtctttatagtgcctgatattaatgcgagtgggtggggggaattgaatcggaggccgcccgcacctaaccggggcatcgcaggtcaatgccggtgggcccgagtggtttagtggcaggcagccccccctcagagcccaccatggggcaagggcagagaaggggtggtggtggtggcgttgttgcgcctatgcgtggtgtcttttctcgatacggtccggtcagatcaggtcagccatgggggctgagagtgctgggagccggcttgctaccagaagtgcgccttcctagtgctttgtttgctatccagcgtctgggatttggctggcttccgtggattgatgagacagtgtgagtgtggctgctggtgctagtgcggggacgtcgctttgctcccggccttttaggcagggttcttggtgcaggattacgggccgagtgcgatggccgccttgctgcatggtgggtgttcttgtcggtctgtgttctgcacaaaggtggttctgtgcaatttgggagtttggattgtgaccacatggtaaaaaagcagctactatttggccagaatttttaaaaagggtgatctggaattggatggcagaggggtctgcttctgaatttgtttttcttttttcttttgttacttttgatttatcaatc

SEQ ID NO: 9448 - DNA, 491 bp, Zea Mays
caatcggaatttggggtgacggtggcgcacagccactgttggcggcaatggctccgccgttggggcagagcgccgccgtgtgtggccagcggaggagaagatgcacccatggccgttgatttactgccgaacggttctgattagatcagtgatacccccttcgttcgggccgtcgatctcaaatcggacgataggtgcttatctctatattcattaaatggtgaccattgatcttagatcgtgtggatcccatggcgtaccggttcgcgcgtttgttgatttaatctggacgcgtgatttctaatctgacggccagtagttcacggtaccccttcggccttagaatcttgcataagagcccctgcgtttaatcgaattagaacccgccgtccgcatggggattcgcctgagtcacgggaatacttgcgcagaggcccctgctttctatataaattgaggcgcagtccaggaattaaataaaaccagaaaaa

SEQ ID NO: 9449 - DNA, 1324 bp, Zea Mays
ccgaggtcttaactaatctgcaaaacattctacataatatctaagagtcaccgacaccttacaccgaggtccctggaactttgcttcttccccaaatacgtccctgaccacggcgcgctcgccgtcgactatctcgctgctcggtctggccaaaaacttcggcggctacccaaaccagctgctgggtaagcatcactgacccgaggcaaccatagaacaggctccaatgtgactaacccggaccaggatgtgcttgaccacggtgatggcggacaccaagcatcgatcaatacgtttcggttgcatacgtaaggtaaaactccctgggttgcgtggataacaatcccgagcacatgagggcgctaaaacacgagcaacaagggcgaggacggacctggaatcagctggccgcaagtaggcggttcacgacggcgcagtcgaccgaattggggggaaaacggcgttgcggcgactctgggtgaaattgggggtggggattgaggctacacgaccgtaagaaactatagcttcaccgtgcagactcaatttgggagaagggggcagagacaacgcgaattttggattgcgatcagctcactggtgaagaggtaaacacctcgtcgtggctccctgctctatatataggcacgacgatccgacgatcatttcacatgccgaccacgtcagtaggaggcacagtgagagaaatcacggcatgcgtgacagcgcggcgagagttcactgagtcacggtggtcgccggtgaacaactccggctggctcggggtatggtgccacgtacgcgttatctgactccggcgttatccgttccctaccacgcacgaacccggacggcggtggcacgaattttggcgcagagaggttgccggcggtgagggtctgtcacactggcgatctgatccatctcgggacactgtaccatggcgagggtcattctgatgaactgacagagcaagtttaggtcacattttctctaatatttgcatgagaacttcatcaaccctctgtaccataagttatagacctacagttaatcttcaactttgccacaatgcttaccatcaaatagtcactgaatcccattcaaaatcgagctcaaagttcaccccatcacactgctattgaaaattcagtccagggattgcctgacagcccgactttgagggtgattatctccaattttttctcaacaactatgcttacacttttaagcaaagttgttctcctatgattgggctacaattttgatgtggtgacctagggcaaaaaccctatattttgaaagatacaaagctcaaaagttg

SEQ ID NO: 9450 - DNA, 592 bp, Zea Mays
ctttcctactagaataagctatcacgctgcagccgacgacgcttgctgggaggcatctcatcgcattggcttgccccgccatcatcatcgccgccatcgtcgccactgtcgtcgttgtcctcgtcactgctgccgtagtcactgctgccatcgtcgtcgttctcgtcatcttcgtcgtccgaggagaccatgcacatccaatgtccagacatcaggttgtcatcgttgtccaaggactccacatctgacgattctccatcgtacgcccaagaccactcagtgctggtgtcggagtccagctccccgtcaacgaggaactggaggtcgtccccgtcggtgaggtcaccgtcggattctgatgcaactgcaaagtcccatccatctgcatcccagtgcaaaggtgcctgtttttcatatgccgctataggatcccactctggggttggttaacggctagaagaatgggagacaaaagaagcaaaggaatcactcggtgatgtcgacatgggtaaagctaagcgttgtggccatgaatggaaatgtgcctgttttttctgagttgcgatgaatggaaatgtggccggccgatgac

SEQ ID NO: 9451 - DNA, 292 bp, Zea Mays
atcttgaactatattttataagtaaagaccttgatttcgattgaaaaatgttaagaacacattgttgggccttggaggcccatagagcctatttctatatattaaacgtcagcgcaaagctaacttctcgaattgccacgtcagcctttatttttttagccgttggatcagaccttaacggttccaattccctgcattatctctcttgcaccagtctacacgatggctctagaaggagctcctccccctctcgtcggctcgggtcgtcactccctcccataaaaaatcgccg

SEQ ID NO: 9452 - DNA, 402 bp, Zea Mays
cagaagtgtaggattacggggaggctacgctagcgcaaaacaaaattttcaaccccataataccaagaactactgcggttataggtcatggaattaccactagacgcacagagcagcggaagacgtctcgatgtagacgaacgcgtcgagcagtgccgtgcagtcgtcggtgtccttcacgtcctcgcacggttcgtccaagtgctccagatgcagcacctccgaggtatccacacgtacagggaggaaacgttgtgtaccgaagtgctaggtccgcgacggcggcttggtgagggcgagaggcgagcggctactcgtttgctggtggcgaattaggttaaacctaaccgcgcccccgcccctcattatataggcgttatggtgggcttctgacaccgaggc

SEQ ID NO: 9453 - DNA, 469 bp, Zea Mays
caagcctaggtcgaaccgttacccggcttttgatcctagccatccgtccccgcatcaacggcccaggtgtctcccccaatatccttgtcgagctacggtggcaccgcccagggcacacggcggaccatcgccggagcacagcgcgcacccgatttgaggccccgtaaccaaattctctgcttctactctatccccatgagttagcgaatgcaagggtagtgttaataccttaattcgatgtgctgaacgccctggccacggcagcgagcacggtcacggcggagtccggcgacggtgagaaattcaggacgtttgggcggaccactgagcgcaatacttcacgcagacgatccccacacgccgatgaacaatcccgacaccaccctggccacccaccggcgataccgggccggttctatggtggcagacctttctcttaccgcggacacagcactagcggctgcggcgg

SEQ ID NO: 9454 - DNA, 734 bp, Zea Mays
accgagttggagtaggttggtcctagtgccttcaactgagggcagttgttcttgaagtgactggggtccccgcagtgccaacaagcgtttgctggcggctggttgcttgcaacggagggtgcctgatgggagctctgactctgctgactgtagcgcgatggagagggtccagattgcttatggaagcttggacctctgggtgggagcccaaagggtcgagctctctggtgacgttcttgctgttgtgctctgaggacctgtaattttctcttgatgtgccctttttcttcctattttgccctttccacttgaatagctttgttggaaaggtgagagaagctgtggaagtcctggctggcgaggatggtcttaagctcgggtcttaaccctctcagaaaacgggccatttttctggcctcagtgctgacatcttcgggcgcgtagcaggccaactctgtgaacttgtgcacataatcactgactgttctcccgccttgtgttagctcctggaactcatcctccttgagttgaactatcccctggggtacgtggtgctcacggaaggctgcttcaaattctgcccatgtagcatctctgacggcttcactgaaagtgtcccaccatgctaaagccattcctgaaagctgatgagctgccagctgaacacgctgattctcaggacaagcgatggcttccaacttcctcttgatcgtgcgaagccagtcatctgcatc

SEQ ID NO: 9455 - DNA, 590 bp, Zea Mays
tcttttactgaaccccttggctctcaatttgagttcaagatctaactgaaaaaaagtaaatctcgcctgaaatttttgtaaaatctaatagaaaggctatcaatgtattagccgaggatttatagaaatagaaccaatcaacggagatccttgtctaataaagatcggtctatctatcaatggagatccttgcctaatagagatcgatctatctatcctagccatggcaagattctaccaccaaccaaaggaggtccctgcctaatagagatcgatctatctatcctagctacataagcaggattctaacaaaatcttctgatttaggtttggtaacttcagttcaactgctttactacaattgcaactgattcttgattttgggttatcagccaccaaaacatttcccattattggtctttggtaccctattatatccctgtcttttttcccttttgttgatttggaattttggataccattcttgctcagacttaattgaaattaattcccggtctttttgctagttaactattacagcaggaccatctcgatttttcttgaaaggctagcaatagcaacattgtctt

SEQ ID NO: 9456 - DNA, 334 bp, Zea Mays
acgctattcattgtatacattttttcagcagaggcttaatgtgagatgcaatccccaacacgttatagtaagcatccagattttaaatgacagacagcgccaagctattgcacggagggggttcaccagtattcttgatatgagagttgacgcacttggcaatagatctcatttagcttggctgatggaaaagcttgaccataatgacatgacaattcgagccggcccagggaaggagctcaaaattacaaaggagacggtgcaccttattttggggttaccaaatgctggtggaggaacgacattaggcattgatgaagctgttgctgcaaac

SEQ ID NO: 9457 - DNA, 535 bp, Zea Mays
gtcggatgaggacttggattattttgcggcgttggatgtggctgcagcagagccttcgccgcacgtggagggttccgaggaactcccgggcgcgagtactgggtataggtggcggagggcggtggcgaagcggagagtgagtgaattgtcgcgaagtggtaggcgttatcgaagcgaggtggagaggggtcatcttcgcgtggatgggactggtatgcgagaattgttgtcctcgccgattggggtgagtgtgggtgagggggagctgcgaaatctgtttgagggtgaggaactgaggataatgctattcaactacagggagattggtatcatcccgaaggttgagccaatgtaatatgtgatggcctcgctgtgtgtatgtaaccataattttgtgtgatgaagctgcatgatttcgttgatcaggccgctcccgtgggcgacttctgtacggagtcttttggaaaagacttcgattttggcgtacctattattccggccgcacccgtaggcgacttttgcgcggagacttttg

SEQ ID NO: 9458 - DNA, 400 bp, Zea Mays
aaaaaatcaagttagccatcatgtgcgacaacattcagagcaaaagtcgccaaagagtgcagttggaatagcacaaaaagtgtgtgaagacaccaaagggtgtgaagtcatcctatcaaacacaaacattctgagcaaaagtcgcctaagggtgcagccgaattagcataaaaagtgcacgaggaaactcagcggacacgaaggcaatatagtcgtcacttggcaaagggggcgagggcagcgttccactccaaaattgtcgagcaacgataatacacagatctaaatcctagagtccttgccccttgatctaaaagcgtattatttaggtttacaaaggctccacctttggtacaagacaggcttccctcaaagagtgccctaagctcctactccccaa

SEQ ID NO: 9459 - DNA, 352 bp, Zea Mays
agaagatagaagatttaagaaatgggttgtcgggtagttcactggatcgatctggtgtgcattggaatgattacatagagagccctacaaaccggctctcggtcaactggctatccggaccgatctggtggtgaaccataccacggtccaatggttatctaacgtggcggcaccagaccatgcgagtggcacactggaccgttactatagcaaaagagaagttgtcagatgccaacggctagctgacatggaggcactgggtcggtccggtacagtgcagaattgcaggattcctctaataactagttttggatgggggcctatatatgaccccttgaccgaccatttgaaa

SEQ ID NO: 9460 - DNA, 443 bp, Zea Mays
gagaaaatgagaaaaatcatccaaaatcaccaaatagtatttatagccagaaagactgagtacaggggaggtccacagatcacagtgaaccaggtcaaaagcctgctcagcccgagaagaagaagtagtaaatgggagacgagtatgtcggcctaactgacaagcatgacagagaccctcaaaatgtcccctactacatgaaggatctagactacgggtaatcttggtcatgacgtcggatccagggtggccgagacgtcgatgccatgtggtggaggaggcggtggagaccagggcaggaggtggagacacgccggcggtggtgggctggagcgtgtagagtggccccgagctgtcacagcgggcgagaagggtcctggtggccagatccttcacagaaaaaccagaggggtcaaactcaatggaacaggagttgtcagtag

SEQ ID NO: 9461 - DNA, 336 bp, Zea Mays
tctggctggttgcacaaaatcgtctctggacagcggatagacttgctaaaagagggctgagtcatcctgagaagtgccccttttgtgatcaagaagatgaaactattgatcatctccttgttacccgttccttctctagggaattctggtacctgttgttatggaattttggcctgcattctttggctcctcaacctgatgttggatcatatctaggctggtgggaatcggtggggaatattgctgctggtctcactagaaaagggcttgattcccttatcattctgggagcctggaccttgtggaagcatagaaacaaatgtgtttttgatggct

SEQ ID NO: 9462 - DNA, 568 bp, Zea Mays
aggctggcggccgaagaaagggggtgagtcaccggcacaggttacgtggctttcaccgtggcaaagcctccggcgatggacggacttgctgctatggttcactgcgacgtgttaaagctactaggcacgtggcgcacggtcggtaagcggccaatgccggcgaggatcatctcggtcgaccgtaggccaagtgggtacggtgaacccaccagtgaccgggtctgagcctatccgacatcaagatctttactttgccacgactatctcctcacccaagagcacgaatcgtaccaccggcgcggatcacggcgcgagggtcaccggcggcgaggtgggatgaatctgaagatcttttcgtgtactgtaccatggccatcttcttaagtcgttctgacagcacgatttgaggagccttgttctccattttccatgtgacaacttactaatctgtttgtaacaaagttactaacctacaatccagctataattcaactatagaagccttgagcgaattctgattaaatcatacagaattcagcctccaaagtccatccgagctcactatcag

SEQ ID NO: 9463 - DNA, 758 bp, Zea Mays
taacaatccagaaacctgagagaattaacatggctggacctttggatgcattgaaacctgagcaatttgctggtggagaaaactttaagagatgatatgctagggttaagttctggatcatgtcattgacgatctattcggtgatttccccaatatttcctctcactaaggaggaggaccgtaactacgagtcggataactctacctgcgttggttgtatcttgacattgttgtcaaatcaactctatgacatatacatgcaccacaatgtggctcgtgatttatgggaggccctggaccaaaatatacaaaattagatgatgcatatggactttattttaatgaccagtaccatgaatacaatatagtcgatgatcgttatgtcgtggaacatgctcatgaaatctagcttccggtggggaacttgcacactttgactgtgtcttgccgaacaagttcgtggttggtggcatcattgccaaactgcctcctacttcgaggaattttaccatggctctcaaacataaggaggcaatgactgttgaaactctagttaccactcttgatgttgagaaggcgagatctaagggtgcgccttgttctagtccaatggatagtggcacctctaatgccaacgtggtgtaacggaacctccgaagatattaggcccacctatagttgtccttgtcccaaggaccttagacagtcgctcagatgcacccaatagctcgataggacctagttcacacatcttcttc

SEQ ID NO: 9464 - DNA, 426 bp, Zea Mays
ctggtggcgttgaatccggtgagcgccggtgaacctccaccgcgtcgttggcagcgccgccgcgggctggctggggtttgggggaagcgattctggccgttagatctgttgccaacgcataggattagatctggatagcgcatcgtccgcgtccgttagatgtcgatcggatggctcggggtggacttctggtatttaaaatctggtgcattcgcgggggatcggacggttgcgattgcgtaccgattcgtatagaattgttttaatcccggccgttccgatctaatccaacggccgatagcacacgataccccttcgcggcgcgcgatttgtaaaagagaccctgggaaatggggaaatcaacccgcagtactatcaatagtgttctgagccttgaattaacttgcaccatagcccctgacttcc

SEQ ID NO: 9465 - DNA, 670 bp, Zea Mays
cagggtacaaatccaggtacaaatcggagagaaacggatacacatggctctgttcagcttctgctgcatgcagtgcagtgacggggaccagtatcttggaatgtgcctggaggcataggcatggccttttgctggacataatacttgccatggccatgctgagttaattgactttgtaacattctggtggcgcgactttgctagtctactactccgcatgtgcgcttcgccagtttggtactatggagcacacacccgcgctaaattgggactgttaatctcccgcgctctgtaaccttccatgagctatggtaaaagtcaattttgtccctgctttaaccacgacgctggtgaaaacctaacacctctttccattccacggcgccgccaatctctctgtgctcgttcctccgatggcgactctgacgagagggaagaaacggctggtcgtcgacgtcgatgtcgaggtcgacagtgaggccgaagtggctgccgccttcagtcgattgtccgtgtcaatcgtcgccaagcctacaggcgacggtagcggcaaggagcactccaccggcaaggatgtcacctgcgcggccacatcaggtacgtggtacacccagcaaactcaccagcaacatccccaatcctacaacagccagatgcaatttactcccca

SEQ ID NO: 9466 - DNA, 744 bp, Zea Mays
aacggaatgatactggaagcactcagaaacaaaagtcttcgacaagaatgaaaagttcgcaggaaagtggatcagagagttgccgtatgttatctggagcctgagaactcaacctagccgagctttacatggaaacactcccttctttatggtctatggttcggaggcagtgctacccgctgatctcaagtttggggcaccgagattaatctttgaaaacatagcagaagctgaggctactagactggaggatgttgatatactagaagaagaatgattgaatacggtgattcagtcagcccggtatcagcaaactctgaggcgctatcatgataaggccatacggcatcgatccttcgcagtgggagatctcgtcctccgccgaattctaacgggtgagggacggcacaaattgtcgccactatgggaagggccattcatagtagcagaagtcactcggcctggatcatatcgtcttactcaaatggacggcacggaaattgggaactcatggaatatagaacatctcaggaagttttacccctacctagatttcaaaagctattgggacggccttgtattctgtaaattggaaaatacatcatcaataaaaagacttcattctcaaaggcactcaaactatttactgtcaacctcacgcttacttaactcagggtgaccgctctaccctactaacggagcaatcgacttaagttggtgatgacttaagacggtgtgacatgc

SEQ ID NO: 9467 - DNA, 838 bp, Zea Mays
ggggcttaccgacggcgagatcgctccggcgaagaggccgagggtgtaggggaggtcgtgacggtcatgccgatgtgcggattgtctctggggatggtcggagtaggtaggtccacgtgcacaggcgggggagctcgtcggcagcgatggctctagcctaaccagggcggtagagttcaattgaataggtcagtgagctccactaggtgctagggaaggcatgggcgcgaggaattgaagaatggctcaccggataactcggtctacgcgcggaatggctcatcggataagtccggcgatgatgatcttgctgttccagtgagacagggcttcgattctcgcttggagaagcttcacggctcttcagggaagctgtccaagggttggttgaggctgagggtctctggaaatggctggccacggtggtaggcgctcaggtggctcgggcgggtggcgcagagctcaccggagataagggtggtgtctggctagcgagggtgagtgcggagtgaggtgaggcacgtctatgggtggtcttaaaggcgtgggtgagcacgatcaaggggtggctctaacacgctctcggggtgtgcacgggcgagcgccagtgcgcgctctggcgcctaggcacgacgtcgagcacaaggcagcgcagagagaggtcatgttctagcgcagattggatccaaatctttgtgattatggccatgatcccgttgagagatctcttcacctgacattcctttgtcgtttgtctgtggaggcttatgggtttcgctgactggatcaagagatatggagggatgaagttgggtttgtctcactactgaactctgag

SEQ ID NO: 9468 - DNA, 530 bp, Zea Mays
attctttcttatcttaatagatctgactaatctcaaaagattctatcctattcttagagatacatcttgttctaataagcatacttatccccaccaccttgcttatttcataatgtcgtaacaaacacgatctattccaaaattaaattaagtatactttatccagtctaatctgattacaccaatttaattctgatcccatctaatttgatcggatctaacctaatggacaaacatgttagataatactggtaaaataagattggatcctactcttataaatatgttttaatccaagttggactaagattccaatttagactagaccacatacaacaaccttgccatatgcaactaccttaaccactcgatagttacataacccctctgttttaaccaacagggattttgacctacctcatatagcctgccctacccacagctatcttatccaagacaccactacgaagaagatcaacctcatcaaggaaaggataagagtcatcgtcaaggataaaagttaaaccaga

SEQ ID NO: 9469 - DNA, 697 bp, Zea Mays
tggctccggtagggtcacacccattgggatcagctttggcaaggtcacacccattgggttcagctttggtagggtcacacccatagggatcaacatcagcagggtcacacccattgggtttagctccagtaaagatttccaccggtacttcttcagcagcaggagcagaagggccagcaccctggtccagacacgatactcgccgaagccgtctcttcttcttcttcttcccctcgacaggtgcagttggatgactaacctagcggagacgtttcgggcgagtacccttaggctttcgggtgtccacggtttcttcaagctctgggatagttgcaacagccattgtttcagcagggaccgagtcagaagaatccccagccaacatgtccaacatagcactcatctctacatcacctggactcgtaggcatctcaaagtgaacttgcctctcatcattgggaagatcaccaaatgaagcaaccaggacctcaatatcttcaagatagggtcgcactctaagacccaaaccactatcaccgacatgagaattggatacaaaatcgaaaaaggacttagaaggtggcagattccaagcagaatatgcaacaggagcaccaatatttgatactttgcccctcaagatcatctccagtaggctcactaaatccacagtaggaatcctcttgttggtaacccg

SEQ ID NO: 9470 - DNA, 389 bp, Zea Mays
ggagtccagagatggtggtcaaaggtgaagatgaaggtgatacgggtcttcaccgatggaccgggtgcaacgaaggacgagcgttaagtcttttggaggagctcgtcatgttgctgacggagttgtggaccagtgggacacatgtctaggatgtgaggagcgtccatggagcatgctacccatgggggtttcgatggttgagcctcaaaaccatccagcgcgacagttcgcaggtttcgccaggtttggacctcaaaacccggtggaacagttctagaggaaattggaggtggtacacggtgtcatcgaggagtttacgtcaaggtgaagcaacattatgaagactgtgtggccgtcagctcaaaattccaagaattggtccattttgc

SEQ ID NO: 9471 - DNA, 1163 bp, Zea Mays
agcaaccaaattgaacaaaaggggagaaaaaggatccccttgcctcacccctttgtgagtagtgaagtaagggcccagagtatcattagtcttgatggcaactttaccacctctcacgatcttcaagacctaatcacaccacttactaccaaaaccttttttctccatcatattataaagaaaatgccaattcactttgtcataagctttttcaaaatcaatttttaaaactactccactttgatttttccttttaacttcatggagaatttcattaagcgatatgaccccatccataatatatctatgcttaatgaaaccatattgagaatcacttatcacttttgtgatacaactcgccagtctgttgttcagaactttggaaataatcttgtagcacacatttaaaagacagataggtctgaaatttttcatgtcaaccgccttgtccacttttggtaataatgttaccaccccaaaattcagtctctctattttgagactatcattgtaaaagtatttaaatagttggacaatatccaactgaatagtatcccaaaaagtttgaaagaattcagcaggaaagccatcgggcccaggagcactgttatgcttcatctcaaaaatcactttcttaatctcctccacagagaaaggagccgtcaggaaagatctatcagcgtctgataattgattcatgttacactaagacatattgatattagatatcaccgaatgaccaaaaagatctttataataagaagtagcaattttattaataccatcagcatcactcacagggacaccatcctaatttaagaaaggaattttaaccctcctctttcgacctttagctaaaagatgaaagaatttggtattttcatcaccctcattgatgaatttctctctagcagtttgtttttttacaaatttcttcttccatgatctttttcagattccattccatatcaagcttttcgattctctcagaatccgagatacccattaattcacattttttatctaaaatatcaattttttccatcaactctttttttaatttcaaatatctaccctcaacattgatgttccaacctttcagcaattttttcaatcttttgactttttctttccaaatatcaataccgatcttacttttaaca

SEQ ID NO: 9472 - DNA, 524 bp, Zea Mays
acccagtggcgacgaccccgacgactctggggacggcgatgacgaggatgacaacgacgatgaaggaggagacgaacacgtcaaccaggaagccgactacgcccagcaggactacttcattgggtttggtccagttgtcgaacattacacatcaatgttcgagatggggcacttccccaacctactgcaagaagtgctgcacgcgctaggaacctacgtctgccccctgtacgaaacaaggcgagtgagcgagcctccccaggcttgctactacatcactgagatccacgtcagggtgatggatgcaggggataggggattcaggactttgtctgctcatgagtccctgacaccactgtccacctacgctgcctcggtcagcgacgctgccaggcggaccctgtggtcgctcagccacacctactggcagcagttgcaggacacgaggttcaggcatctccctctgcgtctgagtggaggaagtcagaccagcatcgtcccaggtgaagctagtgaggatcgcc

SEQ ID NO: 9473 - DNA, 380 bp, Zea Mays
ggtgctgttaaataattttgcattgattgtggtccgtgcagtgattgaatcctccaattcgtttttctgtttcttttgtgacacacattacacttgaggcctatgtttatcgatggcccctcgttgatgaatcttatacatagtaggcactgacttcatttgctgcctgcaagagctagcgtgcctgtgtttccatgttatgcaaattttctgttggaaccgatagtacatcattttgatgaccctggagttgctgtagtattgtttcctctactacaatttcttgcatggcaggaaaccttattgcattctgctgtttattccacagtaagattgcaactaatagacaggaaagtcaactcctttcctgaaaacatttc

SEQ ID NO: 9474 - DNA, 295 bp, Zea Mays
tttctctctactagttttagcaactaatgtttaatttcttttaagttttaattgatggatttgaggtgttacatattctatatatcggggagaatgcatgtaacttgtattatccattggtaggtcctcaatttgcttccaccatttgattcacctaaaaggccaccacccaccagtagccgagcctcagctttttctggagctggcaagcagccctcatggacctcatgtgatttatattcacccaaaaaaagtttttcagaaaagaatttgtatatattttcgtcaactctat

SEQ ID NO: 9475 - DNA, 381 bp, Zea Mays
cgggtagaaagcctagagcaacaaatcaaggaattaaaggaagaaaaggcgtcccttcaagacagtctcgagatggcggaaggcgaagaagccaacactcgtgaaacataccggactctgaagatggactatgctaagaaattaaagaagctcgcccctgccaagaagatccgaaagcggttcaagagccaaggatgccagattggccgaaaagaggaagccccaccaacactgcctccctaagggatagaaaccaatttcgacgtggaggaggtgtccctggctagccttgacgatcttcttagggagtttggggacaccctagaaaacgctcgcgcgtagtgtgatctatggcaattgtatgcttgtaatgaacttgag

SEQ ID NO: 9476 - DNA, 762 bp, Zea Mays
acacccattggggtcagcttcagcaggatcacacccattggggtcagcttcagtaaattcaggcactggcacttcctcagcaacaggaacagaaggaccggcaccctaatccaagctagacacccgacgaagacgtctcttcttctttttctccccctcagcaggaaaagaggcttgatcggctcggcgagaacgtttcgggcgaacattgacagacctctgagcgtccaaagctttgtcagcctcagggatgggcgccaccaccaatgtttcagcaggagcggcatcagaagaatcctcagctaacatatccagcatggcacttatctctgcatcacttggattcaaaggcacctcaaaatgaacctgcctctcgtcgtcaggaatttctccgagcgaggcaaccaaagtactaacttcttcgggagagggtcgcactctaagacccaaaccgctatcaccagcagaaggatttgacacgaaactagtataggcctgggaaggaggcaaattctaggccgagtatgcaacaggagcgccgatgttcgacaccatgcctctgagtatcatctcgagccggctcaccaagtccacggcaggaattcttctgttggttacccgggtcgagtcagccaagcctcggtacagataagtcgtatatgctctgtctttcagtggctgaatgttcttgaaaacaaagtcagcgaccacagcttctgcagtcagacccctttctttcaacaatccaacttctgctaacaa

SEQ ID NO: 9477 - DNA, 646 bp, Zea Mays
aggggctctgcgcaaagtattccaggactcagagcactgtcacggtggacggcgggttgattcttctataacagaaggtctctttagcaaaatgtacccgcgaaggggtatctagggtttctggccgttggattataaaccgacgcataggattaaatctaaacagcgccaaaccggtacactacgcatcccgttggattggagatctgtggcccaaatttaatgaatcgcttaaccatcccctgccaccggatttgggatcgacgaccgctagaggcccaggccgaatcagttttctttggtttgatctagaccatccatctatcaacccatggctagcgatttctgttaaatcccccactcacaagacggtggcgccggcgccagtcacggcagccgccattgccgacctgcgccgcctagggattaagtgcctagaacttctatccgaagggtgctacgctatgcagaagtgagggaaaaacactgggagcgaactcaccgaagacggcgaccgagatgatgctggcaacgacgaggggcgataacgcggtggaggaggaacgccgacgagaaattgcccaagcgtgaggcgatttcacacacctgaggctctcggtttgagtacagcgaccccaggcggagg

SEQ ID NO: 9478 - DNA, 353 bp, Zea Mays
tattttccaatttctgagtacaacattgctctggtagctttgagtcttgctaaggataaaacttcctgaggtgctctatattcaatgagttccccacttccgtgccatccatttgagtaagccgatatgatcatggccgagtgacctccgacaccatgaatggcccttcccatagcgacgacaatttgtaccgtccttctcccgttagaattcggcgaaggaccaagtctcccactacgaaggatcgatgtcgtatagccttatcatgatagcacctcagggtctgctggtatctagctgactgaattactgtattcaatcgctcttcttccagtacgtcaatatcttctagc

SEQ ID NO: 9479 - DNA, 594 bp, Zea Mays
ttgagaaccaagagggagacggcaattcctcattttattctcgggataggaggcaaaagaaaattattacttatctgtggatgaatgggaacctagagggagactgcaattcctcatctatagctccctttccagatttcaatcaagcttcattctggctagatattaccatataggtctcaaagttaaatgttgctcttcatctggaataaacgtgtggatggagcttgggggcacgaagggcatagtctacgttgtagatgtacagaccaatagtattgttgacagtttgtccacaaacttagacctcaaccaacatatagcgaaaattgaaggggtgaagagacacaaatattacaacgagcactgattatttgagtaatgtaagccgggagcaatatacaaaaattgagccatagtatttctatctttaccaataatagcagggcattttacattttaaatatgtggcacaagacataaattaattgttgcctcattttcacgatatcaaagtcactacaacaaaattgattttcggagactcacatggttcatttacagagacgacaccttagctcatgtacaatgtag

SEQ ID NO: 9480 - DNA, 365 bp, Zea Mays
gaaagatctcgcgcaggggatgaacttgggacactgtattgctcaatcgtcgtacccacttgcaccggcgacgtggccacgcgaccaccgccgtcgtgccgccgtttacttcggtcacgacacgccttaaactttttcaccacatcgtcacgggttgtggagtataactagtgatggccataaacttttacccagtaaatgctacgttagcgaactccggtgactcacctgtgctccaaccgccaacttattttccctgaattcgaagccatcacttgcggacgctataaatggagtgtgcggccgactccgttagcttgttacgatgccagaacaccaactctcgcccctgattagccattgta

SEQ ID NO: 9481 - DNA, 276 bp, Zea Mays
atcggttctatggtagtgagggatggccaaggaggtccattgggtggattgtgggcattggtgtttagtgagggtgactcattttcaggtgattagaggagctcatgcttgaggatgactttgacaacaatagcattgctggagctaggtgaggggagcaaggattcatagctggcatcatggaagagtagtgcgcggagtgggagtgaaataggggggaatggaggcctgtatattacaacaaacttacagtttcgtgtttggtatgcatttgct

SEQ ID NO: 9482 - DNA, 388 bp, Zea Mays
agatctcgcacgttgtccattactcctagttgatgtgacagtctaggtgtgatatttgataaccaaataaacaaaaggcaaaagttaaagtgtcgtttaggatggcagggcagagaagcggcagtgcagggaattgagaagaagaggatgagtcagttgttgttcgcctgtgacctccgactgaaggacgtctgccctttatatacagctcaccataatcccttgattcgatctgctaaattctaggaatcggcccctggaatatctctacgtgcaaccgtccggagatctcgcacgttgtccattactcctagttgatgtgacaatctaggtgtgatatttgataaccaaataaacaaaaggcaaaaattaaagtgacgtttaggat

SEQ ID NO: 9483 - DNA, 776 bp, Zea Mays
ccaaggttcttgaaagcttaaatttgaaagtactataggtttcaattctctatcaagaactagtagtgttttggcgaacatgtataaataattcttgggtaacattttgcttaatattaaacgattcagccaaaattcacaccatcaatatatgtgatttatggtggtcaattggaacatgtataatgtttccagaagtttatttgacactatattgaagtttattatacactaggagtcccatgcagactgcattttttttcacacaaattctagaaagccctaattcaagcctaaaccatactatttcatcaaaatttaaccaagaagcatctaaattaaattgcagaaactcaaaatagagaattagttagaacgatccatttccggaaaagtttggaatgataaaagaaggcagtgccagtggttcaaggctagaaaagtccaaaatggatactggacaccctttgttggccaaagcagagttagtcgcatagtggacaataggttgactgggagcatatcatgcacaatggatgacaccatggtgttgcagggccgagcttgcagtctaaccaagtaatttgcttctgcattagtgggtccatagcctggtgctgtgggggtgtgtaagtggtagaaaatagatagcaacaactcgaatttgttcaatatgatctgggaggagcttaaggttgcttcacccctggactaggtaagggaaaggttatttgacattaatgacctgatgtcatatcaagtaaaatatatttgca

SEQ ID NO: 9484 - DNA, 544 bp, Zea Mays
atttcagttaacatgccctttaccacccttgtttattaatgatccatgagcgatcattttatctcgcacatctgtggtgatctcgttgcttccttataacttccctcggtaaggaatctttacttcaacccttctgttggaaccttatctatcttaccctagattgttttctccacttcaccacttcgccacttcacgagtcttgccttaactctatcctttgttacgcttttcattattatcatatgtacccttgacacctctatatcctacattgatgtttgtctcataggttccctttaaaatcgcccctctcctatcacattctgagagttgtactttacctatctttaccttggtcatatccttgtctttagcttgtgagtttgtaactccatcctttgttgtgcttttgtttgttatttcatttacctttctcatctctcaatcttaccttggtgattaccctatgcacgttatctaatatctctcatctcccatctcggttcaagagtggcgtcttacttatctcattcgtggttat

SEQ ID NO: 9485 - DNA, 348 bp, Zea Mays
ctccatccccatccccatcttccaccctcccttgctcactcatccacacaccccacgcttgcaatttgcaattcccttgtttggggtaacaagccaagcaagcaaacctcctgctggctgctgtccaacagcaacatgcaacaacccaagcaaatcaaagcttcaccatcaccatcaccgccgaggtcaggtcacctcagctttgctcagctccctagccagcagtaactgcccagtggaagtgcagagtggcctgtgagtactggcagtacaaatcacctcatctccagtcctgcccggctcgcctgccatgcagtccggctacggcggcgtgtccgagttccagca

SEQ ID NO: 9486 - DNA, 626 bp, Zea Mays
gttgcgtcctggatgtgatatccaggtgcttgttggccctatttatttttgtgatatttaatgaatcacaatgttagaaattggaatgttcttaattggaacattagaggtttgaatgatgaaggcaaagcccatgcaatgcggcaaaaaattgaagaaagtggttgttccgtcttctgcatccaagaaacaaaaatgaaggactttacccctcattctttcaaacgtttcgcccctagcgcttcaccaaatttgcctttagcgcctctagaggtgcctcggggggtattatgatgggttcgaataattctttgcttcagggctcgatccaagaggttaatcttttctctattacggtggagtttgtctctcgtctttctgcggaccattggaagttaacaatcgtgtatggtccttgtattagatcggatcgtattgcttttatcaactggttgagctctctcgacatctcttcaatagataactggatgttgttggggatttcaatttctatcgctcagcggccgacagaaataagccaggagggaatgtttctgatatgaataccttcaactctatcattagcagacttggtattatcgaaatcccccttaaagggtgaagtt

SEQ ID NO: 9487 - DNA, 565 bp, Zea Mays
cagtcgtcccctccgctcctcgcctcctctcccgagtcccgaacggccgatcccgacgccggctgcgtggctcgcctcagagccccagccgtatcctgccacccttgtccatgagcgcccgctatcagcgcagctagtccctccctccgcccgctatcttgagcggtggtgatggagtttactttcgaggatgcagcggaactgtgcgcgctcgtttcgaatcagcaatcccacgtcgacgagaagcggaggtcggtgtggtttcttctaccggcgcacctccgatcagaatgcatttctgtttttgcaccctgcatcacaaaagattcggggccctcttaatttgcaggtggctggagtcaatgatcctcagaccggatggctgcatcaggcgcgcgaagcgacccaagtttttgcatgaagtgtaagcgtgcgccaagttctgggatgcgagtagtgttctaattcaggctttttcttggtctctttaataagttgtccgaagtttagtgttttattgagtcaaccgggctgaattttttttccatatgacattggaattgat

SEQ ID NO: 9488 - DNA, 714 bp, Zea Mays
tgcacaccttcagccacatcgtgacaccaacatcaattccaacgagggcatgtaagatacccaaattagcagccgcaatatcttcttcctcatcgtcgtctagtgctaataagaacacccctgtggatgcgcatttgtgctcgggtgtgaacttctcgttgcagtgatataattcaccactagctcgtttggctgcaagctcctctgctgacatccgtttaaactgtggatggttggtctaggccgactttgctagtactgtttgtgtgccgaacttgaatgttgatatcgttggcttggtgttggcctttgtggctttgtccatcttgttgggtccgcgtcccggcgttcataggctcgtgtcaaactcatggttgtctgtgggagcaatggggactgaagctccatgtctttgcgcaatggttcgcccagccctgcgatgaagagattcacatgctgcaatgtggaaagatcatcgcagcgacacaggagcaccgagaattgtcgtatgtagtcgtccaccaatctcgtacgtcagagatccttcaattcggccaggacgtttgtgcgtagggtggtccgaatctcatattaacgaagttggtcaaacgggaccacgagagaatgccatggtcgtgctccagagtataataccactctacagcaatgccttcaaggtgtaatgccgccatccaaacacgttcctgaaagtgc

SEQ ID NO: 9489 - DNA, 639 bp, Zea Mays
gtctccaggtctagtgctgaatccgagtatagcgcagtatcgcgatgtggctaatggagttgcagaagccacatggttgcgccagctcctattggaacttcacattcctcttcaccgcgcaacactggtgtattgtgacaacaccagtgccgtctacatgacctccaaccccgtccagcatcaacgcaccaagcacattgagattaatctatacttcgtcagagaactggttgccgctggtgatcttcgtgtcctacaaatgccgacgacatcacagtatgccgacatcttcaccaagagccttccatcctctgtcttcaccgaattcaggaccagtctgaacgtgcgcagtggctgacgatctgactgcggcgaggggggttactgtgtgctattttaggcaaagtttaggtggcatggctgcacgggcttgttgccttctgcgcctgctccttatttggttaattggtctcaataggcaaggatctccctgataggattgtgtaggattgtttccttttctgtagacatccttgcctatatgtacttgagcctttgatcccattaatcattatcatattttctgccaattcattgtctctcgatatttatatcaccttcaaacatagctatcatctg

SEQ ID NO: 9490 - DNA, 391 bp, Zea Mays
gattgaagagagttgtggctgcacatgtggctatgtgcgatgtgtgtcaaggagttaaggctgaacactagaggccagctggactattgtacccattaaagatactcgaatggaagtgggaagaggttggtatggatttcactactggattgcctcgcacccagaaaggatatgatgctatatgggtgattgtggatagattgactaaagtagctcacttcattcctataaagactacttataaatgttctcagctagcagagttatatatggctcggattgtgtctctacatggagtaccaaagaagatcattttggatagaggatcacagtttacctccagattttggaaaagttttcaagagaatgtggatacgaagttgaattttag

SEQ ID NO: 9491 - DNA, 335 bp, Zea Mays
gagtagttcccatcgctcgcggacagcgtcttagagcttggtgaagagggagccaaggatccacgagagcaccacactgtccattcggtgctagaacgagagtagctaggcaatggcatcagtgagggcatggtcgtcaagggcataatgctacagggtgaggagcacctagtcacaccagcgggagtagtgaatggacacgtagtggaggacgactgagacgagagatcggatgcgctggacacccgttgcctgagcgtggaggttgacgataaccacgacctcatgttccgatggaagtgatagcactagggctaccggagaaggctcgacaa

SEQ ID NO: 9492 - DNA, 625 bp, Zea Mays
catgaaatttgaagcaaatcgacctgcaaattgctttgttaggacaactgaaacagccctgatggtacagtgtctgcaaaaatatctcaggttcagcccccccccttgccgccggtgatcttgcgctcggattcacaccggtcgccgtgattcgtactagacacgtagtagatatccacggggaggtaaaaagatctcacgggggcacggatttggtcgcggcagaagcttatcaccgtgcctgtagccgtgcgacgtggccggaccactggtgtcaccgtggaaactcctgggacctcggttatgccacgccgtggctcgttgctatgcggtagtaaccgtggcacatttaggattaaaatctttgagccgttgcaccggtgaacgccacgaccaagccaccagtgttctcccctctcttcggccgccagcgcgccatctcaaattcacgggccaccaccctcaggtcctataaattgagcgtgccatcagatccgctaggtagtcacgcacccaatacaccaacccgtgcctcagatcgtccaccagagcgccccaatttgagatttcgcccaaatcggtcaagaacactgtgtgtgtgagctcgctgcggtcagcccttcgc

SEQ ID NO: 9493 - DNA, 1166 bp, Zea Mays
aaggcaacagaaccaacagctcccagatggcctttgccaatgccaatacagccttttctttcggcatcccataaccttacctgtgtacaaaaggtcagactcaaaaatagaagaagtagcacaagaatgcactcgacagcagtgaggtaccgaggattatcaaaagaaaccacaaacaaaaacattatggtaagtcaacatagttttcaggtccagacatcacaacttacagtatgatccttgctcccagttacgacaagtgtcttcccggaagcagagacacaggtgtcaatgcaaacaactatttcagtgtggccagcgagtacataagaacatgacatcgacgcaacatcgtaaacacggacctgaatatgccggtaacggtttgataagtttcaagtgcattaaccaacaagaactgtgcagacatcatttatgaatagctcacctgctccaagttggtagccacggcaaggtattgttcctcctccccgataaacttcaagtcaagaatctcatcattataacctattagtcgtctatatagagacagttcaaagtccccatcatcagttcttttgggacaatagaacaaaaactgctgatcagcagtaacacatagcaatccttgatcatttggcaacataacagcagatgtaaagcccctcctggtttcctcgttctctgagttaacagttacatcagatgtttgctgctcgaacacgcaaacacaactgcacaagaccagaaaagccattcattgcatgtacaacagaaatatgcaaaaaaatgacaaactaatgtacctctccaagcaccagacacgcacgaccccacgttcaccaactgtaagaaaataaccagcagatttctcctttatatttgccagttctatgcccaaacaagccaagagctcacttcctgatccaatgaaggaaacagcttctatcatttcatatgtcggtattgtcttctttgagctgtacttacgaatatcccatgcggtaacaatctgcaggtgttccaaacattcataataaccagtaactccacacagaaaatccaaaccacagtaaattcctatgttagaaatatcaaaattcaagaaaaaagggtactcctatgaccaccactttttgagcacaaagatccacatacaaaatgaa

SEQ ID NO: 9494 - DNA, 488 bp, Zea Mays
gtgaggatggcgtgtggcatactggcagggagccagggagtggtagacggattcattcggaggcgcggtttcctagcgacgtggccttcacgctgagcagaaatatttgtttgcctactacactattgtggaacacgtgacagtgaatagtgctggcgaaccacctggctatatatgtccgtatagaccggacaactcgtttagcacgaagctcgacactattttagttaggtacgaaaccggcacggcatgacggacatcaggctcgagccagcacggcacggcagtcgtgccgtgtttgggctccatggtcggcacactttgcttggcctggctcggcacagaataacgagtcgcacgaagctagcccgacgcccccgctctccttactgcatatacatgacacgtgccgcacgcagcacgcccggcccacacacccctgactccccgtactcgctcactgtgtacgttgtggaaaccctaaatcc

SEQ ID NO: 9495 - DNA, 593 bp, Zea Mays
ctttccggacacattgtggtcatttcgagtttcttgtaatgccatttggccttaacaatgcaccatccactttccaggctctcatgaatgacatcatgaagcccttcatccggaagttcacacttgttttcttcgacgacttcttgatatatagttcgtcttggacaaaccacctgaggcatgtaaagcaggtgttccagctgctaaatgacaacaagctggttctcaagtgttccaaatgctccttcggtgaaccggcagtgtcgtatcttggacatattgtatcagcacagggggtcgccatggatccatctaaagtggatgcagtggagtcgtggccaataccgcgtacccttagagctctccgcggttttcttggtcttacaggatattatcacaagttcatagctggttatgggtccgttgcaagccctctcactgctcttctaaaaagggatgccttccagtggacagatgaggcagcagaggctttttgccagctgaaacaatcactattaacaacaccacttcttcagttacccgatttcaccataagattcttcatggactgtgatgcgtcgggctcaggattt

SEQ ID NO: 9496 - DNA, 356 bp, Zea Mays
ctggaaggagcatgaaaataccacacattgcatccactgcagtaagtcaagatatgcagtggtgctagatgaggatggaaacgaggttacgacaaaggtgccgatcaagcaactccggtacatgcctatcactccatggctaaagcgtctctttctaaatcaacagacaacaaagcaaatgaggtggcataaagaaggggatcgttagggtcaagatccggatgtcatggtgcatccctcagatggtgaggcctggcaggctcttgatcgttttgatccagaatttgcaagagaccctaggagtgttcgtcttggtttgtcgatggatggattcactccttactccaataattcca

SEQ ID NO: 9497 - DNA, 763 bp, Zea Mays
caagcactcgagagagggaggagaggctctcaggtctcatgtcgggatgaaagtcgagcttagaagttgaaaggtgaagcttgacggggctctggccttgaaatcctcgtcgacgctccttctcatgttcgtccttgtgagctcgtctccgtctgaaggcgttcaatggtgtccaagagccctctactcgatctcatttgccctaagacgaccctctcccttttataggtcgggacaggggtcgggcggcggtggtttcctcgggaagaagtcgtaaggcaagggtaaaactagtgttttaccctgggagaggccacacatactcgtggggtccggtgctgtctggttgtcgtgtattatcgtggtggatgacgcgtcggcgatggtcctaggcaccatcattctggctacgtcgacccctggcttccgtagcctggggctcggcgcggcccgtcgtgtagtgccctgctggaggtttgcacactcagtcctagaccgatagaccataagtgcgtcgtaggtcgaggggcgcgcgggccattaatgcactgttatccgggggctcgtaggtcatgagtgctatgtagctcgaggggttcatatgtcatgagtggaaagtggaccggcgcccacgctgtggcttggtgccaaacgtggttaatgcgaccagtcatttatggcgggtcagtctgaggcctggcacgagatccactcgagtggttcccttctgacacgcccgaactcccttgtcaggctccaccac

SEQ ID NO: 9498 - DNA, 363 bp, Zea Mays
aaatcgcatcgccacttgcgccaatgtcacgtcttctcgggactacaggacccgtgcagcgactcgaggcagccccgtgcatgacccaatggtgccaattaagggcgacggtcacgggtcagtcagccgtggggatagacgcgacggttggtctgaccacaggtggacaggcagtaattgcagcaatagacgtgcggaagcagcggtccaaccaccaaccaggccctggtcccacctacaggctcgcatcctcccctgaagcggcagggtaaccttctcctacagcataaagacaacgcacccgtgttccattcctcgaacaactcgctcacttgcaatggataccccgcgaatcgcccgtcc

SEQ ID NO: 9499 - DNA, 309 bp, Zea Mays
ggcgacggcactagtccattatctgcgtcggtggtgagggcttggggtatggacgctagttcaatagggacgagaagtcaaagaggtgcgccggtacttatacacggagaagagggtcaaagtgattgcacgacccgagctatcccccgcgatttgcgtcccccagcttcggcgcgcgcaattttgttgccgcgaagaccgggtcggtgaagaagacgggtctgccaacgcggccccacttggcggtgaaacacggcgcgagcatccgttaatggatgggctatccagtgggcctaggtcgccagcgat

SEQ ID NO: 9500 - DNA, 1094 bp, Zea Mays
tccagatcggtgctaccacaggtccctgcggcgggattactcggtaactacagtctgggaccgacctccagcaggacagtctcgagcccccatgtgtgccatctagacctcccctcctatgttgccacatgtccagaccatcacagatgggacctagaccccccacaagtaccatccgggcccccagacaagggtggtccagagctgccacgtctgcgtgcacctctagccattattccttgctcaggtggagacctggtgttgtcgcgtgtcctatgacgcgtgacgtaagcccctagcacagggggtcactcgcgttcaatgcgggcagggcgcacgattgttcacacctgtaacaggtggcgcgcattgcacattgaatgtgggtggtgtgtgcagtccgtaaggcctaaaacgcatcagtaacccgcgcgttaccgaggcaaagaccattgacccagtgttgcgcgtgggtaacttccatcatgacttctactgttcccgctgcagcgccaggcgaagagatatgcggaggggatagggcgacatcgtccacctactcccataagcaagatgacgacccacctactcccctacgtaaagacgatgggctaggctacaccgcaacctaaaagccttcacccacacactgacgggacgggacaaaggcgagtcaggccagaggagcccgcatggtgaccgagtgaagacaccttcccatcgtgagaagatgccttggttcaccaactcttcctgtcactcggcacttcatatttttagtattcctaggcccacatggcaaggtctagctcccttgtatgtgctcccgttagcctataaaagggagggcacatacgttgcaaggggacacgcctacataggctcaggcaccctagggacgagaaccctaggggacaagctcacttgaactcccccagaggcattgccaagctctcgagcattcttgagttctcaagcaatacaattgatagtggagtagggtattacactcaagcggcccgaactacacatcaccctgagtgttaatgagtttgttcctccctctagtgccatgagtttgttcctccctctag

SEQ ID NO: 9501 - DNA, 462 bp, Zea Mays
attgttgatcatccagcgggtgcccaacgagcgtgggtgtaaaaatccacccattagacatcgttgatgcgggtgtggcttactttatcgggtgtcaacatgggtggttgtttctccattagcaccactcacccattgaaattcctaatcttatctttaatgctagccactaaaccgagtaaaattgggttcataactttgagattggataaggtgtctatgcctttggagactttgacgattggcattggtgtgtggtagtggcagtgagacgacatacttcccctcactaattatgttagataatgtcgctaaccgcgttagataatgccaaccactagaatgactaaaatcaggaccatatctttaatatcggaggaggttgctataggaataggagacatcgcttttgacatctgagttgatgaatgatggtgatgacgtcgagggtgtagaggcgac

SEQ ID NO: 9502 - DNA, 659 bp, Zea Mays
gcaaaagtcgcctaagggtgcagccggattagcacaataagtgcgaaaaatcgaagtcttttccaaaagactctccgtgcaaaagtcgcccaagggtgcagccggactagcacaacaagtgcgaaaactcgaagtcttttccaaaagactctccgtgcaaaagtcgcccaagggtgcagccggactagcacaataagtgcgaaaaatcgaagtcttttccaaaagactctccgtgcaaaagtcgcccaagggtgcagcctgactagcacaacaagtgcgaaaactcgaagtcttttccaaaagactctccgtgcaaaagtcgcccaagggtgcagccggactagcacaataagtgtgaaaaatcgaagtcttttccaaaagaccctccgcgcaaaattcgcctacgggtgcagccggaatactagtacgaaaaaatcgaagccttttctaaagaactccgtacaaaagcctacgggagcggcctgatcaacgaaagcgcacagtttcatcacacaagagtatggttacacacatacagcgagggcatcgcacgttacattggctcaaccttcgggatgatacccatctccctatagttgaacaacattatcctcaattcctcacccacaaacagacttcgcagctccccctcacccaca

SEQ ID NO: 9503 - DNA, 527 bp, Zea Mays
catttgagcataacaaatttacaatgttaaaatgaaaggaagtagcaaaggtttcatcgaaataattacaataattctaccgggcaagagtttatcagaacctgaactatataacaaattcttcttcggtgttttttccttttttcagttgcaaggacaaagggatacaaacgtttatttcggcagatcagaagaagttacaactgtatgttttccttctccccttttttatcaatattatatacactaagggtactcaacaaacggatttcatcaaaaaataataaccactaactgatttcacaatggagcatttatttccttctacagtgctgaccataaaatgcaaaccgaaagaaatgaaatattccagagcataagagaatttttaacgcagtggtttgaatcaaaccaagcagggcttgacgtttttaccacaaagaccaattttgataactacaaggtccttaaagttacaaagcacaaaaaattgtttatctgttcattgcttctaagtacaagatcgc

SEQ ID NO: 9504 - DNA, 501 bp, Zea Mays
gtcgggtttggttggctagaacttgggctaaatctaatggcagctccggaggtgcggggagatgggtctcactcccttctccgccagcttctcctttagctcctagtggaaaccctgctccaatcccggaggtggtaggcgtggttttatccgaagccatctgccagggaaaaagagttactactatgcatatgccaatttttttcaaccaagttattttattcattacacaagttcattacaagcatacagttaccacaagtcgcactacatgcgggtgctatctaaggtactctcgaattccttttctaaagtgtccccaaattccttgaggaggtcatcaaggctagctagggacatatcctcggtgtcggacgagttctctatcctggtaggaggtagggctggaggggcttcctccttctgctcagtctagcatccttggcttttggtcttctttcggattttcttcgcaggggcgagcttctttagcttcgtgtc

SEQ ID NO: 9505 - DNA, 673 bp, Zea Mays
ccgcgacggcggccgagccttcgcaggtggcgggataggggttagggattgtatgtgaattttttgcctgtgtgatactaaacctcggttgctgcgcaggttccgacgtttgggcctgcgcaagcaaccactactgacaataccgattttgcggcggagactccaattgtagtgtccgccgatgataatgtgcctggctctgtgtctgagtgttttgagtccgacggtgagtctgggagttcgtttccttggacggaggagtcctcggacgaaggcttagattattttgttgcgttagatgtggctgcagcggagccttcgctgcgcgtggtgggttccgaggggctcccaggtgcgagtactatgtataggcggcgaagggcggtggcgaaatggagagtgagtgaatttccgcgaagtggtaggcgtcatcgtagtgagatggagagtggtcgtcttcgcgtggacgggactagtaaacgggaattgttgtcctcgccgattggggcgagtgtaggtgaggggagctacgaaatctttttgagggtgaggaattgaggataatgttgttcaactacagggagatgggtatcatcccgaaggttgagccaatgtaatatatgatgccctcgctgtgtgtatgtaaccgtaatttgtatgataaggctgcgcg

SEQ ID NO: 9506 - DNA, 1108 bp, Zea Mays
tagtggagttacagaagactgtaaatctctctaggtaaaatttctacatttttttccttttagcaagaatttgagatttggaattttctgccttgtcaccatgcataatgttcatgtttattttttgctttgtatcagcttatttaattgtttgttggcccagaaaaaccaacacgtcttatttgaaacactcaaaatttcaaggatccttgcaaaaaaagatcagcactttttcttggagagctttaccaaggagggtgtaaagcatgcaattgagtatatagtatcacaatcaaaaaataccagtcaccagaacatgaaagaattttgcctttgcttttacatgaaaacttcctcgactgttgaggcatgcagcattgcgaataattctgttacggaactagcaaaagagataaagaaaaacttcttatcggtaaaagggagtaacaaatctccaaataggtttggattcactctcaaaagtgtcagggacttttttgctaggttgaatttatattcctcgacacaccttgctgaaaatcctgatagctgcaagcagttgtttgatctttcaaggagattattgtcagatgaactgccagttacttctaattttgagtttgtgcagagtgggtctatcaaatgtttgtcagtttatctctcaaacggggcatactgcaatgcagaccttaatgatggacctgtacttgagcagcttagtgtggtgcatagtcggttgcataaatttgctaatttggctctcacccccttcaatgaaagttcagcaaatccacttgggattttggtggagaagctgctagacactttgcacatgtgctatggcagttttccggtactgctatcttatgaacagatgccacgtgaggacatgatgattccgctgagatatcctaaggccaagaaaccaacatcattgctattaaaattccggaggtcgcagaaggagagagaattgtataactacaatggtgttcttagtgtcgaccttttctcaacaccagatagcaccgaaccaattctatttcctgagatctttagaagaactgatcaggaacctgcatccgaggtacacacagttgctcaaaat

SEQ ID NO: 9507 - DNA, 601 bp, Zea Mays
gcggtgctgaaatctagcttggtgcccatagcttgctgaaggctcaaccaaaactttgaggtgagctgcgttcctcagtctgatactattcttcacggaatgtcgtggattctgactatttctttgaggtatatccgagcgagggtggctcctccgaaggtagtctttactggtatgaagtgagctaccttggtaagacggtcaattatgacccagatagaatcgttccccttttgggtccggggcagtccaatcacgaaatccatgcctatttcttcccacttccatttgggcaccggaaggggttgcggtaacccagcgggcctttgatgttctgccttagttcgttgacaagtatcacattgggctacatgttgagctatcccctttttcatccttctccactagcatctagtcttgaggtgtaggtacatcttagtaaaccctggatggatagagtaggctgagttgtgggcttcatctagcaggatttctcgtgcctctccctttggtacacacagacggttcctgaaccaaagagttcccttttcatctgttctgagatccaggagttgttccttgttagccttttctgcaagtc

SEQ ID NO: 9508 - DNA, 805 bp, Zea Mays
gccaaagctgaccccaatgggtgtaacctagatgatgatgaccccaatgggtgtgatccggccaaagctgaccccaatgggtgtaccgtccgcattgttgatgaagatgaggaagaggaggatgaaatccctctagttcggaataacagccgacgctacatagccagcggggaaagtagtggtgttccttctccagctttgtctgccctcattggtctgcaagaattgtctctggcaaactttgatcagactcttgaagacatggtcccagaagatctgttgtcagagcctgtagatggtggaatgatggatatttatgctgatgtgcctgatgccgagctagagttatctcgagcagcgtcccgtgcctcgtcgaccttagagcgtggtcttaagggtcaggaggctggtctggattgttctgctcccatggaagtgggtgaaggtccttcagccttagaggtggctgttacagagagctcagtcctcaaggatggcgcttgcgcttaccgagcccccgagggtgtcgccggggatgatccggctcggatgggtagcgcgagctatgacccagcccccgagggtgttcgagttggttccccctctcacaattccatgcatgttcacgtagggtcttctccttcgcattctggttgcatggcagcaattcaagctttgggtcaggaagtcgccttagaggctggcgctcctgatgacggagttttgattcctgctgttgacactcacttggtcgccactgatgcattgagggttgctccgggtgttgatccttcatcgagccatc

SEQ ID NO: 9509 - DNA, 793 bp, Zea Mays
gctggatatatacgtcaggtggcacattgccgaaccatcttaataccactaagggaagggagagagaggatagcatcgcttgggcctcgcctccgccgctataccgggtcatggaggggactcgaagatttgctcaagctcggggatcacgttagatgtatggctaaactgcgggagtgcgaggtagtgacgtaattcctcgtcgaagtggcgcagcgctgccgatctgccatgtgccgtcgacaaagctctgcgtcgtaagggttccggtaagacaactccccagatgttcaccaacgtccttactttgggttgcgttgttcggatcgggtttgggttacctggtgttgtgttagggcgctctggcgagccctccgccatggccttgggagaaaattgtgtctggcatccgtcctggtgagaagatgggggcccaaccgtcaatcctgggattgagggctgggaggaagagagcgagtgtgccgtcgatcggtcgttgggcggccacgattagaagcaacttacccctctagcttgattaaatcagatacgtcgagatcagatccgagggcttgggattcgtcatggcgtggatgttttggggctacagatctctgatcctgcggtcctggtgtcgtaccagttcattaaatgatttgatggctatcgtctaatattgatcctgcacccgagatccttggataccccttcggtcgtgccaaattgttaaagagtccctggacttttatgaaatagaaccctcagtccatgctttgtgtaaaataaatacgaa

SEQ ID NO: 9510 - DNA, 504 bp, Zea Mays
aggtctcttttgcataaaggcatggccgaatggttattgacgtggatgggccgtcagatctaaaacgcacgatccagattacatcagtcgacgacacaatttccctataatcccgagtcgtccgatcgagatcgaccagccgcgatttaacttctgcccgatccatatctaaccgttggatccccgatcaacgccacaccgcgcccgaccaaactaaaaactgatcacgggcgcccaacaatggatcaacggccaggattgcctcactttcctcccatcgccgaactacggcggcgcaccagagccgacggcggcggccattgccgcgcacccaaatcccatctccccgcgcccgaagctcccatcggccgaactctactctatgcggaggcaaaaacgaactggggcgaagagttctcaccaacaatgccgatggacgcggtgcggtctgcgacgatgcgcggcacggccccctccccgtcgaccgacgagaaatcacgcgag

SEQ ID NO: 9511 - DNA, 492 bp, Zea Mays
cgcggatgaaccaaagatccatgcgttcccgacggtcagtggacccctagcccaattggacgggtcagtaagcatcgcagacatgtgaggaagcttaaacgaaagagagggagggttggactgaccggaaaaagggctggcgacggtgaagctcgtttcacggtggcggaaagagatttgggggaaaactcgaattcgagctcactggtggatgatccggtgcaaggtttggtgcaactgatgcgtaattatcctacggagtggcggggacactcaatttatagcgaggggaagcggtggccagtgaatttggggaggacgcgcggcggccggaggtggagaagattactggcgcaactgcttggtgtctactgccgtggcagttactccggtgagccacggagagcgagagtaagtcgcggcggtgctgtagaacggctaggccacgcggcacacggccgggaggcggcggtctccggtgaacttatcggg

SEQ ID NO: 9512 - DNA, 385 bp, Zea Mays
gaagtagaggaggggagggagagggaagagagagaggagagaagggagatgaggagatgatttatttatattgtagaaacattagaaatcacacatttcgacatgaatttgtatatcaaatatacttgatgttgttttattttttcgtgaaattagtttgaggcacaatcagatttatatgagtgtcatataaatgcatatacgttctacacgttctatataactctaactttttatatgactttgtacattctatacaactctacatgttctacacgactctagacattctatatacatgttctatacgtttatccgttctatacacacattctatatgactctgtacgttctatatgactctacacgttctatatgactctat

SEQ ID NO: 9513 - DNA, 475 bp, Zea Mays
gtagactgctgcaaacggccttagcggacaggagagtacgttcgttcgttctgtcgtgcaatgatgcaaagggaaaatagagagactcgttagtatcattagcaagaagaaaaattagagactcgctagtatcattagcaagaagaaaaatagagagactcgttagtaccgtctgatccggaccattctgtagtttgtccccatcaatctgtgacgaaggaacaccaacatactgttcgcacgtccccttcagtacgtgctacggtcatcgtcattatttggatgcacaatcctctgccatcgacacctagcagatggcaatagtaacttgccatttgcccatttggtaggccgtacagccatacgtttggcaaatagccagctaaatctatctcatatttcaaatttcactatataattagggcaatctatagcatgaaactgtgtttgacacggccatatacacaatcagctg

SEQ ID NO: 9514 - DNA, 418 bp, Zea Mays
ggtatcgagcgagcgcaatttctcgtcggcgttggcggctcaccaggaactcgcggtcgccgtggacagccctcctgcgttcacgattcgtggtatgtattcgtcgccggggattcgccttgccggagttgggttttccactgtggtcgggccgcggcggacggggggaaacaaggagcgacgaagatgatggcggggtaccgttggatctccttttgatggccggatgtggtgactgcgtagcgtttcggataggggtaaccagaaccgtccgatcgggatcggatgatggtcatcactctgggatccattaaaccgggaccgtcagatctagatccgaggggccaggctgcgtaccggttcgctcgatttatgatctaatccgggtcgtaggtataggatcgggcggctcagaagg

SEQ ID NO: 9515 - DNA, 1201 bp, Zea Mays
aactttctgagatgctctatattccatgagttccctatttccgtgccatccatttgagtaagacgatatgatccaggccgagtgacttctgctactatgaatggtccttcccatagtggcaacaatttgtgtcgtccctctcccattagaatttggcagaggacaagatctcccactacgaaggatcgatgtcgtatagccctatcatgatagcgcctcagagtctgttggtacctggctgactgaatcactgtattcaatcgttcttcttctaatatatcaacatcctccagtctagtagcttcagcttcggctatgttttcgaagatcaatcttggcgccccaaacttgagatcagcaggtacactgcctctgaaccatagaccataaagaaaggagtgtttccgtgcaaagctcggctaggttgagttcttaggctccaaaccacatacgacaactctctgatccattttcatgcgaacttttcattcttgccgaagacttttttctgagtgcttccaatatcattccgttggatctttctacttgcccgttggctcttgggtgtgccactgatgcatatttgatctggatgctttttgttcgcaaaaatcaaagaactctgaactagtgaaattggatcctaggtcagttatgatgctattcggtattccaaacctgaatattatgtcttgtatgaattccactaccttagctgaagttaaagaagcaatgggcttgtactctatccacttagtgaatttgtcaatagcaaccagtacatgagtgtatcctccttgagctttcttgaagggtccaatcatatccagtccctagcacgcgaatggccatgttacaggtatggtttgcagttgctgcgttggtaaatgctactgttttgataagtattggcaagcttcacacctctggactaactcggctgcatcactctttgccgttggccagtagaaaccagacctgaataccttcccaaccagagtcctggatgctgcgtgtatcccgcattgcctagcgtggacctcatctagcagttgcttcccagtagccgaaagaatgcatttcatgaggactcttgtcgcgccccttctgtatagtgtttccccaaagagagtgtagtgagttgactgtcttgcgacgcgctctgctgcatttttgtcatctggctcctactcattcttta

SEQ ID NO: 9516 - DNA, 794 bp, Zea Mays
ggagaaccgagctctggcgagctcataccggccggatcactcaactaccggtgctctaattcggctgagacctaatttaacccttaacaagtgtttcccctctcttaattgttggattggagctctacatcaccctgtccacggtgacagtgggcacaacggacaacacaacgtgttcccggcgatctaaggggtcctagctgaactggttgggttagggagaatccagagcacctaaggatattgaaaggagaaaccagagagtatgatcgaacctggaacgggctagccacggcgaggccctttcatggcggcggagaacagatttggggagaacaagaaattgtagagttatggtggctaatcgaaggtgggaatggttgctctggcttcgtgataacatggtgcagcagaccgggccatcaatttataagggcgctaagcggtggccggtgaatttggtttcgcacggtggcggtcggagaacgaggagatcactggtgcaagcgattggtggcagctaccgtggcggttctccggtgatcaccggatacagataacccgagctattgcgacgtcataaaaggtcatagcgtggcacgacgggggaaatggcggtgctcgcggtaatggccgcgcggccacgtcgctggcgcaagtgggcaagaggcagaatggccacagtgacttgtgttcatctgcgacaagatcttttcacgttgagcgtaatccactcgcccgagacacgaatcacgacggccagcgacgcgaatccggacgcgcagatcaccgac

SEQ ID NO: 9517 - DNA, 505 bp, Zea Mays
tacggtctagtctacttttaccatccacgacgatgcacaatgcgcgaatatggggcattgttcccctattctggccactgcttcaaccactcctagcgtgactacgtgtaacatacggtccgggagaaatctccggctcgtccaagctcagcctcggccaactgtcctagcagacgtgcattaaatgttacctactcttccgtgaatctcgcagaggaccatgctaagcactatgacaactaatccaactcgacccgcttccatgtacatgttgggctcaagcacatgcccgtactcccgagtcaagcctcggctccctaccccgtcagaagaaacaaactacatggctcggacaggaggacaagggtcatctcgtcggtcatgccgctacatggctcgaacgtgtatcccctaaccacaacaaccgcacacccactcttatacccctgtgcctcctccttgcgactataaaaggaggagcccggggccttctacgagggacgag

SEQ ID NO: 9518 - DNA, 551 bp, Zea Mays
tttctctcatctatcggaaggttgctatcagaagaactgcttacaaaagtattacttatgttgctcaagatcggccagcaccctttaccccacctttggatgacgaagaagaaacatctttctctaccttatcctcattcttttggaaggctttgttatggaacccctgagtctatcaccatactcctttaggttgataggatagtttattgaaataagctagacacagtagacgataaaacagtgttatactataataataacaacaatgtgatggtgatgtttgatatgtttgagttggatttttgtttgagtgcaatggtctgatggccataagagcattaaaaacataaacttaagaaattcccctctagaatcttttctactccccacttctctaagaatttcaatctctaaccaatcagatggtgaacgcccattcaggacccaacaacaaccggaaccagcatggtcaacagataccaccaccaccgaatcccaacatcgagcagttcatcgccgcccatatgcagattctgcaaggaatcact

SEQ ID NO: 9519 - DNA, 513 bp, Zea Mays
ggaggtcatggattagggcgggccacatgaaagatatggagtagcttcattactttgctgcgggagctaggcatgccccagttcagagacgataccagagccgcaaggtgaagtcatggtctttgaggtgtttatttgtgatcatactttgactatcatgccacaagtttgtaccaaaagttctatcaaagtttaatgtgcaacacactagatcaccctaaacgcaatcgtgggccttggaaagtatctttgggctacaattaggtatggtgcttcacaagacactattgtttgaattagcaataaatgactgtagctggacgagtagtctagtttgggagactagtctagtttgggagttgcatgttcactccaaagacagagaagaccttggaggctgttattgagtttgtgccatgtgccaaaaactgatggggcgacaaatggatgaaaagttggttttaagtgaaggttgatgagggaaaagttgccaattattggctgaaggcgagt

SEQ ID NO: 9520 - DNA, 720 bp, Zea Mays
acccatacttggtaataaatgccgtcttcggaatgtctgaaggtcgagtcctgagctggtgataacctgacctcagatctatctttgaaaacacgctggctcctcttagctggtcgaacagatcttctattctgggcaaggggtacttgttcttgatcgtgacctcattcagagctcgataattgatgcacatcctcctagtgccatctttcttctccacgaataggacaggggcaacccaaggtgaggtacttggtctgatgtaacctttctctgatagctcatctatttgcttcttgagttcaaccaactctagtccagatactctacaggctcttttagaaatgggggcaattccaggaagaaacactagggcaaactcaactttccgctcaggtggcatacctggtaaatctttcgggaacacatccgggaactctgacacaaccttgatagtcttgagtggatttgcctcactgttatcaatagccatctgatgacaacctcctttccttggctcgggtgagactaactcagccaccacttcttctcctagtggggacaccaacttaattgtcctcttatcacagctgataattgcttggtacttatctagccaattcatccctaggatgacatctattccctgagtacccattactatgaggttagcgggatactctatcccccttattttcacacttacattcaagcaaccac

SEQ ID NO: 9521 - DNA, 1013 bp, Zea Mays
gtaacatcctattcattgcttccataaaagcagcagaggcattagttaagccaaaagacatgacgataaactcgaaatgcccatacctggtgctaaaaggtgtcttctcaatatccccctcgcgaatcctcaactgatgatacccagagttcaaatcaattttagagaacacctgggcacccctcaattgctcaaagataacatcaatacgaggtagcggatatttattcttgattgacacttgatttaaagcacgataatccacacatagcctcttgcttttatccttcttctcaacaaacaatactgggaaagcccatggtgacctgataggcctaatgaaacccttagccagtagatcatccaatttccgcttcaattcaacctgctcctttggagccatccgatatggggccttatgaatcggatgcgtacccgaaatcagcttgatttcaaaagccgcatcgcgctccgatggaatgcccggtagttccactggaaacacgtcggcataatcacacaccacacggatgtcctacacccgcaaggcagcctcactctccaccaccatggagtaagagattcccgacttctttgaccgacgatccggaagtaattgggacaacaatgagagagtgagctttggagaacttcccaagattaccacctccctacctgacggcgcctgcaataacactgtcttccaaaaacaagatatggctgcgcgatactgagttaaccaatccataccccaagataacatcaaatgaccctagggaaatcaccacaagattagctgaaaatacctcattagcaagaatgacggaacaacccgggtagaccgaacaactactaatggagccattagcagaactaaccacaattgggtgacccatcctctgcacggaaataccagcacgcgacacaaaattctccgaaacaaatgaaaaactagcgccagagtcaaaaagagcatgggaatcaaacgagttaactgagaccgtacctgtcac

SEQ ID NO: 9522 - DNA, 576 bp, Zea Mays
cggagctggaaaagtgtgaagaaacgcagcatgcatgcgtgtctagagaaggatccatgcatcagtgtatcatgttcatgttcgccagcagccagcaggtgaggtgggtccaataatggctacccatctggaaggtcctgcgagactggagatagataggggagggagggatcatgctgttttgtacgttgcgtaattgagctacagagggaggattagttttgacatggacatgcttgggtagtgctagctttgcctttgtcatgtacaaagcatagaaaaaggaagaatgttgctatgccatttgaaattctatggggcttccacaccgtagatttctgcacacatagaaaaggattaaaaaaacaagcaaacggaatgaacgaaggcttgctgtttcatccacttcgtttctcgatttgtttatcaggactactggacaatgatcttagagactaagcgtgatctgttcttgctggcaggcaagcctaaccagagaagaaggatagaagatttctgctcacttttcactcttcttaatcttgtggcagaaaattaaaaaaaaagacacacgag

SEQ ID NO: 9523 - DNA, 733 bp, Zea Mays
tcgaggattttggatagaaagtgttcacaagtagcatacatcggagtagaggttcatgaactttgaagcacaacaactcacctccctggcatgttgaaacatttttgttgttttcgtgtgtcctttggcacacttgtgggcatagagttattattgatgtttcacgataaaatccaatttcccccctttttcctattttctatgagttacaacatcgcgtggacaaagtccaaatttcgacatggtcctcttttcttcatccttaggaatgcccgaaacctagctctgaggggcctctgcgggcgctctagacgaaaagggaggaggaccatggtcgacaacgagtgaagacccatgtttgcggaggtaaaaccattggtcatgttagccctaattggacgagcacaatcgtagtgggatgtaccccctcgatcatgcccctcgaaggtgaatagccacacagtcaatatgtgtcgcctccaacgcttatggataagctcagtcaggaagaaatggcactataggaaaaagtggaggccatcctcagatacccctcgcacaatgtcacgaaggcggacatgtgctaggtcatgttaggtttgagatcatgtagctatatattgtaatagtggaggagccctaccaaggagggatgagagggcatcatgaagccaagctcgtggaagtggacgaacgaaaccatgaaggccactagttgttcaggacatcttca

SEQ ID NO: 9524 - DNA, 610 bp, Zea Mays
cgtaggcattgtgcttgttgttgagctctttgtgttataaagcggttctataggattacatgttaagtgttgtggtctgtgtcggtgtttggtaccagtagtacattacggggtgtgttacgtagtgctttttgtggttggcgagatcgactgtagttcgatggttcatgcttaacacgacataacataagtatttatacaagtttaggtcaccagaattcttaataccctacgtcatgtgtgctatggagatgatattgctctagattcgaggttacaaagtatctgagaggtgaaaaatgctctctcaggctaccgagggatccaatcgtgttgtagggtaccgaactcgccttatataagacgacgagattagagttacatattgtcattcttcctatcgctaatcctacatgttcgggaatctgctccgacttgtgtgtgatgcagagtttcatgcaggcttgatcggaaacggccatcacgatgccttggacttaaactcttacgccgtctctagtctaacttagccggccagcccacgaaaccaactgtccggcccactcaggccttctaacagcccatgattccaatctgtgttatgataacc

SEQ ID NO: 9525 - DNA, 796 bp, Zea Mays
gaagaatctgcagcggccaacgatgtcgacgcaggctcggtgctgtcagcaacagaggatgcaggggctccaccaaccacatgagactcaggaaagatcacctcaacgttatcagcaccacggcggctaccatggatctctgtacagatcaaaggaagggcaaaacaaccactttttggcaccacttaactcatacagagttacagaccatcggcagtcggcactcagcaccacttaactcattcagatgaagagcagaccagaaaacaggagagaaaagagggaaacttggggcgggggaccttcacttgaggagctcatgttgtggttgccttgccggagaacaggagccatcatcggtcaactggaataggatcagctgtcgactctggagcaggagaggagaggagaggtggagaggagatcaagagccgcagccaccggtcttggaacaggggcatcggtttgtatccagtgtaacaggggcgtcggcatagtgtgccttttcggctactgtagctgggccaaaaatagaggcccataaaaaaatctggctggtcgaattgctccttaattggacgatttaattgatcaagtcaacgactagtcggacgaccaaaggatctgatcaaggcgtcctcctagtcgaggacttgctggcgaccaggctgactaatcgcgattaaccagacgatttcaaaacaatgaccactctgccatgcagccaatgtatttgggttactgctatgacgttgttactaacaataacaattttgcaattaatttcggatacaca

SEQ ID NO: 9526 - DNA, 697 bp, Zea Mays
ccaagcccctaccgagcaagtgtgcaagtcctcctccgaccgggcaccagcgctgggccaaagttgcaagcatacgtgaaccacagcaggacatgtcgacaggagcccgagcgataatcgtaatctcgactgtacgccctttttcttataaaaagtgtactgcgctgatgggacggaacaactccagtcagaggcgacctcagcactagggcctccatagtagccggtatagcaaaagtgacaggacgaggcgccataccgaataggtgaatccatacgcacggaaggacagcgtagggcccacgatgatggaagaaagtaatgttgtccatgaacccaccacaggaatggaagtgacgggcgatgccataccgaaagcactactttgcatgacctagggaggggcccaccatgagaaccaaaggactttttctccctctactttctctctctaagagagatgtcaatgtaaggcctaccccttgagatataaaagggaaggcccctcttcctctaacacgggtacaagatgtaacacattccattgcaatactacgatcaacactacactggagtagggctctggcctgagccagtgtaacccccgtgtcccaagttcatcattcgagtcctagacattcaccattcggagttagtccgcgctaccgtcccccacgtaaaacaaatcttattgtcc

SEQ ID NO: 9527 - DNA, 376 bp, Zea Mays
gtcgagccacttcggacgagcagagacagggctatggcggcgcacctagattttccctctgccgttctagcgaccgcggtagaccggttcaatctttccccgcacacccacccgcggaatcaatggagccctcggtgaagagatcgtggtgagcgcgtgcgtatttatacacccacagcggagtccgatgaacggcctgcgcgatttccacgcgcttcagttcgcatcgagtccgcaacgcggagtagaaatcgcggcattcgttagttggcagcagcgagcaaaggaaggagatacgtacggggatggcccaccggtaagtgactgaagaaggatgcgtgcttgtgccctgtgaagccgaccagcgggacccgtg

SEQ ID NO: 9528 - DNA, 369 bp, Zea Mays
ggatgcttcaactgtggtgaccccaaccacatcgtcaccagttgccctaagaagggcaagcaagaggctgtcccgtgcgaccaccactctgatcaatgcaagggcacgcggaagtacacctctggcaagcacaattccaagggaggattcgacaaggaggcgctcaagtagaagtacctccaaaaggccaagatcaaaaggagcatgccttgcctccctcagcgacctcgaccacgactccaacgactcaatgtcttccttgagcgacgaggagactgataggcgggtcgaggacaagctgaacgggctatgcttcatcgccgacaccgcaggtggcctttgcaccatggcccttggtaatgacctccg

SEQ ID NO: 9529 - DNA, 727 bp, Zea Mays
cggtactgaagatccttctgaatctggattgtctattcttcgatgtgattttctagtacttgcaggcatttgcggagctaggacacgtgaaacacattgtggatatctgacatggattctggcaatttcaaggcggtatgttgcgggtcctactctgccaatgataggataggggccgacgaaccacggagctagcttccctttcacttgaaaccttttgactccgcgcatcggggagaccttgaggtagacgaagtatctttcctcaaacctgagttctctccgcctgttgtccgcataactcttctgccgactctgagcttcaagtaatcttttgcggatcagggcaaccttctcttctgactctttaacgaaggcaggtccttctagtgtcttttcccctacgttgtaccacattagaggggtctgacacttccatccatacaacgcttcgaacgatgacatcttgatactggcctggtagttgttgttatacgagaactctgcatatggcaaactggactcccaatttctgtcaaacgttaacacataggctcttaataaatcctcgaggaccttgttgaccctttctgtctgaccatctgactgggggtgataggcggtgctgaagtctagcttggtgcccatagcttgctgaaggctcatccaaaattttgaggtgaactgtgttcccctgtctgacactatcttctgtggaataccatgg

SEQ ID NO: 9530 - DNA, 351 bp, Zea Mays
gaggagggcatgatcggacctgtggagagctggccacggcgagctcacacagtatggtgttcttgaccgatttgggggaaatctcaaattagagctctctggtggacaatccgagacacgagtgggtgcgctggatgcttgactacctagcggagctaatggcacgctcaatttatagggcccgagggtggtggctcctaatttgggcatggcgcgctggcggccagagagaaagaagatcactggtggcttagtcgtggcgctcaccgtgcaacggctctaaagaggtgaatctaggcgtgccacagttactaccatgcggtaaagagctatggcgtggcataagtaaga

SEQ ID NO: 9531 - DNA, 457 bp, Zea Mays
attgaattcaggtatagtgagtttaatcttagaggaaaaatcattctggttacgtaccacacgacgaggtctgtgccagcgatgatggggctgatcgttgtactcggtgtagccaccataatcaatgtcaccctgtagctcaccaagctgctaggacaactcctccaactgtgtcatgatggtgtcgagggtggtttgtaattcctgtagcaccgtaccagcttcaatttgtgctatttcaagcgggccaagacgctcgttggtgatgtgaatgtcttcagcgaggccatcaagttgcagccgcatttgtcgctcaaaatgttgtatgatgcccttggtacgaggggtctgtggcatggtgttctcatcctctttaacccccgagggtcctaccatagttagtgcaaagacaagagaacaaggaacaaaataatatgtcctacagctagttgaatgg

SEQ ID NO: 9532 - DNA, 565 bp, Zea Mays
ttccattcaccacccccttttgcaaatcttccaaatctgtaaattcctgtgaatccaattgatggaatgagttcatgtacctcccttgtgtatccctgcaaactcttagctccttcgggagggcattcccacctcaaatggccatttccctaaaaccatagatccccgcacaccacgtgctcggtgaaatgcccaaaccagccaaacttgctccaattgaacccaaatttttcaggcaccttcaccacacttccagtaacctacttgccaaatttcacgccaatccgagatcccaggcttaaatttcaccaaaattcccgttttgcgcgatcgttcccgagccgagtgccccaaaccctttttcttcgccaaaattcaaaccaagcacacacttcactcatattgacctatctaaacctattcgtgaagtatcggctcaatcccatatcgttttgtgcctcaatttgaattccaatcatcctatgtctctatttgtctgtcaaacgtcgttttcacggcatttgacttatcgatcgtcccgtctcgtgccatatctctttgtgta

SEQ ID NO: 9533 - DNA, 541 bp, Zea Mays
gggcggtagcatgctccttgtgcggcggttcgccttcatgaccgttggtcacggcgaagatgaaggggcgcactatgcggggcggtgatatgctccttgtgcagcggttcaccttcttcgcactcgaagaccaacgcgccagctgcatgacttgtgggaccaggcccccgtgtcataagatggataccccggtgtgcatgggggagacttctcacgacgtttcaggcgggagcgagggagtctgcctttaaaggggggttcatccctcgagtagcagccatgccttgcttctctcccactcgcggcgtcctctcgcctccgagctctctgtgcccctttgccttcgaggtctctgctttgcgttgccgtagtttgccatggcccttgtaagttcatcccgagcgtgcccagactgagtgagtgttcgacatggtataccgcctgcttggatgggatgcgctggcgttcggcggaaggatttgtgtcggcgccctccaccctggtgaacttgccgctggagagtttgtgccttttgtcctcc

SEQ ID NO: 9534 - DNA, 426 bp, Zea Mays
cagctgtcgacccgccactgcttgcttccggcctcagccgcctctggtgtctggagtcgatcgcgacggacggacggacgacgacgtatcgatcgtgcggcgcatgtggagggggggctggctgagggctagctaggggtggataataaggcggctgggtctctccggtccagacctccacacagccaggaaatatcacgcgggccgggcagttcctgctcctggggaccctgctgtgatcagccactagccgatcagctacgtgacgcctgctgggacgcgcaggtgctgacagtgggcctgctgttgggtatggtatggtatggtatgggcggagggtgtagatcgaatgcatatctcacgaatggatatggattcgataaggtcactcgatcgggtttgctcatacaccttcaccaatcacca

SEQ ID NO: 9535 - DNA, 810 bp, Zea Mays
tgcggaggaagtggaactgaaaattgctgctcagctcttgacatcatgttgacagtgccctgagaagaggaggaagtcactggctcccatctgagcttcccattgggattcctcctacacaccacatccttgtggtcttgactgcagattgaacacctgccgttccactagcactctacacggcgatgcgcatcaccacaacggaatcacaccagccccagcctgggcttaggaacagcccgaaacctctgagtacttcctcccgaagcacccgagttagacgatttcccacggtagggatggtggcgctgatgctgagacttgcccctcttgtgggctggacctccagtgttgcccctcctcgcgtcctggccacgatgctgatcaacacccgatgacttctgcgactccatggtatactggtgttgcatctccacacccagtgctagctccactgtagtacggaagtccaccaatggaaaggctcccagggcatgcctgatggaaggtttcaggccctgacggaactggctcgccttctccatctcattataagccacatgagggacaaagcagaccatcttgttgaagcccacttcatactctgtggtagacttcttctcctgcttgtaggactgcaaatcaatcttcattttctccaggaaggtgaccgggtagaatctcctttcaaactgcctgatgaagacatcccaagacaggactcctggtgaggaggagtgcgctgcctgcacgcctctccaccaattttgagcctctccattcagcagctgtgtgccaaagcgaactcga

SEQ ID NO: 9536 - DNA, 653 bp, Zea Mays
tgattcagttctggatgctgatcaaattgaaaatctcattaaattttgcccaacaaaagaggagatggaacttctaaaggtcgctttttaattaatatcatatttttccacatgtttgaaccattttcttccctgaatcttgcaaaaataagatcaattatttgcacattttccttcagaactacagtggggacaaggaagctcttggaaagtgtgagcatgtaagcatccatatttgttttacagataaatctcgatgtgatttacatgaattagggacacatacataacaattgtgtgggggtgacctttcaatctttcattatatagactttatgtctttgtgtatatgtattggaggaataataatcagttgcattcctgcgttgttcgagaaaaaataatcaattgcattgattgggtgtagggattacattatataggcctatgattactccctaatcctaataggctacatgggctaggctaggcccataatacacataaccacatgatagcgatacatacacaacgatacagtctaacaccctctccccacagttgaaactctagccacgacaaatgttgagactggtccggaacttcgaaaacaccgaggatagaagtcccttggtgaagatgtcaacaaaccg

SEQ ID NO: 9537 - DNA, 625 bp, Zea Mays
gctgaccacagcgaggtcacaccgctcggtgttcttgagtgatttgggggaaatcccaaattggggagctctagtggttgattcgaggcactggttgcttcactggttgcacaactacttagcgaagcaggcggggtcggcaatttgtagcaggcttgagcggtggctagtgaatttgagagagacgcgcggcggccggagaagaagaaggttactggtgcgcgtgattggtggcaattaccgtggcaagctccccggcaaccaccggacgagctaacgtgagtcacggtggtaaagttaatgtgccaaggcacgtggtgcaaggctgcgaagtggctatctccggcgaacccatccaaatcgaccgtggtctgctcgggtacggtggccagagtaaaatagtggtcggagtgtatccacggcgtgatatttacttacccccggtgctatccaactgatccgagcgtggaacaccacagcgatagcacgaatccgcgcacggctcgtcggcggcgaggggatcagaacctgatccttcctgttactgtaccatgggattgttcttcagtcagcctgacagaccatgtttggggcggatttcctcctgattttacatggcaacaag

SEQ ID NO: 9538 - DNA, 435 bp, Zea Mays
ctaattcagagaagcccggggttaaatttacaaaagtctaccagactcagactaattccgtggggactgcgggttcattatgcaaaaactcagggaccattttacaaggcagtcgcaccgaaggggtatgattgaatgtcgaccgtccgatcagcatctgacctcctagattagatctgccctgatctaaaccggtatatattcatatccctccgatcaatgaccgacgacgcggatttaaaatactccaacccatcccagaattacccgatcgagatcaaacggctcataagcagactggacaaaccggcatccaaatctaatcggggcgcccacgatccaacggctcacacactcccctccccaaccagcctgtcgaccatggtggcgcggagcacaccgcggcggagctcaccagcgatcatggccgaacag

SEQ ID NO: 9539 - DNA, 338 bp, Zea Mays
cgggagcagaacaccaaaccaaaccacggggcgacaggatacaatacaactcgcaggatcacaaactaacaaatacctacagcccattagagaaggcccatgtagagccctagtgcagaattgccaacgccagcccacataacctatgcgtgccgcaccgctgggctgtttccatgtctgagcatgcaacctggatatattttttccatcgctttatttctgttgagaaaccctaaaaggggtttaatgggctaataccgaaactgcccttagggggtacacaggttatatatatgtacccatacccatcataatatatatagacagaaagagcttcc

SEQ ID NO: 9540 - DNA, 434 bp, Zea Mays
gtttgagagatatgggggtgggaagttgtctttgtcctagctgtccataccgagacaaaacttgtgcaaagtcgtgtcaaacgacttagggttgggttcaaacttttccagggtgttctagaggtctttgggcgccactttgtcaattgggtcaagtggttttgaagtttgaatgagggtgaacatgtttcatcttaaagagggttggttttggacttagaaaaattctgattttccttttatgctcaacccttggtgaaccttttggggggtttttctgaaatctttttggggtcaccttcttactattttttgtagggtattaagtgtactccatcttttataattggcccaagtcatgatcatgtggttttcatagccctttggtcatactcacttctagggctcccattgtccaaaggggtttgaattag

SEQ ID NO: 9541 - DNA, 438 bp, Zea Mays
actttcgggatgatgcccgcctccctataattgaacaacattattttcaattcctcaccctaaaaaagcttccacagatccccctcatcaatgctcatcccaatcggcgaagacagtagctctcgtttcccaaaccgatctactcgacgacggtcccgctccatccccagccactggcgccgaccacttcgcgaaaactcaccaacgctatgcttcgacaccacccttcgccgccggccctcggtcctcgcaccaggaagatcagacacctcgccaacctccgcccgcggcgaggactccgtcgcgaccgcatctaacgcgacaaaataatccaaatcttcactagacgactcttcactccaggaaaatggactcccaaactcatcatcaaacgaaaaagactcagactcagaactaggcacattataatcagcaggc

SEQ ID NO: 9542 - DNA, 1812 bp, Zea Mays
aagggtaggcacaggacataaagtaaacagtaactttgagcaaatgtttttgtgtatgattttaacatgataatctgctcataagatggcaagctttaagcacacataacaggatgggtgacttacttcagaccttcatgatgtccaggagccaaaactgatgagtatttcttattacccccgtctcgagatacaaatatctggaaaagcagtatatttaactgttcaaaggttgagccttaatagtaaaactaaggccaaaatactgcaaaaatttgcggcgctaggtgtaaaattgtaatctacctgaaatataatcaattataagaacttaatgaagtgtttaaagacattagaataggtatgtctaaagttattgtgctggctaaagaaacgaaatgcattacaaagggcgaaggcaggtacatgaaagaagaacaatctaaagttattgcaccaactaaagaaacgaaatgcgttatagaatgtatgcatagcttgacaaaaaaaatgcccctatcaaccatacttcatatatcagtggaaaaaagtgtaaccagcccaccagcaagtgccaactgtgaagattaagtaaccttcccagacatcataaccttggttgcatgcaaccattcagaaaaggcagtgttatgccatcttagcaaagaaatatcatcttatcgaactcccaaaaaaatgcattgatcacatagttatataaaatataataactcatttgcacatggaacttaaaatgtgtttgtttaagtgatacttcaaacatctatagtgctcaaaaggacatatcatcatacacatcaagcttcaagagtacataaagcattgcacacatacatcatacagcaaaccaaagtctaatagaaacagcatgataagatagaaacattacagagaactggttctccatgaccggcgaactttcacaaagaccaggtatgatgtgccaattcttgaactctcccctgaaacctctcgaaatgcttccgctcctgtaaaaaccgatactgctgatatgaaggcaaagttctccagaatgcatcgatatatgaagttcagataagcaatggcattagcacacaccccatcccaccaagtggcacaccctgggaagctgacggtttacagcgctcttttgtgaacggatcgatcggtgctttctgcaagcacaacaacagatcacaccctgtcagcacagtttttggatccatttgtgttctgaagaaaatcatgcataggaggatagctgatgtcacccgtccatgtgacgcctcctcccgaacatacgaccatagtctcaggccaaggctcatctgcaattgcgggagcagaacttagcaggcagcaccaacaaggcaacagctttgaactagaagaggaatagaaaaagcacatgtcctaaaacacccaacacagaggaccggatccccgaggcgtccataccatcctcattgcctccatgaaagtgacactgaactccttgaggatgttcgcgtggctgttgagccgcctccgccacgcctgctccggcggcgccccgccatcgaaatccaactgcagcgaaggaagctccaaaacgtcagaccaccccgcaagcaacagtcaacacgaaacgagaaacggaacggattcgccgacgcaggagccaaaaagtgggctcaccagctgcagcgcggtccggccgacgtactcctccgccggccacgagttcttccggcagtggaagatgtggccgctcaccatcgcgcccgctcgactcgaagtgctagttgccgcttctcaccctcccccgcg

SEQ ID NO: 9543 - DNA, 349 bp, Zea Mays
cttttaatgatatcctccacttcttgcacagaaaagggggcatcaagctcagacaactcaaaagtaggcaatcccagggcttcgagatcaatcaccctatctcgaccaacacattttccaataaggttggtgtagaagtgatccacacaagcaaccttttcatcatggcttgttaggtatggtctccatccaccggcctagccacaaaattcttcctcttgtgatgtcgagcatgaaggtgaaacagttttgtattagcatctccctcttttaaccaggaaaatctagatctaagcctagccatggtgcacttgagagaggatagactgcattttagtttcctgaagac

SEQ ID NO: 9544 - DNA, 597 bp, Zea Mays
agcggcttctcattcctcccgatggccagagacgagggagaagtggccagcgacggcgcgccatggccggacccctccccctcccccacacacagctacacaaactcgaatcccacgggtgctacacgatgagaaggcgaaggtgaacaccaagggaaggtcttaccaaggaattggagggcgcagagacctggcgtcgaagaagggcagcacagtgggggaagacggagcttcggcgacaattccgaacactacgatgacccccgagcccacccagatgctaatatacgatccctgagcttcggcggaccaccacgacccaacacagaggccggagcaatgctggggatccaattcaacggcggcggcggaggcttttccccgcacaaatggcggcggttttagggacgcgatttcggtagagcgagggccatgtacccgcctatttatacccggggcaatatcttcgcacggaattttcgccaggatccaacggatagagccaagatcagtcggcctcccggagattttgttgcgcttcccacggagtcgcgtggggttgtttggaggggacgattctgactgtgagggcccgca

SEQ ID NO: 9545 - DNA, 321 bp, Zea Mays
cggtgatggagccgttgatccaagacagaacaacggcgttcatgcgagtccagtcgggcgagtggtggacaacatcggaaagcacgtggcaatccagagagaatttggtgagggttaggaggaaggactcacgccaccgagagtagaaggtagagttgacgtcgaggaggagtgggacgagggcccggatgttctgcacggcgacggcttgagcgtgcagattgagaagagcagccgcttcgtgttggagaagagcggcagaaagctgggcgacggagtcagcaccagtgccgtcggaggtgatgacattgatggggggag

SEQ ID NO: 9546 - DNA, 923 bp, Zea Mays
ccgggagggaattcgttcgtggtttatataagctagcaggaagcctctcttgccttgatttgctagaaggttcaccaccgccatcacgggttcctgtgcgctgagtgctcccgtcgccgctggagtcgagagagagagagagagagagttgggagcgctaccatagcaaacccagcgcctctgtgagcattcggcatcatcgagtccgtgaagaatggcttctcggtgatcctcgtgggagtgctttgtcttgcgggtgagccgatcgagcgcgagaccccggggcacctaggtgtcattgctggtgttcatcctggtagtcaggtcacttgtcatcaaaggcggacaaccccccccccccccccccccccctcgacacgctgatccttggtaagatcaccctcgttcgattaaccttcctctgggcatcaggtagtagtttaggagttgggtaagcatgctcggggcgttggttcatgttccttcggcgtgggtgccgtcgtaggaaccatgggcgccgctgcctgttctttgcgtggggtggaggaggaagatgggtgtgtgccgtctgatccgaaacagatggttgagatcagatctcatcgcagctgtttgactaaggatctgggcctctgatcgcttaagcaacgactctggccgcatagctcacatttttaatctgggtcggggaatcgtgatccaatggcccagccctgtaccccttcggcgtaaccattttgcgtatgagtccgtggagcgtaaccattttgcgtatgaatcaacccgccgtcctagtgccattgaggaatatctaaagcatgtcctattttcttacacgttagcccccgatcttttaactattagtggctgccacccctagccatgacaaaacagggaaaatggattataaaatgtgtgggaag

SEQ ID NO: 9547 - DNA, 559 bp, Zea Mays
ttgaaatacagctaggggtagaactttctgagatgttctatattccaggagttcccaatttctgtgccgtccatctgagtgagacgatatgatcctggtcgagtgacttctgctactatgaagggtccttcccataagggcgataacttgtgccgtccctcccccgttagaaatcggcggaggacgagatctcctactgaaaaggatcgctgtcgcacgaccttgtcgtgatagtgccttagagtgtgctggtaccgtgctgattggattactacatttagctgttcttcttcaagtacatcaatgtcctccatcctagtagcttcggcttctgctatgctttcgaagatcaaccttggcgccccgaacttgagatcggcgggtaacactgcctccgacccatagaccatgaagaatggagtgtttccatgcagagctcggctaggctgggttcttaggctccaaacggcgtagggcaattcccttatccactttcctgcgaacttttcattcttatcgaagacctttttccggagtgcctccagtatcatcccgttgg

SEQ ID NO: 9548 - DNA, 299 bp, Zea Mays
gccacctgcgccgcgcccgctgccatccaactaccagatgatcaacccgggcaggtacaagagggaccagcagctggcgtgcgacgatcccaaggacaacaagcccaagtgcatggccaagtgcgacaagcgctgccccaacaagtgcatcgtcctctgccccggatgcaagacgttctgcagtacgttctccttccttttgcccgcacagcgcacacacattaataataatgtctcgtatcgtcatcaccgctagcgctagctaagctaacaacaactcattcgccgtttccgtttcc

SEQ ID NO: 9549 - DNA, 614 bp, Zea Mays
atcattcgtaaccgtctttctgttcatcggttcaccaccgacaactcatgttccattgaatttgacccgtttggtttatctatgaaggatctggccaccaggaccctcctcgcccgatgtgacagcttgagacccctctacacgctctagccgcccacctccaccactggcacgtcctccccgcgtgtcttggcctccatcacttcctccaccacttgacatcatcgtctcggccatcctagacccgacgtcatgaccaagctcgccagtagttcagaaatttcttgtagcaggggacatttttagggtatgtgtcatgcttgtcaactaggccgccatactcgtctcccttttgctacctcttcttctagagctaagcaggcttttaatcttgtttgttgtgatttatagacatctgttgtactcggtctctctggttataaatactacttggtgattttgtatgggttttctcattttctcttgacttctctacggttgaagtccgacacttctcccaccctcacgcacttcttcgcctgggtctccacccagttttgttatctggtttgtgccctctagtgtgataacggtcacgagttcgacaactccac

SEQ ID NO: 9550 - DNA, 294 bp, Zea Mays
gagaagatcagactcagaaacaacagacatatggttacctgcgaaaggcaattggctgttgggatcgatgggaggaatgacagcagcggatgaacttgatgctttccgcttgggcgccatctcaatctcgctggcgagcggaacagaagcagtatcgcacgagcgcaaggaaagcttggatgcagaaaagcaagaattagggcacggaaagcggaggcgcgcaacaacgcagtacatatggggtttttccaggccagataccgtttccaaaaagcgtccagtcatcacccggcg

SEQ ID NO: 9551 - DNA, 557 bp, Zea Mays
atcgtggtggtcggatcaccaccttctcccgggggaactttctgactcccttggggttgttgtgccgtcctttcggcgaccagcaccatgctcactgcctctgtagccgttacaatgtataagtacaacggctcccctggctctagagctaccagtattggtagggacacaaggtgctgcttcaactcttgaaaggctcgttctgcctcctcagtccaagagaatggaccggacttccgtaatagcttgaagaaaggcagtgccctctcagccagtcttgagatgaagcggctaagggcggccagtgaccccgtaagcttctggacatctttgattcgggtcggaggcctcattgtctctattgctttgatcttctctgggtttgcttcaatgccccggtgcgaatccaggaatcccagcaacttccctacggagacaccaaagacgcacttgtccgggttcagcttcgtgcgtgttgcccgcaacttgtcaaagaccagggttaagtcttccactagggtcgaccctctcttagtcttgaccacgatgtcatcaac

SEQ ID NO: 9552 - DNA, 504 bp, Zea Mays
aacagtgtgctcggtgggtgcaaggtttatacttgttcgggcagaacgtccctacatctagtcttcggcggctcgcactatcgacacctttgttgctcgatgcttgtagtatgggttacaagagggttacaagcgggcgagagagggaggaaggcctcccaagtctcttatgcatggatggacctaaagactacagaactagagtcttgtgctaagccttggctccagcctccatgtcttcaggtctcgctgggcatgtgcgattgccttccgtcgagtgtccctgtcctcatgatttacctccttcgtttatacgccaaggtgaggatcaaccgtcaatggcttccttgagaaggtgccataatgccatggtaaaatcgagtgttttaccctggcgaggtcatgttgttcatatgtgtcttgtcatttggttgccactattcctactcattacgacgggcgacgtgggaggcgcgggccctggttccatcattactacccctg

SEQ ID NO: 9553 - DNA, 380 bp, Zea Mays
caggaactgcaagtttgttggctgaaaccatggtttcacccctgatcacgatcacacacgaaaacttttgaaaatgaacatgcggtagcctagttatcacttcacaaccagagcacactccgcgtttcaatccttttgtggcagacgccatccacacaaaatttcgcctgcttgttctgttcagtggtcgatgcaggcgttttcatccacctcctcgagaggaagcctcttcccttcggtgacctcctcctttacataatgaacaaagagtaaagaaagattcactaacgacaatcttaaatgagtgcacacgagatgagtcaattaatttcatacctttgcagcaatgagatatttcttgtgtgtggctttaagcttcc

SEQ ID NO: 9554 - DNA, 1664 bp, Zea Mays
actcctgctttaggttcttgcataagaacatcctccgtagtgtagccagtcgcctccaaaaacaacgggaatggctttttggagaaatgccagcaaagtgtcagcaaattgagaagatactttaaatcagcaattacttcagctcctttgagctccacactatcatttccagcgtatatgcttgctacagataagtttccctgtaacacatttcagaagcagagctatcagaaaccttgtaggagtactggcaatcacagtgcaatctgcatttttggttcatcaaatacaggattaatcatttgtttacgatagacagctctgccctggcccctggttatgtatttttacagaggaaggctttaaaggatgacatgagcacggtatgagcgaaatgtgaaggaccaaactatatccactgcctagcttaaatgtacagcactccacattggctttcaacctccaagaatcagaactagttcaaacgggacaagattaccaacaaagtgtgagccaccaacctgtctcttgaggaggaaactgatcccgaaggcaaggtcgccgatcggccacttcccaagggtctctgaatacgtgaaccgcagcgtctctgacagcgtcgagatagtctcaagccaggtggcaggggcgcggacgtccctccgcgatacacggctcctgctgggagaaccctgtgcggccctgggtgtcacatccctgctatcgctgcactccccttccttattcagcctctctgtctgcaggcggcggttcagtgtgtagtaaagcagtgccgcggcccccgcggcggttgccattgtcgctgtcgccatattgtcggggagtagtctgcaggggcttcgtcagctgcaatgagccccggatggcctgtgggtcgcagcctcctgtgcagttgtaacccaaggttatcaatggcgcagtcagccagtcagataacgttacttagcagcccccgaggcttccactggtgatgcgatcttgatcctttggggcagggcagtatgaagtcaaacctgataccacagacagataaaccgagtttttttattccaagaaggccatcgattgggcgggcactggtcaccgatagctcaccctccccctctcctttttttggcagtggtatgaacagttggaccatccaaccacatcccatcaaacactactagtacactagatagagtaattcacacaaacaactaacaggttgaagaagtccaacgcatcaagtgaactaagaagaaatcgtccgacgcggaaaaaggaagtacggagaaagaaaacaagaaaatcatccaggtagagatattcgattggagacgttacctcgatggctcaacaattgcgcgcggcagcggtcgatctgattggcctgggaggtcgaaacccgctagggttttgggaaaagggaggggggagcgggagacgagtccgggtgagcctacctatcggtgcggaatgcgcgggaggtggggagtgagagagaaatagggagacgagagaggaggcaggatatggtgcctttaattctcgccgaatctcgcggggcagtggcggcggatggggaggggaagaagggcttccgtccgaccggacgaggcgcgtttcctttttgccctttccgggaagaagcggttgcgctt

SEQ ID NO: 9555 - DNA, 329 bp, Zea Mays
gtattccatgtgtagtgatcgcgttacttaattaataaatggaaactcaatttggaaattggttacgttagttaattcaggtagttaatcatctaccttatttaatgttgatcaactgaaaatggttatgattctattagtgcatgtgactaatccttattattggaactaagtggaactagagcacgtaatgactagttatgcgtctacccgtaacacgcctcgagtatagctttaacccctgcgagaccttctttcttctctttctagccatggcaagtgcaatatcgtatgtcatactctatgcatatttaatctatttgttctct

SEQ ID NO: 9556 - DNA, 426 bp, Zea Mays
ctcggaggttataactcttcggaatggggcacttgagaaagataaaatcctgctttctttggtcaaaaagttaaaggcaagcgaagctaatttggccaaactctctgaagtggaccaaaagattttaaaatttgaggaggaaaaataagcagatgcaaaacgtatagctgatctggaatatgctttatctattcaagtgggattacacagactggaaaagaagtagcaggactcgaaaagaagcttcatgaagttactgaaaacttcaacgttgagcaatcaaagcgtgagatatccgacactgaacggttgagggttcaaaagaatgttgaagagcttcgtcaagcaaaggagtagtgctataacattgctatgcaatgctcaaacaagttgaaaaatgcttttattagtgttggtgcattctcg

SEQ ID NO: 9557 - DNA, 417 bp, Zea Mays
tggtttgtacacttagagaacgtcctacccacgctcacggcggaaaccgtgacgtcgagcccgcgttcccattcaatcacacccgaattggtcaaatggctgctacgatgagcttcacgggtatacagagctgctaaaacaacacttgagaagtgcagagccataccagagtagtccgcccacggagcgcgaagaagttgtgcgctggtgacagaaaagggggaaaatggcgtcgcgacggttctgggtggaattgggaggtgagattggggctacacggccgtaaggaactatagtttcaccgtgcactaccaattttgggagaggtggagaggattccgcgaatttggacttcaactgagctcacaggtggagatgtgaatacctcgccgtggtccatggcactatttatagcca

SEQ ID NO: 9558 - DNA, 991 bp, Zea Mays
cgtgtaccgtttgtcctaggttgtagtatgagctagcagagagagacattaggatagctttgcttgagaaggctagctcagtgagtgcccctgcacctgcgcagtgtgcactttgtgagggtttgcagtctgctcttgagttctgcagacacgacaagacaagaatcgaggaagaaaacacataccttcgatctatcttgagttgggtgtcgtgcagtgatcctgagttgggcatgatggtcagtcagttcaagaggggaactggcggaccggggttaggctttgctgctaaggatgggagtgtcacttgctttgggaaggttggtgagggcagtggtttgacaccttcagagaaaccttcacccactcccaagcttatcaaaaccacccctgctaagcctatcacccctgtgagagatggtgtgattgatgaacctgtgagagctcctcctcaaaaacaagtgtggcttccaaaacctaaccatcttaggaacacacttgacacctttcccgacatctctagcgacccattttctagagcccctcagccatccaaaaagaaagccccctcccacaaacaaaatccacccaagagagaggtgaggtaccattgtgagtgttgtgagaaggatgggcatcttgcttctttttgctttaggaggaagagagatgagcggcgggattctgagtcgagcaggaaggacatgaaccgcccctatcatggtgttcatgctcagcctgttcagagacgtcctgcgaggcttagaggtgtttttcctcttgccgctagacctcaggaagtgagaccacgtggtggtcgtgcccgacgggatgttggttgtgtgccatatggccaaggaccacgtgacagaggctttggttcatactttcccagcggaccacagttccttcttgtggtgatcacttcccttcggaaccagggatgtttggtgttttccctaacacttttcatgggcaaatgccacagcac

SEQ ID NO: 9559 - DNA, 740 bp, Zea Mays
cgcggaccgtccggtgcgacacagagaaggcgccgctcctacatccaggtcactgaccgttcggcccagagacgcagttcgtccatgccgccatagagggcagtgctaggcggtacacccctagtgattggcgctgccagattagtgccaacactcttatctcgctctgcaaccctttttccgcgccccgacgaactgttcatagctccagcaggccctctatcccaaagtgcaaaatagaagccacccttggtgctccgtatgcctatgagttctttctcatctccgcacctcaaccttcactttcatccgctcccaccaaatccgctaccaccctgaggatcgaccttcttcctccccccacctattgtcgaatccgcaggagttggtctcatcacgacgctccacctctaagcccacctgctgctcaaggaggactgaagggagtacgtctaagtctgctcctgcatcaacggtgttgcatcctccgtcgagcatcgccattgcgtactctgctccatgctcacgcaccacgctaacaccgcgggtagcttagggaagctcagtcggctcgttgactgcgacactgcacttgcttccagagttctaggaggctcccgatgtttcgcaaggcgtggcctacgaggacattgttggtgtttacttccgactgcgcactacttcagtatatggaaatatcgaatgagttccatatatcctctcacgaaacccaatagctg

SEQ ID NO: 9560 - DNA, 444 bp, Zea Mays
gaggtatggcccctcctgtgttcgatgaaatgccccctactacagtgaggatgtcattgcccttccaaggtgctttggaggttctggttattcagtgttcgatgaaacatctactgggaaggtggtctgggatgaagaagtgttacttggttccgattcacttggtttttggcagcgcctagctcatggagtggggaaccagatgcccaacgattgcaagcagaatgttgtgcctgatgccccatggttgtttgttgaaatgtcacagcaagtaagtacatactcaatgtccagtgaaatgggtcttacagtggcatgggatggggagatgcaagctgaaactcacacgcatgaaggattactgcagcaacttgctcaaggtgaagaagccttaaaagaatcatctaagaaggagggtgacgttgaagatgaggccagcaggcc

SEQ ID NO: 9561 - DNA, 731 bp, Zea Mays
taacgtaatcaccaaggtatggtcgagggatgggaaaggtaaaggcaacactaaacagaagcacaacaaaggatggcgttaaaactcgcaagcgacgaggaagaagatacgaccaagagagaatatgtacaatacaactctaagattgagagggaagagggaaggttttagagcacatgtataatataagcatcaagggaagatataaaggtgacaagggtaaagatgataatcgtgaaaaacataaccaaggatagaattaaggcaagcctcgcgaagtggcaaagtggcgaagtggagaaaacaatcaagggtaagattccaacaggagggttgaagtaaaaattcattaccaagggaagttacaaggaaacaatgaggtcaccaaggatgtgcaaaacaaagtgattgctcatggatcatcgagaaacaggagtggtcaaggacatgtaaactaaaatgtcttaaactgacattgggatataaaggtaagcataaaaaacgagagtatgcaagattccaaggagatgagcataccaagaccaagagattagaaattgtcgaatgatagcgacttgatcaatagaataggaaagggtctcaaaagacagaaaggtcatggtcatataaattgaaatgtttaaatagctagcagggttttttgaggtaagtatttgaaacaagagtattgaggaatctaggggtacgagcatgtcaataccaggggaata

SEQ ID NO: 9562 - DNA, 318 bp, Zea Mays
gtggcctgatactcaatttttcaaattctgttcactttctgattttgaatttcaaatctgatttgatgctcatatatggacatttcgaccaatccaagggttagtatgcatgcatatacacattatgtatttgaggaatgcacattttcatatcaaactacttagatcaatctaaaatgaaaaattcatcaaaaatacccaataaatagcgtagagagcatatttagaaccgaaatgcaatactacacatgtgcgttcaacctcaagctacatttgagagatcgatcacattcatttcacttcttagagtacaaaatc

SEQ ID NO: 9563 - DNA, 497 bp, Zea Mays
ggtgccgatgactccgcgccgcgatcttcgtcggcgctatgattcacgcccagtaacgcgcggataacgacccctggtgaaaagatctcaccgtggatgaagtcggagcactgtattgccctgtcgccgtacccacttgcccggcgacgtggccacacggtcatcgccgaggctgtcgtcgttttcctcagttgcgtcacgccttaggtagtttaccacgtcgctttgcaccatggaggttaaccggtatagccattctcctaggtccggtgaatgccagcacactttcttcaaattggacgccaccaccgatggagtctataaattgctgccccagtgagctccgctaggttattacgtatccaaaccaccagctcttgcctccgatcgtccaagagagcctcccaatttcccatttcccccaaatcggtcagaacgccaccgtgagacacctcgccgtggccagacgtctacgggttagttcatgcccttttgtg

SEQ ID NO: 9564 - DNA, 485 bp, Zea Mays
tggacaggcggcgtgtcctctccacaataaatgcggaggccgcgcggctcagagcccttacgtcatgctccgcccgctagcctacgtcacggacaataagccatgttgctgctttagacccttggccgagcggggggcggaggcgctacggatagagccaggacacgcgtcagtcctggacccaggcctaggttatgacactccttttctcgggaccttgttatgggcggtccagagttcacttggtggggtccgaaccctttccaatggcttcgggctgctttacttcgagggttcgggtcgtgcgcacaggggtccggcgtcttctaggcccgatagcgttatctctaagaacaccaccctaagtgcccacaagaaacccctgaagctgttctccacgcggctatgggtagccgcacagacatcgtgccttcataccgtagtaaggggtacccctaatccagggtatcgacagtggtccccgg

SEQ ID NO: 9565 - DNA, 466 bp, Zea Mays
aaggcccagtgcaattgtatgaatatggatgcaagaatcaccaccttatgtgatgagttgtgcaagttgaaaatagaagtcgtttcctccggtgccttaagttatatttcagtggagcccacattacaagagcaaatagtcatggcacagattggagacaagggtgttcaagtcattaaggaaatgatcaaacaaaaggtggacaaatacaaatgcttccgtcaggacagcaaaggaatcctatggtttggagaccgattggttgttcccaagaaccctgagctcagagaagatattggatgaagctcacctttcaaaattctccatgcaccccggcagtaacaagatgtatcgtgatctcagatccttatactggtggaccagaatgaagagggaaattgctaagtatatatccgaatgtgacacctgctagagagtcaaggccagtcatttgaaggtagcaagc

SEQ ID NO: 9566 - DNA, 962 bp, Zea Mays
aaacaggaataggtccgtttactattgtgctaagtcactgacagattgcagataagccctccatgttctatttcttcgcagtgggaggtccacgacaacggccgcacggaggatgaactccggtgaggttgtgccggcgaatttaagcaacggctggtgctcccgagcggcgtacaccggattaaaccctccctgaacgattcccctaacttaatttcacgattggtaagctatcacgccctgtccacgtgaaccgcgaacgatgaggacaatggtacgtgttcccggtgatccctgacggtccggttcaattaaagggttcaaggggtttgcggggtacctacggaggctagaacaagcggcagagggacttgagctcacctgaatcgagctggccacggtgaggtcttcttcgcggtggcggagaaccaaattggggggggaattcaaaatttgtgctcgctagtgggggatttgggatgcaggtgggtgcggtagctgcttgggtacatggcggagctgggggtatggtcaatttatagaggccgcgagcggtggccggggatttgggcgacgacgcgcggcggccggaggtagaagaaggtactgacgcacgtgaattcgtggcatctaccgtggcagttactccgacgagccacgaagaggcacaagggttcacgacgatgtagtggaggggctgagccacgcggcgcaaggccgggaggcggctgtcgccggcgagcatatccacatccgccgtggtgagtgcggtacggcggccgggattgtttactgcccggagttatccacggcgacgatattttcgcgactccgcagtgctatccaacacccaggcgctaatctcgacgccggcgacacgaatcacggcggagagagccatcggcggcgaggaactgccgcgctggcgatctgatccagtcgggctactgtaccatggcgag

SEQ ID NO: 9567 - DNA, 677 bp, Zea Mays
cacctctctggctctctctctctctgcgagtctgcgacgacggggctaccgccgcctccgtacgccaggtgccgaggtcttcgttggtcctttcgccggcgacatccaccaggtatttccaccccttctcttcccttactgctgtgcgaatccgagcacccaaaccaaaccagggttaaactatcactatttaatgtctaccgacttcgaactttttgcagaaattatatcatcaattcattaccgggtgtacatttgtacacagtacacccatgtccttcactggatccgcccctgtagtgaggataatatctttggagtttcggagggggcgcgctagaaggatggtttccaaaatgaggtattgttctgtacctttgttcagattttaggatttctcccgtaccttatccgcgaagttatattgaaatttatatttatgagcatggctagtgacgaggatgtttacagaatctcttgtacggcagatttcggaatgctctcggttctagaccatttcagtgttgttcgcgtgagaatcatacatatgtccggaagctgttggaccgagtgtcggagagatcaaagctccttaaaaaggtacttgatttcatagtactttattgttgtcatctgttaactttaacattcattttgccatgcacctttgatggttt

SEQ ID NO: 9568 - DNA, 820 bp, Zea Mays
gaattttctaaggattaaataagttcctaggtttattttaatactaaaaaccaatttctaggattatttgtttattttctctgttccctggactttgcacaataatacagagaaacataggggggtttggtaaaaacatccctaagactcagggcgcccccaaatacggacggcgggttgatattcattaaatataggggctcttgtgaaaaagcgcgcggcgaaagggtatggttatatatgggtcgtgcgatcacagatggagggctaagattaaatcgttctcatccccaaccggtatggcaccaggaccgtaggatcagagatctgttgcctagatttcaaatatgctcgatcagtcaccaccattggactctgaatggacgacccagatcatgagcccgaagtggctacgggagatctgatctccagcgtccattgaggaaccgaccgccagggactctccttctacctccgtcggccagccatggtaatcgcacactatcttctacctctagttcggcggcaataacaccgcacctgccctaggtcgcgacaaacccgagccccagaaaccccgcccaaggagtagcatcggtatggagtagttgcatggaaaggagaaggtagttctcaccagaaatcctgtgcgccggagttgaagctcttagccccgcgaccacatcaccaacggacaacagcacggaccggagcacacgcggtaggtcttacctttggtggggatgcaggcaaacccaaccacgacgcgacacgacagggcgactccgaggcgacatcaaggtcatacaagcaattcgtc

SEQ ID NO: 9569 - DNA, 533 bp, Zea Mays
catccatggaggtgtgggaaggagagcttacttggacaccctcgggggctgggttatagctcgtgccacccaccagagccggatcattaccggcaacaccctcgggggctgggtcgtagctcgcgttacccaccagggctgaatcactaccggcgacacccttgggggctgggtaaccaccagcaccaccctcggaggctgggttttctacaacagccacctctaaggatgaaggatcctcaatcacctccttgggagtcgagcaatcttgaccaacttcttgacatcgaagactgccctccaaagtcgacaatgtgcaagataatgctcgggatacctctaatcccacgtctggaattttagagcaaacatccatcatgtcaccagcagtcggctccgacagcatatcttcaggaacgacatcctcaagggcctgatcaaaatctgttatggacaattcttgaaggctgacaagagcagacagagctggagaaggaatatcactatccccactactacatctgtaacaccgg

SEQ ID NO: 9570 - DNA, 625 bp, Zea Mays
agccagactagcacaacaagcgcgcaaaatcgaagtcttcttcaaaagactatccgtgcaaaagtcgcctaagggtgcagccggactagcacaacgagtgcgcaaaatcgcaggcacatcacatccgtgcaaaagtctacaccgagaaactgtccgcgcaaagaccgactacaggcgcagccggactgacataataaatgtgctagaccaagtgcgcaacgcccctatggacatagccgaatgcgcgaaggcgcacagcctcatcatacaaactatagttacacacgtacagcgagggcatcacaccttacattggttaaccttcggaatgattcccatctccctatagttaaatagcattatcctcagctcctcaccctcaaaaagacttcgcaactccccctcacctacactcgccccaaccggcgaggacaataattcccgcttgccagccctgcccacacgaagtcgaccaccatccacttcactcactctacgtttcgccaccgcccttcgccgcctatgcccagcactcgaaccaggcaaaactttagcatccgtaacacgtggagaagcctccgccgcagccacatccaaggttgcaaagtaatccaagtcctcatcc

SEQ ID NO: 9571 - DNA, 548 bp, Zea Mays
tcatccgactcccatggaggtggctgaggggccttcagcctaagaggtggctactgtagaagacctagcccccaaggggtggtgccgacagctacccagcccccgagggtgttgctggtagtgatccagctcttgtgggtagtgcaagctacaacccagcccccaagggtgttcaggtgtgctccctttcccatgcctccatggacgtccacgtcgggtcgtccccacctcggtccgatggagcgacggcggtacgtgcttccgcagttttaactggacgagtcgccttagaggtcggcgagctagatgcaaggagcctgctgtctgctggtggggctgaggtcaccccagatagtgctcttcagatcattcctgctaaccttccctcgtcgagccatgcctcagttcctcctgccctgggtctaccactgttcctcttcaatcttcaagtgagtcggcctcttgctctatgttgttcatattagcgaattatctttcttctgctcatctatttatgatcacatgattttgttgatggaatatctgcc

SEQ ID NO: 9572 - DNA, 1121 bp, Zea Mays
gctacgaggtgcgctggatcggcaatcaacggtcatgattcaaatatccgaaggggtatccactcgactgatccggagcgtccgtggctgatccaacgatcttacccatcgccacacttgcacccttcatcgaggatccaacgaccctcaccctcttccacccccaagttgtcaacgcggcggcgcacagcgttccgcccgcggtggtcaccatggccagcccacccaatctgcgcgttccggtgcgcgattcccaaatcaatctggtgctacacgatgtaggtgcatgggcggatcggtatggggagttcttaccgtgtctcgacgcaatagaggacgtgaccacggcgcacagcggtgtggcgacggtgcaagagctctgatgagcaattgatgccgccccagtagacgatttccccccaacagtcgcggttgcaccactggtgatgcagtgagactcccagcgacgacccagaggtcttgcgttgcagccgagcttgattccgtgagcgcagttcaccagcgacttcttccaggcgagatctgaaatccgcgacgccggtgagaatcccccgagctaccagccgaggccaagcggcttcacgagcaagtagcggcactcgaatttctctccccccaagcgcggcaatggaggccaagggagtacaaccaaggcactgagctccaatcccccagggccttgaacatagaggagagggtagttgaagtggtgccacggggttgttttatatacttatatacccccaaattggtggtccgagcggaacacgatgcgacatgtgcggagtagagattgtgcgcgtggagattgattgatttggttggagtccgccatgtttgggagctgggaggagatcccgcttgtgcggcccacgtactggtgaaggtgtgcgcggattctatggagttcggccgaggagatatgcatggtggcaaatctcaacaaacccagctgaagaaacggcatggccgaggaccgcgcgaagccctggatgccggccgcaccgagtttgccgcgccacgggatctgttgtgagctaggggataagcccgaccgatgggccccacggctcggtgactgaagaatagcttcagtgcat

SEQ ID NO: 9573 - DNA, 342 bp, Zea Mays
acgctggcaacaaggttgtgctggacgaaggcgaagaggtaggcggtggtgacacatcgaggttcctagagtttcaagggtgggagagccacgatgcataggaagaaggtcctcgataatgccactttagcgctacggcggcgcttgaagttggataagaacttgaagagccaaataataccatgcatgagagacgtgcaccggcaagagtcgacatcgtatagatgtaacgacgaggactatgataggtgacgatgcagcgacagtcctcttgtttggcgaagcatcgcgcgatggacgacaaatgtctcggaacggtggttcgcccgcaatcggttgatc

SEQ ID NO: 9574 - DNA, 553 bp, Zea Mays
ggccgtaatcggccctgacgccatcaggctcattgagcaaggaagaggtctcgagacgactccgagcgctgtcgatgtccctaagcgcgcaaaggtcgatgggtagagcagcacaaacacagaatgtgtgggctcccagcaaaaaagtatgacaaggaactaccccatctaagcgaggcacaactgtgtattttcacccaaaatcaatgaattttggaatgcgcgtccacactattgtccacacagaaacaaatgttttcatatacacaagaaacaccacaaagaggttcgatacataaatcctaagggtagggacatcgtctaaacaggggcaggtgggccacaaagcggaaggctctagggtcaggggcgatcaggagggacctgacgtcgacccagctcgcggtcgactgagcatgggggtggacctgctcttcgttgacatccagctcctcatcgcttcggtcggcagcatagccatcaacaattacaacgacgtcaatatcatcaaaatgagagaccattttcctaagggtgatgtcgccccctcggc

SEQ ID NO: 9575 - DNA, 558 bp, Zea Mays
tgggatgaagtgggctaccttggtaagacggtctattattacccagatagagtcgttccctttttgcgtccggggtagtccggttacaaaatccatgcctatttcctcccacttccattcgggtacgggaaggggttgcaataggcctgcaggcttctggtgctcggctttcgttcgttggcaagtgtcacactgggccacatactgtgctatctctttcttcatccctctgcaccagtatctggttttgaggtctaggtacatcttggtggttcctgggtggatggagtaggctgagttgtgagcttcatcgagcaggacttctcgcgcctccccttttggtacacacagacggttcttgaaccaaaggactccttgttcatctgtcctgaggtccggaagtttttctttgcgagctttttccataagtcttgctatctccgagtccaggcgttgagctttgcatatgaggtcatctagcattggtttgacttctaggctgccgttgtttcccaaacatgcattcagctgagctgattccttcttccaatcttctaa

SEQ ID NO: 9576 - DNA, 442 bp, Zea Mays
atcaacaaactttgaggcactatcatgacaaggccatacggcatcgatccttcgcagtaggagacctcgtcctccaccgaattctaacgggggagggatggcacaaactgtcgccactatgggaaggaccgttcatagtagcagaagtcactcggcctggatcgtatcgccttactcaaatggatggcacggaaattgggaactcatggaacatagaacatctcaggaagttttacccctagctagatctcaaaagatattgggacgacaatgtactctgtaaactgggaaatatatcatcaataaaaagacttcaaaagtactcgaattgttcactgtcaaccggcacgattacttaacttggggtgaccactataccctactaacaggagcaatcggcttaagtcggcaatgacttaaggcggtgcgacatgctcacgct

SEQ ID NO: 9577 - DNA, 318 bp, Zea Mays
cacgggggcatctcgtccgtcatccactcgttccgatctaaaactaaaacctagaagctacacattccttgcaaaacaggcagactaactcattcctcccatccgaacatgcaacaagtgagtccatgctggatcacctggttctagacaggtttattccacaaaccaaacagtgtgttagtcttccctacacctctagctagaggcagacagtcccatagagagaggtcagacagccaccctaccttccacatacattacattactattgaagtgacatccactgttcgtccaccactctaataattaacaatcgac

SEQ ID NO: 9578 - DNA, 733 bp, Zea Mays
gtactactactgtaccgatgtgaaaatactactgaagggaagtttgcaggctattatttgaaatctggagtttacagatcctggtatgatacagaagtcatacaaaaaaaagtggtagatgcaagagttttggaaggaatatatgtatcaatatttcatgcaataacattactggcttcttcagataatgtgcacatttataattgatcccagttgtgattcgaggacatggacaccacaactatctgatgctttcctgtgactgtcttggcgtttgttgaactagaagtcagagacatgacagataaattcttcatccaggtactttcataatcctcttctaaaagaaaatgtttgctataagtgcttccaaatttgacgctgcgactgcgattgtgccttacagttgattaacattaatccttatgatcgattctggaatcaattataacgtgataggaaagggtggtgacatgctggcaaagccacaataaagctggtttcatatgttcatctcaaattccacatctccatccatcctcatcttatttagagccatctgatccaaaaagtacattccccaaagatgataatatgcactgagcaagcataaaaaaatctgacgcagatttttttttctctcaaacccatagaagagctgttatccttcgttggtacttggtagatagaaaaaatgatcagattatgagctgattccatggctgggattagt

SEQ ID NO: 9579 - DNA, 547 bp, Zea Mays
tggggagaaagagaaattagagaactatggtggctaatcggaggcaggagcgggtgctctagcttcgtgattacctaacggagctagcggtgtgcttaatttatagtgttcaagagcggtggccttcaattttggaatggcgcgctggcggtcggagaggaagaagatcactggtggcgcaatcgtggtgttcaccggtgcagtggtttagagagggtaagcctaagtgtgctacggttactaccgcgtagtgaagagtcacgacgtggcataaatgaggtcgccggagtgtccacgacgacaccggcggtccggccacatcgcaatagctataggcacggtgataagcttcccttgcgaccacatctgcttccccgcgagatcttttacctccccgtggatatccactgtgtgcccagcacaaatcacggcgaccggcgtgattccgggcgcgcggatcaccggtggcgagggggactgaaccctaggatatttcagtgcactgtaccatcagaggcttcatcagttggtctgacagagcttgttt

SEQ ID NO: 9580 - DNA, 1143 bp, Zea Mays
ataatgactgagaggaagcgccgggagatggaagatcggaagcgcaagattggtggaccacaggtcgggagcagtagccgtcctcgtttcttgggcaatccaccccagcagttcaagtagagtcaccccaagggatatcatcaccagagtcagcgtccgcatcaacagcaattccagaggcagttccctcagcagcagcagcaatggcattagtactgccagcacaaccaactagtaggtagttagtatcagatgcagagtagtcaggcacctcgccttcctgtcccagcaaccaattagagcaactaggcaacacatcgcaaggaggaggtcgaggatgcttccattgtggagagcatggtcactgggcgatgcaatgtccgaagaaagcaactcagtagcagtcagcttccaacaccacagcaagacaaggagcaccacagtaggcatcaagacgccatgtccaagcctacaaccgtgggaaggtgaaccacttggaggctgaaacaatctaggatgcactagatgtggtagtaggtatgttttcagtcgaatcccatccatcaaaagtactatttgatactggtgccacacattcttttgttgctacatcatgggtagaagcacataacatccccgcagaaccaatgattccacctctaagggttaattcagttgggggaaatgtttagtaagataagatgtgctcaaacctaaggattgaaataaggggggtagatttccccactaacctagtagtaatgggtactcaagagatagatatcatcctagggatgaattggctgcacaagaagcaagcaactgccagttgtgacaagaggacagtaaggttagtgtccccatctggggaagagatggtaattgaactgatcatgcctaatctagaagaaggagcctgttatcatatgtctgtagatggtaaagaggccaacctgcttgagaccatcagagttgtatcggagtttcccgacgtgtttcctgaggagttaccaagcataccacccgagcgcaaagtcgagttttccatagagcttgaacctgacaccgcccctatctctaagagagcctatagagtgtctaggccagaattggtggaactcaagaagcagatcgacaaactgt

SEQ ID NO: 9581 - DNA, 298 bp, Zea Mays
tggatctggtcaagacgacccggtcgtatttaggctcctcaggagcgactgggagcaacttatcgacgaggtgatgatgaaattccgctttagaatgatttagcttatgtcagtgtttgcatttgtgctaatgctaattgttgttgttgggttgtggttatgatggtgatacagctgcaagttaggctttcgaagaatgtggaggagtgtgtggtccttgatcgcgccacaaccaccgattaaaccgcgcatgctttggatcaccttgacaacctctttaccgccaacaaagttatat

SEQ ID NO: 9582 - DNA, 709 bp, Zea Mays
catacaaagcttcgaaaggtgccatctttaggctggattggtagctattattgtaagagaattcagccaaggaaaggcacatatcccaatccttaccatagtgtaacacacatgctcttaacatgtcctcaagaatctgatttactatttccatctggccgtcagtttgaggatggtatgctgagctccttatcacatgggttccaagtgactcttgcagttgctcccataaacatgctacgaacggtgctcctctgtctgacacgatagtccttggtattccatgcaaacacactatttggtcaatatatatttctgcatacttttcagccctatgggtggtatgtactagcaagaaatgagctgtcttggttagcctatccacaatgacccaaattgaatcgtggtgccaggaggtgttgggcaaacccacaataaaatccatacaaatgtcctcccacttccaagaaggaatgggaagaggctgtaaggtacctgctaccttcaaatgactagccttgattctttggcaagtgtcgcactcatatacatacttagcaatttctctcctcatcctagtccaccaatacaatggtctgaggtcatgatacatcttgttacttccggggtgcatagaaaattttgagagatgagcttcgtccaatattttcttcctgagttctgggttcttggggacaaccaatcggtc

SEQ ID NO: 9583 - DNA, 371 bp, Zea Mays
cctatgttcacatcgcataagcccacgttctgctctgtacgcacctgtatctcgtatttgaggccgtatgttgtcgttgccattatttcttgggagctttcacataacagacgtgatcttcgtaattaactaaagcagaaaacttgggacgttataaccatccgagattcgcgtacctagtacccatcgtttcatttgaagtccgatcctaccggagtatatatgcatgcccacgagaccacgagccgccacacatgtgagggagagaaaccaaggcggatgggacacagggtcgcagcgcttgatcccgtcgggcggccgcggagcgtatcagctcgtgcctgcgcagtgccacggtaagtcttgtgccc

SEQ ID NO: 9584 - DNA, 556 bp, Zea Mays
tgcagttgttgtgcgaaatctggaaaggaagtgccctgaagttgctgtgtcaggttcatctgaatggaactcaccattgtacagtagcctgctatggatcaggacgccagcgcaggatgctcaccgccgacgaccgatctccaccgcgattcgcgccaccgccgttgcgatttacgtcaccggtgactcgataagcctgccagctaatagctcttcgcctgaggatgactccggtgactcatcgctgtacccccgtgctttgcggcttgggctgataagctcaccggcgacagccgccttccggtcttgtgccacgtaattgaacacctctattgcatcgccgtgactctctatagccatctaatcatcgccggtgaggtcgccaccgcggtagacacgagttcgctgcgccagtgagcccccttcttgcaaccgccgcgcgtcatcgtttcaattcccggccaccgctctccctccctataaattgaagctgctgtcagctccgcagcaccatcacgtaccacaccacctagtatcgcccacaatcttgcaaccg

SEQ ID NO: 9585 - DNA, 363 bp, Zea Mays
aacaaagttgttgagaagaaatgggagataatcccactcaaagtcaggctgtctgatgactgaaacttggtctgacagtgtgatggttcaatctttgaacccagatttaaacatgatccagtgaaagtttgggcatgattcccataacaaaattgtagctggaacatggggctataactttggtacagagggttgatgaagttcttatgaaaaatctggagaaaagttgctttgaaaatgctctgtcagatgaactgaagaagggtccgatggtacagtgcttgattggatcagaccgccagcgtagggagtcctcaccgccgatgaccaattcttcgtcgtgattcgtgtcaccggtgactg

SEQ ID NO: 9586 - DNA, 444 bp, Zea Mays
gtccgccgcggggagcgccgccgctggtgactcgtgttccgtcgttgggcgccaccgaggggaggatggaccagctgccgtcagatcttatcggacggtctagatttgaaccagcatgagccattgatctcaggatgatcggacgagattagatatggtgtaacgtttcgaccgggacgatttcagccgtagatttgtgatccagtgatgaacattaaatcctagactcattaaatccttaccatcggatcttgatcgggcggctctgggcgggtaccggttcggccgagatccgatctaatccgtgcccttgacaagtgatccaacggtccagatccacgagtaccccttcaccgtggtcaattttcaaaggagcccctggactatttaggatttaacccaccgtccacctctgcagtgttatgagtctcgattacatttatg

SEQ ID NO: 9587 - DNA, 284 bp, Zea Mays
ggcgcaaccagccgacaacccacgggttgtcgcgcacgcatatcaacaccacctcccacaaccatacaaccacgacctcgcccagcatccacctaaccacgcataccaacaccatcaggaggtacaagtcgtaccacctccacttccgcctccgcacccgcatcagccaaacatccaccacccaaaccacccccaagcgccaaaacaagaagacttcgccgatcagccgtatcgcggagtcattcacatgatcactgggggtccagcgtcgacttcgacatgaa

SEQ ID NO: 9588 - DNA, 610 bp, Zea Mays
agcgacaattggatgatctgctggctaagggtttcattaggcctagcaggtctccatgggcttccccagtattgtttgttgagaagaaggataaaagcaagctgctatgtgtggattatcgcgctttgaatcaagtgacaatcaagaataaatatccactcccccgtattgaggttctctttgaacagttgaggggtgcccaggtgttctccaaaattgatttgaactctggttatcatcaattgaggattcgtgaggaggatattgagaagaccgctttttgcactaggtatgggcattatgagttcatagtcatgtcttttggcttaactaatgcccctgctgcttttatggaagcaatgaataggatgttgcatgagttcttggatgactttgtggtcgtgttcctggatgacattctgatttattcaaagaccgaggctgagcatgagtagcatctccgtctcgttctgggtgccctaagggagaatcagttctatggcaagttgaagaagtgtgccttttggctgtccgaagtgaatttcctgggcatgtgattaatcagcggggcattgcggttgatcccaagaatgttgcggctatggtggag

SEQ ID NO: 9589 - DNA, 1586 bp, Zea Mays
agcgatttgatttgtatctagaatcaactcattgctatctaagtactcttcacccccggtgagtggccgagattgcatgcatttgctcaaagtagccacttcctcatcccagctcaccacatcacatagctcagcattcatgtctgtctcgccaaccatacactctccttgagctactagtttcaataaacagttatgtaactgaagaccttgcggtaactcatcatcccatagaacatggctagaaattgcatcaaacactccatgggcatcactcatggatgtcatgggtaccttgaacaatgcctggtcatgctgctgcaatagcacatgtggatcagaaccatgctgcaattccatagcaagctctagaaacaatggtgcattactggaaggaataagcacgacattggcatcaagctccgcagtatgctttgtattcttgtaatacacataccatgtaccacatgctagctattgtaataagccatcatgcgccacttgagttgaaatctcatcccacactacacctgtaggatatatttcctccagtgtagctacatcatcccaagaagacaattcatcaaacagcttagtggaagaagttggcgccatccttaaatccttgaacatcaccatattaggacatgccacatcatcatcccaatggggcatatcattgcatactttctggacaactacttcagccatcgcagtagcagccatacgtctgtctgtcgcccatgccagagtcgcgatggctgcaatccacagccaccaaacgccgcccaactccacctgaagaagttcgtcgccgcctagagagctggcactacacgtgcaacaaactggattgaagaaaaccagaagcgccttgtgtcgaacagctgagatgcaacaagtctactgccgccacacgccaccggaattccaaccaccaccgccaataccaccaagttgaacgcccgctggagatcgacgaacgttgatgacgcgatgccgacgccgagagtcattagaggagagagaaaaaaatcacgcccgaaaccctggtcaccaaagcggaaacgctgtaaaggaagaacgcgacctgctacacgcgacaccaaggatcgaaagcctctgataccaactgtcacgccccgtggccgccggcggtgaagaccgggacgtgaggagatcgagaatcacctgaaccatgcctccatgaggaagacggcgagaacatgtctttcgtttctgattttctgtctccaaccacctgcccgcccaaatgtcacgccccgtggccgccggcggtgaagaccgggacgtgaggagatcgagaatcacctgaaccatgtctccatgaggaagacggcgagaacgtgtctttcatttctgattttctgtctccaaccacctgcccgccgctgcccttgttgttcacgggtttggtttgttcttggcctaatgggctgtcttctgatgggcccaataaaatgaactatgacacttgccgggcatgacaggcttccagaaagtaagcgagagagctgtagaactactcgggggccttccgcggccgcttccgctcccgatctcgg

SEQ ID NO: 9590 - DNA, 314 bp, Zea Mays
catcaccaatctccatccacaaaaaaacccaaatatcatagaaatagtgattcctagtcactcgggcacaatcgacagaatattaccagaggatatgcaagtgaattgcccacagccaaatcatgttctttagtaatcaaaggggccacatcacagacgaactgtaacactctctccatattgttccaaacatactacactacttactggacggggagggaaactgagaataggggaggggatcgatgacggcatacggctactccaggtgttcgttgtcgtcgtcaccgccgtcatcgtcgtctctatcgtca

SEQ ID NO: 9591 - DNA, 509 bp, Zea Mays
cggccatactgcgtacctggttaaaagagttaatgagggtaagaagccctacaagacaatactccacggaatgggtgctggtataaccactctgcacatctcctcataaccaagacccaatatttttcgagcatggctacaatgggtcgatgtggtaacatggaagtgtactccacaacctgccatgtgtcatgtagtggcatggacaactccacaatgccataccacattctcgggtcttctgggacgtatgcgctagtgtatataaccgctcatctgggacgtgctcacagcttcccaagtcacctatagcagcatggatggtgtagatctccaccggtcacatcttcgagttcccgtacaggctgcgaaatgtacatgctaggaacatcccctcctaaaaagacgtgcagctataggacctcagattgatgtcaaatagtgtaatcattaattgcaagatatgataatttatggattgcccccactatcaggttgtgactcactct

SEQ ID NO: 9592 - DNA, 449 bp, Zea Mays
ccccaactccgatcagaccacgacggcgtacagggttgccagcggcggtgccatcgccggcggtgctcgattccgccattctcgccccattcactaattgaacacgtgctaccgcactactataccatggcggaactggagaagatgttctcaccgtcaattgacagggcgaagaggttagtttgcagtggtcgaaggcgtcgcaacgacggagagctcccttgaatgcggtagttgatgacgttggtcactgttgcgcaccgaggttcggctgatgaagtccagtagcctgcgccaaatctccacgggtccagcaaccctctctccctctcggcacaacacacggttcatctctccctacggtgtgacgatgatggcgacagaagtcacaaggttctcggtctagggttcacgccaggtggaggaggaagcacacgacgaggttttat

SEQ ID NO: 9593 - DNA, 665 bp, Zea Mays
gttggagatggcctgagctactcggttcacatgcgtatgaggcagtggtcaacagtggctctgaattccaatcaacaacgatggtagagttcgatccgactaggtggggagcttcacgacatagtggcggtgctgtgtaccagaggaatcagatggaggtgggctagggaagccagcccacattcaccggtgaagccttcttctccgatgaggtcgactccactattccagtgaggtatagtttgggctcgatcttggggaggcttcacgggactctggtggagctaatagtgaagctagattgggtggaacacgactggagcaggcagaccgtagcgggcagtgctcagaggcaagggcggcgcgtgcggagatcaccgaagttggacgctggcttgggaaagtgtggcaactagctgagggtgcaacagagggcatgatcgagggctcgagtgtcctttatagacacaggcatgggcggggtgaggcggtggccaaccgttgtgtggggcacgcggggcgcacttctatctgccagccgaggtcgagcacgtggcgatgctcggtgtagttactttcaaacgttcattagctccaaatctttgcaaatttgggcaaacatcacatgtaagatctcttctcctctctatgttctttcacctttg

SEQ ID NO: 9594 - DNA, 754 bp, Zea Mays
cccagcgcgtacagattaacaacacaatctggcgaagacctggaacattcctggaatatagacaatcttcgcaaaatttttgtttgaatcctcagggccatcacgcccttgtaattcacttgacattattattttggcccgcactcttttcctcccaggggggtgaggtttttaatgaggcggcaccatgtagtatacaagcaaaaacccctcgcaaaaaactaagccaatgttgaaaaagaatgcatcgacggtcttcggcattcgaccacaccgaagtcaccgcgaggggcagcgctgactaccctcacgtgtgacactccgcgcaaaagtcgcctacgggtgcagccggaatagcacaataagtgcgcaaaatcgaagtcttctccaaaagactctccgtgcaaaagtcgcctacgggtgcagctggactagcgcaataagcgcgcaaaatcaaagtcttctccaaaagaatcaccgtgcaaaagtcacctacaggtgcagccgggctagcacaacaagtgcgcaaaatcgaagtattttcaaaaaggttcggatcaacgaaggctcgcagttacatataagccacagttacatacacacagcgagggcatcacactttacattggctcaaccttcggtatgatacccatctccctgtagttgaacaacattatcctcaactcctcaccctcaaaaagatttcgcaactccccctcacctagactcgccccaaccagcgaggacaacaatt

SEQ ID NO: 9595 - DNA, 284 bp, Zea Mays
ccggcggtctctcacctacgggtcttcagctgcctcgcgttcaccaaggagcttggccacatcggcaagctcgacgacaggagcaccccaggggtgttcattggctacacggagggctcgaaggcctaccgcatccttgacccaggaacactgcgtgtgcgcacgacacgcgacgtagtgttcgatgaagggcgaggatgggcctgggacaaggcggtggacgacggcacgactccgacgtacgacgacttcaccatcgagtacgtccactttgagggagccgg

SEQ ID NO: 9596 - DNA, 518 bp, Zea Mays
cggaggaggaaatggccgtccagccgctctctggtcgtgctcgtgcacgacatgacactgtgcttcgctgcgccatcgaccccggacggcgacgggccctacgtacgggttacaatgcaagcccgcccatcccatgcacacggagcccacatgggtcgccacgacttggcccggtctctcgccgtgggaatctgcaagagtagagaggatccgagtgcccactcgcacaggacagtaatggacgaggacaacgcttcgatagtctcagagattggagagcacaggcacaggaccggccggggggcgatccgatttggatcgagtccgacatcttttatgtgactgcatgccccggttcgaggcagtgttagccattcatgggagcgcatggtcgtggtcggttgtggaagttaagacaaccgttagtgcccatgggccacgcccaacggcgatgcgccgatgccagtgtgagagcgaggccgcccggcagccggaccaaaagaatcagcacagggcac

SEQ ID NO: 9597 - DNA, 522 bp, Zea Mays
ggggaatcctcggggtggctctgcgtgtgctcaaggtgttgcaggggctcatacagcggctgggtcaacgcagcgcaacatccatggtaacgagcttaccttcgtattcttcgtcttctccacatcatgtggctatatcgaattggggaatactcttcagggcagacggattggaatcgccggccatggcaccaccgtggccctgaccgcgccacctgtgctgaccgggaaggaagaagggtccctcaccctcgatccagggatggacggatatcgttgatcctgggcataccgcttctagaccgttgatccagcgataaacgcttacgattagatcctgagtatccctcgcttgagtcgatctggtccattgatatcaggatgagcggatgctgttagatcgcgcgttaataaaaccccgaccgtggatctcggatcctacggtggacagaacgtaccgattcgtgttatagtcgatctaatctgggcccttggttcttgatcaagcggccccgggcacac

SEQ ID NO: 9598 - DNA, 410 bp, Zea Mays
gggaaatcaccgggaagcgctaacgtggcttttactgaggcaaggctcccgacgatggacgaactccctattacggctcactgcgacgtggtaatgctcctaggcatgtggcgcaggtacgaagatggcaaacttcggcgaggacaccgtggttagtcgtagaacaagtgggtatagtgaatagttcagtggacgggtccaagctcatccagcgccaagatcttttatccaacatcgttatccgcgcgttaccgggcacgaatcgtagcaccgacgaggatcgcagcatggggtcatcggcggtgagatacactgcatctactgatctttgtcaggcactgtaccataagaacccccataagagcgcctgacagagcgatttgtagggccttgatctttgattttcatgt

SEQ ID NO: 9599 - DNA, 636 bp, Zea Mays
aaagaaactcgcccccaaaaagaaaatccagaagaagaccaccaaccaaggatgccaaacagagaagaagaagaagaaggcccctctagccctacctctccccagaatagatgattggtccgacgacgaggatatatccctagcaagcctcgatgatcttctcaaggcatttggggacaccttagataaggaattcgttagtacctcggggaacgctctcgtgtagtcccacctgtagtagtcttatgcttgtaatgtgatggtgtgatgaataaaataacttggttgaaaacaatttgcatgtgcataatagtgactctcttccctggcagatggcttcggataaaaccacgcctaccgcctccaggattggagcagggtttcccctgagagctgaaggggaagccgttagagaggaaagtgaaacccacctccccgcacctccaccactaaccttagacctagcccaagttctagccaatcaaacccgactcatcgaggtcctcactcgaaatctggaaaatcaacggccgaatggtggaagaccacaagacagaatgggggatttcctgagactcaaacctcccacgttcgccggatcaagcaaccccctcgatgcagacgattggatgcgca

SEQ ID NO: 9600 - DNA, 406 bp, Zea Mays
ctcccgccaacactcggcggaggaccaaatctcccactgcgaaggatcgatgccgcactgctttgtcgtgatagcgccttagggtctgctggtatctgaccgactgaatgaccacattcagctgttcttcctctagtatgtcgatgtcctccagcctagttgcttctgcttcggctatgctttcgaatgttaatcttgacgctccaaagaccagatctaccaataacactgcctccgacctatacaccatgaagaatgaggtgtttccgtgtaaagctcgactcgactgggttcgtaggctctagaccacatatggtagttccctgatccattttcctgtgagcttctcgctcttgtcaaacacctttttcctgagtgcatcgagtatcatcccattggctctttc

SEQ ID NO: 9601 - DNA, 407 bp, Zea Mays
cccaaatcaaaaacgccgacccagctcgtcacccggtgcagagaagagaggaagccgagagccatcggctaggtaatccgccgtcgtcgacgttctccgcttcggtcgtcgtccggagttctcggtcggggtttggggactgattcgcattccctagaagaagttcatggccaccccgagcgtgattggttagcctcgacgtgggaattgctcatcagagcagtccttcgccagggatccgccgctcgccgtgacctgcgccacctgcatgacaatctatggtgagactccttcccccagtttcgtcattgtctccgttgcatgctgcgttgtccgcccgggttatcgatcggggaccggagcttttggctctgccggcaatggcgccgccgctctgggcacctccg

SEQ ID NO: 9602 - DNA, 271 bp, Zea Mays
gtcgaagaaaatgttcagaaaatttttcttaatatgaagaaagctcagactcgacaaaagagttatgcagaccgacgacgacaacccttatgctttctggtagacgactatgtctacttaaaagtttcaccaatgaagggtatatcgtgtttcggggttaaagggaaacttgcacccaggtacattggtccattcctggtgcttgagcaatgtggaccagtggcataccgactccaactacccgaaacattgtctgctgtgcataatgtgt

SEQ ID NO: 9603 - DNA, 420 bp, Zea Mays
gattgattgaggacaatacttggtggctgggggcgtgatgatcctacggacccgatgatgcgcttaatttatagcaagcaagagcggtggtcgggaatttgagcgacgacgcgcggcggtcggaggagtggaaggttactagcgcagcagattggtgtcctattaccgtggcagtcattccggcgatcaatagagagttacaatgggtcacggcgatgcggtggaggtgccaaggcacgtggcacaaggtcgtgaagaggcagtcacctgcgaggttatccgaagtgaccgtgacaggctcggtacggtggccggagtagattaatggccggagtttatccacggcgaggattcttactcgatcccaggcgctatccacacgatccaagcacgaatcacggcgacatgagcgcgaatccg

SEQ ID NO: 9604 - DNA, 1116 bp, Zea Mays
cgcgtggcatactctctacctgggtgctcggggttctacgggcgtcgtctggtggggtcggctcgttagatctatccgcatccccatctcccggaagaactctcaacagcgccgtaacaaatcggccggatttggcgcaggctaccgggtctgcgggaattattgcgaatcggtctccggccttgctcgggtataaaacctcgacacagctcccagcttctccatgccatgccatggtccgccatttactttgagagtgggagaacagccattgttgagggttggtcctcttcgccattggcccgagaaaattggtctaggaagatcagcatcgaatgtaggacgtcttcgggggctcagccatgtgagaaatcatgtgggcgactggtaattcattgccggattccgactcttgcggccaaatcgccgcgcgacgagaacaagcctcctcgggatctaatcaccggtatggtacccatccctatccttggaattcactcagccttgcgtagcactagcggggattaagaatgaagtactagaaccctgggtctctgcgctccagcgaaccgccaccatggggagcagggcggcgccgctgtgcgcgaccgaaacgaggaagaagttgccagtcgttagatgctgagcatatggctcagattaggtcggggtaatggtttgactagatccgatacccgccgtcgatccctgtgtaggcggtcaagattagaatcgcgtaccccttcgatttatgaaagcgatcgggccgttgatcaagaatcgtgcgggtcaggatggatcgggagagttttaaatccgcgccgctgatcgctgatcaaacggctatagtatcgtacctcttcgctaatgataggatctaatctaggccctcggtttgcatcgagcgggcgagggttaggaataccccttcgtcctgggtcttttgcagaagagcccttggactcctttcaaatgaacccgcggtcttgggcaagcacggtctgagtctcctgaagttttatagtttcacccctgtcttctctagaaattgaggcgcaatccagggaattaagaaattagagaaatggatttagaaatggattttaatatgaaaat

SEQ ID NO: 9605 - DNA, 580 bp, Zea Mays
tgaactccatgtatgtagcattcctttgctgattctggtggatacgaaccccatctagattgttttggttatgggcaagttctcgtaggaccctagcattatccgcagtggcattcaccagggcaacaatgacgtctgccagcgtaagcggaactggtggcggtggaggattgagattagtttctgcatcatcgtgcgatgttctggccccatccgaacctcgagtacacataggcatctgaggcaaaactaagctcatgaatatacatccataaccgcgaaatatattacataaaactagtacatggagtattattcattacaataccaaaattggcatagcttacaaccctatgcctacaacagaggtcacaacatcctcacacatgccacactaaccctttgtatcagtgctacctcagaaacatcactaccacctaggtactcaccaccagcataagcataggggttgcttctatatctaagtctgcatcgggctcacccccatcagctaacaccacaccacctactgcatccgtggcttcgggcacatcattagggtgtagttggtagtaaagtt

SEQ ID NO: 9606 - DNA, 513 bp, Zea Mays
cggccgcggcggaccgccatgctcgtgcggtgtccggccgatttagcccggtttagttccctagagtaggtccctgtgtcacccctgcctctgctgaagctagcccaggccttagcgcgccttaagtcccctccctgtggccagaatgcctcaccggagttactccggcccgcccgagaccttctcactgtcgttctcccctctctacccgtggattcatggcctcttccccgccattcagttcgtcatggcattctctccctctctgcccaactccagcgaccccagagccaccctagcccgcgccagcctcaactctggtgaccacgccgctgcagagaagagcagcgccgcccacagtcgttcgtccccctgatctgatcccctccgtccgattcagatcgcacgactcagatcacgaataacgcttcgcgcacgcgcgcctgacgccctggcccgcctgtcagtgcccaagtcccctggcgctgggcccgctcggtcagtgcgccctcc

SEQ ID NO: 9607 - DNA, 766 bp, Zea Mays
acaattacgctaaatggtgcttcgctgagaatattgtagtacctgcagtttgtcagtagtccccttggagtacataaaggaaaccctccagtcatatgcatgtaagacctttggctcatcctcaatactaagttttaagtacaaatcttgtccggccctgtttgtgaatgttatatacgggcgtacatggataacctgttgttgcataacatgaagtcaactgattgacactttaatatgaagttgtagattaacatgcagctacctttgttggaacagcttgatacgaggatggctttgaacaaagaagaatatgcatgcattttccatcatcatcataggcagaaagatcaactgctccatcctgaatatggaatcagtactatttaattgtagtggtagaaaacaagaaaaagaagaaaagaagatccaaactaaccatatcgccaagaggcgacaattctttcacagatccaaaccgtccaccatgtccaacagatgatagaagtcctaatcccttaaaatttaatccagacgctatagtgtatccctcaaccaattcatcgtgttttatatcatagagttgcttctcacccctttccagatgtgaacgtgaaagaaggcgcctcttctctttccttccagaaatatcaatgagacgcagagtaagtgtaggcaatctagaaaaagatatccaatagggaacatatattctgataagccttgccatcaaatagtcactatcactgctttgttcaagcagaat

SEQ ID NO: 9608 - DNA, 339 bp, Zea Mays
caaagctctccgccactgtcgctgcctaggtcaacgacacgacggcctaccagagcctcaccgggggctctctagtacctcacgttcaccaggaccgacatcgcctacacggtctagctggtcttcacatgcatacggtgcaggagccccacctcaccactctcaagcggacccttctctatctttgcgccccctcgacttttggcctcctttggccctcttcgacttttgagctggcggtctacatcgacgctgattgggttgaccgccctgacatgcgccgatccacatccgggtacgccgtttttctcaccgccaacctcgtctcctggtccttga

SEQ ID NO: 9609 - DNA, 465 bp, Zea Mays
ctcgcaacatgtcttcgaggatttgatttactctttctgtctggccatccgtttgagggtggtatgctgagcttcgtattacgtgggtcccaagtgattcttgcaattgctcccagaagcgtgccacaaacagtgcccctcggtcagatacaatggtcttcggaatgccatgcaaacgtactatttgatcaacatagatttctgcatacttttctgtcttgtgggtggtgtgtaccggcaagaaatgagttgtcttggtcaatctatccacaatgacccaaatggaatcatggtgctgggaggtattgggcaatcacacgataaagtccatgcaaatatcctcccatttccaagatggtatgggaaggggttgcaaagggtctgctaccttcaaatgactggccttgattctctggcaggtgtcacattcggatatatacttggttatttccctcttcattctag

SEQ ID NO: 9610 - DNA, 522 bp, Zea Mays
gaactttttactggggctgaccccaatgggtgtgaccttgatgatgctgatcccaatgggtgtgaccctgctgaagctaaccccaatgggtgtgttgttcgtattgttgacgaggatgaggaagaagaggaggaaattcccttaattcggaagaacagtcggcgttacatagtcagtggggagagtagcgatattccttctccagctttgtctgctctcgttggtctgcaggaattgtccatagctaactttgatcaggctctcgaggatgtggtacctgaagatctgttgtccgagccaacagatggtggtatgatggacgtttgctctgacaatccagatgtgggattagagttatcccaagcagcgtctcgtgcatcgtcgaccttggagtgcggtcttcggagtcaagaggctggtccaggttgttccattcccatggaggtggaagagaatcattcagccttagaggtggctgctgcagagaacccagtccttagggatggtgcaagcggttaccca

SEQ ID NO: 9611 - DNA, 303 bp, Zea Mays
ctcaaagttctttaaaacttcccctatcatgtcatttaaggagaccgaagtcctgctctgaagaagctcttgaaaacgacaacttcgtcctcttttggatccgcaacattttcctccccagcaaaccggacaagcttgctctcagtctccccgaaatagccaagtttcctcatcataaccatgtcatcctctgttacagtagatttcccaaactcaatgtggctaggctttgttgggctcagaatactgttatcttcttcattttcatcgtcactttcgcctccaactacaatctattcagct

SEQ ID NO: 9612 - DNA, 465 bp, Zea Mays
tggctgggggcagcatcagctcgttggtggtgcaagtttggagatgcgtcgcgggaggaagacagaataccttgatattcctcttaaggataacattaaagggtggcaccttgagtggtttattgtggaaaaccactgcgagtccctccccctcggtcggggaggcaactagatgtacatacttcgagctgggttgagtctccaactcctttggaggtaacggaggccagagttctgcttgctgagatctgtctgctgaaggagaaaggtctgactgccgaagctgtggttgccgatttcatcttcaagaatatccaacctttgaaggacagggcataccctgcatatttgtatagcggcatcaatgatggaacccgggtgaaaaacaagagaattcccactgccgatctgctgagccgactggatatgatcctgaggggcagagtttcgaatgctggtgctcct

SEQ ID NO: 9613 - DNA, 441 bp, Zea Mays
agaccgatcggttgttcctaaaaacctagaactcaggaagaaaatattggacgaagctcatctctcaaaattttccatgcaccccggcagtagcaagatgtatcatgacctcagatccttgtattggtggaccagaatgaagagagaaattgctaagtatgtatctgagtgcgacacttgccaaagaatcaaagctagtcatttgaaggtagcaggtaccttacaacctctccccataccatcttggaaatgggaggaactcagcatggatttcattgtgggtttgcccaacacctcccaacgccacgattctaattgggtcatggtggatatgctaaccaagacaactcatttcttgccagtgcataccacccacagagcagaaaagtatgcagaaatatatattaaccaaatagtgcatttgcatggaataccaaggac

SEQ ID NO: 9614 - DNA, 1169 bp, Zea Mays
ggaaaatcctagctttgataccatgtgggaaaccctaaccctgaaatagggtggggtgatgtattaatagactaggagtgttgggccaggcccattacagcgggggcgagagggtaattacatagggagagccccaaaccctaatagttacgctaacaggtggatcaaggcagctttccaacccgggagacggtcagcaatcttaccgatgagggaaataatatcagccttagtgatcttccgcactgagagtggtaacccaaggtaattgcaagggaagtgtaccacaatacaaggcagcaattcttgttccgttgataaatcttgctctttacaatgcataggagtgacagagcatttacttatgttggtcacaagtcctgcggctacgccaaaggttcttaaaatctccttcaacaagtttaactcctccacacaaggcttaagataaaggacgacatcatcagcatagagagaaattcttttcgcccctcccctcctaaggagaggctgcaaaagaccttgctcaatagccttcatgaccaaagaattaaggacatccatcactaggatgaaaagcatgggggataggggtctccctgcctgagacccttttggtggcaaatcaggtcccccgattcaccattgacaagcaccatggtggaagacgatctgaggagcttgcaaaggatattacaccacgcaggacaaaccaaggtatctcagtacttccagaagaaagggccacgaaatagagtcaaaagccttgcttatgtcaagtttgattaggatacgaggttccttctggatgtggagagctttagcagtttgttgcacaagaataaaattgccgtgaatgcacttgcctttcataaaggcactctaattttcagaaaccaactgatagagcttgggcgccaaccgggaagccaacaacttggttacaatcttggcaaaactatgaatcaagctaataggacgataatccttgacagccatcgcctcaataaatttcggcaagagaattacagaagctgaattaagcaaataaagcttgttgtcatccccttgcatcagccttccaatagcagccatagaatccgatttgatgatctgccaagccaccttgtagaatctccatcaccggagctgctcctgtcctcgtcggc

SEQ ID NO: 9615 - DNA, 899 bp, Zea Mays
gaaatttgcccataacttttggagaagaatgttgggacgatcaacccaaacaagttcctccatatctacgccctaccatcctcgtcgttcagggcgacaaagaagtgatggcaagctgctttcatgtactttgatcgactctgctcgatcatgtattattgatctacctgaggcctcaatctagtcttgggaagagctctacctacaattcatgtccaacttcaaggaaactcactctcagcccaacatggaatctaacctccacaacaccatccaccaataacctcgtaagtccccacatgtctttgtgtggtggttttgctaggttgggaacaccatcctctatgtcatggtagcatccattgtcataatctttcgatagggcatccacggtgagaagatacttgagaagatagccatccacaacctccaggatgcggggaactgctctctttggtggaaaatatgcatgagttgttgagatagagcttggaatgctcctcgctagatgcaactagggctataggggtttgtgacctcgtaactagagccctaaaagaagaaaaagggcaaggtttcagaggagaatttatgctaccactgaaaatagcgagcccatccctagagcaaggagcagccccacccaagtgctctagagcattcggaagtattgccccattcataggtcgactactcatgacctagttgagtgtagggcagttaaatacctaacttagcgcttttaatatctcgactcgatgcgccatgatcgtgggcaccaaaaatagtgccgccccaaccaatgacacctaaacaacaacaataatgtcgggtatcgtaattaggggtaccccagatcatgcccctaagcatacctgacacctgggtacttagaaatc

SEQ ID NO: 9616 - DNA, 469 bp, Zea Mays
tgtgcatcctccggcgccgctcgtctcttcgctatccgccaccacatcagacgacgcccctagcctgcagctgcagctgcagtgctgctgcctgctggtcccggcatgaaagctagtacgtcgccattttctgcccgaaaaagattcatcaagatccaacggacgggcgggcgggcgcgcgcgcgcacgcacgggctagctagctatagagcctatagctagcatagcaagcttgctgttgctgacacgcagccgctagaaccgatgtctggagcagagcagagcaaagcaaagcaaagcatgttcattttctggaagatgactcgtatactgccaggaggaaaaagccacacaacgagcgttgagtaccggccggagtcccggccggagtacgagcacacaccactgggcacagctgggaatccgagtcgctttcgtcgtctcggagtcgcgtagacatggacttttc

SEQ ID NO: 9617 - DNA, 920 bp, Zea Mays
aattatgagtgggcatatatatccaggtgctaaaaaatacacactatataagtgacattgattaggtctgtcttggaggtgaggacaccataccgctgccgaaggaggatgaaatagttgtattctgaagctttctgaaggttgggctttagtttctgctgcacaatatggtactaggggtgttgaagaggtttgacatatatcctcataagcttactcctaatgcgataatgaagcttaggcttttttgggctattcgaagccaggcatagagccaagcgtggaatgattttgtcaaatccatgagttagcctaccagatgaaagcggttggtaaagagcgtcttcataacaagtttggatgctataatttcgcttacgaaaaggaagcatagttcccgacccttgcatatcgtagcaaatggccaaattcatggatgaaggagtagttctatataaagaatgacttgaaagagggatgatatcaagggcataatccaaaggcctatcaatcctagcttcgggttcaagagaccgacaagttacatgaactttgaggctcaggctgctatggttgctttcaacactgtttgcacctatattgggaattgggatcttattcaagagcacttgtcatttaacatctggtctatgagggtcgaatggtccatgccagagccgaaggatgatagttcttcggagcaagaactaggcctcgttaggttgatgtatatgtacaaatttgagagtgtgttcaaagagccatgcgatgaatggctagaggtcgttgaagataaatgcaatgaagtccttcagaaatttaacaagaaaggagatgaagcattagatgttgccttcagggctcggcacaagcgccgcttgaactgcgtgtttgacacgatcgggtttgtatatcctgac

SEQ ID NO: 9618 - DNA, 599 bp, Zea Mays
ggattttctaactctctggacagggtgcataaatatcagaaactacaggggctatctcgcaaaagatcataagactcaggattcccaccgcactggacggcgggttgaatatgtaaaaccccaggctctcttttgcaaaacgtggtaaccgaagggggggtacgtcaaactgtgtgtcgtgagatcgtgaatcaagggctcagattagaagttcacccatctgaactggtatgccatactgaccgcacgatccaagatcgacggtcatgatttgattaaaccccgcgtccaatctaggccactaaaatctggatctacgaccgagataaaaatgcagagggtatgagcccgacctaatcccacctgttgaatcctagatccatggttaatggcgatcaccatgcctcccccttcatccagtatcctgcgccccggcggcgagcgtgcaccgccatggcgccattgccgcactgctttgccccgactcccaggcacaagaccccaattcaactatggtctatgtagaggagaagaaatcgatcctgggagaggacgcctcaccggaaatcatcgcatggagccccctggccacggcggat

SEQ ID NO: 9619 - DNA, 303 bp, Zea Mays
gaggcaggcaaccactctgctcctcaaagtctattttttgtccacctctgataatgtatcctgtcgtggtgtcaagagctttgcccggtacttagtaacatgaaccgaaattaatcggggttattgtgttgttacacactgaagtggccggcctgtttggattagcggagttattaacaagccgattggatgacttcgcacgagcccgagggtggccggttagatacgcaagatttaggtgtatctatggatatggataaaataacttatcttacatccgctcatacagcttatgtctgtcgt

SEQ ID NO: 9620 - DNA, 678 bp, Zea Mays
gtgcatggcagcgggatgcgcccgacagcatgcacctagttgttggacgcagaccagagggcgactgtggcttcctgtaactattggaagccctagactctcaatataccaaccatgatggcagcagcccacatggtgtagggagtcaatggtcccgcttcggtaacgtgtgagggcccatgtactttggtcatagcgcccgtcactgaagtgggcatgtatacatcttgtccgtggctaatgctgaggcacattgtactccggaggtcgagaccgggtttccccggtggtccacgctatgtgtcgtagtatacgcggcagcgctgggcttcgcctggtaaggggagtagcggtcggcaccgctcttccttgtgacgactcctttccgcctccttgccttgcgatctgcaaaaaaggcacccctccacatggcctcgttatggtgctcaacagtgtatctgcgagtcgtcgttcctaacggtttcaatcttttggattttttcctgaacctcaccgagcagggtcttaggacctgtcccttggttaggaaaaggcctaagcctttaggggccagctctaggttctggaatagtcatcctagtatgatggagtgtgcgagctttgggtgctggaccaagctaagtggttactcggctccggaccaccactgagaatgcg

SEQ ID NO: 9621 - DNA, 1089 bp, Zea Mays
aacacaaatgggcctttcgctgaatataggtaataccctgtttatgtcgttgttcctcagcaaaaaaatgtttttgttggtctatgccttttgtttgatatattttggtaattaactttggttataatgttgccttttcagatatttcagcaacatccttttttaagcctgtgacaattatcaaatttgtggaggagttcctgaacctgcgtgatacatctcggccgttgtttgacagagatcgtgtgaaggtattttttacacaatgacaatcgcgataacttcttttatagaacttgtacagcacgccatcctagagaaatcttgtatggctgtaactgtgttcagataaagaaagcattgcgcggtgtccgaattgaaacaactcaccaacaggaccaaatcagaagatacaagataacagggattactcccatccctatgagccagctgatgtaagtatttatctgcaaatgatactcttcttttctgttctctctacagcattttctgtaatattaatatcaatattaattctggttttctgaattgctagtacatctcttactaactgctaaatagttgtagtattacagttatcacaatttgaacgatctgacctatgtcaacagtgccataaacttatttttcctttttgtcattgtcatcaactgaccgcttcttttttgtcactttagattccctgttgatgataaaggaacaagaaagactgtagtgcagtacttcttggacaaatatgactacagattgaagtatgtctcttggccttgccttcaggctggcagtgattcacgacctgtatatttgcctatggaggtactgtgtccatgatcattcagttgtacctgaattattcatgttatgttcatagtttcaataaaaatggttgtaggtttgcaagattgtagaagggcagagatactctaagaagcttaatgacagacaagtgacgaacatacttagagcaacttgtaaacgtccccaggagagagagaagagcatacgtgatgtatgcttctagacctttattcctctgctgtttttagaataattattatctcttttgga

SEQ ID NO: 9622 - DNA, 720 bp, Zea Mays
cacggctcaaatacaacacgacaccaaataatttcggtcggtttggcccgtttatgcaaatacaaaaagacccatttataggcacgtaaaagcacgtatttctttagtgcacagtcttgcactcttgctgatcatcggtgtgggcgtgtgccatgtggcctcgaaaaggctcagttcccatcccacccatcccaccccacggtcctgcaaggcgaagcatacgagctagtcctcggcgagcaactcagcaaggggaagggctgatccaatacagtggacctacatctgcatgacaagacgtgtcaccaccaaagcatgttcggaccacgagtacggtgtcgagaagtccctgtcgaacacgacgacacgcccacgcgtacagtctctagcgtagccccgctgacttgtggggccactcaaccccaatcgtggggacctcagcatcgaagtctctacattgacccacgtactagtaaggacgggacgatacatcataccgggtgtatacctacacatgctggaaggtgacgcgaggtccatgacaagagacgaagctgcaccaagcatgaccctgaaccctactgtaagtctaccctgtgggacacgcaaggaaccactacatcaacatcgaactcgctacagggactcgtatgccggatggaagaagcggtacaccttacgtggagtacgatagcccacaaccctacatacgacgtcaag

SEQ ID NO: 9623 - DNA, 326 bp, Zea Mays
catcaagttatcttggaaagtactttcatggaggcataaatttgttatgttttggagaccatgccattatccaaagtggtggcaatattggctctgcccctcatgacaaggtcgtgaacttttaatgttctcactaaatctacttgtgcatcatgtaagcaccattcaactcattttttgtttgtagtttaccttattttggatgaatataatactttgcagcgtactgtttgaaggaactgaagtgtctctaggttgaaaatggtaataaaatgaggatagactaacctagtcacgctcttgccttggaacatggcacctgattc

SEQ ID NO: 9624 - DNA, 410 bp, Zea Mays
atgatacccatctccctatagttgaacaacattatcctcaattcctcacccgcaaacagacttcgtagctccccctcacccacactcgccccagccggcgaggacaacaattcccgtttgccagtcccgtccacacgaagacgaccaccctccatttcaccacgatgacgcctatcacttcacaacaactcacccactctccatttcgccaccgcccttcgccgtctacgcccagcactcgcacccggaagatcctcagcacccatcacacgaggagaagtcttcgctgcagccacatccaacgctgcaaaataatccaagtcctcctccgaagactcctctgtccacacaatcgaactcccagaatcatcagactcaaaacacttagacacagaatcatcagaatcgtc

SEQ ID NO: 9625 - DNA, 672 bp, Zea Mays
attgaaaagccctttgatgtgtattgtgacacatcaggcagtggtctcggctgtgttctaatacaagagggccgagtgatagcctatgcttcaaggcagctgcgccggcatggggaacattatccaactcatgacctggagttagttgctgtggttcatgccctaaaaatatggtgtcattatctgctgggaaatatctgtcacatttatatagatcataaaagtttaaagtacatctttacccagtcagaattgaatatgaggtagaggagatggctcgaactgattaaagattatgaattggagattcattatcacccaagcaaggctaatgtagtggtagatgcattaagtcgcaaggcttcctgccattgtttgacgataaagacttctgacattacgttatgccaagaaatggagaagttgaacttgggaatgatacaacacggaactgtaaatcatttgaagcttgagttagtcctcctgcaaagaataattgacgcacaaagaaatgatgagggaatgaaacacattcatgagaaaatagaggccggtaaagccaactgcttcagaagagatgatcaaggtgttgtatggtgtaacaaccgcatagttgtgcctaagaatgatgagatccgccagcaaattttggatgaagcacatcttagtcac

SEQ ID NO: 9626 - DNA, 961 bp, Zea Mays
tggatgcgtcagagagtatcaagagcacccaagcatactgaaacgaggaaccagaggacatgaacggacctaaaacacgttggccacggcgaggtcacaaggtgcggtgtttcggaccaatttgggggaaatccgaaattggggagctctggtgagcaattggaggcacgacttggtggattgggtgcttgactaccttacgaacccgacgacacactcaatttataggctccgggggcggtggccagtgaatttggagttggcgcggtggcggcggagagaagagttgcactggcgcaaggattggcggctttcaacgtggcgggctcactggggatcaccggacatgcataatgcgagtgactgcgacgtggtgaatgccgaggcacgtggcgcaagaccgcgaggtggctaactccggcgaacctatccaaagcggccgtgacacgctcgggtacggtggccggagtaaaatagtggccggagttcatccacgacgcgatatttacttaccccacgacgttatctaactgagctgagcacgaatcaccacggcgagcacgaatccaggcgcacggtcgccggcggcaaaggggggtgaacctgcgatcttattcagtcattgttcaattagaataccattcagtctatctgacagggccatttacagggcattaatctccgttttttgtgtggcaactggttaatctctctgtaacaaagttctagccctataatccagctacaaatcgactatggcaactatcctcaatcgagcaacagatcttactcaaaatcaagccctaagttcatccaacttcactgtcattgaaagttcagacttaaggttgcctgacagcccgactttggatccaattttctcaaaaaatttcatggcaccaaggcttaatccctatagcaaagttgttctcctatagtagctctacaacttttctatatt

SEQ ID NO: 9627 - DNA, 391 bp, Zea Mays
tgtcgaaaggaaaccactcgagtggatcccgtgcctggccccagactgatctgtcgtaaatagtcggtcacattaaccatgcctggcaccaagccacagcgcgggcgccggctcgcttcctagtcatgacctatgaacccctcggaccgcctagcactcatgacctacgagccccccagattgtggtgcatttatgatctgtgtccctcagcatgtggcgcactcatgacctatcggactaagcctaagtgtgcataccactggtagggcgcaacgcggcgagccgcgctaagccccgggctacaaaggccaggagtcgacatagcctaaacgatggcctgggacccatgcagccctgtgttgtccaccacaataaatacgagacatcgaa

SEQ ID NO: 9628 - DNA, 847 bp, Zea Mays
tgggcatcaatgcactatctggacctgtcccaaaggagcttggaaatcttaccaatctcttatcactgtaagatcctccaatcacgttattgtcctgggaagtcttaacaaatggatattctctgactaatatttatgttcagttactgtcatgcatctgttgtcctggttatacttgcttttcaattgttgcgttaaaaaaatacttgctttccaattgtatgaaaatcatgaggctgtatgccaagagcttgaagttttgcatatactatggccatatatcgagtataatcttataatatcgttttctcacgaagttagtataatataatggaagtgagaatctgaatgcacatcttcccaatccaacattttaccagcatttcaaattttttattgtcaaaaggcacttaacagcacttccatttgaacttttctttggatcgaacttaatttaattagttaattctttcagggcattgggctcaaataattttaacggcacacttcctgatgagctggggaaactgacaaaacttcgacaaatgtgagttatctatttggttgctttacatgtcttctacatgaccatctatgctttcttcactctttaaactgataactatatgcatgacataactgaaaaatgctatccaactttgagttgcagatacattgatagtaacgacttcagtggttctctaccatcgacattgtcccagctgaagaacctgtcaatcttgtaatttagtaaaataagctagcacctcgtgaatttgctcttcctttggaggtagaagctaataatcttaccaactcttgtcatgtatctaggtgggcatcagac

SEQ ID NO: 9629 - DNA, 571 bp, Zea Mays
attttccagaaaacccaggggctatcccgcaagatcgccaagacacagagaatagttgagagggatggcgggttagtttctcagaagtcaagggtttctttagtaaaaaggccaacgcgaaggggtatcagtggtttctggccgtccgatcggaaatcaggggcccggattagatcccaatcccaaatgagtccgcacgccctgctacccgtcggatcaaggatccacggtcggaattagaagcgcgaagggggtatgttacttctaatcttggccacacgtcgaccaatcaacggtcatggaccgatctggctgaatcagtatttttacttcatcttgtccgtctaccgacgatcggacagccaggacgcttccttcaacctccacacacggacgacggcggaggaacgcctcccacagcggcgaccaattccgcgacggcgctccctaccagggagggtcgcgagccccaatcccaacccccgactagcgcagtatgcatgggaaaccaaggcaaactgggaggagagctccttaccgtgggttggcatctggtggtggccggccaagg

SEQ ID NO: 9630 - DNA, 647 bp, Zea Mays
ctagccgccttgtctacgccactggtactaactgtactatgaaatgaaatattaatccttagccaacaatggaagcacccaaaatcatattaaccactattgcactcataaaaaactaacctgaaacaaccccatctatatcatgtattaaaaataacccaccactatcactaaaaaactaatctaaaaatacccctacatacctactactataaattatccaccactgcaattagaaaaaaacaacccatatcgtcaaccttacagttaataaaagagatccaaatatggagcaaataagggaatgcaattatgcaaaacaatttatccaacatatatgttcattatagatggtatacattcgagaggttagagttacaattcacacgtcttatttgatccatggtaagccttttttgagagacggggcattccttgttttgattaatcagataacggaaatacaacaactgattcagccgattcagttgatgtcgggctttatacgagaggatgagtgaccagacatgattctcaaggacttctagaaataagaaaagtagctcaacatctttgagccaaatcagaaacttacattggcaaatcttctacaatcttaggcaggcgtagtaaagatttttgagaaa

SEQ ID NO: 9631 - DNA, 419 bp, Zea Mays
ggagaatgaagaggttcgccctagtcaagaagattcggaagcgtttcaaaagccaaggatgccagactgacccgaaggaagaatccctgcccgcactaccttccctagggatagaaaacctttctaacgtcgaggaagtgtccctggctagccttgatgatcttctcagggagtttggggacactttagtaggaaacgcttgtgcgtagtgtaattcgtggtggttgtcatgcttgtaatgaactggtttgctgaataaaataacatgtttgcaaaaaaggacatatgcatagtactaatcctttctcccctctggcagatggcctcggatagaaccacgcctaccgcctcaggaattggagcaaggacttccctagttatcgaaggcgaggacgaaggggaagggagtgagacccacc

SEQ ID NO: 9632 - DNA, 508 bp, Zea Mays
taaaagccttggaaggaggcagattccaggctgagtatgcaacaggagcaccgatgttcgacaccttgcctctgagtatcatctcgagccagctgaccaaattcacagcaggaattcttctgttggtaacccgggtcgaatcagcgaggcctcgatacagataagtcaggtatgctctgtcctttagtggctgaatgttcttgaaaatgaaatcggcgaccacagcttctgcagtcagacccctctctttcaacaatccaaccttagcaagtagagcccctgcctcagccacctccaggtctgtgggggattcggtccagctcggagtgcgaacatatggttgtctccctgagcgtggggggagggaattcccgtgattctccacgataaaccattccaggcaccatcctttgatgctgtccttgagtgggatgtcgaggtagtcagccttcctcccacggcgcatctccaaactcgcgcccccccacaagctggtgatgccctccgg

SEQ ID NO: 9633 - DNA, 1014 bp, Zea Mays
gtagtttagaaaatgccagtttgcgtggaggatgtattgttaagacatgagtgtcggagttcatatataagtggtcgcgccacattgattgaagtgtcttgagtgcacgccacaatatggttgcttgcgagatggggttatgcgcatgacgagtttagtaaaaatccatcggtgtcacttgtgttaagttgagggttatttgtgtgtggaaagtaataatgtgtttaatacctagaactcttagtcgatagtagaatttgttttggcttgtatagagaggtggtgacatgccaaagtagtcatcactttctctatatttttaagtcgagtctagacgatacgtattatgcgttcgataaattatgtttcgcacatagtgtatgattgtgctcacgaattcgagtagacgcttcaagtaagtcaagtaggtttgtgatacaagtgtgtaatggagttagttgttttaggataattattgaaatactcagttcgtatgataaacatgtatgcgttcatgatttggaaagtaaatgcatggggtttgcgaattgtagactggtggtttacgattcgtatgatttggtcggtgtgcgaaaatacttgtgaatatgaatgtttataaaaatgttgtagtgtatgttgtgtctcggattgcgataataatagacacgccgacgtgtatgttatttggcggctatgtcgttgctctagttagccgaattgttagatagcttgggttaagcacataattgcaataaattgcttgttgtagtccaaatgcgcatgattatggtcgcgggtaaaattagtggtgctcatgtgatgtctaatttaaaatgaaaattattgtgtgaagagcgcatcgataaacacacatataccgggtttgattattgtggtgaatacgttgttgattgagtatggtagttctagcgcacaaaataacttgaataaatttggtaagtctacttgttggtcctcatttgattaatttaactctaacaactggtaaag

SEQ ID NO: 9634 - DNA, 541 bp, Zea Mays
gacaaattcaatcgggcattaatgagagccggttaaaatttcagaaaatgtgggtggataagcagcctttcactgtcaatttcagaaaaattctctcgaggaaagttgttgctaaaaagacaccagacggaggagaaacactgaagatcaatatcaagtccgccaacactaggggcagacgtagacggaggacagggccaggacccatgttctgtgtatcgtggatggtctggcccttaggcgcagacagtctagatctccggcgaacagtccggctagcacgagcggtgcgttgtaatctcctttttagtcggaaataaggctgagggggaaaccctacgaaaacaagacagacccccgtagagtagtcatcttccacctctagaaatctcttgtaatcctcaatcatcaagcaagatacatccacaaactcataggacatagggtattgcgtactcgagcggcccgaacctatatacttccctgtgttccattgtgcttcgcatgaaccatcgagttgcgatcgacttcgtcgtcctct

SEQ ID NO: 9635 - DNA, 468 bp, Zea Mays
gtgatcctgtgggtccgggcatacggcttggcttcccaatctaagtcctgcaggtcctgttgcatgaatcaaaggatggctgataccagacgatgggtactatgggtgtgctcctaacacttcaaagccagagctgtgtgcaggtccaggtcctagggaccggaccatcaattttatctttggtatactggtatccagcctcgacacgtcgagcctacctcccagggggccaagtaccaaggggaacttaatgacgctacacacagcaaggacaaataacatacagataagtttaagttccaatgctacctcattagaggttcttagaacatcttacaaaatcaaaagttgttacagctgcttcccagcggaacccttgctttgtctctactactctacaggtcatcagcagggtcgcgctagaagcgctcgaccactagctccacagcgtcttgtacgctctcccgg

SEQ ID NO: 9636 - DNA, 403 bp, Zea Mays
ccgccgttctaagccgcacgcacgagccagctccggcaagcctttcttcctctcccttgaccgcgctaccctggccagctccccagcgacaaccagtcgagtcccctgcgcatggccagcgtggcccatccccaaccttcggccatcgcccaagtgctccctgcgcatgcgtccgtcaaaaacagcagagaggaaatcgcctagcccccacttgcatgccgtttttccatgattcttgtgattgaagaaaccgcatgagagccccactcacatacacatgcacgcatgtcaccagccaccacactagagaaataaaaaccgtcttatcctccctcgcagaaatctcgtggccgcatgcaagcataaaaggagaagatttgtggtcccacctgcatgtgccaaa

SEQ ID NO: 9637 - DNA, 310 bp, Zea Mays
tgggtgttagacgtggttgttggtggtggtggtggtatgtgtgcgcaacaactctctggttgttggctggctgtgccctggacatcctgtccatggtggccttcgtttccgcgtaatctcttgttgggtgcgcacggtcctcgccatggaataggcaatagaatctgtgtggctgctgcgcctgtcctcgtcctctccctctagtgtcgttgtcgcggccttggggggtattcttgacggcggacgttttctccagcttggtgctgattggctatgttgtgcacctattgttggcttcggctgtcccgac

SEQ ID NO: 9638 - DNA, 513 bp, Zea Mays
gcatgtcagaaggcctttagcactgtgtgtgccttcattggcacgagggatttgattcaagagcatatagccttcagggtatggccacttgtggagagctgggatatgccgaaggagaccaccgccgattccagtgagggtggcttggtctgattgaagtataccttcagatttagggagaagtttgatgagcccaacgatgactggctgaagtgtattgaagctactagtgatgagctacttggggcatactccaaggccgaagataatgctttgtctacaactttcgggggttggggcaagaaaagattgaatagggtatttgacgctattggcttcgtataccctgattaccattacctgctacgagggcaagggaaaaagagaaaaatcgccgcttcggccatcactgttgcgccggctgcgctgaaaagtaagaaaatgaaggttctgacccatcgaccgcgatatattgaaccgaccgtagtgtctgaacttgacaaaggggccgct

SEQ ID NO: 9639 - DNA, 489 bp, Zea Mays
ttttgagtgaaacaggtagctctcctatcctgtttgttttagaaaaaaaaaacaaatacaaagaaaaaaggctaatcgagtcgtactagtgtttctatcaagaaagtaattgtgccgtaacctcggggccgaatacacatacatgtagtgcaccaaggggactatcagttgccacaggcaactggcaactccctcttctcccaggcttcagcccaaccaccagccgccacgaaatcgagaccccagccaatcagtgtacttctggtttggagcaaattaatgaccacatgttcttatataagctcacttctgttctgttctgttgcgttattaaagggcacttgcatgcagcaatatggccacgtcgtccaagacgcaggaagctctggccttgatggccctcgccatgctcgtcaccaacgccgccgtcgctgcagacgatgcgtcgccgtcctgccccaggctcacccttcacaacctctgtcctta

SEQ ID NO: 9640 - DNA, 278 bp, Zea Mays
cacataatagagagcaagagaattagagaacatagtacacattatccgctctcctctccacttctctagactccagcacggcagcactcgaccacaacggcgtcaggcattcagaatggtgagcaaattggcaccgcacaacagataactcacatggttaattcttcaaccgcacaacagacaactcacatggttaactcaacaacggcatcaggcacaactgcagtaagcactggcgcgctggcgcagggcgctgccacgctggccgcctggccgag

SEQ ID NO: 9641 - DNA, 412 bp, Zea Mays
gggggggtcatacgtagcccacggggtacgtgccctagacccttccattgctcgcaatgatcgagttgtagggtcgtctagagacgtcgcatgcggtcttgcggacttctaacgttcgtattgcaggccttcaagcgcgtctggctccatggaggcctgtgtgtcaagtaagtcgtagctctcgctccctgcctcctttagcaccataggattgttcaggccttgttcttatctcttagcagggtgggaggcagagctgatggagctccatcgatagattgacatggtgccccgaagcatccacgctcatggggtgactcaggcacagcgtatgctggatgtcccaagccatatccggaacatcgtggagcaccacatccatcgaggtgtcgccattgccctcgccgtcacc

SEQ ID NO: 9642 - DNA, 443 bp, Zea Mays
gagaatggcctatttggaggcaggttccacgtagaataagccacaggagcgccagcatttgagactctgcccctcaaaatcatgtctagtcggctcagcagatcttcattgggaatcctcctattggtgacatcattgacgccgctatacaagtagcgcgggataaattctatccttcaagggttgaatgtttttgaagacgtagtcagcaaccacagcttcagcagtcagaccccatccttcagcaagcagatctcggcaagcaatactttggcttctgttatctccgaaaaggtaggagattctacctagctaggtgtgtggacatctggttgcctccccggctgagggggagagacttgcagtggttttccacgatgaaccactcaaggcgccatcctttgatactgtccttgagaggaatattgagatactctactttc

SEQ ID NO: 9643 - DNA, 431 bp, Zea Mays
cagggtagctagcctgtgcactccctcccgatccctgcgagtcgtgcgtggtttcggctggcacgattgggacacaggggaccggcaattgctcgccgtggtgaaggctccgccgcgaatccgcacctctccgtggacaactcgcttgtgccagcaattcccagtaagaaaccctcgcccgaacccgctttcatacccgcaacatgtagcatcagttaatttaagtttggtgcccctgaaccggagaattggactgccggtggagatcctcgccgtcgtcgggcatttgggggatttggtcggaggaggacgatgggatgtggacggttgatcaatagatcaacggtcccgatcatatcgctggttgggtgatgtctgtgccgctggattactgatggacggcgctgactcggtcttagaattgtgaggcg

SEQ ID NO: 9644 - DNA, 592 bp, Zea Mays
gtgaggtgattcatgctcaccggcgcctggataatgttccgcggtgaaaagatcttctcccccctggatgagcttaaggcactgtttgttcggccgtcgtgtccaccctaccccatcgccttgaatcaaccctcgccagagttagaaacctcacggtcttgtgccacgtgccttagcactttaaccatgccgccgtgactcatactgaactatccagagatcaccgttgaggttgccatggttacagccactaatctcgtgcgccggtgactcctttcttctccgaccgccagcgcgccaatccaaaattggaggccaccgctcaagcacactataaattgagcgcaccgcgggtccgtagggtagtcatgcaccaagccaccatgccgtgcctccaattgttcaccagagctcgccaattccgaatttcccccaattctgctttgcgccaccgtgaaagagacctcgccgtggctagctcgtctcaggtccgctcataacctctaccctttcatttcagtgttctgatgtgtccttgatgctccccgaccctgccaatcggactaggcccccttagatcaccgagaacgcg

SEQ ID NO: 9645 - DNA, 738 bp, Zea Mays
tagggttctgattgctgaaatctgtccgctgaaggagagaggtctgactgccaaggttgtggttgctgactttgtttttaagaatattcagcctttgaaggacagggcatatccagcttacttgtacagtggcattactgactcgactcgggttaccaacaggaaaattccttctgaggatctggtgagccgactagacatgatcctgaggggcaaagtatcaaatgttggtgctcctgttgcctactctgcttggaatctgccacctcctaggtcctttttcaatttcgtgtccaaccctcctgttggtgatagtggtctgggtcttagagtgcgaccctctcctgaagacattgaggctctggttgctcctctttgtgatcttcccaatgatgagaggaaagttcattttgagatgccggcaagtccagatgatgcagaaatagatgttgtactcaatatgttggctggagaatcttctgactcggcccatgctaaaccaatggctgttacggttgtacaagagcttaacaaaatagtggacacccgaaagcctgagggtagttgcccaaagcgtcctcgccaagttagccacccgactgcgcctgttgaggagaagaagaagaaaaagaggcggcttcggcgactgtcaagcttggaccaggatgctggcccttctgctcctgtttgtgaagaagtaccagtggaggtccttactgatgttgatcccaatggtgg

SEQ ID NO: 9646 - DNA, 297 bp, Zea Mays
ggaagacatcatccgtgccgttagatccaattcggacagcatagggttgatcaacgggctcgatgaatgtgggtcgtggatcactgatccaactgcctaggttgtgtaccggttcgggatgaagttagtttgatctgcgttgtccgtttctaatccaacagtagggaaacatccataccccttcgcggctgacatattgcaaaagaacccctagctttattagaaactaacccgctatccattgctacagcgctctaggtctcgggaattttgtagattagtccatgttgtttcctg

SEQ ID NO: 9647 - DNA, 374 bp, Zea Mays
gcctcacgagtcacgactaacagatattcctaatgcaactaatcactaagaaagcaactaacctagcagattaagatcaagctgttgctgcatgacttggatgggacatccatgctgcttggctcacatgttgggcctagccagtcccatgattgctaactactctacaagattcagaaggttaaggttatctgatgttaaatgtgtattaagattaaccatcatgtgagcgcccataccaagttcgccttcattaaaacaatacactaaaattttactaacatgtactgaagaagttgtcgaccataatgatatcccccaagtgttgggctgttggcacatcccttttggctactaactgcactgaactttaa

SEQ ID NO: 9648 - DNA, 765 bp, Zea Mays
ttccaccgttactgcaagggattggatggtggtgactagggcggatgtgttgggttccgccataacagaggttgatgagactgcgtcggatggtggtgaagagatggatttgggcggcggaagtggtggggaggatggcctggaatccggtaccaagatgttgtgacgtgttccaatggagttgaggggtgccggaggcggcgacccctagctgcgcaaggcgtagccaccggtgttggcagcacaaggttttgcccctcggctatctatttttgctggagagtaggtgaggaagataatatgatttattgcttgtctttcctgattacaaaatcctaattatataggcctaaggctaatcgactcttcccccaataataggagataaaactgctaagacctatccgaactaacaaatgagatctagctgctaaggcttatccaaactaacgaactcaatcacaactgattctatctattctaaccaacttgactgatctaatgttaaccactggcctgaccgttcccttatcctaggcttacgtgaataccgtttgccccacatgacaggtccattttctgacgcgcataggcgataccagtcataacattatttcttgtcatgtggacatttcaccgttgctcaaaacatagtcagaaacattcttgtaattttttggaaaatgttttgccgaacaaatacataccttcaatatcacatagtatagtacgatcaacgatgcctcatgctcatttcattgcttg

SEQ ID NO: 9649 - DNA, 547 bp, Zea Mays
ccacagctgcaaataattccagcagctcaaccgccggcttgcaccgattgtacaaccgtcccaagctctatcgcgtcaatgggaaataaggtccgttatccagttgatgacataacaaggccagtgacgtgcacactggttataagatatggtattaacaataatcgcacgaagaaagtaggaacaggcattgcgatcccaggacgtaagtttcatggaagcgacataccagatgattattgcagggtagaagtgatgatggtcgtccaatgatctgaggacgacatactagacatcccttggcccaaaggaatcgagacacttggacaagccatcaaaaatttcatcctttggcctcaaagggatgtcgaattggttgatccaccaacgccgtcgtcatctcaaccccaaccatctctgcctcctcaaactttagtacctttacatccatcatcacctccacaatcttcccatgctgctcctcatcctctttctaatccaccgtctctgccacaagcatcaacatttaggacaccaccaccttctc

SEQ ID NO: 9650 - DNA, 820 bp, Zea Mays
ggcggaaacgtgctcgcgtctgcgcccgcgggcgagactttgcacaaaggcccctggtgttttaaatatccattaaagagtctgtggcactattcacatgtctcactgacagttccacataagcccttccctttctatttcttcacaactcaacgtccctaacaacggcgctctcgcccaccgaccactcctcaccagaactcgcttcaaacggcgatgatcgtcgaacccgtgcacctaatcgtcatcctcgatccaagacgatcctaatccgtgtattaattggggtaatctgactcggaatcccctctatccacaatgacgatgggttccgagggctggcaagatcgttcccattgacacagcgtggtagcgttcgaattgaaggtatgctgagcttaagtgactcaccaggactcaaggacgacgaccgagaaggtgggcgagggaataggacaacgagtcaacgtggagatggctcacagcaatgttcaccgacggcgaagtgatgttcttaaggggtcactatagtagagtttgatcgaccgggtcagtgagcaactgaggatcaaagggatcctagaacaagaactagagaagcataaactcacatgagaagctctagccacggcgagacccatcacagcagcacccatgactgatttcagagaatatccgaaatttgtgagctatggtggatggcagaatgtggttggggtgcattgggtttgtaacaagggggcggagcagggagagtcttcaatttaaagggatcggcccggctactcgtgaatttgaacgaagttaagctcacggcggt

SEQ ID NO: 9651 - DNA, 644 bp, Zea Mays
attaggagttagcgtatttagaaattctaatgggtaattgttattaggatcatgcaccgcggtgtcaaagctatggtacatcatctgctccccttggaaacaatcgatcatcctcatatttatcatatccacctagtcattccgtgtagacaatattgctattgaagtgatgtagcttgtgttagacatattttcatttagattggggtaaatgtcatctatcagtctggcaaggtcatagtcattatcagtatatggcacacatacttcatttggaagacaaacatcaccatcggtgttcgctttctcagttccacctccgacacgcaacaaatattctacaaaccatgggtcgctctatgccctcatgttttgaacaagctttaggtggcacgtggattcccagaggtaagaactccatagagaggcaacaactatctgagcccttgaccccttgcgtacaacagggagtacttgtctgaaatcacccccgaacacaacagtcttcccaccaaagggcagcccaggccgtcccattacatcacacatgctattgtctagcgcctcaattgcttgtctcttagtcattgatgcctcgtcctagataatgagcgatgctttttgtagcaactttgttgtcctgc

SEQ ID NO: 9652 - DNA, 411 bp, Zea Mays
tgacttgagttctacccacaagccactgcaatgatgtggaagtccctgtgttcatgctggtgtaaccctctcccccagtccttagctttgctctgacccagaatcgagtgcttcagaccctaggtggtgaccacaactgcagatcacccacttcaccgtggccagggtattcagagcagtaacacaccaagttgaagtgtgttctgtgctctctctgagaccgtgaagctcatgtcgtttaacttttgaactctatcgatgtatgctgcgtggagcagggccatgccgctgcagtctggcgccgcggacacgcctcactgtcgaccggccaatgtgcatcctccccgggcaattttacgcgcgcaccgagacctttgtacgtcactattactccccacatccgtaattgaa

SEQ ID NO: 9653 - DNA, 416 bp, Zea Mays
gaattattcttatcttcctctcggagaattatgttaaaatccccacataaaaaccatggccccacacactcatcacgaaccgttctcaattcatggataaactcctgcttaaaaatatcctgatgaggtccatacacacctgtgaaccaccaggaagaaccagactcatcctgaaaatggacagagacaaagattcttcatgactgaagccacagagacaaaagacccgtcacgctaagcaattaacactcctctagtcccttgggcgggactagaaacaaaattgctgaaaccagacccgagaatagacagaatgtcaaagtccgagatagaacacaatttggtctcctgtagacaaacaatggaaggcttgatatcaaggaccagagatttaactgaatccctcttggcacaat

SEQ ID NO: 9654 - DNA, 407 bp, Zea Mays
gttggaactgctgagctcctgttggatggtctgtgcatggttcagggacttcacccagattcaattgacagtatggatatggctgttctcaagctcagagcgtggtgtttctctccggatagcctgccggcggtaattgatctacatgttcaggaacctcttattgttggggaggatggatccattgtccctcgcactttggtttatcccatttctgtgagggtgattactcctggtgattggccggcaggggacatgtctgaggcattgcctcctgttgtcgaagatgaagatgacatggatcagtttcagcagaggcggcgcattgttgggcatgatcttacagctcggcactcggtgcattcgaggcttgggccgcgaacctcttcttcgtcggctgctgaacc

SEQ ID NO: 9655 - DNA, 339 bp, Zea Mays
caaaattatagcccaatcataggagaacaactttgcttaagagtgtgagcatagttgttaagaaaatattggagataattaagcctaaagtttggctgtcaggctggttcccctctgaaattcagatgttcattgtaacagagccaactttgagtatgaattcaaccttgatctagtgctcaaatgagttcaagccctatagtcgaattattgctggcttatagctctacaattttgctgcagagcttgggaggagttgtcattggaaattgagagtaaatcctgctccaagttgctctgtcaggttaactgaaatgggacgccatggtacagtaagtg

SEQ ID NO: 9656 - DNA, 742 bp, Zea Mays
aacagtgttatgggctcaacttttaagctttgtaactttcaaactatagggtttttgccctaggtcaccacatcaaaattgtagcccaatcgtaggagaacaactttgcttaagagtgtgagcatagttgttatgaagaattctgagataaatgagcctgaagttggactgtcagactgcttgaaatctgaaattcagattaacagtgggatgacatgaacttagggcttaattttaagctagatctagtgactttttgtgggaacacattgtagcaaagttatagctggatggtagttctacaactttgctacagatcattggttatgttgccatatgaaattgagagaaaaattgccttcaacagggactgataggctgtctgaatgagttagtcgccatggtatagtgctccagatggattagaccgccagcagggaatcctcaccgccgacgactccctccgccgcgattcgtgtcaccggcgactagattcgtgcctggcgttgatgaatggcctcgcgaggtaaaaaaccgtgccctggacgccactccggtgactcaccgtcgtagcccttctgctttatggctggagcagataagctcgccggtgaaccgccgtcgtccgaccttgtgccgcgtgtcccgacctcgccaccgcatcgccgtgactccctctaagcttcccgtcgaccagcggagttactgccacggcgttgaacacgtatccactgcacccgtg

SEQ ID NO: 9657 - DNA, 458 bp, Zea Mays
cattgggaccctgcatgctagtactagcttactcttacacctatcaagactgcaatacgagtcatcgaatcacattatcatatgatcctagttttaacaaacaatatgaggcgcaacaggggttttaggcagagtgaccatggtattgtagaatcgggattcacatgtgatttcatactgtccagacagagggggagagtctcttcgctgcattatatatgtgactagtcgcctggtcggtaccataccatggcaactggtgtcgactagccaatgctgctgcagaccagcaaaagcatttgtgaaattgcgatagagctctgtagcctgggccactggcagtgctccgctgcactgctgcagttgcaaaattcttggccatatggtttcagtactgtaaattttagtttatccttgatgcatgttttttttttgtaattgtgtttgttcatcttgga

SEQ ID NO: 9658 - DNA, 272 bp, Zea Mays
caggagaattggcattgctacctcatctcgtgccctttgctctcaatttgttacacagcaattggatttggctgcaaggtgggtatgtgccacttagagcagagcttacagttatttcttttgttagctacactgcaagcatcctttgtcgtgattttgagtgttagaggtgagcttagaatgggaggtgctcagctgaggtgttgaggtattcttcctttcagcaaaatagcaagtggcatccttttgctacttttacgtgcaacgattgc

SEQ ID NO: 9659 - DNA, 692 bp, Zea Mays
atcttgtatcaacaaccgagaacatgccatgacttttatctaatctgtctgacccattacccaatcaacggttcagattttatgcatcaaagggtgcattatgatctaatctcggccgttcggatcgagatcaacgaccacaattcttttctcctccctcgacgtcgagcgatggtggtgctggcttcccctgcggtggagccttaggaggatccacgacggtgaagaactcagttgagaaataaccgtcgatctggttgatgctatacccgaagttcctatggaaccttcctctcgctctcctcttccacccggatcagtgaccaaagagaagatagaccgtgacaggttatccctcctctcctgatttgctttgcaagggccctcgattttgcaagatagctcgacgttctcctgtggcgggggatatgaggtgcgggcctcggttttataccatgagtcacgaggatttgctagctagcggatcccaatctgctggcgagtttgttgtgggtggttacatggtgacgttgggtttgttatagattagaaatcaatggcgaatctaggtataagcgtgaggaactgtgaggatgattcgtgggccccacaaatcagttaacacgatggtcttgtgcacgtagaagcgtgggtgcagagcgaggctgacatgctggtcccgtaggtcggtg

SEQ ID NO: 9660 - DNA, 398 bp, Zea Mays
ggctctgcgcagtgggcgagcaataaagaggaggaatggcgagcaggggcaggggctcggcagcgctttatagccacgggctagcatacgagagggcgtcggaaggagaaacggcgctgcacaaatgctcggcatctattgaaggtagctggtgactggacaagaaactgacgtggttaatggagaggaattagtcacgagaaactgtcacgacgagtaacgggcgtgggacagctaggcaccgagtgcggtgcggtagtccactgcctgggatgcaagcaggcggggaagacaaagcagcagtggaaggcgacgagaaggcagattgcggcgacaacactgcctagacccgttcgaacagacgaacagagaagaacactggagcagcagtgggatcc

SEQ ID NO: 9661 - DNA, 687 bp, Zea Mays
attttggtggcagtgaccaatgtgaatcatatttcggagtccgcagaaatagtagttgatgaagggttatatgagattttcttcaaagttgataaggttctcatagaggggaagtggatggataacgataacatgagtaatcgagacaaagatgatttctctgagaaacatgaaaatgattcttttcagttgaaggagctagctaaagatactgtcatggaagataactctttgcatggtgattctaagaagcctgaagatgggacttgtgccatggggatggtgtctcagctagagaatcagattgttaatgggtcagtggcaagaacgggtattgaaccagaaggtctatctctaggcatgccgacagacttgatggcacttacttctccttttgttgatcagtatgttgtcactcacacacatggtgctcttgatcagtcaccaggctgtggtagcggtgatgggaagtccaattcctggctcgagcagtatcctagttgctcttcccttgcgggcatgtcacagggtgaggttgggtggaccttgtcagggcctgccaccggtcatttgttcctgaatgagactgcatctcttgctggagcggcagccggtatggttgttgaagatgtctatgctcagccaaaggttgtgatcgaattggatgatggtcatattaaatctgtt

SEQ ID NO: 9662 - DNA, 467 bp, Zea Mays
ctgtttattttaagaagcatgaaacttgcatcatcttcacgctctctctggctatgcagcttctgtcctttgtgattgttgtttctccgtgagacccacccattgccgcggtatgaacagttgagattgagaggagaccagcaggaggaaacaccgggtcggtggtgtcttgttttgggtgtctgctgcactgccattcacgtggacggaatggaagcaggagagggcgtgagagccgacgctgctgtccccccgcccaccttacattcgctacgatttcagggacgacggcgatttgaatgccgagttccgaggtgatcaatcgagtactcctacatcaatcagatcacgacccatgcactgccctccgatcatgtcaaggttcatgcctctatctactgtttcagtttaattcagagaccaaagccagcagctatcgacggaagccgatagcgataccaagcgcc

SEQ ID NO: 9663 - DNA, 559 bp, Zea Mays
cccatctcctgtcctgcctggatcttctctctctctctcgtgaatttccaggtagctatcacttcatttgagatcctattggctactctctacttctgcttatcttttcactctctcatgtagcagtcaggtcatgatggtgcggacgaagagcgtctcatcgtcaggggaggagacaacggggaccctcctcgccccttcaggcagatcaaggggaagacagtttaccttgagcagcatgagggcaggaagaagcgtcgtatggacagagccgctcgtgcagcacttgcagcggcaacagcagcagagcaggctgagcagggaggccagctctagatctcctcagataagataacgtatcgagtttgtcgcctcgtatctcggcctcgctccactgctcccttcacacctttcaccactgtctccactcctcctcccacttcactagctcctgtcgctcgagagccatccactacttctgatgtacccaccacctccaccactccagcttccactgctccccctcccgctcccatttcctctccacccattccaccac

SEQ ID NO: 9664 - DNA, 427 bp, Zea Mays
caaccatcagccatcgcattcatcgtgacccaaccatctcaggaaggcgtcttactcttccccttccccatcacaggcaacttgaccaccaagcgaagctgactctctcatctcatctatcatgtcagatctccagccagagctctccgcaaaactactcactgtgaaactccaatgttagccttcatccatcaggcactggacactccacatgatcctcactgcagaactccaagtcatgaccatattgaggtacacaacatggtcctggcccggagctgttggtgtctgtattaacctctacttggtcaatgcctatattgtctagctactgcttgttgcactccgctacgttactgcctccgtgctctacctcaaggcccatcactacggcatcatcatcaccctacatatgcctttgctttgt

SEQ ID NO: 9665 - DNA, 584 bp, Zea Mays
gggccggcagtaactgcatcaacgggcgcgcaggagcagcgagccgatcgccagtcaaactctggccccacctgcaggctcgcatcctcccctgaggtgggcccgggggccactgtcggtaccctggattagggataccccttactacggtatgaaggcacgatgtctatgcggctacctatagccgcgcggagaacagcctcagggtatcttatgggcagttaaagtggcgttctcggagacaacgccatcgggctcagaagacaccggacccctgtgcgcacgacccggacccccgaagtaaagcagcccaaagccattggatagggttcggaccccactaagtgagctccggaccgcccataacaaggtcccgggaaaaggagtgtcataacctaggcctgggtccgggactgacgcgtgtcctggctctatccgtagcgcctccgccccctgcttgaccaagggtctaatgcagccacatggcttatagtccgtgacataggccagcgggcggagcgtgacgtaagggctctgagccgcgcggcctctgcatttattgcggagaggacacgccgcctgtc

SEQ ID NO: 9666 - DNA, 286 bp, Zea Mays
gccgcaagctgcggctcgtggtccggttttctcgtaaatcggttagcttcttcctcttctcgtctccttaaaggtatgggttgtcaatcctctgggagatatagaaaaactacatctcgctgctgctcgcggttccaatcggatccattcggtccccggtgttttgtattcaactcgctggtggtgattggaagaaggtggaggtggtgctgctcttgtgcagtgcggttctcccgcactccctgattcacttgtgcgcctgtgtggtgctgtgttcgtctgatta

SEQ ID NO: 9667 - DNA, 442 bp, Zea Mays
gtggcaggggtcgatggggggagagtcaggatggatgtcgtcactaatggcgccaccgcggatgggggcactcccccgtgctctgccctcgggggagggtgatgactcggttgccgttgatcccagatttggcgactacgattagaaaccatgtaacccttcatgctaccgatctcggcccttcatcgtgaatcggatggttgcgagcgcacctcggttgttttaaatccaatccgtagatctaaaatcgtgtggttgtcgttcgaaactggttcataaaaggttggggctgatcactattgtccagagtagatcgaatggccacaaacatgtaccaacccatttatgggatcaatctaatctggcacgtaggaatctgatcgggcagcccaaatagactcatatccccttcagccagcgcgttttgcaaaagagcccttat

SEQ ID NO: 9668 - DNA, 467 bp, Zea Mays
ggattattcaacgccctatatggtctcgcttcggcattaggaggtcagccactgcccttgggaatgatatacaaacatgtcaggtggctttcaatacagtgtgtacttacataggcacaagagacttagtgcaagagcacattgcttatagagtgtggccacttgcagatgggtgggaaatgtcgaaggagactgctgctggctctagccaaggtgatttagtctacctgaagtataccatcaggtacaggagccaatttgatgaaccgaatgaagaccggctaaatgtcatagaagcgactagtgacgagctgcttggagcatattccaaggtcgaagatgaagccatgacaactgccttcggggctcacggcaaaaaaagattaaatagagtgttcgatgttatcgggtttgtgtacccggaatactattatccctcacggaaacaagggaaaaagaggaaagct

SEQ ID NO: 9669 - DNA, 722 bp, Zea Mays
gcaggctcaccggtgatgatcgggtgtgctagagcgagtcactacgacaaagtactgcgtctaggcatgtgtcatccgagcggcagacgactaactccggtgaacttatctgaattcggctgtgagccaagcgaacacggcggccaggcggaatagttcccaaagctcaatagcggtgaagatctttctaccctgaggcgttatccgggcacaagtgagcacgaatcaccttgccggtggcaagttcactgaatcgacagatcttttcggttgttgtaccatcaagaacttcttcagtcagcctgacagagcgaatggcagggagatttgctccaaatttcatgcagtgactcgatcatctcactatatcaaagttgtagtctaacaaactagctttaactttgttacaatgttcaccatccaatagtcataggatcttactcaaaatcaagctctaagttcatccattttcactgtgactgacaattcagacttaaggctgactaacaacacaactttgagcctagttttctcccaactttgtataacaacaatgcttaatcccttaagcaaagttgtactcctatagtagctatagacttttgatgtgttgaccctaggcaaaatctttgtatttttggatctacagagttccaaagtcagcctggttcatcaggtgttggcgttttggacccgcgaggtccgtcaactgaccagtgaat

SEQ ID NO: 9670 - DNA, 672 bp, Zea Mays
ggagccaatccgcgcttgaacttgacctctctctgcgctgcctcgtgctcgacgtcgtgcccaggcgctagagtgcacactggcgatcgcctgcgcaaaccccgagcacgtggcagagccatccctcggtcgtgctcgcccgcgcctttaagaccactccagacgcgcctcacctcactccacactcacctttgctggccagacagcacccttagctccggcgagctcagcgccacccgcccgagccacccgagtgcttgccaccgcggctagccatttctagagaccctcagcctcaaccgagcctttggacagcttccccgaggagccgtgaagcttctccaagcaaggatcgaagccctgcctcaccggaacagcaagatcatcgtcatcggacttcgaccgcccgccaccgcgtgtagaccgagctatccggtgagccattcttcaattcctcgtgcccatgccttccctagcacctagtgaagctcactaactagtttaattgaactctaccgccctggataggttggagccctcgccgccgacgagctcccccgtctgcgcatgtggaccggcctactccgaccattcctggagacgatccgcacatcggcgtgaccgtcacgacctcccctatgccctcgtccacctcaccggagcaatctcgcc

SEQ ID NO: 9671 - DNA, 464 bp, Zea Mays
ttctgatatccagctttattcaaatgtgtatttgaccgatttcctttgatcacttcatctgcaaaaatctcacaaactatcctagtatattcgtcaccccatgtcgccgtactgtacacgccaatgtggacaaacaatgcataacaattcaagttgcagcaagcataacaatgagtaataaaggattaggaatcaaataatcacctagcatcagtaatttccacatcagtgtccatagaggttgcagcatgagaagggcgtcgagtttcagtactaggagaagggcgtcgcacatcaccagtaggaggacgtcgcacatcagcgggagacggtgctcggtgcatctcagcagaaggtgattgaaggatgtctgtggcagtgccaagaatgccggcaagccacccatcgtcttgtacagctgatgtgtcgacgtgagtagcccaattcgcatccaaagacccggc

SEQ ID NO: 9672 - DNA, 411 bp, Zea Mays
ctcatatgattgtgattgtaccgagtttatgattcattcatataggttgggtacatttgattcatcgattgactctagggagaccgagcatccataccattgtcctcttaaatgtctcgttctcgcacctccgcgcaggacatggagattgctaggctacaagaagcgttaaggcaatagtcagagtattagaggcaacaagctgagcaccaaatgcagcaaaactagcattatgtgaatctattcgctcagtaggaggctttcctctcagtaagttgaactaatatgttattcatagcaactagaaagttgtgtcattcataaatagtgacttgcatctaatttgtagcaagtggcacaacaaacgtgcatctagatgtcagccattgggatgccgcctctagattttgc

SEQ ID NO: 9673 - DNA, 458 bp, Zea Mays
aaagcactcaaacgagagagcagagagggtgaactgaccggaattgcgctggccacggcgaggttgttttcacgatggcggaaaaccgaattggaggaaacgagaaattcgcgagctctagggaatgattcgaggtacgagttgcttcactggttgcgtaattacctaacggagccgagggtgtgctcaatttataggctccgggggcggtggctggtgaatcggggatggcgcggtggcggtcggagagaagagggtgtactggcgcaacgattagtggcttgtaccgtggcgagctcaccggcgatcaccggatatgcttaacacgatctactgtgacgtggtaagatgcccgggcacgtggcaaacggcagtgagggatcaacgacggtgagatcctacccaagcgatcggtgaacaagggggaggtacggcggctagccggattggtgtccagc

SEQ ID NO: 9674 - DNA, 721 bp, Zea Mays
ctattgatggtatgtaaattaatgtgttagcatagaaatgtatatgttatggtgggtaaaacatatgaaaggcggcccaagcagcccataggccaggccatgctaggagatcaggattagagggataaggataagtttgttagattagatatcaaaaggagagatagtaggaatttgttagagaataagtaggggcagcacagtttatgtgcgcctgtactggactatataaagtccttagtttgtacctaggaagattagcaaagatcaatctaagaagagtattgctccttgccacattctatctcagccgtgcgccaacatggctccctctcgccctcaatcctcaaggcctcgccctactacccactcatacaacctcagaagtcgagatcattagaatctggtatcagatatgtcaggtcatgatgatgaagatagcatggcagccactgccctgcagccgtccctggcgtccatcgccacgacactaggtgaagtccaacgttagctctgcgactttgcctagcagatgtcctccatctcctcccgtgttgcggtcgtcgaggcatgtccatcttcatccacgccggccatcccgcaggacattccctatggcctgccgggctacggcagcatccccaaggtaccgatgaataccaatcatttgccagtcacgacacattctacctccatagcccccttccaatccatcgtctac

SEQ ID NO: 9675 - DNA, 360 bp, Zea Mays
ctcctattctgtgttctatgacttgtatggcaacgacaacggttggtcgtgccccctgtctccaccagttcgtcgctgccggggcctgcctgctagcccctagaaatgttgtcgccttgccgccgcgcatccacggtatgctctcctcacgtccccacttgtcgacccaggccgcctcctctagcctttcgctgctttggttgtcactgtgcatgtgtgcagattcaaggttgtttgcttctattggtttcaattcaacttaccatggtgccgtcattattagctcagagtttgcttttccgccttattacttatttacttgcatgattttggttcatgtatgcaatgcgctcatctttt

SEQ ID NO: 9676 - DNA, 338 bp, Zea Mays
gccgagatctaccggggatggggaggagctcgatgcaagcacacgactgtcgaggaagggaggagttcggcgtggctactagggagaagctcggcgcaggctcgcgactaccgatgaggaggcgagcttggtgtagcggaaggagaggagtctagttcgacgcgactgacggtgaggagcccggtgcatgcatgtgtcctaggctgttgggtggagacatggcggagctctgaccggatctagatgcggagggttagagcttggggcatggtctacagagctcgaagggtggcggtgggcgcggttcgtttggcacagggcaattcctcacgtggaac

SEQ ID NO: 9677 - DNA, 492 bp, Zea Mays
ttcagcttcaggcatagtctcttcagcttcggcatcgatgttagcttcaacattagcagatgcaacaattttttctgccgagactgggggcggggtcttatgaatagccttcattacagtcatcacccgtcgtttcttctgacccccagcatttcccccatttgccgaagcagtcttcttcccttccgagctttgttcgatccccttctcctttgactgcaataggctagtcagatctaaccccaggggacttagcacaacaaatgggaagggtttagtcattaccttcaaaatttctgtaacactggcagaggaagacgaagaagtactgacagtcttttttggtacatcttgtacctttgtctcgacaggagtcgtcctcttagacttttgtttcctgggagccgaatcctttggctccgctgaaattttctattttttgccagccctctgatcttcttcaatggactgcatgccttgccttttcaaaat

SEQ ID NO: 9678 - DNA, 545 bp, Zea Mays
tgaaactgctgagaccgctccgatttccgaagtgatgaaacggtcggggctagtagtgtcggaagatgtttctgacgaaggtgcacctgccgctgaggctaagcaggttggtgctgaggaagatgaatctaaagatgattatagtgtcgtgccatctaaacccagccacctggagtttgggaggtccaccattaccgaagatgatatgcctaagctgatgaagttaggctatttcagtgaggccaaaaaggagctaattcactttggcggagaggaaattactccgaagccggaaaaggatgaggtggtagtctttaaaagcttcttcaaagcaggattaagatttcctttgaatgagatgattgccgatgttttgaagaagtttgggatttatcttcatcagctaactcctaacgccatcattgggcttagcgtctacatatggcccctccgaagccagggggtagaaccgtttgccgaaggcttctgccgagtacatgagcttcattatcaaacaaaagctagagaagatgggctgcacaaaa

SEQ ID NO: 9679 - DNA, 474 bp, Zea Mays
caagccaaaaacagcagtcaaacactcagaagaagtcctcccaaagtacctttcgcctactagctccaagagggggaaaaggaggccagagctttggtgacagatttaatgcacaaccaaggaagtcattctatctgctctgtgccaaagataaaggttgcacaacaaggacctgtcagcacaccatccataagcaaagggagattgctactgcagctgctcagtcatctcaaccaaaggaggtgttccgtacatctttgtactgctcaccttacacaaaatgtccaaccctaggagcctaggctacatcagcccttggcttcaaatgctttgaacaaccctatgatgagtgcatggtcgccatctgcttccttcaatctaaagccacccctatgatcaggtccctgctagtcatcccaagttactggtgcatgacatgcaacaacgggacagaagggaggccttcgaagcccg

SEQ ID NO: 9680 - DNA, 1519 bp, Zea Mays
ctgagctagggtcccagtgcgagtggtgaaatacctagtccgtagatggtttcaacatacttgatgttgaggtcgcttcccccatccatgagcaccctggagaggcgcttcgagcccacgattagatcgctgagggatctcatgcgggtggtcgcggcgatcgaagacgattagggactctgaccaccagaagtatcgaggaacggtgggatctgtcatgttcacctcacggcgagccaccttgagacaacgcttgtcacctaatgttggctagtggccaacacggtcatgagtgctgacggtgagcctccatccacctgccgcttgatggctacgacgagctagttgatttgttgtttcagggcggcggtgcttctctgtcttgcttcatcttgcttctctgtcttgctcctgggggagagcgtgggcttcgccgtcgtggtgatgagctcataagggtcagtgaggcggagttcgtcgacatcagtggcgaggaagtcgagggagccgaacatggcataacttccaagagcgaaagtgttgtcgtcgatgagtgttgatgagtgggccatcggagtgatggaagtcttttggcacgctaacggtcccctacttggcgcaccaactttcgtggtttcagaaaccaggggacaatagaatttgtgttcgatggaggagctagcgtggacccactccaaatggtgaattgtggggattctaagagaatggggtgtgagacggtgaattatacttgttcaggctcgtgccctagtcccatgtagtgctaatcgtagtattgcctgaatagtgttgcagcgtgtgcgcgtgtttgagaaggaggagggtctgcccttttattgttcaagggtagatcttacaatagggacttgtttgctattcgtaagggggcactctgccaccccaggttgaggtagaattcccaatgtcgtccgtagggccgtgcgtagccgtactcccggtatggtgtattgtcatgtgtgcctgccatacgggtccctgtagggagtccttcactgatgtattcgtagaagtgtgcggtgggtcctatgggttagcctcatgacttggtcgtgcgcgatgtagctctgcttgtcgtcacgagccctgcatcactagtacgtatacgttagcatacgcttggcatggcgcattgttctttcttccctaatatgcgagccactgctcagactctagggctaaggtccccttgtaactgaggttgattgaccccacatggcagtgggggcacatctaaggctgtacgtggaggcatccgagcgtgtttgatagcgacctcccggtgctactttggtatgctgcacatatgtccagacgtgggttggtgacgacatgtcttgtcatagctgtcgcaggtcaacagtgtcgggcgggtcctccaccttgcagcattggctgattcggagttggtcggccgcctcgtctcaaacggttactcggtgaggagttggtcgatcgctctgcctcacagagtttgctc

SEQ ID NO: 9681 - DNA, 1191 bp, Zea Mays
aattaccatccgccactttttgcatgtgcctattgtcgatcatgataataactcaggcagacctcttccagttttaatgtcttatggtttctgcctactgctaggttgcatgtggtattcgaaagctgcaactggctcacatactggtatggtctaatagagacttagagagtgggcctgtcgagccatggcttgccctccctgtttccctttgcaggcactctgccggatttaagttggcggcggggttgtgtaatgtgttagccagatgacgcttcattccaatattttctgcgcctctgtggcctgtgggctccgtggtctggcttcagcataggcccatgctatgcacgcaagcagtgtacgctgatgcgtgtaccttgttgagtaaattgctgcatggcatctgcctctgcctggccatgaatggatatcaaaatcctcaaccagatgtgaccacactctgaaaggagacaaaccattaaaggccacagagttgaaggactccatatgttgacctacctgcccactgctcgatcagcaccatggaccaaatccttgcatacaaacacctcgcttttggtaaactatgggtaaattactgcagcagacggtctaatggttatagtatccgattcacgcgcgcaaggaaggtttgccaacgcacgcaggtggtgttcagtagtgggactcattcggcggcgtgggatgtggtcaccagtgtcagcgaatcacgctgcattatacgtacatttggttccggactaccggcgtaggagtgagataatgctagggcatggagggacgctgtgttattaaacgccgttacttgttgagacaaacaacttcgccgtacgctggctgcaacttcattcctattacgtcagcgcggtactgatcctacaaccaaacagcacagagattctgcaggttggttttagttctgactgaagttctgcacgaccgaatgaaactaaacttatgtagtcactagtcaggcagtgcagaaacgctgcggaggagacatatagaccgcaatgcagagtgcgcgtacgtccttgcccgtgtggtgcgccacccctagtaatcatcagctcgcctatctattataccttgaaaaagaaagcggacgctccttgtcatgctatgtctaaactctaaagacgtccactgggttagtcacccaaatcc

SEQ ID NO: 9682 - DNA, 539 bp, Zea Mays
gtgtaatccaacgtcctatatggtcacgcttcggcattagaaggccatcaatcgcacttgggaatgaagtgcaagcctgccaaatggctttcaacaccatatgcacctacattggcacaagagatttagttcaagaacacatcgctttcagagtgtggcctctggcaaatgagtgggaaatgccaaggaagctgtcgctggctccagccaaggtggcttggtttatctcaagtacaccttccggtgcaggagccagttcgatgagccaaatgatgactggctacacgctatagaggccacgagtgatgagctacttggagcgtactcaagggcagaagacgaggccatgacaattgccttcaacatcttctagtgcgccgaaggcgaagaaagtcaaggtcttgacacatagaccaaagcccattgggacgacaaatgtgccgaagctaattgaaagggcagaaactgcccccttagccacagagacggttcatgtgatgctgattgaagctagtgcagacccggtcaaagagccggag

SEQ ID NO: 9683 - DNA, 369 bp, Zea Mays
tacaaattttttttgctcagcgcttgtcatcatgttgacagtgccctgcgaagaggaagaagtcactggctcccatttaagtttcccatttgggattcctcctacacaccacatccttgtgatcctgtctgcagatagagcacctgccactccactgacactcggcacggcgatgcgcttcaccacaatggaaacacaccaaccccaacccaggcttaggaacagcccgatacgtatgattactccctcctgaagtacccgattcagagggcttgccacgataggggtggtggtgctggtgttgtgactttcccctcttgtgggctggacccccagtgttgcccctcctcgcgtcctggccacgaggct

SEQ ID NO: 9684 - DNA, 793 bp, Zea Mays
gatggttgtacctttggcgccttgaggggcgccttggtgccagaggtcgagggatcccttcttccgtcgtctgggcgagcagtctctgccgccatggcgtgcaacttttctatagctgccagtgcggcggcacggtcaccttgcacggtgaggaccccagttggggatggcatcttgaggaccaaataccagtaatgggcaatggccatgaaccggtacagggctggcctgccaatgatggcgttgaaggggaggttgacttctgccacgtcaaagatgacgttcttcgtgcagaaattatcctcagttccgaatgtaaccgggagtgcaatgctccccagggggtacaccggctgcgggcccactccggagaacgggcgtgagggtcccagacgggatcccgggatttgcagctgcttaaacgcagcatggctgatgacgttgaggcccgctccaccgtcaatcagcacatggtgcagtcgcatgttggcgatgacatgagcggtgatgagcggcagtacgccggcccccgccatgttgtcagggcagtcgggtgcctcgaaggagatagtggtgctcctccatcgctggtggggagcagccttcgggacccctagagttaccgataggacctcacgacgtaaggacttgacgttcttgcgggaggttagctcccagctctcgccgtacatgacgtacaatttcttgcggcggtcgctgtcatccccggagtcggaaccttcggtgaggacatccttgaggtccccctcgggtgattgatacccgagctctc

SEQ ID NO: 9685 - DNA, 477 bp, Zea Mays
aatacatgagtaagaacaaataaaaacaacaaagaagaatgcaaacttattcggtataacattagcctcatttttgtactatcccagcaaatgtacccactccatgtccaatatagggcacaattttagatagaatatatatatatagggaagaggtaatggaagccctaggcttccgttagtgggcgaagccccagccaggagaccgatcgggtcgcgttcgacccactggacgccagcctgcgccatttatgcaaaggatagccacgtatcccggcttacacgcgacatgcaaatacgcaaccataaatatgtgtacaaatgtgcataactcatgcataaaaggaatctttgcatgccaggaatcgcgcgcacgaatatttgcatgtgcttgccggttacgactgcataacgttgtgatacatgatagcgtaaaccatgcaaacgtttaaaatctaccaccggatttgagataag

SEQ ID NO: 9686 - DNA, 436 bp, Zea Mays
atgtcagctacgacaggacgcatcatcaccaagcaatgtccggacatatgagcagcataccaaaggggcactagggggtcactgtcaacatgattgtacgtccctacgaaaggtctcaggcgtatccccactacctctgggtcgcaactatgacccatataccgggaatgacgggacaatgcactgtaccgaatgtacgcctacacatgcaggctggtgacacggggctcatgatgacagcgtctgcgctacgcacgaccgcacaataagactgaatagtgggacctgccacacactattgcgaagacatcaacaatagacttgctacatggacttgtctgacggaatagcaagccggtacacccgtaccgggagtagggctacgcatgaccctacggacgacctcaggaacaccacgacaacccggggctacgga

SEQ ID NO: 9687 - DNA, 980 bp, Zea Mays
ttgatagggaagaacataccagcgaatcatggcgcgagaaccccccacccacggtgaagtgtgaaccgcggcaaacacttcaacgccggtgcaaaattcagccacccccgaggaccgcttctttgctctagtgccacggacttgctccttgcgcctccaccagtccttccgagccactatcgcagacacacagctccaattgccacgattcctcggcagcggcgatgaggttgtcccgaccccatggacagggagtggcacaacaacgagtgcatgggggaagttggcggagatcgacgcaaggagcacggggcaagcttggcgtcgacgcagtggaatttgagggcggaatcgcggagaagacgacgaacttctccctctacggcggagctcccctgggcggtactctccttgccggcggcaaactggatggcggccagggagcccaccgcggcggacgctatgccagagcataagccggactagcctcgcgcaggagcagaggggtacagtggagcaggagcttgggaacgagggtgtggacttgctaccatggatgagcacgacgtccaagagccaaggcgcagggcaaggatggtcaggtaagcggagggagttccactggcgacgagggaggaacgtgccgggggggtcgacggcgaggctggcctaccatggcgcccgcactctctctctttcagcgctacctagcgactcgatgttctaggggctcgaccctggtgtggttcgcggcgaggaaccacgatgtgggactttatccccggaatcaggtgacaacaacccacccgaatcctaggggaagactccgagctggcatctttgtagtttctgttggcgctccccgattctcttggggaggttgacgatgccagacaggtgggtccctcggctagagagagcagtagcagcacgcgaagcgtaccggctgacaggctacccggttgggccgagtggtggag

SEQ ID NO: 9688 - DNA, 373 bp, Zea Mays
ggtataccttcaattttctttggtatttcaaccctctctggtgcattccgtgcgggaacatgcgacttaaccacgctcttcaaatcacaaaaatggtcaggcagttcatttgctaagtcttgcaaatcgattatcttttgaacttctagatttgcttctttggtgcgagggtcatgagcggggattcccatggattgccatataatttctcggcatttctcatccaaaggttcttttgctccccctaatgacgggaaattatcctcgtcaaaaaaacagtcagcgaatcgggtcgtatgcaattctccggtcatcgggtcaaggtatctaattatggatgcactctcatatccaacacatatccctattttcc

SEQ ID NO: 9689 - DNA, 841 bp, Zea Mays
cggcatccaaggccaagagcttcatcctggatccaccattgccggtggtggtgcatagcaccacacttcctacaccaaatccaacatcaggtaaagcactgctctgctacactggtagttgtgtgtgttcagtatataatggtagttgtatgtacatgtatataatggtagaaacatctattgaattgttgttaggatctaagcgagcaaggtcagaaaatatgtgccaaaaccttagtggtttgtgtctacatcaaaatgatggcagtggtagtggttctggtgcagcagcaacaaatgatggctgtggtagtggttgtggtgcagctgatgtaggtagggatactttgccaagtggaggtggcagcggtagtgttgctgctgcagcggatggaggcggcaatagtgaacaagccatcaatattgaggatgatgtccctactggaaaaaggcagaaaaaatgcacatctgatgtatggcagtactttaccaagaagaagttggtcattgaggataatgggaagacacatgttcagttgtgggctcattgcaactggccaagatacaagcgcaagggccgatgtgagagcaattatggaacaactggattttggacacatttgagggtggcacatagtatagtgaaatgccagcggcaacttgcagttgaaaaaaatggggggaaagacatcgctgttgtggtaccatacaagtatgatgaagaggctagtttgagaaagttttacttagcaatagtcatgcatgagtacccatttaatatatctgagcatgagttttttgttgacttcatcaaatccctgcgtcctagctttccaatcaa

SEQ ID NO: 9690 - DNA, 325 bp, Zea Mays
gttccttggagcgggagcgggagcaggacaacaagtgggtgttggctgctgctgctgaggtggcctgatcacccaccttcctgcctgctgctgaaatcccctgctctgattgtgggaaacaatcctgaacctctgggtctgagcggatggtgttgccattggtgccttcctcttcttctctgcccgatgagctacaatacaatcctcctgggagatggccaggttgaccaactcattgagctatcggcctggacattgttgagatgctcacgcaacttggtattgagacccctgcggaagcgatctctcttcttctcattgaaat

SEQ ID NO: 9691 - DNA, 282 bp, Zea Mays
gctgccgacgagccacgcgcagattcgtgctatcgccgtggtgattcgcgctcggatcagttggatagcaccgggcgtaagtaaatatcacgccgtggatacactccgaccactattttactccggccaccgtacccgagcagaccatggtcgatttggatgggttcgccagagatagatacttcacggccttgcaccacgttccttggcacattaacctcaccgccgtgactcacgttagctcgtccggtggtcgtcggggagctttccacggcagttgcc

SEQ ID NO: 9692 - DNA, 497 bp, Zea Mays
caaatttgagcaggatccaatgagaatttgactggggatactatgacaaagttaaagcttgttatatgggaataactttgatacaggaagattagtaagttgtcacatggaaaatggagaacaagactcctcaaatcacgttgttagaacgaatgagcatgatcgccatggttcagtgatcataaagatatcaggtgccatgcgctcaacgccggtgatccaccgccacaattcacgcccacctgggagattcgtgccaggggaagagtagataacgtcagggcaaggtgaaaatatcaagtgcggggtgaatccggttgttggccagaccggccgtcgtgtcccaccgtggttaatcgtgctagcatcaccggagttcaccgttatccggccaggcaacgtgccttaaagccttaccacgtcgcaatagaccgctttaggtagcttgttcatcgtccaagacactgcctcggtgaaagccacgatagcactgcgcc

SEQ ID NO: 9693 - DNA, 608 bp, Zea Mays
tgaaccccaaggtcgtcgacctcgccatgaagattgccgagaggatgttcctcaagatgaagaggaagatgcaaagaaaaatgccgaagaagaatcaagaaaaaggtcgaagaagaataaaaaaaggccgacgaagataaaggaaaggggaaaatagagtacaatgacgacttggttgaactcttggtgtccaaggtgatgagtaaggtaagtctcaacaccaaggaatcttccaccaagagtaaaggtaacgagttcaaccgagttcattttgattattcctataattttgttccaaacttctcttcggcgtcgttcggaaaacttcaaactcttagtgagtttaactatgacgagtgggctgagaagatgaagttagatttaatcggtgtgcatcctagtctttaggagattgttaatatatgtatgaataagcccgcccaaggagaagagttgatgccagaaatgatgcaagtgcatcacaatgctcaagccgcaagcataataaaaggaagcttatgtccgaaagagtatcggaaagtccaaggtaaagaagatgctcgtgacatttggaacattcttaaaatgtcacatgacggagatcccaa

SEQ ID NO: 9694 - DNA, 722 bp, Zea Mays
ggttagagtgatcatcgagggtcgaaggccactgctgtgggtggattggaatcctcggaaaagggaaacgaggtttcataaaaaaccacatgacgggagatgattgtacgattggattggcgatcaaagcataggtagcctttgtggttgggagaatagccaagggagacacaaagggttgagcgaggagataatttatgtggagtggtggcggaaagattggggtagcatatgcagccaaaaacatgaaggtgctcataggatgggttgtgggcgaagagagcaaagtgtggtgtagagagtgcaagtgttttggtgggtaatatgttgaggagataggttgcggtgccaagagccgcaacccaaaaactgggggaaacactagattgaatgaggagggtgcgaatgatattgttgatggagcggataacacgttcaaccttaccattttgagctgaagtgtaggggcaagacatacttcttgatggtgcctgtttgtcaaaatttcatacttaaatggttagctgtctgttgatgactattgaatacttactgcttgttgaaagctgatctgctcaagttatggttttggactctgaattttaaatgtttaattcaccaaattatacttctagcctacagataccatcaagaagttaatagataacattcctgtcaggcccacgggtcaggaggacggaggaagagcccaccttggaagg

SEQ ID NO: 9695 - DNA, 609 bp, Zea Mays
ggaaagtgcagcatccaaatttgattggtgtgctaaaacgaaagaggcgttgaattcctttgcgtgttgtcatgccatatctgtgatgacatactgagtttagtggttgggtggtcttgaaggcaagaggggtctaaggaacatgttttgcagttgcctaaaatggtggtcctgctatccatgtgcatcattattaattaatagatgttcttatcaagggcctaagtaactttatgtcttgatccaatgcaccattctgctgagccatatgccatgttgtgtgtctacaccctgaagcattgacagaccataagatttccacagcatgaatagagagcatattgtgtgtctggcatgtatccagcagcttgcatttgccctttgagcttggccaacaatgcctggatctccctattcatatcatgtgttgtatccttagcctggaaaacatggacaacatttttccaagtgatccaactgcgccctgggtccttcttgatcccaacattcttcatctcctttctcacatccgttgcttctgcctacctggggcaattaaaaacttacattaaatctgaagcacaatttatgagtgagtgcagcttgttt

SEQ ID NO: 9696 - DNA, 460 bp, Zea Mays
gcagtctcgagcagtcggtagaagatggctaggagacgacctagacagggagttggggcgaagagggttctgcgccgtttatcgggggctcggatggcgagctctgcggtgggggaacagggcgccgccataatggccaggccattgctgtggtccgtgttttgaggaagaaggtccctgaaccgcgcatttcgcgatcaacgactgtgattagaagttggggatcgagtagtgctagccgttgatctcctcccagacagctaggattaaataacacatagccctttcgcgcgattgattttggccgttgatcttgatcctacggctcagatctatccccagcccagcctccacttgatctattctgggccatgcagatctaatcgaatggtccagccaacttcataccccttcgcgggtacatttttctaaagagaccctatactttactagaatcaac

SEQ ID NO: 9697 - DNA, 694 bp, Zea Mays
gattggggaaaaaactagagaaaaaagtcggtaagcgtaaaccgacataggtgaatcaccctctacttatatatgatggtaaagaaggcaaggcaatgactcatggtcgggcctaccatgaccccggtacagtcgaacctcgctgctccaactcccggtcacctcgagacccgagcagagatcgaaccgctccacaacagcgcccgcctcgaacagaacgccagggcaggtcacaccgcttggaaatcacgtctgcaccaagtaggacattactcgtcccgtcagctaccagtgccaagcatcatgatctccccctcttttttcacgccacaacagtcgttgtggtcgccttgaactagctaggtaaactgatatgtccaaaccccccacgtagagtgagggacgattcgagcaagctcctagcgagccacaagccaagtatgccagcacaaggccacttgtttggaactgtgtctaaggttgtacctcacactcctctgcgctaacgcagctgatgaggtggacaatgggccccctttggtcagacatccaaccatagggctaatacatgaccgagtaaggaaggactccataagatgccctcaacgggccaagcccccaagcgggaccactcactagaccagaccctaccagagggcggttggatctcacatggataactcgcttgtagctt

SEQ ID NO: 9698 - DNA, 409 bp, Zea Mays
gccatatggtgcctttgtttagtttaggtctatgagcattagggcaagcaagagggttttgaggcccaagcctatcaaaccgtctatcggtgatttggaggcccaaacaatcaaacccagctagagaagcgtatctattatatctcctccatgttcttgacacatgtcaccatccatctttgattgttcggtcaccaagtgcttgtgctattgcttgacttggtcaaccatcgtattgacatggtaaatatggtccatggaacctccacatgtgcacttgctctatgcccccaagtgttagccactcatggttcatccttcaacactagtcccttgatccaagcctccacatacatctttcactgcttccaatccattgacacaaacttgcttaaccttctcaattccc

SEQ ID NO: 9699 - DNA, 388 bp, Zea Mays
ttgaagtgaggagtggtgcactgggcgtgtaacaagagggcggaatagggagggcactcaatttatagacgtcggctacaggtgctctgaattttggacggagatgagctaacggtggtgaagaggtgagtcaccggagctcgtttaccatggcgctcaatagggtaagaactcagggcaataactggccatccaccacgacttactacgacgtggtacgatagtgtatggcgtggcacgatcggagtaaacgacggtcatgatggcggtggtcacgtgggcacgtcgcggggcaagtgggtacgatgagaccagctgaatccactccccctcagatcttttcatcctcgcggtaacatctcacccgaatcgagcacgaatcgatgcg

SEQ ID NO: 9700 - DNA, 482 bp, Zea Mays
atttagggttggtctagttcaccacgcatctatcagaccactccaccactccattagtggctggcggtgcatcgcacatggttcctctactcaacgcctcgactgctctcaatcttgaacttcaacacggcagtgtggaaggcgcacacaaggccgtgaggggaagcacgagtttcatgagttgtggcatccaatgcggctacgctggaggcacatggggctatgggggtattgggactggaagcagtggacccaagcactcggggacaatgtgataggtggcaagtgggtagcacgacaaaacggatggctgggagcacaaatgtcttgtaagcgtgtcccatcctgctataggacaagagtatttatagggtaacagaggaactgaggcctaaaataccgtagtgcactcgattacctactacatgtcccgaatatactgtccaacagggtaattgtggatcaccttggcactattcttt

SEQ ID NO: 9701 - DNA, 395 bp, Zea Mays
atcagattcagtgaacctatcgccgccggtgggcgtgcgccgcgatcctcgccggtgttgcgattcgtgcgctctgggtgcggatattggccggtggtgaaaagatcttgaccgcggatgaggccgtgagctggccatcgtacccacttgccttgcagccggtccagatgacctcgccggagtctgccgcttgccgcccggatgccacagactgagaagcgttactacatcacagtaaaccgccttaggtagtctgtccatcacctgagacattgccccggtgaaagccatgatagttcgcggcggtgactcaccccctctcttcggtcgccagctttcctctcccaaattcggagtcaccgcttcaagcctctataaatttatgccctggcctg

SEQ ID NO: 9702 - DNA, 582 bp, Zea Mays
gggcggcgtcgttgatcgcgactcgatggttcatgtagcaacacgacagaaaggaatgcatacttatacaggttcgggccacaagagctgcataataccctacttcttgtgatgtttctagtattgaaatgaggtttacaagttgtaaaccatgagtgtggtgggctagatcagatgaaaatggtgtgtgggggggtacttctcggccttatatacacgaccagagagagttatccccgcataagtgatagacattatccactcgctcatctccccgtttgtagcgaactgtctctctacgtatctggaatcatccttgttcatccgtccgagttaccgctaaggatttaacctatcgggtgatcgcaactgctctgcccgatatgcccgtgctcccgtagcgcttaactcgggcgttggtcttcgccggcttagattgggcttgcttagcttggtcgcactcaactggcccatcccgtaggatgactcaggaggagacctgccaggcggctcagggtgcgttttagtgtgcgtgaggacccaggggatatccatcccacacaaactttcgaggttcaagtc

SEQ ID NO: 9703 - DNA, 765 bp, Zea Mays
gaggaggcgggtgtctagggggcatgttgacaggttcagcatgggaagtcttatttggagatgctcactgttggttgtcttcgtgtcataccaaaccttgagggacttttagctaaccactgctaatctttgttaaatatttgtatttatttttacccaaaccttgctaaggtgtttattgcattttgtttgcagaaatatctccttgagaagcgtgctgttgttgatgttgataatggcaagttattaaatgaagatagtgatatcagatcggtaagttcaaaccccattgatgcacttattctttacatttatctgccaaaaaaacttagtttggaggttgtgctccgaggaaaattatttcaaaaattctagctgtagcatatacaagaggttatatcagtttttgttggataagtgcaggtccttcagtttttaatggatgatgtgtctgacttcttgtcaacacatttttctagttcaatggagagaagcaagactgatgagaaaggctgtgcttctacacttaaagctttcattgattatatatctttgagggaaactgaaaattttcgatcccgaaaggaggaaaataagaattctatcacattaacaactattcatcaggtctgttctcttgaattcaattaatattgttggctatgccactatgtaatcctttgataataggaaacctgatgataattctttttcacttgcagtcaaaaggtttggagtgggatgttgtgtttattgtgcaggtat

SEQ ID NO: 9704 - DNA, 533 bp, Zea Mays
ggggttacaagcgggcaagagagggagaagctcacaagtctcttatgcgtagtaagttctaaggactacgaatctcgtgtttgctaccaacctaagccttgggcgtcgtggtagtgtgctctttggctttgcctctattgtcctctatctttcatctaggtcgaccctcccccttttataggtggagggggccggttataggtagcttcttatggaaggagtaactgtgttgtggcccacgatagaatgaagcattctaccccagttgaaacgtgtctgtcggtattcgccttggtcgtctgtgctccatggccaagctcattaagtcctactatgtgtgggcggcgaggggttccaacatcatcattactcttcctatgtcacgccaacccgtggacttcgtagcctaagtctcggtgctactcgtcgtgttgcgggcctgtagactgccaggacactcaggcctaagtttggtaggctatgagtgggctataggcctatggcctcataagtcatgagtggaaaagaggact

SEQ ID NO: 9705 - DNA, 371 bp, Zea Mays
ggaataccgaacacaatttcatgtgttccgggtaattgagcgtggccaagcaaagagggtggagccgatgagtatcacgagcgtatatgggtgctgaaacacgattaagaagagcaggagcagacctgggagtggctggccacggagcgcagtggattttcgctcgctggtgactgaaaaggggaaaacggcgccgtgacgggtcctagcggaattaggaggtgaggttggggctacacggtcgcaaaggactatggtttcaccatgcactaccaattttgggagaggtggagaggattccgtgaatttgggcttcaaccgagctcactggtgaagatgtgaatacctcgccgtgggtggcggggctattt

SEQ ID NO: 9706 - DNA, 585 bp, Zea Mays
tcctccaataaagtgctcttgcttcctctcatcttcagcaacttcatccggtgcatatctggagagctgaatgaacttatcgcggtactcgcttactgacatgcttccctgcttcagcgacaaaaaatccttcttcttaatcttcatcagtccagcgagaatatggtagtttctgaactgagtagaaaattccgcccatgtgatagtatcagcagcatcgtgggcagcagtgtatgaatcccaccaatcagcagtaggacccgtcagacgaccagaagcatatataaccttatcctggtcagagcactgagcaatattcagcatcttctgtacagacttcagccaatcatccgcgtctagtgggtcaggagagttagcaaatgtcggtgccttatggctcatgaactcccagtgcttgtcccggggtggaactggtggtaggggtggaggcagtggtgcttgctgttgttgctattgctgttgcgcccttctctcctggcgtatctcctctcgctcttagcgcatctcctctcactcttggcgcatctcctggcgttcctgctgcatctgcgcgtgcatatccgc

SEQ ID NO: 9707 - DNA, 583 bp, Zea Mays
ttcagggcggcgcagtcgaccgaattgggggaagaaggaaattctccggctatggtggctaattgaaggcgggaatgggtgctctagcttcgtgataacatggcgcaacagaccaggccatcaatttataggagcgctaagcggtggtgtccaattttgaaaggggagaccggcggccaagaggagaggtgagtcaccggcgtaaactatcgtggcgctccccggggtaatgcctccagtgacgaactgacctcctacggataactactacgacgtggtagatcttctaagaacgtggcgcggctacaatcgccgtcgaactccgacgaggacaccactgtccactgcgcggcaagtgtcacggtgaacagtccggcgataagtctctctcccttcccgagttgagatctttccttgcccacggttatccgcaagtcacggcgcatgaatcacgaagatcgacgttaatcacggcagagggtcaccggcggtgagatgcgctgtatctgagatatttctgctactgcaccatgggaaactctgtttaaagcgcatgacagagcacaatcaaggcagattttct

SEQ ID NO: 9708 - DNA, 374 bp, Zea Mays
ttttaaagttcagtgcagttagtagccaaaagggatgtgccaacagcccaacacttgggggatatcattatggtcgacaacttcttcagtacatgttagtaaaattttagtgtattgttttaatgaaggcgaacttggtatgggcgctcacatgatggttaatcttaatacacatttaacatcagataaccttaaccttctgaatcttgtagagtagttagcaatcatgggactggctaggcccaacatgtgagccaagcagcatggatgtcccatccaagtcatgcagcaacagcttgatcttaatctgctaggttagttgctttcttagtgattagttgcattaggaatatctgttagtcgtgactcgtgag

SEQ ID NO: 9709 - DNA, 347 bp, Zea Mays
gcagggaatagagcgaactaacgtacggatgaacgagaggccacagaataaaatagaccgagacattttatttggttgttgcttgggaattaaattctcgcgcataagtagaaataaaatgaatcgagatcaatcggcttcggattcgttatcgaattaaagcgaatcggattaataaaaatcattgctgatgctgattttcgaatttagattggacatagagattttaagccgagttggataaaattaaataggtgccaacacgtggagtatcccgtttgagagcacgggctcggattaatttttggacacagatcgaacatcgagaaattggattcggacacagc

SEQ ID NO: 9710 - DNA, 916 bp, Zea Mays
cgcgcacggtggcgccgcgccctggttgcggcggatcctcgctggcgaacgaccgcgatggctgccccgtgtttcccccaaccctacaaccggtgcaaaatggtgtgcacggcaaagcgaagctatccaggggcttaccggagacatgggtgaggttaggggagccgaccacagtccgcagcggcccggcgcggatcttcctcgatggcgacaaattcgtgggctcaccgttgtcgattccgcccgaagagcctggggttacctacaacaagttgatccgaaacgtcccggaccgaatggatggctcaacagcggctaccgcgtggtactgccaagacgcagggtcggcggcaatggatgaagtcgacgagcaatcgcggtgatcctagtggataatcgccaccggagaggccacgcatacaaccgcggggatcaagcgaagccccaaggtccacatgccaaggccgtagggtcgccctagggttgaatcgaccgaagcggtcgtttctgaccatggcgatggtctcctcacgtgcaccggggaagaggagctcccccgaagctggccctgggttcgattcggatggaggagcagggagggcggcgttgggttttatacccgcatgttcccccaaccgaatgcgccgaggtttgggagtccgcgtggagatcatgccatggttacggagctcggagttcacggcgcgctgagcggaggttgttgtgagaagggagataagtctgacgagtggggcccgcaaagcagtcactaggcacgcacgcaggattgagctgagacactggcgagcgcggtccgccagtcatcggtcatcgcggtgtgcagacgcagcccacagacatggcgaccccacgcaccagcgccaggttgcgcagtggccgatgggagggctagtcg

SEQ ID NO: 9711 - DNA, 764 bp, Zea Mays
gacggtgttatgcgtgcaagctccgaattctcagctattcccgtgggtgatgcctaccttgatgtgttaaagcttgattccttcctggcctttccagatgaggtgacaaacgcctcgtctactggggcgggggtgcaaatttcttgaacctccaggcctcgaccccttggctgatgggttctgcgacctctgccttcctaccctctaagaccatggtatgcgagccatcaaggacattcggtggagaagactcatccccaccgagcgcataagcggcccccaatgttgtgccctcgggagccctcttccctgccttcgatatgggtggtgggcccaatgttctatcatgaggagacgggggtgagtcaccaaccaggaaacaaaggtttgacattacgcgcatgctgagctgtggtccttgccgacctttgcttctcgcccttctatcgtcttgtcgtctgacgtctccctcccccctttggcaatgctcctcgcctctccgcccctttgtcacacgtaaggaaggtcatatttaagaagcgaaaaatggtgtctgccctcggtggggatggcagggtgtcagtgctaccggaattccttcagtcgtcggcccctgtcaaggtcgccatggtcaacactcctggttcgtttctcccgctatctttggcaattcttgtttggtctagatcatgagggctaagggtcattcctcctctgtagcgaacttagaagtctccactgcccctgcctcaagtcactcgctt

SEQ ID NO: 9712 - DNA, 424 bp, Zea Mays
atcggcctaggaggacgccatggcggcggggtctaggaagggaatgggagggttgatctgcgcagtgggggctgtgaagggagcgggatgcacggcgatggcgaagtgcgacgcggcggtagtctcgaaaggaggggggcgttgcggctcaagcgcggctgtgacgggagacggacgggggtgaaggtcgcagaggtcaccgcttccgccctcgtcgcagaggtcaccgcttccgccctcgtcggcaacgcggatcgtggcatcaccgccgcgggcgtccactcgcctctgggcatgggcggcggcggttggacgagggtcgagcgggggaggaggggttgcgatggacgagcgggggaggaggggattcagcctcgggagaggacggtcgagcgggcagtggacctcgaatccagcggcgggg

SEQ ID NO: 9713 - DNA, 635 bp, Zea Mays
cacgagcccacgacgaggttagggattcggtggcatggtcaccagacagaggaatggatgcacacacttctgaagcagatcacgctaggtggttaggagagaactcaaactggcaactcagcttcaacacacactccgtactctaaacagagcttgaggcagagagaaaggtccactgaaacaaatctgcagcagctagcttaaaaggtagggcaggggaaaaaggtcaccgagctcactatggctaaatgaagaaggatcaccaagggtgccaggacctcaagcactaggacacctgtccacaaacacaccccgcgccagcccacaattccatgaatctgctttggtttatttagtcaaggcaagtagataaggatgccttgtaataatgcacacaaaagtctaaacttgatatttctctaccttcaactatgcaccacgaccttatctccatccctacacacaagtacaaccagcaagggcacaaagatcttcttcagttttctcaactcagcactgcactaactgaactagccactgctatcccagttgcagacctccccgttgagaccctatcatttcacaaatccctatggcaacaacccaatcctccttaacaagatttactctccaac

SEQ ID NO: 9714 - DNA, 646 bp, Zea Mays
aagtgcctctgatgtatcgtaggatgcgtttgagggcagccaagtgtggttcccgtggatcatgcatgtggagacaaacctgttgaatagcataagcaatgtctgaacgggtgaatgtaaggtactaaagagctcctgcaaggctgcggtaatcaatgggatccgaaactggagtgccatcagaggggagcttggggttcacatcgactagtgtagtcatggcttgcaatcactcataccagctcgcccaagaatctcaatcatgtactgatgctaggaaagatagatgcctgaggtagagtgttgaacatgcatgccgaggaaatggtgaagtctgccaacatccttcataggaaattcttgctagagggcattgatgatacgtcgtagtgttggcagggaggaggcaatgagcacaatatcatccacatacagaagaagataggccatgtctacacccttgtgacagacaaacagggacgtatctgttttggcctcaatgaaatcgagttgcagaaggtgagaagtgaatctgttgtaccatgcacggggggcttgcttgagtccataaagagagcggttgaggcggcatacataatctggatgagtggagtcttcgaaactagtggagtgagcacagatgaca

SEQ ID NO: 9715 - DNA, 500 bp, Zea Mays
gctcgcttgaggctagccttcaccctccagataccgcacataaaaccaattctctttgcacaaggggctaactccataaccttctccttagtctttccggtctttgtggtaaaagtgcaactgccaaatggatcaacaccaccgctcgaatacctcttttgccaatgcagacaatagtgttttgcgaagacctcagcagatgggcctccgccaaacgtcgtggtcacccagacaaatttgctcagagccaccacatcatttggagtaaactgatgaataaaccttaaatttctcgagcacatcaagcaaaagttcatgacacgataaccgaagaccagcgagaaacaacccctcgaaaaccaatacttcgttattcagccttgacctcatctctgctccagcagcgcccctgtaaccaacaataaaataacctaggctctccatctccctaaccctacgtgacaaagtcttcgatcgacctaggtcataattttctcagc

SEQ ID NO: 9716 - DNA, 500 bp, Zea Mays
cccctgagtaccctcaaatgtttgttgattggggttcggttggcatgaattcaaggggcaattagtcacagtggtcggggtatgctatgcctaacatgaacttcccaggttttgatgggtcaaatcccaagttatggaaacatagatgtgaaatctactttgattactattttgtacctgttcaacgttgggttaggatggttgtcatgcattttgaggggtctgctcagtattgggtccaagctatggaatctcgggttagggaaatgaactgggagtcattatgtgctgctttaaacactaggtttggtagggatcaacacaataccctgattagacaattttatcatatacgccaaaccaattcagttgttgattatgtagagcagtttgatcagttgatgcatcagttgttagcacatgaaaaccagctgacctcggctatgattaccactagatttatagatgggctaagggatgatgtcaaaagtgctataatt

SEQ ID NO: 9717 - DNA, 657 bp, Zea Mays
agagccttgcagaagcaacaatactgcttacaataaacaaaggaactaatgttgtctctaccagcaaaacaatgcatacaaatcagtctttttatttttgcttctgcactacaatgaaacacacaatgtacagaacagaagattgggagactgtagtactgcacaatgcatagaagatttatgatcataatccatgagaactagtttcagttaaataaagaatgcggcatcaactaacatgagaacagaggagtaaagcgaagggtggggcgctgtcagggggagcatgtgtgcgtccaacttttgggcagagagcatgtgcgcatctagcttttgggcagcaggaataaaggatcagttcatgtgtgcgtctagcttttgggcagcagcagccatgtcgccggagtgagcagacttgacttggaaataaggatcagttcatccatgcgaggagcaggctcgctcgaccatggcgccaactacaaacaacaaaagctttgtggggaaatatatgtagccaacagccatgcgaggagcaggctcgcagctcgctcgaccatggtgcggctggagctagacccgtccagccagatttgcacagatttggaagaggagaagagaacgaaggaaaggacgaactcacaggagaaaagttcg

SEQ ID NO: 9718 - DNA, 644 bp, Zea Mays
cagccatgcatgtacccaagggcgagggctagctgtttgttgaataggaaatgacatgagataataggatggatgagagaggagtctccccttctcattgcctctttattacgtcttagcttagacacccggacattgacttagatgcctcgggagaagcagcagtgggatttaagaccgttcctccctttaattagctgtacagaccgcagagagacaaaggtacacaagctaactagatagaggtcaagagcatgtcatccaagaagaagagggccgccatagatctctccctggaggcggagaggagtggtgaaggccacagcggcggcggaggcaagggcgatcggcaccggggcaaggataatggtgaggtggacaagaaagaagagcagttcaaagagcaaagagaggcaccggaagagggaactggagaggagaaggtggtagttgaagtggttgtagaccaaggaagggacgacaccagggagatcaaatataggactcaacaagaagaggagatggggaacgacaagcaaccggcagaggacgcgcacggtgacgatgagagcgatggcggcgaaacccgtgcccaagacaagcacgtggtagaggccgccggcaacggtgacggggacgatagc

SEQ ID NO: 9719 - DNA, 344 bp, Zea Mays
gaaaaaggttcaacagcaacgggtcgaaactaacgggctcggcccaccaacctagggataatggcccccgctcaggccgcccgtgcccgcgctgcgtactttgcacggagaccgctgccgattttggtaactggaaaataggtctaagcactatttcccccactcactgacagttgcacataggccctcggcttcccttctattcacaaactctggtccacggtccaacctcgacgagcgtcggccatccaccgcctagacccatcgacgacgaccatctccgatggaaccaagcctaccaatgtgatccccgagacttacctcctatttcccctaggttaatc

SEQ ID NO: 9720 - DNA, 471 bp, Zea Mays
agactacccacgtagcaccatatacggctggacaatccggatataccttcggaccatttggccaggtcgcggaccatccgacctcttacgccggaccgtccggatatgcatacgcagagccgagagctgtgcaatacgcacagttcccacattcatcgcagcaacatcatggtgccccaccggtaacacattataatcatgccataccacctcatggacatagggctgaatactgttcggtcacaagagagcctgagaggtatagggcaggagctggtgacattaataggacacctagcacacacctcaaacatccctgggaggaaatccgacagagtgatgtcaggcaacctgagatttccacccacaaactcaatgaatggtcgctagacatggcggagaggatcagagacgaggtagccgggatgttcagggacaaactcggtgttagtgtgccaggtacagggcaat

SEQ ID NO: 9721 - DNA, 528 bp, Zea Mays
tttgcatgagactacacacagaataagtaggggagtatggcaaactcgggtgggcaatccttaccgtgaatcgtcgagaggtgtcaatgatctgcggtaggaagcagatctatggcggcggcaaggttcggcaagaaatttcgaccgccccgaggcacgatcccctaaccgcgcctgcaagcagcttcaccaagtccctgcgacgctacacaatctggtttcgatgccctgacgacactgatagcaggtcgacgacgcggcggcccggttcccacggtggctggttcctccctgtttgcttggccagcgaggttatgaacaaggcgccgatgatgcggatccacgtaacgggctcgattttatagtgctacgggcgaagtccgaccagtggtgtccgaccggtgaggttctgcggattaagcgcgcattcacggttttctgttgcggcattaccgcaaacacgagtggtgcgcgatggtgttccagcctaatgcgagggaaggggcaaacctgtcgacgcggccccac

SEQ ID NO: 9722 - DNA, 573 bp, Zea Mays
taaaattataaggtcctttctgcaaactacgcacaccaaaggggtatgaagcgttgacgaccgtccgatcaagtgcggatggcccggattagattcgtcccaccgcgaaccggtacacaaccacagccctcagatttggatctggcgacatagattttaaatactaagatctaactacaaccactggatatgagatctatggtcaggattgattgcgcgaaggggtaagcagtgatctaatcttaaccgctaatcctgagatcgacagcttctaacgcgtcgttccccaacacctgctcttcccagcgaacagacacggtggcgttctcgcatgcggtggcgcaatggccggacacagcgaatcaacgacttaccaacctaaacagagcaaaactacatcgaggaaaaggggagagggaggcgaactcgccagagcggtcatactagcctttcgtcgcaaggacaggtccgacgacgcgacggcgtggctccctggtccagttcaactctgacgagcaattcaatgctcctaggacgaagacaagcccgggcgacccttgcgctggcttcgag

SEQ ID NO: 9723 - DNA, 475 bp, Zea Mays
gtagagtcaagatagcaaaccgttggagggagagagggggctgtcatacactgagaagagggagagggtgaaagattgagtgaaacgttggatcgagccccaatggcggtagtagagtcaagatagcaaaccgttggagggagagaggggctgtcatacactgagaagagggagagggtgaaggattgagtgaaacgttggattgagccccaatggcggtagtagagtcaagatagcaaaccgttggagggagagagggggctgtcatacactgagaagagggagagggtgaaggattgagtgaaacgttggattgagccccaatggcggtagtagagatagcaaaggaggggaatcatgttttaatttgtattaacatatagctcgtgctaacgtcatgctcacgaggactgcaaataaagggatggcaacaatagtggtgcgaagaaagggggcgacaggtcacagggaaggg

SEQ ID NO: 9724 - DNA, 312 bp, Zea Mays
atcagtcctcaatgaccggttcaaaggataaccctttccaatgaacatgatcagctttgacgataagaaagtcctggttcagcctagtgcgactgataagggcaaaggcaaagagatcatcatcaatgacccacgggaggccaacgaaatcaccaaaatttcttcgaggaaagtggttgcagagaagaccctagatggaggggagacattgaagatcactatcctggcctccaatgctgggggacaggtgcagacagacagccaagagcagcaccctattctgtgcaccgtggacggtctggcacgcaggca

SEQ ID NO: 9725 - DNA, 306 bp, Zea Mays
attatacctcagaatttaccaaaaataatttagtccagcccatctcaagcagtccatgggatacggaccagaggccgaccagcccactcgcccagtccaggcctagccgccagccccattctgttggcgtgtgtaaagtcgcacccagacttctataatgcagtggttggtgtgctcctttctaattcgccgacgtggtaccaaaatgctttgcctcccattgtgctgctactactagcactagaagacgaagttcgctgctatgccatcgactggccaagcctatttaaatgggtcgaattctac

SEQ ID NO: 9726 - DNA, 761 bp, Zea Mays
gccggaatgtggacctaggagagtttaggccctaacaggtggacctaggagagtttacaatatggaacggggaaacaccagatagagctgacaatgctagatcttcttcattttgtatcccttctttgtcgtcgtgcaggctcttgacatcctatcctcctgttttgtctaatcggagtatgcatgcagcctttgcggtaggttgtggcatagcctgatacgttgtcatgcataggtgtgggcggtgtcatctcgtctcctccgcatgtctcttcatgcctcggtaatgcacgaagaacagtgaagtcataatgaagggcatccaaaacggtgcaccgggtcaatgcccttacctcggtaacgtgcgggtaacattaaaatctgcacatcacaggcctagcgtgtcgtgtgcatttaatgctagggatacgctacccaccaacagcacgagcaattatgcatcccatctgcactcaatgctgatgggccctatgttagcgacttttgtcaggcatcgtcccttacgctaggtgcatctggccacgtgttggcaccgaaccccaccctggacagggatcatgcccaagaataagtgattgcacgacattctcaggccttccctgattgtgggctcagaccagattcgagggggtctaggtcttggccacacttttctagatacgtggcgacattcactagggttttgagctccctccgaaccccttttgcgagggatccgatgggcccacaaggaggtccga

SEQ ID NO: 9727 - DNA, 523 bp, Zea Mays
gctcctgtcaccaaaacaggcatccaccgccatgggagaagacgtagagctccgtcaccctgcgcagagaaaaaaagaaggcgggtccgccgcgggggagcatggtggtggacctggagatgtgcggcgagcggcgtcacgggtgtgacacaaaaggccctgcaaaatccccccgggagttaggcggtccaaagtgccgctttcacgcgcaacgcaatcgagccagagcgactcctcctaatccaatcccaaatggtcaaagtgagcgtgaaaacgaaacgttttctatctctaaaattcaaattgggatccaggcctcagaaataagccgtctttctgaacacacatggaaggcacatagcaagaactgaagaacatggggcaaaatagctacaaaaaatcttgagatttattgcaccgaccactaccttgcacactttcttcaggctaatggtgatcgagcccttccttcggctcctcttctcccccgccgccgcagctgcgggtggctgcttggccgcaa

SEQ ID NO: 9728 - DNA, 554 bp, Zea Mays
gataaatattcctaaggcacagaactacatccgtatggacggcgggttgatttctttgtttcacggggactctttagcaaaattgacctgcgaaggggtatgggcaaatactggtcgtcggattagaactaagggcacagattagatccagcgcccaccaatgacgcgagttaatctaggccgtccgatcgggcgccaacgctctagattaaatctcatcaaagtggtatactagttctgatctggctcgcccatagcgagatcaacggcccaaaataatccatcgaaggaggcactctggtgatctaatctaaactttgagcctcgcatccaacggccacgaagcggtcttctccctcccaagcgctcgcacggcggcgcctgcacagcccacggtggtgctccctggcgagccaccaacccagcacagacgcaatcctacgcatcgcatgacaggtaaaaacccaaattaggggttcggcggagacatgggaaaggttattaccttcaatggctatgtggagaacccggaccacggcaaaggggcggcttgg

SEQ ID NO: 9729 - DNA, 512 bp, Zea Mays
ctaagatctaatcacagccgtagacgctcaatctcacggtgcatgtatcatctcttttccccgaccgcgacggcggcgatgactgaggcaccacaacaacgccatggtcggtctgtggccgaacacaagcactaggtcaccagcacgtgactaaccgaaaaaattatggagagtagggttcggcgagtcgtctcaaggggtcatactgggatttgatgcggtgacgaggccggtcgacagtgaaccacggatccgggatcgagcccatctctagcgagaaattcgcccaaccccctcggcttccccgaccttaatctgccacggtcacgatctgcataaccatgcgagttgccaagacctcctgccgacctcggaactgcggcggaagagtgaatctatggtggagaaggtgtgagggctgtatggtcgctggctcaacaggggtgagaaggcgaggatgcaccggtacatatgcaggggaagaccaaagccgtgactaggatctcggagca

SEQ ID NO: 9730 - DNA, 1111 bp, Zea Mays
ctcgagctggtgctcgctgatatggagtgtgggcgcatcacctgatgactcgactggcagtggaaatgaatcattcttgagctcaacacttgttgacatgtatgccaaatgtggaaggattgatgtgggaactgagatattcaaagtcaagagaaaccatattcctgtctggaataaaatgattaatggcttggcatcacatgttcttggatccgacatagtggttttgttccacaagatgaaaagtgaagatctggttcctgatggggttatgtttgttgcactcttgacagcatgcagtcactgtggcatggttgaataggctcgccaatacttcagatcaattactccagagtattctatcacgccagaggttgagcactatggtgtattggtggatatgtcattgcgagctgggttgctggatgaggcatacaagttggtaatgtcgatgaatgtagcctgatgttgtgatatggagggcattgcttagcacctgttgcatatattgccaaacagaattaggtttggtcactattgagcatgaggcatgccatggcagtgtggtttacgcccttctttcaaacaggtactcatcagcaaatagatggaatgattcagaggaagtatggaaacagaagaaacaaaaggaaattaggaagagcaaagacttgagctgggttgagttaggggggagcagccatgaatttaagctggtggtagatctcatcctgacactgaggatatatacctagtgctgcgtggattacgtaaaaagagctaaggttgaaggttatgctccattgactgatccagtaacaaaagatgtctcagaggaggaaagagaagaaaaccttaccttccatagtgacaagctagcagtggcttatatagtatcctgaagattggtccagggacagcaataatgctttccaagaatttgcagatttgcagtgattgtcatgaatggattaagatagtctcaaaggtactttgtcgtgttattattttgagggatagaattcgatttcaccagtttgaaagcggatgctgctcctgcaaggattactggtagcccttttcctgagcaatacagatgcgatccagctaa

SEQ ID NO: 9731 - DNA, 538 bp, Zea Mays
ctttcccatttgcactgctaagtcctctgaggttggatctgactagcctcttgcagtcaagggaaatcgcttcggctgccgagggggaaaacagggggcaaaagaagcggtctatgatgaatataatggaagctattgaacagaccccaccctcagcttcggtagacaaagctaccatacccgtccatgtcgaagctaccaccgcagccgaagccgagaatctctcaaccaccccgttggaaattgacagacttatatcgaacgtggttgcagagaaagatgtagccgcagtaccatctgatgaagggaaaagaattgaagaaacctcttcggaaagtatgaacttcgacattcggcacctgggtggccaacaccttttcgaagaggacatatcaaagttaaaggaatttgccatatcccgcggctaccagcccggatcaatgctcttcggtggggttgatgaagaaattgtgggatgcatccgcgaccgtgctggggctaaaattataagcactctgtcaaagtgcattggattccc

SEQ ID NO: 9732 - DNA, 307 bp, Zea Mays
tacaatagtcgatcgttttgtacgggcgacatgtgcggtggattcatctgaggttccctgcggaatggcttgagcagcccacatgtaacgtgttgtggagacaagcaccctctagaagctaaaggtgataggttacccactcaacacgctccagcacctggaaggggctgacatagcgtggcacgagcttgcccttgcccttcatgaagtgtttccacttcttgctattcttctagaccatcatcacatgattagagttctttctattgctcttctcagctgtcttaaacatcctatgcaactcgtg

SEQ ID NO: 9733 - DNA, 630 bp, Zea Mays
ctttgcacatctttataaccttattcctcgtaacctgagtcaaagtatccaaaatcttgatcgggtactccgtataagtcaaatctccttgaacacggagttcttccattggtaattgttcctcagggacacgaagacacttcttaagtcaagacacatgaaacacattatacacatcagatagatcatcaggtagctcgagttgataggccatctctccaactcgcctaaagaactcaaaatggtccaatatagtgaggggacaactttcctttgactttaaaccttctcataccccggagtggtgacatcttgaggtgcacataatctccttcctcaaattccagtggtcttcttctgttatcagcgtagctcttttgcctggtctgagctaccctcaaattctctcgaattatacgaacttgttcttctgcctcttgaaaaagttcaggtctaaagatttgttttcctctagtctgatccaatatagaggagtcctgcatttcctgccatatagagcctcgaacggtgacatcttcagactggcctgttatctattatatgagaactcagcataaggtagactcttgtcccaactactaccatgctgaagggcacaagctctcaaca

SEQ ID NO: 9734 - DNA, 281 bp, Zea Mays
ttttcttactaaattctgtagctttactaatacacttcatctttagtaaaggttcctttttatgttttgatcatttgcccactcttccccctttaatcccatggttagggtttaagggctttaagaaggatttagagttttagaatcttgttggtgggtgaacattatatgaaggatagggttttctctcttgttatggtaaattcttatctcacccatgcctctaaactttgagttccttcactttcctttttagcataaagtttgagtaggacacaaag

SEQ ID NO: 9735 - DNA, 359 bp, Zea Mays
atcaattctgcatacagccaccgggtgctcctgcgtttgtcggaaatagcgtatgtttactgtgttcttgtttgtttttatttttattcttcaaaatcagcaccgcacacttttgttttttccccccttctatttagtgagaaaaacaaatggatgtaacgacaatgctatatagcttttttcttcttctaactaatgttcatttcatgcaaacattctgaatagccagagcaactatttcatcggaagtacttgaacatttccagcgaggctctagctggtactcgggcaagagggaagacaagggcagatgactttcaaatcggtcaggatttgcttctaaggttcctttccctcct

SEQ ID NO: 9736 - DNA, 467 bp, Zea Mays
gcactgttgaaatggatgaacttgcacgatctagtgctggggattgatccggggtggatagcttcgaacgtggcatgatttcgcgaacccggtcgaccgtggccggagatagtcaccggcggccaccgtgactcagccagttttgctgcggtgtcatccatgccccgattctacctcactgtatctcttctttacgtgtaagcttgcgctaacaaggttatccgtggccgtgaagtgatcgccggaccgccgcggctataaatagccttgtggtccacgacgaggtatgaacatcacacacattgagttgaatcgaagccaaattcgcgctgcctatgccccgtcctctcaaattgattgtgcacggtaaaactagagtcccttgcggccgtatagccccaagctccaccctcaatttcacccgagcacgccacgacgccgttttcccccaaatcggtcagtcgcgc

SEQ ID NO: 9737 - DNA, 605 bp, Zea Mays
aaattaagtggcaccagtctgtctcatggaaacggtccatttcttccgtcaataacacctcatggttagatatcccccagctggaagtggggaacaacaatctattgaacaatatcaaaaagaagcatctgatagagaggtcatcatcgtttccttttctcaatcggtcctgaagagatgcaacaacgaactcatccttagacaatccaagttcagccctcaagttattgcccgccacttcttcatcgattcctagtggcttaccaccgcaagcattcagtaggcctagtataaggtggacagtttctttcgtaatctttagttccttgccttgaccggggcgaatagtcatatccttgtggtccaacttatccatcaatcaacaaagatgagatcggctacccagtgcatcaagggtcatgtcaagaatataggaaaatccttttctagcaacggcttgtcgttgcctctcattcaatatcttaatggttataataacatcctgagggttgcatctaacattgagtttctgaaaaaatgtatgttaaatggtatgaaaacaatgaaataaatgtggcatgagccataaaattagcactcataat

SEQ ID NO: 9738 - DNA, 515 bp, Zea Mays
taaaccccatcggccaggatcgagggtcgacaggagttattaagtccccgcgtgagcggatgcgtgtgtcggagatattttggcgggcccacgctaatccccgtcggctaggctccacggcctatgggagttatttttatcccgtcggtgttttttgaggccgacgacaattattttatcttcgccggttatcatctgagccaacgagaattaacttaacttccatcgagtcttttatgggcgacgttatttaatttatcgcgtcggctttttaaaaagccgacgggagtcatcatcccgattcctgttgtggggggacgacagttgaaccagtgatttatatagtggagatttgtcagcatgcataccgtgcatatctgtcatcaacaaaactcatgtattatctctatccatcgatcatacatatatggcgtcataattccaaatccatgcatcttgcgactttgtttctcgatgggttgggtcaggaagcaccatgcatgcaccatcaccag

SEQ ID NO: 9739 - DNA, 664 bp, Zea Mays
gcggtgaaggttgccagcgatgtttctggggcgaatcggagcccagcaccttaggatttctcgccgtcgacttgcggtccgccacataccacacctcgccgtgggcagagctccgtgctccatcaatcaccatagaagttagccggactaagtcaccctcgtgatctccctctgaatcaccacgcgcgggaagtaatgggatcctgggtgttaggccgcgtttgcgccggcgatgcaccgccgcattagctctggcgccgccgtgcttagctgagggaattgggggagaagggtgagcgttgatctgttgatgaagggtggtgattgcaagttagagagaggcactgagagccatgagttggccgatgaacgatccagattagagtgtcataccagtttagctgggattgatccggaccctcgatctttcatcggacgggtgcggttggatcgcgcgttaatgcaaccccgtccatggatctcggatcctatggacccgatggcataccgtttcattgggtggctggtagaatcagggtcgttggtatctaatccaatggatctcgtttgactataccccttcagcccgtacattttacaaaagagaccctctgctttaaccaaatcaacccgccgtccgtagggttgttcgcctgagtctagg

SEQ ID NO: 9740 - DNA, 389 bp, Zea Mays
accaaacaaataatatataaaatagtacgatgttcgtgcgtttctgtggctgtcgacggacgtgtcggtatgtgggtgtatacgttgccgcattcctgcggcgaggggatgggatctgatgcagggtgtgggccaggaagatataggtgcagcaacgtaccgacgatgaatgggcgtgctcatcattggtcgcgtcactgtaaaggaggagtaggtgacagctaacctttcttgaatttgcctcgcccagtgcttgcatgcaaggtgatcttcctgttggatgtgtcctctacagccggtcatcagagatcggattgggcttaacctaattatctatatgcttaaactagacccttgattggaaggatccacgctaatctcggttggag

SEQ ID NO: 9741 - DNA, 613 bp, Zea Mays
cagcaagatcatccttcgataagaccgaaaggccttcttcaagcttaggaaatcccatactcttagccatctcccggcaaacggatatttctttattatccgggagacagtacaggaaatcctcttcgttactaccattgaacactaaggcccccttcggatatttcagtctttgggcgtagtgtttggcctccaagatttcttcttcagataatttcttccccgaagcatgtcgaacaatgtaatcagtatccttagctaaggctttggggataggagattttgcttttttctgtcacgacttgctctgtcgtcttgccggtatctgaactttgctgacccaccttatcttcaggcacgacggtcttcggcttagtaggcgttgaaggcccagcttcagcttcgacttgatttttggcagcttcggcagttttcttggtagaagcaggagttaaggccttcgtggtatctataacaacgtctaatacgctgaccatccttctcctcttaggagttgcggcaggaattttctgcatctttggcaaatctgcctcttctggtgggctcaggatttctggcgttttcatcacttcttccacctgtgactcttcag

SEQ ID NO: 9742 - DNA, 300 bp, Zea Mays
cgtaggaacccgtcagtagttgaatctgactccgatgatgatcaagaaattcgtgaagaaactcatccgcgttctagatccaagcgtgggcgaggatccagaaatgtgatgcaaggtggtgaggcctcagggtctcatggtgctcgcggtcgaacggaccggaatccctccggtcggtctcgacccgcggccaatccacaggcatgggagccaactagcgatgatgacggaggcaaggatgatgaagttgatctcccctctgccaacacacccattttccaggggttggttcttcacagg

SEQ ID NO: 9743 - DNA, 568 bp, Zea Mays
gtcctcgaagtcacaaaaattgactttcgagggaacgccacggcgtaagagccggtgccgcaactgcgtcatatacggccactaggcaatcgactacaaacgcccaagaggggcaagaaggaggcacctccaccgctgggaaggattcgttttgcagaactaaggaggcagctgggcatcatcaaaattgaaggttgacaagattaagggggtgaatgttgaataagcagcatctagtctgtaatcgtgtcaaatattgtcagcatgtagatgcattagttagcttatttatggcttaaacatgtttgtaatagtgcatagaatcgtgggcatgcaagagattgcactctgcctgtgccatgaccgcgtctagggccatttccccgtcatcctattcctgccgtgcatgtcgcacgacgagcctcgatcctgcagctactcagcatggcggggaagcggatcagaggtcatttatatttacatgtaatgcacaaaaaaggttgcacgatttggcaacagaaaacctctctgtccagctcccagttctcgccgtggtgatcacgttccg

SEQ ID NO: 9744 - DNA, 637 bp, Zea Mays
atgtcgtacaagtcaccatgagtacggaacatgtggcagtacgccacctgccacctgattggacaggcacgccgtctgcaagatagcctagttgctgccgcctagaggggtagagagagagaatgcattaaatgccgagtagtcacatcgcctgccagcggagtggacggggcgtattaaatgctgagacgacatatctgtcaggtggcaggcatcctccacattaaataccgagatagcgtagcatgcgacgcatggcgcagcccgtggcacgtagaccctacgtcaggctccgcccgctggcttacgtcatgggcagagggccacgtggcagtattgggtctccgcctaagcagggagctgaggcatacatgatggggtctagacacgtgccagcgccggacccctgcctggtctttgaccagggctttaagcactttccgtccttgtgcactgggaccccaccgtgagcagcccagaccccttgcgaaggggtctggttcccaccttggggggggccagtacgcatacgtgggggtctcagacctctctaggagtcctgtctgcaaacttagtcggactcccatgggggtccggacttactgccgatgcccaggagcattccatcatgatggac

SEQ ID NO: 9745 - DNA, 500 bp, Zea Mays
gtccgatctggcgccaacggttgggatttaaaacgtgaaggggtacattgagctctaatctcacacgtccgctaccagatcaacggtcaatgcagtcttctcccaccaccggtcggtagggcggtggcgcttgcatgcccacggcggcgttctcgccagcgacagccaaaatggctagctggcgacctatcccccacccgagacgacccatacaacgtgtgtacaatggcgagcatagtgaggtgacttacagagcgcccgaaacaatgacgggagcaggccacggtgaggtgcggcccacggcggtagagggactccggtgagaaatcaccggtgccccggttgtccaacgaggtccggagctccatgcgcatgttctagggactcaggcgcagcgcggacgttgtcgttgttcaccgatgacaaggcattttctacctcagaagctcgattatggtggctcgagaatagcggtgtgggttgagggagctacgacgtcc

SEQ ID NO: 9746 - DNA, 753 bp, Zea Mays
ctcttataatggattctaataggcacttaaaaatttaagagaaccgttttcgaatggggaagcaaatggaccatggcggaaagcacggaggtcaaaattcaaatgaagtttctttttctttgaaggcggacggcggtcgcaaacacccggcggtgcggccccgtgcctctgccgtctgtgccccctaccaccctcgtgcagagcgcgtgctccggccccctcccgctagaaatgaaaacaatttcggtttttttcggtttttcgaaaaccgtttttgattttttcgactgaaaccagcagtaccggtatttttcgcagccggcatcggttatcggaattttgtttcaaaatcggtatcgaaaacaatataagatttttccgaccgttttaatcggttcccgttttcaaacgaaatttaccgaatttaggtatcggaatttttccaaaaacaaaaaattaagtaggctatttaaaagcccacactcaataatggacgctcaggcccaagtgcctaccgtttcatctggctcgagctgttatctagatgagactcttcttcgatgacatttaggtgggcgaggtgagactaaataatgttgtgcactgtacccatccggcttcgctaacagctgctgggacaagtgggtccgtaggtgggctgcatgtctgatgaatccgcttcgtgggcgactaggtggtgagctcctgatgggctgcccatctgatgatgggcgactgggcggtgagctcctg

SEQ ID NO: 9747 - DNA, 518 bp, Zea Mays
tgtccaaccctcctgctagtgatggtagtctgggtcttagagtgcgaccctctcccgaggacattgaggctctgattgcccctcttcggaatcttcccaatgatgagaagcaaactcattttgagatgccagctagcacagatgatgcatagataaatgatgtgcttagtatgctagctggggaatcttctgactcgacccatgctgagccgatggctatcacggctggacaagaacttggcaaagcagtggagactcggaagcctgaaggtgctcacccaaagtgtccccaccgagttagccgcccgactgcacctgttgaggaaaagaagaagaggcggcttcggtggctgtcatgattggaccagggtgtaggtccttctgctctggctcgtgatgaagtgccagcagaggtccttcctgaggttgatgccaagggttgtgaccgtgcaccgactgatgtctgtatatttgatgaagatgatgatgaagaagaagaagaagtcccgttgatccgt

SEQ ID NO: 9748 - DNA, 587 bp, Zea Mays
ctagtggggactcgatgagtccggcggcaatgttagccgcgatgcaggccatgcagcaggagttggccattctgaggcaagctattcctgttgcccctgcgggtgctgctcagggtgctagtggtggaggagtgcccggggacactgtccctgtgggtgttgctccaggtggcggggccgaggtgcctcttctagttagtggtctttctctgatgcagtggatgggcatgaagttggatacttttgatggcagtggtactccggtcgaggcggcggattggctaactacgtggaggataagatgaatgtctttgagattgtgtatggtgattgtgttcgctttgacacacagctgctgaagggagaagctcagatttggtggaggggcgtgcaggcagctcactcctcttcaccaggagtcccgtcctaggatgtttttatcaggcagtttgagaggaggttctacctggtcaccttcctggagaaaatgaagattgatttgtagtcctacaagcaagagaagaagtctgtcacagagtatgaagtgggcttcaacaagatggtctgttttgtccctcatgtggctt

SEQ ID NO: 9749 - DNA, 583 bp, Zea Mays
ggggttttggctaactgggaacgggttcttttactatttcattgagtcactgatggtttgcacataaaccctccatattctatttcttcgcagagggaggcccacgacgatgatgagcgcggtggagctccggcgagctagcagaccggcctaacggggcaacgactggtgttcccgagcggcggacaccaaatcagacctactccgagcatttcccctaagttaatcgcacggttggtgacctactccgccctgcccacgagaacagcgaaggctaaggacttttgcttgtgttcccgacaatgggtggcggcctaattcaattggacgggttggagagcatcaccagcatacagagacacgagaacaatgcacgaattggatggtgccttaccagaacggactggccacggtggagttgtgttttgcggtggcggagaccaatttgggggaaaaggggaattctccggctatggtgggcaattgaggggaagaacgggtgtgtcggctacatgatgacctagcgcagcagtcccggccttcaatttatagggagcttcgacggtagcgtgcaatttggccg

SEQ ID NO: 9750 - DNA, 460 bp, Zea Mays
agcgtgaccctactgatgtcgagtagctcatacctgtagaaatgaggctagggccccgcttgaaggcggatgtaataactttgtttttgtaagatacttttgggaactatcaattaaatagctcttatatgtatgatgcttgttcttgctgtgtgtggttttatcaactcctttcctgatacctagcccccctgggatgtatgctcaacgtgtcgaggctagataccagcatacctaagaaagagttggtgtcccggcccctaggaggcagcctcgactgagacttggacctgcacacagcttcagctaggaagtgttagtagcacacccatcaggacccatcgtctggtatcagccatcctttgattcatgcaacaggacctgcaggatttggcctgggaagccaagccatgtgcccggaccctctgaatcacagttccagatactaggacacccatcg

SEQ ID NO: 9751 - DNA, 479 bp, Zea Mays
gtccgggcctctgtagctggtcctaagctttcaggtctctatccttcttgtgtcgccctttcggcgactaacaccatgcttatcgcttctacagccgccgcaatgtataggtacagcggttcccctggctccggagcaaccaggatcggcagggaagctagatgctgcttcaactcatggaaggcttgttccgcctcttcggtccaggcaaatgggccggatttctataggagcttgagaagggcagtgccctctcagtcaaccttgaaatgaagcggctaagggcagccagtgatcctgcaagcttctggatgtccttaatacgggcaggaggcctcattacctcaatagccttgattttctctgggttagcttcaatgccccggtatgaaaccaggaaccccagcaacttccctgcggagacaccgaagatgcatttctctgggtttagctaggtgtgggttgcccgcagcttgccg

SEQ ID NO: 9752 - DNA, 671 bp, Zea Mays
ctctaccacaaaaaaccctattcttattagttggcgattatgtgttttctttcttcaaggtcgttgcatacaatgctcatcaggaaagaacaaattgagtaggtagtgggctttgaacaagaaatgcattaagtggatggagtttaccatggtgctttgaactccgactggtcatggggacagaatcatagccgatttgggaatggatgcggcctatgtagagtcgacgttatctagtatttgccataagaattattcgttgaagaccttgtccggatgaaagaacgggggcagcaagcggctgctgccccgccatgaatgacaacacgagcccttggaagatgtgtagggaacaatttgaggttaggttaagacatagatctaggttttggagaggtcaacacggggcctagaaattgaagaggtagatgtagagagcttacatggagtctgaatccacattgacttgcccgctcgccgctggcgatgatgcggaggatgggcgacgaagaggaaggtgagcccgggggcgctaggcggcgagcggaaaggcacaaagcaaggctgagcagtgtagtggagtcgtggtcgggttcggagcaagcgttggtttctaggcgagcggagttcgtcctcgcgtgtagtggagatcgtgggagtctggagacagg

SEQ ID NO: 9753 - DNA, 463 bp, Zea Mays
ccgcccgccaagccacccgagcctcggccaccgcggccagctcactccagccactcccagactgcgccagctgttcggttagcttcaccagagacctgtgaagctctccaagtcctcggaccccgcagagcctcacaagagaccccgaatcaccctcgtcggacttcttccgctcaccggcgaacgtggaccgggtaagtctatacgacattatcaaattccttctgtgtaccgcctctatgtcccctggtcaagcctctcgagctaaccaattggactatcgcaccatgagcaggacggaatactcgccgccaccgagctcacccacctgcgcacgtggaccggcctactctgaccatccccagagacgatccgcacatcggcgtgaccgtcaagacctcccctacaccctcggccacttcaccggagcaatcatgccgtccgtaagcccctccgccctttc

SEQ ID NO: 9754 - DNA, 803 bp, Zea Mays
gccagccggacttcatgccatccaaattcttgactcgctcctgcgcgtgagaaaatccgcggtggcttgcgtcgcaatctcctgtttgttcgggatcaaaaccgcatgggagctggagccgtaaacccccgcgtaacaacctccgtagaactcgcgcaagccgtttctatcctggtgtataagtgccatacatccatgcgcgccccgcagcagccgagagagagagagagaaaggagacatgagagaactagtgcgtgagctaagcctgggtcgtgcgctgccgcgcttggcgtcaggcgaatcctccgttcgtgtgcgctgaccgggggggaaacagagcttcatcgccgcacgtcgtgatcccggctggtcgatcgcagtaccaggcggtgttcctggcagtgccacggtaagttgtgctcccataatcttcctcgcccgtatctccctagcgttagaacttgcgtatggtagatgcgagccgcggcgcgcttgttcaatccgacgggtcgcgccatgggcgctcactgctgtcgaacgcccgtgcgcgtaggtagaagaaagcctactggtcgttggatcggttccctgcggctctgattagaagtaggcgataccccttcacgacaataaatcgcggtcgtcgctcgttgatcaagtggacacactcgcttgtctgtttgccgcggccgtgatccgttcctggcctctggatctgatctggacgaccgaaaatcaaccgtaccccttcgccgaagctagtttacaaaagagcccctctgttttattagtattaacccgc

SEQ ID NO: 9755 - DNA, 458 bp, Zea Mays
ggccagctacgtcgctaggtgagtagggagtttggtgcgagctccttggccaccatgatgtttgcgtagtgacgaggaagaaggaggcaaagaagagggagaaggagaggatttgtcacctacacatgaagaacagccgagcaggcacgcaatgaagaggaagacgacgcgaggaagacgatggggctgctcctctgacgacgcgaggaagacgacgaggcggccccttagaccacgaaggcacaatgcatagagaggaaaatgcgtgggctgctcatgtgtgagaaggaagagggaaggggttcatggcaggcgtgtacgattgtatagaaaggagagggcgtgagaggtggttgtcaatttcacggcggctcttgtcctggccgagcgagagagacagctgcgcggcgagttgcacgagacagggttagacagagttagatgggtggtagacatgg

SEQ ID NO: 9756 - DNA, 459 bp, Zea Mays
cgagtcagcggcagcttccactagcaacctagccctaggatgatcgaggcgacatgacgctcgttcgcctccccgggaccaacgacacaatcaccgacgagagggtagggggacatgcagagtctcctctcttacccccgattctgagcaatccagtggccttcaaacttaaaagtctccaacgtcgacaagtacgagcccaagcacgacttgggaggctggttggcagtctacacaaccgttacgccgggctgctggggcaatggaggatgtcatgatagtgtacctgcccattgtcctggggcaggacgcgctgcagtggcttcgacatctaccacgacaatgcatcgatgactgggaaaacttcagccgtcggtttgtcacgaatttccaatccctctctaacaaaccggtgcaaccatgggacctcaagtccatcaagcgccagagcgatgagac

SEQ ID NO: 9757 - DNA, 1138 bp, Zea Mays
gagaaattgaggataatgctatttaattatagagagatgggtatcattctgaaggttgagccgatgtgataggcgattccctcaccgtgtgtatgtaattgtaatggtgatgtggcctattggctgtattcgtacacttgtattgttccggctgagtacgtgtgcggctttgtgtggagtatctttgtgatgatagacttcgattaacgttatcccgggtgcgcccttaagtaactgttgcgctgtcttttgaataaaagacttcgattaacactcctgtcaagttgttccggctgcgcccttaggcctcttttgctcggaatgtcttgtttagagaagacttcgaataacgctcttgttgagctattccggttgcacccttaggcaacttttgcgcggagtgtcttttgaagagaagacttcgaataacgctcttgttgagctattccagctgcacccttaggcgacttttgcgcggagtgtcttttgaataaaagacttcgaataacgctcttgttgagctattttggctgcacccttaggcttcttttgcatggagtgtcttttggataaaagactgattaacgcacttgttgtgctattctggctgcacccttaggcgacttttgcgttgagtgtcgcacgtgagggtagtctgcgctgcctctcgcagtcacttcggagtggtcgaatgccgaagaccgttgatgcggtctttttcgacatgttgcatcttggtttttgcgggggatttttgcggatatattacatggctccgccttgttaaaaacctcaccccctaggaggaaaagagtgcgggcctaaatgatgttgtttggtgaattacaagggcgtgtaggccctaaggacttagacaaaaaatttgcatagattgtcaatattccaggaatggtctaggtcttcgccggatggcgttgttaccctgtatgcgctgggggacgccttcgacttgatgatgaatggaccttcccacttcggctccagcttgccccgtgactctgtccgggtggttcggacgagtacgaggtctccttcattaaattctcttgggacgactgcgtggtcgcgccaggccttcgtttgagcttggtatttgttgagggcctgcagggcgaag

SEQ ID NO: 9758 - DNA, 606 bp, Zea Mays
ctgggatctaacttcactagctctgaattctttgatttctgcgaacaacggagtatctagatcaagtacgcatcagtagcacacccaagagccaatggtcaggtggaaagggccaatggaatgatactggaagcgctcaggaagaaggtgttcgacaaaaatgaaaagtttgcaggaaagtggatcagagaattgccctatgtggtttggagcttgagaactcaacctagtcgagctctgcatggaaataccccattcttcatggtctatggttcagaggcagtgttacccgccgacctcaaattcggggcaccgaggctggtcttcgaaagcatagctgaagtagaagctaccaggctagaggatattgatgtgctggagaaagagcgattgaacacagtaattcaatcagccagataccagcagaccttgaggcgctatcatgataaagccatacgacaccgatcctttgtagtgggagacttggtccttcaccgaataccgaattctaacgggggaaggacggcacaagttgtcaccactatgggaagggccattcattgtatcagaggtcactcggccgggatcataccggcttactcaaat

SEQ ID NO: 9759 - DNA, 442 bp, Zea Mays
ctatgatgcattccctccatattcaatgaggccgacacaacccacactgactctggaacttggtagagtgtgaaataatcaacacacttgtcaatcaaaatcctggccccccttcaaattttggaaatgacatccatggtatgggtaaattatacctccatctcctctatactacgccccaacctcctgattacgattcagattttgtcctccataccttcggttgggttcccgtggcgcaggtagcggcgctccactgcaaatccttacgcctagcactgactcctatgattccatatccctcgccatctactccagcctcagttccgccacctccttcctagtttgctccaactgctgcgcgagccgcaccctttcatccatcgccttctgcgccacgctcgccgccaatcccacctgcgcaagcagttgttgttgaaat

SEQ ID NO: 9760 - DNA, 533 bp, Zea Mays
tgcgggacccgtgctggtcgtggcggtgagtatggttcggacgggattgggttggagaacttggtgttggtgcaaaacgaggacgtggagatgcaggaggctggacgtgttcttcctcctcaagctcctccgcttgaggactcaatcatgcagagagtcgtggctctgcagaaggagattgtgacagtggaatctgtcttggcggcccggcgggtggcgaaggatttgcaggacctttgcgttgagtccaggaatgctgcaggagtgcttagcttagtacagccgtgggaagctgacgatgacactctgagggtcttgctttccaatttagtgcttgaggaagatggggtggatggaaaaggaccagcacttgttctgtgttctgttttcttaccacagttactggagcttcaaagaccagcttcatccgttctcctttccactgcattgggtctctgcaagcgccacccagctgcagcactggaagctgtactctttccactggttcttagaaagggcggcctaaatgttcc

SEQ ID NO: 9761 - DNA, 935 bp, Zea Mays
aatttttcagttccctatactttttcaatgggaagccaacttcatatgcatacctactataaaattgatatgcttcatccacaccactgaatgtcataccaactttaggtaccaactttaggtaacttcctgtgcaaaataaataaaatacatatttatgttcaaatatcaataacatgtacgatgtttggtagtccgacctaattttccattgtatgcacaatataacatgtcataccatctagctgcataatattacccttgattcaattattatatcgtatgcaatctaagctacactaatgcaaatccaaacggttataaagtacttacatgtctctgcagaataactggtgtgtcctgttcatgctcaccaatagtccgcatagtagtcagctgttgtcctccttgatttatggccatcctcgacgcatatgatgtgttgtgatcatcaaccctcggcgccctcaatgctgttggtggagtaattgcccctccggcagtatctgtttacccatgtgcatctgcagccgaggcaaactggttccctcctggttgatcttcctgcaccattgatacgatctcaaagcatggatttgatcaatgaactgatatcggcgtcgtgtactctctgatcggctctttaccccatggcgctgtcatcttccagctccggttacttccttctgccagtcacaccctaacacacgattcttgttgtctaacgtttttggaagcgtgggattctttccttttcccatgcatatatccattatcgtgggcgcgatattcacgacaatttcgagtgtatatctgctacaatataggatcgtgggcgtaacagcaatttatgcaagttcgacgtaggtcgtatgctatcgtaaactctacttagatccacttccataatactcgggtgacatgtcaccggccca

SEQ ID NO: 9762 - DNA, 555 bp, Zea Mays
tcctgcgggcgaagacggttgaacacggagaccctcgggagaggccgaggcaaagcctgcgggcgccagctgttaagagcctgggcacaattagtggaaggacggcccaaacgattgaaaaccgaagaaccagcccgagcagcgtgctgaacaccaccaggcgacctggcaaggctccgaatcggaacaacattggcaccggtgagagggagtttaaccacgtccgcatatgaaagagaattcctgacccggaccttcgaccaggaggcagcttcctccgccaaaaaaagcctgaattcatgcttccaattaggtccaccacgattccagaggttgaagaaggccctgaactccttacgctcaatggaacccaagttataaatgtgaaaacccaccgccatcgaggaaaccgaaaaccgaaaaacgcggtcagccagctgaagcacttcgaaattctcggcgagcccaccaagagcagcctggagaagatgaccgaccgagaccgaattcaacttgaagatgcatctgccaaaggaaaccaccagccagaagggc

SEQ ID NO: 9763 - DNA, 877 bp, Zea Mays
aatgggtcggttctggctgttcttggatgattcagagcttaaagatattcctttgttgagacaaaagtatacttggtctggtgaaagcttgagcccaattctagtaaggctggacagtgccttttgcagcaatgattgagaaggattttttcctgatgcaattttgcagagcgctgcctcaggggtgtcggatcagtgcctactcatcttggggctccaaggtcagcactcagggaaagcgccacttccactttgagagtttttggaccaaactcccaagttttttttatgctgtgcatctgaactgggaggctcccatatggccatatcttccaattgtcggttgagcgcctctttctcaagctgcagcatcgtagcaaatccttaaaaaaatggagccagcagaagattgctaatattaggacccagcttgtagttgacaaggagatacgtccatctggaaattgctagggactcgcgagaccttgctcatagtgaagaatggctgagaaggaactgcactgtcttggtttggcctctctggactgtgccattgctaggctgcgacctagagtgttatgtatatgagaaggtggtgccaatactaccttctgccacttgcacgcccgctgccaaaagaaaaaactccaagttgaggatcatatctttacctggcaggaggataagcgggaagctgcccttgatttttatgaaaacctgctcgggtcgactgaagcaaggaacttcacctttgatcttttgactctccagattcagcagcacgacctcgcttccggcttccttagatgagactttctcagaagacgaggtatgggcaacaattagagatatgcccttagacaaggccccaggattc

SEQ ID NO: 9764 - DNA, 324 bp, Zea Mays
cttgtctccgtctccggtgtggagctattttattgattcgatttcgtttcctctgcacgtagcacctaaccgggaccgaattaagcaccaagaccttggatcgcctgttcgctgtcgtgtgccacgacaccgccgcctctgggtgggccgagaaaagagagaggaaggagagatcactgtggtcatagatcaaataatggacggacaagattgtgttgtagcgtaccctatcaccccattttgatccagtcgtagatcatgggatcgacggtcctgtgggatcggatgggtgcacaccgttggatgatgatatgatggtctcgg

SEQ ID NO: 9765 - DNA, 306 bp, Zea Mays
tcgtgttcggcgcaacatctgcgtcatggctgtactctgcggtgtgcttgcaagaaaaggagacacatggctggagcagagcacctagcttgcctttttggaacgggacagagagagaaaaaaaggacacctcttctggaaacatcttttgcggcgactaattaaaaccacacgctaaagatcgtgaccgaagaagatttggttatttattttcccaaacgggacgacagcaggactgccacatgtgatcgagctaaacccacgtgcatcagcggctatcaaatgtaaaacaaacaaacacctttc

SEQ ID NO: 9766 - DNA, 338 bp, Zea Mays
ctcgtctcctagagtggtccggagccatgtagctggttagccttgtcccgtaccctaagtctgcacgctcgaccgctctgcaatgggtgtcctagtatttggaactgtgatcctgagggtctggacatatggcttggcttcccaggctaaatcctgcaggtcctgttgcatgaatcaaaggatggcagataccagacgatgggtcctatgggtgtgcaactaaaacttcaaaagcctaagctgtgtgtaggtccaggtcccagtccagtagtaggtagtctcaaactgtagagactacctcctaggggccggaccaccagttttatctttggtattct

SEQ ID NO: 9767 - DNA, 744 bp, Zea Mays
cgccaaccaattgtcctctgcgcggactcgcccttccctataaaagcatggctgcgtgaacccagggcatcacaccattttgacctgtgcaccgagtgagagagaatatggcttcaccggtgattttttgctacatcgccggtcaagccgtattcagtggacagggagcgtcgtcggcacataccccacgtttacatgacctattgaggtaagggaaggcgggactcaacgggtattcatcaccgaatatggggccgccaccgaggatccatacccagccatgggcagacctcactgctatcccatctctggtattgcttgtcttcgcaactttgccctattctcctcatagcatatgacctagccgcactcgaattggctcaacagaacgccataatggggcgctcaccagcgcggcttcgccgtaaaagctggtggcatcgggtgcccggcacgcgggtcggtggagaagatgatgcgtgaaccattgatcgtggcatcaatgatcaggagttgatctcgtgtgtttggagatctaaaccgtggttctggcaaatggcgtctgtgatttaattgtgatatagcggttccgccgtggcaggtggtcgttgatcgttgatcggagggttgtgagcggtttagatctcataaaatcctggtagtcggatctcgatccgatggctatcctagtgtaccacttggggatggttgggatataatcctagccattgatgcatgatccat

SEQ ID NO: 9768 - DNA, 439 bp, Zea Mays
gcctactgcgatgctaagagccactttaggatctgtgcttgatgccttgcacccaatagaagtaatgacatctagtgcatgctccctagcctcaaactatccgccttcatgtgctaccttgggagcacctctgctagctacaatctttcaggcacaacactcatgacgccttctctagctgccccatctactactagctctccaccatggaacaacgtgggcccctcagaactaggtgtagcagcaacaccaatacaacaatactccctggtactaatgggcccattgatccaatcatttctcatactaatgttgcatgacatttttgtatggtacacatctaaaatataatatcaggtgccaaaacaatgtgctaatagtatggtgacatattctgttatttgtacttctattgaagagccatcatcacatgttaagc

SEQ ID NO: 9769 - DNA, 704 bp, Zea Mays
gctggacgccgccacagcggaggcggacgcggggagagctgaggccaagggggtcaggttctgcgtcaggccgccggacgtcatggagacggtgcacgaggtggccatttacatccaccgcttccacaacctcgatctgtttcagcaagggtgagaattgctcgttttgtccgcaatcccgatcttgtttcagccacggcgtgaatttttcgttcttctctatttgtgcgtgtcttatttctcgcaaaacgttttctcgggtttactttctttactgccttttagggagaacatgtttttagatagaacatataaaggtccgagctatatgtttgtattttctcgaggtgtttctgtccttgcctttctcgttcggtcggttgtttccaggcatttcttctcgcagctggggaattccgattttcctcatgattatgttcccctcaggccctcactgtaacttatgtgcgacagttgtaattgatgccgcgtgtggaacctttctggcacttatctgtcgagtgtaaacatttgccatttatttttgtttcttatgatatgtttttttggattatgcgcagatggtatcagatgaagattagtgcaatgtgggaggaaggtggcaacaaaacaccggcttcacctgccagggtcgtgcaatatgaaggtgtgcatctctatgggcactgaatagcgtgatccag

SEQ ID NO: 9770 - DNA, 521 bp, Zea Mays
aggagcatcaacaaaaaaaccatgtggtgtcatgctagtcccaaagtttagtaaacagtactaggcaccaccttcttccccactaatgactacgccaagacgaagtaaccgagttgctggaatcggggttgaattcaacatgtaggatctgggtagcaggaccaccaaaaaagtcatgaggtctctatagatcatcacagaatcagaaggcattagtcacgaagctctagaggactatgtcagactttttaaacaacctttgttgcaatatcatatagaggctctttcagccctttttggctagagcactccaaccgacccagggtctcattagagacttgcctccttcctggtagttcctctgtttatgtttttttatggatccttcaaaaatcctcgtaaggaatgtaagagggctaaacttatctgttcgccaagattttgtgagagagcttgttgattcctctcgggttgatgtggtctgcctccaggagaccaaaatgcaggttatctcaaatcac

SEQ ID NO: 9771 - DNA, 848 bp, Zea Mays
ccggttcaaaggatagttccaacatctctcccaacaacattatggagccaacaatggagactctgtcggctgaggatcagcgagagttcgaggagcacaaggcgcagctgatcaaggaggcctaggcgaagttcctcgccaacttcaaggtggtccgaaatcaaaaagtcatatgacagtgggcgactattctggcttcgcatcgacctattgtaactaccccaaagtaagtgaaacaaacgaaatccaatcccttatatcttacgtagacgagcatgagaacaaatgcaatgaatactagggggtatgcaagaggattataagaggctagcatgtgcatttgataaatccgatgttgctaattttccatcgcacgagggtaagactaggaaaatacacgagattcatcgattgcaaattggcaagaccaatacctaccactttatgggatgccgatggacacatatcctagacaaccacaaccttgtgcgttggggtaaatccaccgatctccgcacggtcggaccatccgcgcctgagtgtggaccgtccggagtagtggtggtcggtcccattttttgaaccgagttaccgaattctgctccagggcccccacattttgtgcaaaccctaacagaccatttcggaccgtccgcgcatatggtcggacagttcgaatacatcattggacggtccagatataccccccggatagtccgcgcacacagccgaacggtctacatatcagaccgaacagtccggcacggaatatatagaatgtaatattaattatcatccctcatctttacacccgtctcaaccaaacctcctgttacaccccacaacac

SEQ ID NO: 9772 - DNA, 770 bp, Zea Mays
gcttcccttacgatcaaagcctctctctctctttcctgagccttcgcctgcgctcgcgcttctgccatctctcagtacccgcgcaatttctgtgcaactggggttcatcgttcgaggactttcttttgttgttgtcgttgcgctcaaaaacattggcaagaatccgcgatgttatcttgtgcatcctgtccttcatcgggcagggtagcatcagctgcactcctccagacgagctgtctctgcttcgcgttccgtgttcgagggggcccagatgaatcgtcactttcccttgtgctagttcttcactgtactagtacttgtggagttgtcactgtcctgcctcggatgtatcgtccgatggatggctcgtttcttgcaattggtgcccaaactgtttcaggcgacctgtgaagtctgatggcggtactggtctgctgtttgtgtttttctccgtaggatgataccagcattggtagtgccactgccaagagggaaggggcacgaaggtgcatcatgcagcggtacaggtcccagctcgagcaggaagtgagtgtgttttccttggtttcttagctctacagttgttgaattctgtagcatgatgtcttcagttgaaagaattcagctttgtttggagttgtgatgggccctttccttttgaatgaaaactacctaatactggtgcgcggtgagcataattcagtgttccattgaaaattgctgatgagaggggtgctctgatgaaacccagaatctaaattttgttctct

SEQ ID NO: 9773 - DNA, 1122 bp, Zea Mays
ttttattagttttgtctattaatatctcagtaatatttttcatagttcactttgacagtaataattaatgttttttctagtgaggtgccatagtgtgacaaataaaagctagaaatcaacattcagtaattatccattaaactcattttgatacagtgtatttttcagtaattattgtttctttttatgttaacagttgcaagataaaacagttgaagaaagtacagatgttgtgactggaaacatatctggttttcctgccagccaatttgatcatagtgcatgggcatacaagggtgccatggtcaggaatatgccagatgacccgtcccagtcacaacatctcgttcaagaagatttagttgatgtatttgacattttggatgacctgaagaatgaccctgtacagcgtgatttgttgaaagaagtcgagaaacacgatgtaaagaatgtttctacatttggttctactgaaaggagcatccccctgtcccaaggtttcacgatgccccggtacgtgtgccagtaataatcagtaattttattcttttaatattgtataatagtattcagtaataaccaattctatgtcagcaggttgtacctgatgacactgacattcagtacacacctcctcagccacgagcgacacgttctcaagctcaacctctgaaatcttcgctccgtaccaatgagactaggcagattaggaaaggccagaagaagctcaagaagtcgcctaagaaagtctcccaagatgttgagcttgatgacaatggtttccccatcatcgactttgctgctctagaccgttttgatcctcctccacatcttgccgtggatgttgagagttatggtggaccagctgcctcaggttgatatggtggactcgtgtcactattcagacctgaatggcgtcgcaaagtggctgcaaagcaggcagctttgaggatggtggcagaaattcttgagaagaggattgctcacccacagtaatatcttgcaatcacggtacatttttttgagcttatacttccacccactcacatccattttgtttatgtccattcaaaaccaggttgacatactttacatatgttgaaaagttccttcctgaggatg

SEQ ID NO: 9774 - DNA, 789 bp, Zea Mays
cgcattaatgtgtttgacatgatctgggaagagatcatccgtgcttcctggtctcctctcaaagggtgtcttcatgcaccctttatcatgaagatgatcgaagtggtcacccagactcacttcgaaaaacctgtcaaacactcccgctacgtaccctactgggttgattcctccaacctagctgctcgtacgaagcgggctccctcagggtctggaggccatgcctcctctgctgagccacctccctagcctcctcatcatccatcttcctctcgccccgccgccgcctcgcgtccctctcctagccgcggatctcccatgccacatggtcgtggtcatggtcaaggtcgtggccgagggatgggtgctcgcttggttcatgggattgcggcgtttttctctatgtgccgaaacatttctgctgatgtacatgagctggcacggcgtcagcgggagactgacgacaatcttcgtcgtcaagcttccactatgggtatgccctttgcctctcgctcgcctgacgtgcctctccatcctcctcccccgaagatcaatgagtggcaccgtcaggcctacagggtgccatttatgtcagcagacgacgacgaagaagaagaagcctatgttgatgatcgcgagcagtttgccccgcctccctaccatggggatccggatcaatcatcctctcaccctctgcctccctacccaggtccgggacccattcctggtgacccgcggccattcggctctggttaccatcaccaccctccacctcctcctcatcatcgt

SEQ ID NO: 9775 - DNA, 848 bp, Zea Mays
actaagctctggcgaacctgtaccggccaagataagcaatggccggtgccctatcttggctgaaccctaattcaacacctagcgagtgtttcccctcgatcaattccacagttcgagctctaaatcactctatccacggaggcagtgcaaacaacggatgagcacgggtgttcccagcgatctagggcagtctaacctaattgaatgggtccaggagcaatagtggtatgtaggagtgctgaaacaagagagtagagggcaagaccggacctgaattgcactgaccacggtgagagcttgttcacggtggcggaaaacagatttggagaaactcagcaattcgtgggctctggtgagtaattggaggcacgagcgggtggattggatgctgaaatacctaacggagccgagggtgtgctcaatttatagggctcttgatcggtggccggtgaatttgaacttgcgcggtggcggtcggagaggagggggtgcaccggcgcacgcgattggtggccattaccgtggcaacctcaccggcgatcactggatgggctaacatgagtcacggtggtgtggttaaagtgtcgaggcacgtggtgcaagggtgcgaggtgtctaactccagcgaggggagatctgaagcggacgtgagctaagaggacacggtggccggagtgaactgtggccggagttcatccactagcgatatttcttactccctctgcgttatccaactgcaccgagcacgaatcactgcggcggcatgaatccacgtgcgggggtcgccggcggtgagtttactgagctagcgatctgatctggttactgtaccatcgcgcagcttcttc

SEQ ID NO: 9776 - DNA, 391 bp, Zea Mays
tacttcagaaaaatggatgagtacgtcaaagcagacgctgatttcccatagaagagaggaagcccaaggatacatagagacgactaggggcttcagagtgagatttaatccaagacatatacgaagcattcacaacccaagctagactaaacacaaacctgctcagtctcaagggcaacaaagtcagcacttagagtcaggagcgcaacaacagtcttctgagggcgatttccgcccaccgaccccaagaggaggctaaagctttggcgaaaggttcaataactagctgaggaatctattgtgtgttttgaagagaaaagaaggaacatataatgaggacatgccaaataacaattcaaaagaaaaagagcatgttgttgtgtagacaaac

SEQ ID NO: 9777 - DNA, 557 bp, Zea Mays
gaaggattttgctcttatacaaggaagaaggggaggaagaagggatgtcattgatggcagtggaggggatggggaaaggaacaggaaggagatgaatggaaggggcacatgatgaagaaagggtaggggtgcaaaagaggaaagtgggaagtgcggaatgggatgggcatcggcgaggaagatgaaggagcacatgtgcataaggtacaagaaagggtgctgcaatagtgtacctggccggcttgcattagaggcattcgtgcctggccgagctcatgcctacaatgctggcactgaaccacaccgtagccaactgcatgcccacctatccgcttcttggctggtcgtacccagcccctagctacgcgctcacctacacagggtcgcaccacagcctagcatgccacgcttgcgcccctagcctatgctaaagcacaccaaactgctcacgtcgggccagtgattacgcccatggctagccaactcgcgtgccaatggttgcatggctaaggctaaaactagggaagcaaattatcctttttattcttttatttttg

SEQ ID NO: 9778 - DNA, 422 bp, Zea Mays
aagaggtgaaagtgcaggggaaccaagggtacgagtacaataaagaatgaagctaaggccaggctggcgcgtggcaaatatgaggttacgaccaaaaggcgggataagtagaataccactcccgaaatgagatgggaagttggagattttagataacagacataatgtcatcacaaggtaggatagagtgatgagaagggtaaaggagacgacaaacagaacacaacaaaggatagagttaaaactcgcaggtggcaaagaagaggatacgaccaaggaaaaagtaggtacagtacaatgctcagattgagatggaaaagaggatattttaaaggctggtataagataaacctcaaggtaagatacaaaggcgataagggtaaatgcgataatgatgaaaagcataaccatggacagagttc

SEQ ID NO: 9779 - DNA, 453 bp, Zea Mays
cattggcaattgctcctcaggtaccctgaggcacttctttagctgagatacatgaaatacattatgtacatctgatagatgatcgggtaattccaattgatatgcaacttcacccactcgctttaagatcaagaaaggtccaatgaagcgaggggacaactttccttaactttaaatttcctcattccacaaagtggtgacatcttgaggtacacaagatctctttcctcaaactccagtggtcttcttctattatcagcgtagctcttttgcctggtttgagttaccctcaacttctctctgattatacagacttgttcttctgcttcttgaatcagttcaggcccaaagagctgtcttcctctagtagtctggtccaaaaatagaggagtcctgcacttccttccatatggagcctcgaacggtgacatcttcagactggcctggtaacta

SEQ ID NO: 9780 - DNA, 726 bp, Zea Mays
cgagcgccaacatcgaggatgacattgaagattgtgatgctgtcagagttggtggtcgtgcgcttgatgaggatgaagaggaggaaaaggaagttgtccctttggttcgcaagaacagccgcagccatagcagcaatgacgttccaatgcaggccttatcgggactagttagtctcgaggggttgatgatgtctgccattgaccatgtactagagtaaattattcctgaagaccttttattggagcctcctaagactgaaagttttgtcgtccgtacagaggtcccggatgacgtccctttggctggtaatccctgttgggcaagaactaacacggacagtttctcatgcttcttcgaccttggagggcggtctagctcgcggggacacactagctcttgacgttgcaggccagggtcacccggcacctatgggtacgaccgagggtgcttccgcttccgaaggtgccgctgaggataacccagaccccgaggttggtgctgaggatgatccagcccccaagggtgccaagcttggttcctcttcggctgcctccatggatgttcatatcggatctccaccggtacaatctgaggaacctgtggtgatgagtccgcctactgctgttgttggtctggtcaccttagaggccagtgacccagatgctaggaatccaccgcctgctgttggagctaaggtctccctgagtgatgctcccaacattgtc

SEQ ID NO: 9781 - DNA, 628 bp, Zea Mays
gggtggtgctagggaacgagtcaatcggtcgagacggcccaagggttctatatatacagcaatggccgaggcaacggtatggccgaattcctcggcgaattctgcgcggcgggtatggagatcccccaacgaccatggtgagctgcacgggggagaagtccatcagacgaggcggagtccgcggggttgttgccctgtcgcaacggtcgcagcggaattcacgggattcgatacggggcttcgccgcgtgcgcgagccgccattgcgaagaacagacgaaggtgactgcagaccgagcgggccagctgttcggtgaccaggcgagacgtgtttgcggggcggcaccgtgttgagcgagcgcgggagctgtgcctgtggatccatatccatccttcgagcgctagctgcctgcggtgcggagtccctccgtccgtccgtgcctccctccgatgtccaggcggccagcagaggaaacgtgagcagacaagccagcgtggggtaaggaggaagaagaaaaaagaaaaaaaaatagtaaatgggccgcggaggtagctgggccaaagggaggttcgggtccgagagtgtgttttcctttttatttttctcttctatttcaaggttctcgttt

SEQ ID NO: 9782 - DNA, 618 bp, Zea Mays
cattgattgagcaactcatagcaagaataactctcttccgcattctgaattcattataacttgtttttatcctaaccccgggtgaagtttgtgttcaaagtttataatttataggttttgtcgattcaccccccctctaggcgactttcactcatgttgtttgtcataaagaatacgagacaaccaggcgaccccggggcccacgagcacgtgtggcttcaccccgagtagaacgcctgattttacctttgcttggtggctccttcccggggaagccactgttggctgaccccacccccggcctataaaaggaaggggttggtccttagacaaatggatgcatacacgcacagacgggccctaaacaagaagacacccagacggatcgacgaaggggaggagaacacaccgacgaggacccaaaggccgaagcctcgccaccaagcaagacttagctaggactccactctgtaacctttagctccacttccacccccgacaagagccttgggagcgtctcctctctcgctctctcgcccgcttgtaacccctactactagctttgatcatcaatggtgccggtagggcaggccaccgatgattagaagtagggacatt

SEQ ID NO: 9783 - DNA, 413 bp, Zea Mays
atagtggtcgctctatgatatgtagtcgtgggcatatcacatcgtattaagtcattgcctacttaaggcgattgctccgttagcagggtatagtggtcaccccaagtcgagtaagcatgagcatgtcgcaccgtcttaagtcatcgccgacttaaggcgattgctccattagcagggtatagtggtcaccccaagtcgagtaagcgtgaacatgtcgcactgtcttaagtcatcgccgacttaagccgattgctccattagcagggtatagtggtcaccccaagtgaagtaagcgtgagcatgacgcaccgatttaagtcatcgccgacttaaggcgattgctccgtcagcagggtatagtggtcactctaagtcgagtaagcgtgagcatgtcgcaccatcttaagtcgtcg

SEQ ID NO: 9784 - DNA, 492 bp, Zea Mays
aaaagaatttgacctcgaattccgtcgcatctatcagaacaacaaaagaaaagattaatgaatcaacaatactcacccacagcgaaaagttctggatacttctgccgcatcagctcctcaagcttccaagtagcctcgcgctcacactgattagtccacaagaccttaacatacttgattgatctattcctcaaaacacgctccgaggattccaagatacgcaccggacgacactccagagtcagatcttgctgcacaacaattggttccatctcgatctgatggtccggatcccgcaagaacttcctcaacatagagacatgaaaaatcgggtgtacccctgccatggaatctggcaattcaagcgataagccaagttgcccacccgggccaagatagtgaacggtccaatgtatatcgggctaagcattccggagacaccgaaccgaacaactcctttagtaggtgataccctaagaaggacttggtcac

SEQ ID NO: 9785 - DNA, 369 bp, Zea Mays
gaagaatttcatccataaattggttgttgatgatcaatatctcaccttgcaagaggacaagcagcacgctatgtttcaattctatagcaatctgttcggcaaagaggtcagaagggactttagtctggatttagcagcttttcataaggggaattttgacttggcagctcttgttaatcccatatccatggagataaaaattgctataaatagccttcctaatgattgggcccctggacctgatggcttcacaggtcgcttttacaagtcttgttggaatacaatcaaataggacatttgagcagccgtcctgactatccaacaaggagcctctgaaaggctatggctattaaatttggcttatctcac

SEQ ID NO: 9786 - DNA, 484 bp, Zea Mays
ctcgatcagtctgtcgtgtttgggcgcaaatgctaatctccagatagattaaaggttgtttgcgagcgatgtgtaatctaattaagcatgtaaaggtagggcgcgggtgtagattaattttccgattcagaatgtcacgtcaggtgaatgaaccggctcgaaaacaaaatgtcactggcaaatcgtagtaagtgaagtaactgagcagctaggacgaggtgtagcaactacgtgctcttctggacagctttagctagctagttatgagtttatgactccatgcgtgtgactgtgtgagtgaaagcttgcagattttgcttgcttttctggacagctttagctagctcgaggggaacagtacctgcagcacctagatcaagaggtatgtactgtatgttgcaataatattttttcacacatgtttttcatcattgatttaatgcatgtttatatatgttcatagtgtagactgctaccatttttt

SEQ ID NO: 9787 - DNA, 499 bp, Zea Mays
ggagatgatgcagttggaggagagatttatgtagtgataacccttgtgacccgaggagtaactaaggaaaacacaacgagtagcgaggggcaagcttgtgagtagtggcggcggcgatattggcataacaagcacaaccaaagacacgcagatgatcataggaaggtgacttgccgaaaaggaccgcgtgagggatggaggcagaaatcgcgttgcttggaagacagttgaggaggtaggtggtagcgtggagactttcaacccagtagtgagcgggaatagaggattagaggcctgaaacagaagggagcgaatgacgttattaatagaccgaatgctgacagaggaggaaggaccatatggaggcatgagcgcgaacatatggaggcattgtcgaattcgcacccattgtcacacttaacgcctttgatgggacgactgaactgagttgtaacataagcgaaggagggcaaagtagtgaatgtgttagatttcaacc

SEQ ID NO: 9788 - DNA, 983 bp, Zea Mays
gtgaggggcaaaagcccactcagaacagacaaccgaggcacccacacgcaccccccaacacaacacgcccagaacactctcgcccgcctaagaacaaaataaaacaactcagacaggatctcctccccctcaacctggacaatgctgttgaagccctttttctcgcctttgcgaattaaggacatggcttccctccaccagtcaacaaaacaagtatcacttctcttggggactacaaccgaaaaaccaataggggagagaatagagtgccaaaattgccttgcaaacatacaggcacacagctggagatgatatgctgcacggtttcctcttcttgatcacaaagcacgcaacactccgggaagtcaagccctctttttttcagcatgtctgcagtccagcacttgttattgatagctagccaaataaaaaacttgcatttagggggcgcccagctcttccataccatcttccaaggctcaaacactacaacaccaatgtagaaaagctctgtaagccaacttagatgtaaacagcccagaattggaggacctccaaacatgtttgtcagctctatcttgtagctggaattcttccagaatctcccccagcttcaaaaattccagaatgccagccagcgacaggttcccttcgatatcttgcacccaggcgagagaaggaacggcctgctgaacagttctgcactttttaatcattttgctaccccagcagcaatcaaaggtgcaatctcagcaatagagctgccatgaatccacctgtcctcccaaaacaacgttgtagctccattgccaatattggtagtcactgcagcctgaaagagagctcttgcttgagaggaaatgttgaggtttaaaccagcccaagctttagaaggctccgtcttctggagccacaaccatcttaactgtagagcccaactcatggtgagaagatcaggaacgcccagacctccaagctcaaag

SEQ ID NO: 9789 - DNA, 287 bp, Zea Mays
gtgaagacaagatcaagcctcacttgaaggttagactttttattcataagcgtttgaatacatatcagcctggaaagctaagggtagaagcgatgtagttgtttgttgttttaggcgttctcgtagacttctccttgttcattgcagagtttgtatgtcccaagctttagcaccttcgcgatgatgaagggtccttcctagggaggagtgagcttctagcgccctcggttgtcttgtcataactgaagtaccatatctccctcctggattccccgaggctggacatg

SEQ ID NO: 9790 - DNA, 650 bp, Zea Mays
gtcccgtcagccgtccccgatgtggacgagcctacttcgaaggacctcatcgacggagaccgcgtcttcgccctacaggctctaaacaaataccaggctcaaacaaaagcatggcgcgaccaaacagtcatcccgagggaattcagtgaaggagacctagtgctcgtccggacagcacggacagagtcccggggcaagctggagcccaagtgggagggccccttcatcgtcaagacgaaggcgtcccccagcgcgtataggctcacaacgccatccagcgaagacttagagcattcttggaacattgataatctccgcaaattttttgtttgactcctcagggcgagctcgcccttgtaatccgcaaaacatttttattccggcctgcactcttttcctcccggggggtgaggtttttaacgaggcggagccatgtaatatacacgcgaaaaatcccccgcaaaaatctacgttgaaaaaagaccgcatcgacggtcttcggcattcgaccaatacaaagtcaccgcgaggggcagcgctggctaccctcacgtgcgacactccgcgcaaaagtcgcctaagggtgcagccggactagcacaacaagtgcgcaaaatcgaagtcttcctcaaaagactatccgtgcaaaa

SEQ ID NO: 9791 - DNA, 685 bp, Zea Mays
tgctggggatattgatgatcacaagagaaggggtgtggcgacacgtggtggggtggttgaggggtgctctaaaggtcaggtcatggctatggcagtgagaaaaaagagaagggttgatgctgaaaagaagggtctggcgaagacatctagggtggcgggggcctcggacagatttgttgaggaactggcgaatacgtgcgccaagccaggggaggtcatgacctcgcccaacctctaggaagcatcttctgagatgctgaaagtaactggggtgagtggagcagaaaagaccctattctcgtggcttccggcgaggatgattttatgtcttgtctagctcggtattttaaagtttttccttataggcgaaatattagtgttgttgtgacagctgtgatggacaaggaccgctaggagccttcgtggaagaaacagaaagctctgttgtggcttgtggaccctcgacgtgaggtgaaggcgctctgtactggcacgaagggtgctgccactatcatggtgatgcctccgcccgtggtgccggttgttactgctggggggatgccttcgcctggcaaagctagtcaggatggagtggtgaggagtgctgaaatgggtggagctgttgcgatggtccggcagctttttgtcgatgattacttgctcgagggtctgagcgtgttcgatg

SEQ ID NO: 9792 - DNA, 577 bp, Zea Mays
ggggtgaaggatcctcttaaggatccgagatgcggtcgaggttggtgatccgtccctttaacccaaatcgcttttttcctcgtccacccgcctatcccttcaagcaactagttttcatccgtcccactactgcccctgctcaaaatacttagctgagtacctctagtactcatttctcagccctacctagttcatctaacagctgcttcaactgtgggaagtctagacatttcatcatggattgtccctatttgaagcaaaataaatcaaacttccaaaaggcttctggaagcacatctcaaggcaagggaaatgtggcaagcacttaggcaggcaaaggtgaaaggaaaactggaagagtctactatactcaagtggctaccaccccggaaggagagcctttgatgatgggtacgttttctgttgccaatcatcatatcgtcattcttttttattctggtgcatcacatactttcatcagcaaagcttttgttgagaagaattgcataccttgtgttgaatcaaagaagggtcttcttattcaatcacctaggggtcaactttttaataaggaaat

SEQ ID NO: 9793 - DNA, 773 bp, Zea Mays
agccatgcggtatggtctctttgcgatcggtgtcgttccaggaatcagatctatgtagaattccacttctctttccggtggcattcctggtaactcttctgggaacacatccatgaattcttctaccactgatatgttttctgttgccagattaaacatcattggatcattgacgggtggtttagcctgacaagagactgactttccttggtggtctatgagaaggactgtcttgtttgtgcaactgatgatacctttgtgtttggtcaaccaatccatccctaagatcacatcaatcccttaggatggaaagacggttaaatctgtcaagaacagtaccccacttaaaaggattctgacttgggagcatttgagctgacatagaaggtctgaccctggggttcgggtgaccaagggaatctctagaggggtagagggaatgccatgcttttccacaaaactagtggctataaaagaatgggatgctcctgaatcgaaaagtacggtagcgggagtaaattcaacaaggaactcaccgagcactactcccggagcttgctgagcctcctgagcatcgacgtgattaactcgtgcccttccttgatactgggtcttgttctgctggctgatggaggagggcgtcttgggggcggatgcggaggtattcttggggccattcacctagttggagtaggcaggtcctgatggcttcagctggggacagttgttcttgaagtgactgggatctccgcagtgccaacatgcattcgccg

SEQ ID NO: 9794 - DNA, 679 bp, Zea Mays
ttggtttgtactctatccactttgtaaacatatcgatggcgacgagcacatgagtgtatcctccctaagctttcttgaatggcccgatcatatccagcccccagcatgcaaaaggctaggttacagggatagtttgcagatgttgggtgggtaagtgttgttgctttgataggaacttccaagcttcacacttctagactaagtctgatgcatccttatttgttgttggccaatagaagcccgacctgaaagccttccctaccaaggtctttgatgttgcgtgtattccgcactgccctgcatagatctcatccagcagttgcttccctgtagcgaagtgaatgcatttcatgaggactcctcctgcaccctcctgtatagcagccccctatgatggtatagtgagctgactgccttgcaatgtgctctactgcggcattatcatccggctcctcctcatttttttatatctgataattggctacctccaatcattgggatctgtctttgcctggtctaccgcgttgcattcttcagcatgtcctgttgtgatgcttggctgttgtacctcctgaacaaaaaactttgggcagaacctgggcccgactggatcctagcttcgacagtgcatctgctgctgcattgtgacccctttctacgtgatggaattccaaaccct

SEQ ID NO: 9795 - DNA, 513 bp, Zea Mays
aagacgatatgatccaggccgagtgacttttgttactatgaatggtccttcccatagtggtgacaatttgtgccgtccctcccccgttagaattcggcgaaggacaagatctcccgctgtgaaggatcgatgtcgtatggccttatcatgatagcgcctcagagtttgctggcacctggctgactaaatcactgtattcaatcgttcttcttctagtatatcaacatcctccagtctagtggcctcagcttcagctatgttttcgaagatcaatcttggtgcccccaacttgagatcagcaggtagcactgcctctgaaccatagaccataaagaagggagtgtttccatgcaaagctcggctaggttgagttcttaggctccagaccacatacggcaactctctgatccactttcctacgaacttttcattcttgtcgaagactttctttctaagtgcttccaatatcattccgttggctttttctacctgcccgttggctctcgggtgtgc

SEQ ID NO: 9796 - DNA, 659 bp, Zea Mays
accaaatcaatccggacagaaataacattctctttagcatcatcgtagattttttaagtttcatcctagccttgcactgtgttcgtttcgaacatgtgttacacatcctgggatttccaactcccctttcagcattctttccttccattgaacaattcaaccatttacaattcttccactccctttatttcttcaacggaaatcctaccacatatgcatattgcctataaaaattatatgcctcgtccacattacaaaatgtcataccaactttaggtatcaatcttatatcaatattgtccggctgtgcacagaaatttaacatttatgaatcaatgacgaccaaatttactgtgctactgctacaccattacaaaagtatgtatgtaactgatattatcatcttagaggaacttacatggctttgcagaatgtgaggtgtgtcctgttcatgcgccctaatatgtctcatggggattcgtttatctgctcctaccacatctgccgatcttgtgttatcgttaatatgtctaggtgccttcaacgccgccggtggagtaacagatacactgtctgcgtctccagtcaatgcagacggtacaacttcgatgtccatggcagtagacgtacctattgatcaatgccttcagtatgtccgg

SEQ ID NO: 9797 - DNA, 470 bp, Zea Mays
cgccagcatcatcggaccatggcggtggtgaattcatgctcgcctcgagaaagtgtcaaccggtgcttcaggaatttctcaccggaattggcctccgcggtcgtgtcaccgtgtgccgtggataggactcaaagcgccctaatccatggaggtaagcccaccatctaactcacgatcacctccgcattgttttgcatcagcgcttgtcgtgaatcggtcgccggggggaaatcgattttttcctctcccggcgaggggcggcgccgtgctcgtgttcctgggcgcgggtgcgcttgtagggacggcgtcaggacgtcgatccggagatcaacggttttggttaagggttatggtgatgaattgcgggccattgagcgtaagatgggcgggtaggattaaatccagggtgtatcccttcgcttgatgtgtgtggaccatagatctgtggatgtccggatctcggggcatgc

SEQ ID NO: 9798 - DNA, 500 bp, Zea Mays
ctttaggaggaggcaggttccaggccgagtatgccactggggcaccaacatttgacactttgcctctaaggatcatctcaagacggctcaccaagtctgcagagggaattcttctgttggtaacccgagttgagtcgggtaggcctcgatacagataagccgggtatgccttgtctttcaacggctgaatattcttgaagacaaaatcagcaaccacagcttcagcagtcagacccctctctttcagcaatccaacttcagccagcaaagcacctgcctcggctacctcctgatctgtgggggactcggtccagcttggggtgcgaacatccggctgtcttcccgaccgaggggggagagagtttccatgattctcaactatgaaccactccaagcgccatcccttgatactatctttgagagggatttcgagatactcagtcttcctcccgcggcgcatctccaagctagcaccaccaaccaactgatgttgtcccccg

SEQ ID NO: 9799 - DNA, 656 bp, Zea Mays
agaaaaggctagcaaagaacaactcctggatatcaggacagatgaaaaggggaccctttggtttagaaaccgtctgtgtgtaccgaaggaagaggcacaaggaatcctgctagatgaagcccacaactcagcctattctatccatccaaggtctaccaaaatgtacctagacctcaaagccagatactggtggagaggaatgaaaaaggaaatagcttagtatgtggcccggtgtgatacttgtcgacaaactaaggcagaacatcagaggcccgcaggcctactgcaaccccttccagtgcccaaatggaaattggaagaaataggcatggacttcgtaatcggactgccccgaacccaaaaagggaacgattctatctgggttataattgaccatcttaccaaggtagctcacttcattccagtaaagactaccttcagaggagccaccctcgctcggatatatctcaaagaaatagtaagacgtcctggcattccgtgaagaatagtgtcagacaggggaatgcaattcacctcgaaattttggttgagccttcaggaagctatgggcaccaagctagatttcagcacagcctaccacccccagtcagatggatagacgaaagagtcaacaaagtcctcaaagatttgttgag

SEQ ID NO: 9800 - DNA, 650 bp, Zea Mays
gtaagctgttggagaaacattagaaattactttaaaaaaagaaacttgaagatgctctaagaaccatgctaccatttgcaaaatgaggtactttttgtcctgatttgaagacggtgattggcttctacactggttagcacatggcggagattgtgttagatttgtttttttttttaaaaaaaagatgctacgtagtcatactatttattgcccacgagacgagaggagacgatgcagcgtccactgaactggcgggtttgactagaaacggcacaaaacaaagcgacgggcaacgggccacatggtcttcctcttcccttgcattccatcctcacactcgcttctctgaaccagtgaggcagtgaccccctcatgctcgagatcgttgttgcctccagctacaaggaaggcaagatgcgcaccagcacagtacacagtgactactccccccacccacatgcagcttcgagatctggtagctcagccagatctcctatgctatgctagtacgtgctagcatccaaaaacatgtaacagacgcatcttttccatttcacccaactcgcccctataccgggatcctatgctactgctacactatacgtacacgttgatgaaccctgaaaacatcgttactcctacacaaagga

SEQ ID NO: 9801 - DNA, 467 bp, Zea Mays
ggtgtttataggtagggatgcaagttggctagccctcaaacccgcatcgccatcctaattgttctgtcttgaatgttgttaaattgggctactgggatgggattttggtgctcggtgctgttggagttaagcttattgtccaaatccagaattataggaagatgaaactttgttgtcaatttcaaatttattttttctatggatgtgtctgtgtggaattacctaattttgcaacctgcaatcgataggtatcgacaatgagacggatcgtcgggaccagtgaagccccgcgatgacgtagcaaccagagccctcccgcgagacgattcccaaagttaggtgtgtgacttattccattatttgtaccacatgattgtcagacatattaatagcacgagattgacaagaacactcatgtattttccagtaaatcatcttgattacctcggtgtacaagttgcatgggt

SEQ ID NO: 9802 - DNA, 458 bp, Zea Mays
ggagggtgtatttgaaaatatcattgttttcaggtagggcgaacagctggtcgttccagaggaccgaccaggcgcctaatcgtgattagggcgacaattaggacgcctaatcggttctggtcgacctctggtcatcccctaactgtcctatatatttctggacatatgtatatacaagaaatattgcgatatgcgttatataagtctgaaagtctgaaattgaaactgagtaacagactgaaaggcaatataggcatatagcactacatcagaactgaaattgaaatattgaatacaaggctacaagcagtaatgcagtacctactacctagagcagatcatcatccaatcaaaaagcatcagcagcagcttctcctccaccagtagattcagattcatcagaactcagacgataggaaagataggaaagggagagaagaggggggagcagggggggg

SEQ ID NO: 9803 - DNA, 441 bp, Zea Mays
gccgacatgtgggccaggggtcgtgccacatctgcatcactgacgggagggaccatccggtcagccactcacctcacgtgcggaagaactaaagtcgcagacaaccgtgccccctcactagtcgctgtcatgtgggcccatgtggtcagccccttcccaaccgcaacaaaccgggtgaatccaccgtgccaaggttatataagcagagccacatggatccctctcggccaccctaaaccaaagaatcacggaaagttgtgtgccgccatcgaagacttggttctcctactatttgggcggtggtcgtcgccggtgatccgcttcctcggggagatttcatggactactcgtagtgcttctgtggtgctcgacgggcgcagttctagggatttcgaagctcgcgggttgctggtgcggggcgattttctcaccggagcacaa

SEQ ID NO: 9804 - DNA, 551 bp, Zea Mays
gggcgccaccaggggaaactcgcgctctggcgtcccggcaccgttgggaggtagaagatggcctcgggccattgaatgggagatatgcggccaggatttgatgatggggtcagttggaccaggttctatctctaccatgggatctttagccaacgcgtacgattagatgcatgaagtagctttgatgtttttaatctgtgccgcggtttggtgatcgggcggtcggatggtgtcgttgcaaggggaattgtgggctatggatcttgatccaatggtcaagggcgtgtaccggttcggatgaaagtcgctttaatcctggccattcggatcagattgggcggctcagggtgcccgataccccctttcagcctggcaaaatagcttaagagtccctgcccttttgaaaaaataacctttcgtcctatcgtagtgaaagaaaaccacaagaaggtccctagaatttgcagtttaacccctggatttccctattattctacccgtagtaaaataagcagaaattgatttctagtataaaactaattctagaaact

SEQ ID NO: 9805 - DNA, 702 bp, Zea Mays
cttagttttattttggtcatatatatattttatactttttgttgatgtattactgttgtatgtatatgggccggtctggcacattaagacattttgggctatttgggccggcctggcacacataactaattgtgggccgtgccgtgggccgatgactaggcacacgtgttggcacggcacgacccataattggatatgtgcttttgtagaccatgcctttgtgggccgtgcttttgtgggcctgtgccgtgccgggccaggccagcccacatgtacatgtatatggggactagggccccgttccccaaaaccaaacgaaccagtcggtgtcgtcgctggttctggtcgtttctgggtctccaaggtatcacgggctaggctccgacgtggcgcactagaaatatctcctccctccgtgccctccctctcatctgtctgtgctccatagtcacagtcgctgcggaccaaatcggttgtgcgatgggatgtcatgtatcatgccatgcgtgatgcgtgagaaatcctgtcctcgtcaagccagggcctgccagtacctgattattactaccgatcgatttgagatcggtcgtcggaaaggaaggacgcagggcaccttcacgtggctccgcgtggacctgtcgtcgctctggaaaatctcggaattttccgtgaccgtccgttctgttcgttcgttcgttcgtg

SEQ ID NO: 9806 - DNA, 351 bp, Zea Mays
ggacaatctttgagctgggattcgagcatgatctagtgagtgtttgactgtgattgctataacaagattgtagctggtttattaggctataactttgatacagatagttaattcagtcattacataaaatctggtgcaaatcgatggcaaatatgctctgactggccgactgaatgagctttgcaatggtacagtgatcggattggatcaggttcagatcccctcgccaccgacgtgctgtgcgctcggattcgtgctcgccgttggtgattcgcgctcggatcagctggataacaccggggtccgtaaatatcacgccgaggatacactccggccactattttactccgg

SEQ ID NO: 9807 - DNA, 513 bp, Zea Mays
tgaattccaattgatgaagatgatatataccataccgtgtacccatcggagatggatcacgtacgcgtagaccacacgtacaaatataatcattccgacccagtacgtgcaggcgatggatggatcgccagcatatatgcatgcatggacggcgacggcggatcggaacgacgcaaggggcagggggcatgcactgctgctacgtggtgccatgcacatcagcgagcatcgcatctgcacatacacaaaaacgagctcgcgtcccgtccgtccgtccgtcgctgacgaacgacatggccgtgtgttaggtctcacgtccattcgtgaaagctccaacgacgacatgatggccagtacacgcacactgtgcctgctttttctgtcatgctgtgtatagtattagtagtagaagcagaaggccgctgtcagcatgcgacgagcagccctcatcagctatagctgctactgtaattaagtgatgctaccacacgcacatatatacatacatatcct

SEQ ID NO: 9808 - DNA, 1501 bp, Zea Mays
ccaaacccaagcgcccaaatccgacccccccaaatgccttctctgtgatggtctgattctgatggatgctccccacctgctctagcggtctagccccagctcgcgccgcctcgcttcctccgttcgcgacgccggcatttcgtggcgccttatccttctctgcccttctggtgggtgagataaaggggcagcgggttgttttttctgaaggtttcgcggccacttccagccggatccacggccgcggccaccgccgccgctccctcggcctggtggagaggaggggtgatccatccgaaggtggcggttccatttcttgttttcctggtgagtaatcctaggttgcttgcttgtatagatggttcttggtagttctgtcctgatgggctgcggccgcgagcagagagtccgagtctttctcgctttccgcccagattttcagcaccgatgctcgttgccaaagcgtggggtgcggtttattgttttccctgaaattttgtggttcaatgaatggctgaaccagtattaaatcatcaggcaggtctacatatgctatatgcttatctttaatgttgatgagttgaagctttgtgcttggtctgatgctctaaccaggttttgtttatgtagattgcctgagtaattgtggacatgaagagacttctgtggtgctgttgaagaattagtgccagtctcgatttctcctgatggataagcagggcaacgccaagaacggggaagtggggaacaatgtgtttcacaggatgattcttaatcagtttgctggggacttaggtctcgacgaggacaatgtgccttgcaatactccaagaaactccgctcgctctgcatttggtggcagggcagttgcttctactagcagcaaccacagcactgattcattgagcccaggcgaatatgtgagggatcctggatcccttctaagtttacaaccatggatttttagaagaaacggctcacagaaccatggggaaagtgtgcttgcgagcggtaagggcaagaatcgggtcgatgtccttcgagagggtcatgctgttggaatctcaccaaggagtcctggtcttggttctgggcctggaagaggttgtggagctgttaggagcagaagatctcgttcgaatttgatgaagccacttgtgccaatggacaactcctacgtcccacagctttacagtgagaactttgaaatcgaagaatgcacatttgctccagctccttccccagcttctgctaggccattcattgtgacagatggtacaaggataattagtaaatcacgctatgagccagtacctctgccctttaatatcggaatagacaaggaggaatgtagaggcacctcagcgatgctaggaggtctgattggaattgttcctctacctgagttgaagaaactcaaacatgagtgcagaaattcacatgatggaaggcttggtctgtctggttctcagcgaagtagcagctcacatgaacaagcagg

SEQ ID NO: 9809 - DNA, 430 bp, Zea Mays
gcagatttaggattacctgaatgacctccatctccagatgaagatgtcatgatatcttctttggattctgatttccccggagagagggcttcaatcgccaactgagattgtggttttccgccccacgattgcgacccttgagccaaatccttctgcccccaacgatcccaattagggtttctgttcttttggtccatcagcgacgacatggagcagcgacccagacacgaccactcttcatccaccacaggtggatgcaacaacgaggaataccagccaccccgatagctggaacgggaggaggcagggagagaccagaggcgagagagaaacacgacgaagtgtgggaaagaatgagaaccgatgaggtccgaggggaaccccaactcacgcttatgtcgatcttctgcactaagcgacgaataagcgt

SEQ ID NO: 9810 - DNA, 669 bp, Zea Mays
gagctgcgcaagctgaacatggaaatggtttccccaggtaccttggattatatctcagttgagccaaccttacaagagcagataatcctggcatagattggtgacaagggtgttcaagtcattaaggaaatgctcaatcaaaaggtggataagtacaaatgctttcgtcaggacagcaagggtatcttatggttcgaagatcaactggttgttcccaaagacctagaactcaagaagaaaattttagacgaagctcatctctccaaattctccatgcaccccgggagtaacaagatgtatcatgatctcagatccttatattggtggaccaggatgaagagagagattgctaagtacgtatctgagtgtgacacttgccaaaggatcaaagctagtcatttaaaggtagcaggtaccttacaacctctccccataccatcttggaagtgggaggaccttagcatggacttcattgtgggattgtcaaatacctcccgacaccacaattctatttgggtcattgtggataggctaaccaagacggctcatttcttgccagtgcatgccacacacagggcagaaaaatacttagaaatctatattgaccaaatagtgcacttgcatggaatccgaaggactatcgtgttagatagaggagtacctttcgtc

SEQ ID NO: 9811 - DNA, 665 bp, Zea Mays
ttttattccaagttgccatcgatcagtttacacatggatcgagttaattcaaaacgatcgacttattcagcatgttctttttctgcagttaggagtcttgtttgcataaagtaaagaggaatcgcaccgagggataggtatttatttcccttttacttggctcgataagtatgactgcataggtgcatattatagagataaatttattgccaaaaaagtgaacaacatttggtgccacatcatttcactttgcaggcattgtgagtatgacgtgtgctttgcatgggccagcacctgactcagttcctgtgaaatcatgaatccaccaacggaggtcaaatacctgactgcagccagccagaatgtttacagccacacatgatgatcctatagctggctagaagaagaagaaatatttacagccatccagcataaccttagagctggtttgaagaggatgcaaccggtgcagctgcacaaatggtcagtatatgtttatcctttttaaaaaatcgccattcttattttctcagacaaatctgagttctagtctccacgctttgcatatgtacttcttatacattattatcaggcagacaagagattgtgctgtgtgtggccctctgattcccaaaaaaaaacaccactgagatgcagtccacttg

SEQ ID NO: 9812 - DNA, 1188 bp, Zea Mays
gccgatttacgtaatgaccggcgctctccgttgactggcacctaattcacacctcaatcgaagtttcccgtaagttaatttcactaatggcgcactaaaacgccctgaccacggtgaccgtatgggcaacggatgaacacgggtgttcacgacaacccagggcggtctagttcaatcagaggggtcgtgaagcttgaggatgacttagggatgctagaaaaaacgatcaaagcgcttgaactaacccagagcaagctggccatggcgagggaaaaccgtgcggagttcttgagtgatttgggggaaatctcaaattgaagctctctggtggaggatctagggtataggtgggtgcgctagatgcgtgaatacataacgaagctgatggtgcactcgatttataggctccgggggcggtggctctcaatttgatcacggcgtgctggcggccgaagatagggaagaacacggtggctgtaaccgtggcgttcaccggtgcaacggcgcaaggataatactcctaagggtgccacgattactaccgcataataacaagctacagcgtggcgcaaccgaggtcaccggcgcttccacggcgacgccggtagtccggccacgttgcaacgactatagccacggtgataaactccaatctgcgatcctatccattcccccatgagatctttaccttctcgtagaaatcttctgcgtgcaaagcacaaatcccggcgaccagcacaaatccagacgcggatcgccggcggcgagctgaccgagctggtagtctaatcgggatactgtaccatcgcctagtttcttcagaacgactgaccgagcaccttcagggcggatttttagcaaattttatgtgacgactccatcctccctctgcaccaaagttgtagacctatcaaccatcttcacctttgttatagcatcactagtcagattcctactggatcatgcttagaattgagctttaagttcatgaaatcccattgttagtctgacttcagactttaagtagtctgacagcacgattttaggcacatttttctccaaatttttcacaacaacaatgtttaatcccttaaacaaagttgttctcctaacatagctctatagatttgatgtggtgaccctaggcaaattctctatatttttggatctacagagccctaaagtcag

SEQ ID NO: 9813 - DNA, 361 bp, Zea Mays
gcgccagctccacccccgatgcctcgaggagcgtgctgtcgggcagcgtgccgtccagatcgccaagatcctcaacctcttcatcgtgcgccatctacagcaatagcacattccttcagcaaaaccacacatacccaaacatacccacacaaagatgagcctttacctgatcaatcgcccggtcggacctctcccggaccgtctctcggccgtgagggccccacatcctgtcgaagagcgcccccgccgaccgcttcagaaccgggtcctcgacctggaagatttcgcgtttgaagccttcgtccgactggtcgaagacctcgtagtgcccgcacccctctcgggacagagcattcacggc

SEQ ID NO: 9814 - DNA, 302 bp, Zea Mays
agacaaatatccccatcctgattatagcctcgggggtaatctgatgaagaatgatttggaatatctttaatacctcgaccacaaatttactcagcgggaactgaaggcctgccttcaagaagcttcggtaaataacaacttcgttttcctccggagtaggggcggtactgtctcctccaactctgacaatagacatgtcgcgaaaatatctccccctcatggcgtcaatatgactttgcttgatagtcgattttctgaagatagtgtggcttggccgccacgaccgatcctcagaatcttca

SEQ ID NO: 9815 - DNA, 557 bp, Zea Mays
tgcgtacaggcgaaggaaaaggagaaagaagtcttcggcccgaccaggtgaagtgtgcccccacgactctcttcgcatattccccaggtgctcgtcaacggcgtgagggatggtggaatgcagcggccgcactttctcctggcggcgacaggttcttcaccacacaatagaaggccagggggacggctttatatggcccatggagtccgcggatcggaaggattcaaccgaacccgaaactatcgctcgccatgatccccagctccgaccgcgcacgttaacagaggatgaactaatcggcaacaccacacgcggcggggatcacgacagttcggttatgccagatgcggagtgaggatggactggggcgcgggcgacgcaaccccccggagaaataggcgtgagccgttgagctcggccgccgcaaccgagcccgcggtaatggcgagagcgcccgccggattcggtcggattgatgagaggggaataggctgacagagcgggtcccacatgtaggtgacgcacgtgaagtatgggttgcacgggttgaaaggctg

SEQ ID NO: 9816 - DNA, 829 bp, Zea Mays
gagctgagggctacagagctggagtcatgtctaagtcttggcatagcgacagggctccagtctccgggtcttcgtcgatgcctctttcctttcgttggtctgttcgtttgtcttctgtgtgtgcgtgtgtctgtcccctcggctggtggtcgacttcctccttttataggccaatgagggggtcggccatcggtggcttcctcgagaagtagtcactgggcgatggtaaaaccgagcgttctaccccggtgaagttgtgtgcatgcgtgagcatctgggtcacctggtcatcttgtattctttatggaagacggtgcgggaaacatggggcccaagtgccattacttgagctacgccgacccctagccttcgtagcctgggtcttagcgcggcttgtattgttgtgccctacaggcggcctgcgcactcaggcctagccctgataggtcatgagtgtgtcgcagtccaggggcggcgggtcataaatgcaccacaatctaaggggttcataggtcataagtacgctgcagcccaaagggctcataggccatgaatgggaggcggaccagcacctctgcctcggctcggcgccaggcacatttaatgcgcccagccacttttggcaggtcagtcttaggtccggcaagggatccactcgagtggttatccttcagctctcctagtcgttgtctagctccaccatgcccacccctgggctcggtgcctcatggtttgtccagaggcaggcgcttccaaggcagacatttcctttcttctcctgttgaccaatgggccccgattgccaaaggcttcttcccagcgtcctcgc

SEQ ID NO: 9817 - DNA, 398 bp, Zea Mays
gaaggacgcgagcagacgagcgcgtagagaggaagagggaaaacgggggcaggggtgcgtgcaggggaggtgaggcacgacgttgaagtttttataggcaaggagagggaatcgcggacgtattcaatggccatcgaagctgagaaacggaagtcataaatggagatttaatggagaacaccggtaacagctacaacaggcgggagaaggggaaacgccattgcgcgttaaagtgggagaggagaagagacaggcggctgctcaactgatgcggctgggcgcggggagatggagggctgacgaggcggcgacatccatcagtcaagcggtggtggcattttttttgttgttgttctgatgcgagcgtctcttaatttgaggtagaagacgaaccttac

SEQ ID NO: 9818 - DNA, 377 bp, Zea Mays
ggctgccaatagttttgccgggactctgtattgctactgctaggaaggcttaacttgtgattggttgggtgcatatgggtttatccaggctttggtgttcaattcctcttccagtctttctcatttcatttgtctctctcggttcctctcatcgtcgcagcttcctctcccagctgccccaccttggatctagggcatcatggctacctgtgttcaccagagttggtgcccattatgtttaagctagggatgcctaggctgccggtgtttatcttgatgttctacaatggcacaataaattgatctattccctcaagaatctctcatactacttgttaggatctgattgttcataactgacatacttgataattctg

SEQ ID NO: 9819 - DNA, 304 bp, Zea Mays
gtccaatgtttttccagactctgggatgagtgctacagctagtgtttcagcaggagccgaatcagaggaatcctcagccaacatatccagcatgacacttatttctgcgtcgctcgggctagtaggcatctcaaagtgaacctgcctcccgtcattggggattccaccaagcgaatcaaccaaagccccaacctcctcgagagaggaccgcactctaaggcccaaaccactatccccagcaggaggatttgacacaaaactgatgaacgtcttgggaggaggtagattccaggctgaatacgca

SEQ ID NO: 9820 - DNA, 441 bp, Zea Mays
tccgtgtcatttcgagcactaaaatgaccacatacttttaacaaacgcattcaccacgtaaatagcaccatcacacatgacctcgacttaaccgcagaggaagcgatgactacttcggcatgtcaccacctctctacagtccaatcaatattaactacatcgatcgaacctcatatcgcgtaactcttataatttattatctcaaatacaaccataccacggcatggacttgagactctttgatcaagttaacgcaatcacgactaccatacacatgcgtaccactttttccaccatgtacctttaatctacgtcaaaaaaaatactcgtgcacacacctacttacaaacctatgcacaacgacaaaaccaatgaccatctcactacaacacctaacaagagctgtgaataaaatcaaaaggagcatcgcaccacttcatc

SEQ ID NO: 9821 - DNA, 348 bp, Zea Mays
agggacagcttcgccaaggccccgccaagctccccgagggttgccgctagactctactgcaccaggccctaggattgaagctcgcagacgacctacacccacctgtgcctgtggaccagcttgctccgctcgccgccggtcgatcaccatcgccctcaagtttgcctgaccgacccgaagctccacaacccgaccccgacacgccactgcgccatgtgagccgcaatttctcgtcgtactctgagcactatttcggcgaggggaggagggagcacgggttgaggaccttagaaacctgagggtctttttgcactatcagcgactcaggtgaataggagcccgagggca

SEQ ID NO: 9822 - DNA, 951 bp, Zea Mays
ttgcatcaggggattataaggaggaatggggtgatttggattggagataactctgatctaaggactaagttgatcacagctttgcatgacagtgctgttggagggcattcaggagtgcatgctacttatcacagggtgaaaaaatgtttcggtggaagggacttaagaatgatgttactcagtttgtgggccagtgccaagtatgtcagcaggctaaaagtgaaagagtgcatccacaaggactgttacagcctctgcctatccctacaggtgcttgggaggatgtttctatggattctgtggaggggctgcctacgtctgaaggttttgacactattttggtagtggtgatagattctccaaatatgctcattttatttccctcaagcatccatacactgctcaagaggtagctcaggtgtttctggacactgtggttaagcttcatggtgctcctaaaactattgtgtcagacagagataaagtgtttacaagttctttctggacacatttgtttcagcttgtgggagtgaagttgctattttctactgcatatcatcctcagacagatgggcaaactgagagggtgaatcagtgtttggaacaatatcttaggtgtgcagtccatgatcatcctcacaaatggaggcattggttggctttagcagagttttggtataacaccacctaccatactgctatggactgttctccctttaaaattatgtatggttatacacctcctatgatggttgttccttgattgagagaggaaggggatagggatgtcactacctggttgcaggaaagataagtggcctctgaactgcttagagagaggttggcacaagctcagaatagaatgaaacaaatggcagacagagggcgaactcctagggaattccaggttggagaatttgtgcttctcaagttacaaccttatgctcaaaa

SEQ ID NO: 9823 - DNA, 582 bp, Zea Mays
ctgacagtgccgcagagattaattaattaaaacaagggacggttatcttgggcctgtcagtagtaggtgtgccgacacttaccgacgcgacatgttgcaagatcttactgacgaagtggcgccactcttttgttttattttttttcgtcagaaactagtaatgtaatacgagagagagaatctggcctgcaggtgacaaggagctagccatagatcactcaacacctgggggaaaaaattccactatacgtactgttgctatggaatattcggttaatccaacaagtcaaggtctgtccatcgcatcaccccatctcgcagtcgcagcagacacatgcatggatgcatcgctgggccggcccgtgcagtgcgtgcgttctggacggacggacgaccgtccgatcgattattcggttctatcctatctatccggactggcaactgggaatgggaacttgcgtggattagcgtgcggtttgcatctcggtcacatgatggctcatgtggtactactatagctatatagcagctaggtacgtacatcacccacccatgcatatgcactctgtttctttaatttct

SEQ ID NO: 9824 - DNA, 451 bp, Zea Mays
gtgacagtgaggtttgcgacgtgattttgggctactgactatgacgatgctgattctaaactcaataaaacaaacaataactcaaggaagatagacgatctgaaattgatctagttgtgtctaactttaagccctgagagaggtcagatttcatttatgtttttatgaagtgtacaagtaatagggttgctaactgtacgtacctgtagtaggtctccactaaaagcgccgtgaaggaaggccgttgattttgcactcatacaacaccactgtacaaacataacaacagatgagagggttcaatgcatgagagggttcagaaaggacagctggctactacagaaacgcaagacctcgtgaaaagatggattagttttggatgttgttcatgatattttatgagactacgctcactcgtttgcataaacataatcatgtttcattagttttg

SEQ ID NO: 9825 - DNA, 450 bp, Zea Mays
tgcgttttcccctgggcgttgccaccttgctgtcccgaataggctcacctgacaattacgtgacattacatcacggccatcggttgggttcgatatcgcggcgctaccattaccattaccgacttctgtggtagggcttcccactattcagggatttctggccaacttcttccttttccagtcctttcctcacatcagaaggcaatagttgctcacaagacgcacctctagttcacctctaacagtccctcatcatctgcacaaaacttcttaccaaagataccacaccgcgctcaaccttgccacgagcatattgtaaatactttcttctttatctctagctactttgcgctggtccccaacaacaataatggaaaacaacttatttgtagcttcccttgaaagtttccccagaatgtgttaagtctctgtctaatattagtattcttt

SEQ ID NO: 9826 - DNA, 706 bp, Zea Mays
gtgaagcactatggcgagaaattgctcggtccccgggcacggttcgttagattcggtggggcagaagcctttccgcacccacccgaccttcaggttttggcacggaatgtccaatttcgacgccggtgaaggacggtaacggcggcgggtttcgttcgcttacagttctcagagatggcagagggatgggtactagcagctctcgagtcaccgagaggctttttatctcttgcgcggatgagtcgggaggaggagtcgtgggtcacccgagaccgcggatctcgcgcggcggggtatggcgcgcggaagtcagcgagtagctcggcgggtttgttactgacgcgaggaaagcggggaagagagatctgacgacccggccccacacaacagcgaacacaagcagcccccagagactgtcgacacgggcccgcgtggtcagcctaccgaagagctggtgcgtgcgcctgcggacactaaccggctgatgttgggtcacgtgggggaaaagtgagattgggctgaatttgaggttggcggcccagtaagttttcttcttcctttttctttttcctgtttggttttcttttatgattattttgaatcaagtttgaatttgaatgtgagtttcacctttgagtacattttacaaattcacattctagtgtaggaataatatatttttgtacttatttttatctacataata

SEQ ID NO: 9827 - DNA, 462 bp, Zea Mays
agggaactcccaagtcgtgggaaatcaactgacgactcgttgaagggtcaccaatcggaacaacccgcaatgcatcagtagggactaggtcagtatcatcagcagaaggcaaaactctgtcatcaggagcgctggcctctaaggcgacttcttgacccgaagcgtgaattgctgccatacaaccagaatgcggaggagaagaccctacgtgaacgtccatggaagtgtgagagggagaactgactcggacaccctcgggggctgggtcatagctcgcgctacccatccgagccgggtcatccccggcaacaccctcgggggctgggtaaatgctagtgccatccttgagggccaagctctccgtaacagccacctctaaggctgaaggaccttcacccacttccatgggagcagaacaatctagactagcctcctgacccttaagaccgcgctctaagatcg

SEQ ID NO: 9828 - DNA, 697 bp, Zea Mays
tttggacttccgcttggccaagaggggacttcctcatcagcctgcctgctctctttgtgatcaaagatggaaaatattagccttatccttgtttcttgtgttttctctagagaggtctggagttttgtgcttcagagagtcattccggctgtcagaccgccaaacatgaacagtcgatgtataactcatggtggtgccgagcttctgcaggtttatctaaatacgagaagaaaggatccaattccctagtggtattagttgcttgggagctttggaaacataagaatgcttgtgtttttcagggtataaggcctgctgtccaaaaagttgtgcttgctataatgactgagggacagatttggcgcctggctggggcttctgccctccaggacttggtccttaagctggaccactttggttcgtttctggaagtcagtgtagaagtgtgagttgtattgaacaccccccggggtgtataatctgtgtggggggcatttttttcttctttatgaaatgacacacagccctcctgcgtggttcgagaaaaaaaaagaattgccaaattggtggaagtggtcgctagtgtttttagaggatcttttgtacctgactaattgttgtggctcttttttcaagcacattaaaacaaggcacacaacattgttagggtcattgcatatttgataaatttattctt

SEQ ID NO: 9829 - DNA, 623 bp, Zea Mays
gcgccaccagtgatcttcttcctctccgaccgccagcgtgccattccaaaattgaagggcaccgctcttgaacactataaattaagcacaccgctagctccgttaggtaatcacgaagccagagcacccgctcctgcatccgattagccaccatagctctctaatttctctttctccccaaatctgttttccgcaaccgtgaaagaaccctcgccgtggctagcttgttccaggtctgttcgtgctctctattctcccgtttcagtgttcctttggttctcctaatgctcctcgacccattacattgagctagactgccctagatcaccaggaacacttctgttcatccattgtctgtgttgtctccatggactgtactatttagagctccgctagtgaggggaaacacttgttaggtgttgaattaggtctcagccaaattagagcaccggtcattaagtatcgtggccggtatgagttcgccggagctctattctctgttgttccccatcgtggacctcgggtgtgaaggaatagaagcgcgggggtttatttgcaagtgttagtgacccattaaagaccagccgaggactccttctcagatgtttgaaccgacagggact

SEQ ID NO: 9830 - DNA, 391 bp, Zea Mays
ttgatggagacagcgacccatcccaggaggcgagcgacctggtcatgactccatatggtgggccttagccccgtgctagaccgcattaaccacgcctggcactgagccacagcgtggttgccgatccgcttcctactcatgatctacggacccctcgagtcgcatagcactcatgacctacgagcccccagactgcgacgcattaataacccacgcgcccctcggtttgcgacgcgcttatggcctatcggactaggcctgagtacgcacacatcccgcgcggcactacacgacgagatgcgtcgagccctaggctacaaaagccaagggtcggcttaacccaaatgatggcacctgggactatcgccgcccccacatcatccaccacgat

SEQ ID NO: 9831 - DNA, 567 bp, Zea Mays
ggaatcgtctgttgaggtcttcgccaagaattattgtctgaattggcagaaaaagaagattagtgaattgattgcccaatttgggtcttgcacgttcacgccgaggattgggaagacatcggccgaagcagttgaaattattccatgtgccaagaacaagtggggtaactggtggtatttctggttttatggtgccagaggatgtcgaaggggtgcctggttttcccccatccatcttgtgctcacactgttatgtggcgtttccacaatttagagtgaagaaagaagataaaaacgaataggcccttcggtgcgtagcccggttgagcagcggtcgggattttgttgaagaatttgttgcctacggcgtgtggccgctggcacacaggtggggtctgggtgaagtcacgcttcacctgatgccatttttggatgatcagatggtgcagagccctgccttcgccatcgatctgcgagggcaggatgcagccgccttcgttagggaggtggagtcgaaggctgttaaaattgttggtaaatatgtgccaaagacagagatgataagga

SEQ ID NO: 9832 - DNA, 603 bp, Zea Mays
aggtttcgttagttgcatgcaatggttggtcatgtaaggaaagactactcgaaattgaagggtcactcagtccaattcttagacagaggaactaagtccaatttcaagtaattgatatggaaggaacaaggggttgtgttggggaattcaacggtactggtactgagttcttcgaataggaacattaacatgcatttgtctaccagcaacattgagcaaacaacatagaatccacatgactggaaatcaattcacaagcgataaaatggtgggtacacaaacttcagtaaacgaggatgaggaatatgcaaatgacacaaaagtctcaatgttgtttcctttgtaccatactaaaagtagcatcaattttttacttcattagcacgtatcagttagcaatacatgattgaggatagattcagatctatgtgtaccacaatatcaaacttggttcttgtacataaacaataggcgcatcggatgtcggacataaccgcaaccctaactagtcaaagtaggcgatgaacacataaatcgtagcgctgaaagaagttaagtacatctaaaccctaatggtaatccaaggtacggtttttaaggaac

SEQ ID NO: 9833 - DNA, 341 bp, Zea Mays
gtgctgatatactgtcacaaaatagctgtcattacagtaacctcctcttctgtgttgctcaagcaactgattttgcaccttacatatattttgtgtgtctgtacagcaaatggaaacgatatttgtttaaacattaaatgataggatggtactttctttacaattgttttaaatgataagacgacactttctttacaatggctcacggtttacgtgttccttccatttgtgagccacagtcgtggccatattagtgctcacaatgttctagttccagcttgcagtagtgttctagtcacatcatacagcaatttctgtagcacctttccattattaattac

SEQ ID NO: 9834 - DNA, 538 bp, Zea Mays
agatcgggcacccccgttcctatcaagtggtattcaaagactcaggtattaccgtcaggcttaccctagtttagtttaggtttttcatcctataactccagataattgcgatccgaaaaaaattccgctgtcctataaccctgtttagccttgcaatttcgtttcaaattgctttgttgaatttgtgtccgtgttgagtcttgttgctggtttaggtcgtgtcgtaatcgtagttcaaccgctccatcgctgttatttgtttccgccgctatcccatccaccttacccagattacaagtcaagacaccacattactcgatttgccctcgcaagccgtcttgtgtgaattctcgccatgctagctctagattaggttgcaagccgcattgcattatagcccctccttgtttcatcatctagcgcttacctattgcttataccagggaggtttgtgcccctgtgctctatagccgccgctacggttcctaccaatttgtgccctggaaaaccataacttgaggtaccttccataaaacgg

SEQ ID NO: 9835 - DNA, 1129 bp, Zea Mays
ggaagtcaatgattgtttagcgaaaactcaaactctaaaatagagatagcgaataaactgtaaatcaaagtgtggccggtcataaaaacaggaaccctaaaacgaaggaggcgtcaaaaaaaatggcggtgcgcggctggtcaaaaaacaggaaccctaaaacgaaggagccgtcaaaaaaatggcgatgaaccggatcagcagctatgtctagtgcacaacagagaagggagcgtggatgagaagtacctgtaggtcgtggcggcacaggacgctaggacgaacaggcggcggagcgggcggtgctgtccatgtcgtccaggcaaaggttgagcgcggtggactggtgggcaaaaaacaatgaatacggatgaagtttctagagccgtatggaatgggaaaaggcaccagagctccgacggcttgtagcatttgggcagacagggaccgtagatgaaaaatcggacggtgcataaataaagacatgacgtggatagcctaatcacacccgttttgaaccgtgtttgtaaataaggaaatatccggtgatgtgccacgcgaacaaggagggcaggcggcagcaagtgagcgactgagcgttagctctgaagacacagtacgttcctaaaaaactagattatttttcatcacgtttgttctctaacaaattagttaaaccgcacattctatgtcaatccaaagactaaagtaggcttgatattcctaattcttagacatcataaacatatcccttttcccttcggtggcggaggacagaaaagatttaaggtatgacgaaacacagcaaagattttcgcttagtggtatagataggagacccattgcgcagccattaccatcatggactcgtcgaagatgccatgactctggctcagccctcgcgatgaacgagcgaccttggtattgtgggagactgaaagataactgagcgatggacaccggagccataaagacgatttggtgaaatcgtcctagtctcatctcataaaccatactcatgtggttggctccaagtccagctagctagtaagaaggctatagtcaactgttaacatgccaagcaaaggccaaaggcctgttcgtaaagtacatgtgtttctgtttttcc

SEQ ID NO: 9836 - DNA, 469 bp, Zea Mays
aagcggcaaaaaacatatatgtaaccctgagcatcctgatcgtatacgaggaatctcgtctaaggatggaaggaaggattcggaccacagtgggaaggtctatacaagaaacatgatcgatacaaagaagagatgtcagattattttaagtaagaggccaagaaagatttcaaagacctgatgtctcaaatgctatcgaatcctcctccagaattgatgcagcagttggtgactgcgatatctattcaatagatgaccactccatagatgcaaataattctagcagctcaaccgtcggcttccaccgattgtacgattgtcccaagctctgtcgcgtcaacgggaaataaggtctgttatatagtggatgacatcacaaggcatgtagcgtgcacactggttataagatattgtattaacaatcatcgtacgaagaaagtaggcacaggccttgcgatcctagaacgca

SEQ ID NO: 9837 - DNA, 736 bp, Zea Mays
ggcgaacactatcagacctctgaatatccaaagctttgccagcctctgggatgggtgctacagccagtgtttcagcaggggctgcatcagaggaatcttcagccaacatatccagcatggcacttatctctgcatcacttggattcaaaggtacctcaaaatgaacctgcctctcgtcgtcagggatttcgccaagtgaggcaaccaaagcactaacctcttcgggagagggtcgcactctaaggcccaaaccactatcaccagcaggaggatttgacacaaaactggtaaaggccttggaaggaggcatattctaggatgagtatgcaacaggagcgctgatgttcgacaccttgcctctgagtatcatctcgagccggctcaccaaatccacagctagaatccttctgttggtaacccgggttgaatcagcgaggcctcaatacagataagccgagtatgctctgtcttttaatggctgaatgttcttgaaaatgaaatcggcgatgacagcttctgcagtcagacccctctctttcaacaacccaacctcagcaagtagagcccctgcctcagccacctccaggtctgtgggggactcggtccaactcggagtgcgaacatctggctgtctccctgaccgtggggggagggaattcccgtgattctccatgataaaccattccaggcgccatcctttgatgctgtccttgagtgggatgtcgaggtagttggt

SEQ ID NO: 9838 - DNA, 965 bp, Zea Mays
acttattacatgattgctcaaaaacttaaagcagcctagtgacggatccggactctccatagcgcagcctcttgcggggaggagacaacgccacgacggggacctgagcttcgggcggatccagtccttgcagttgggcttccagggctgcaatcctggcgtgggcattctccagctccaagtgcaccctgtagaggtccagggtggcactgtccaggtcggtgttgagaccggccactacaccagctagggtgttaaggcgatcctcaccaggttcacctgggacgatgttggtctggcttcctccacgcagacgctgaggaagatgcctgaacctcgtgttctgcaactgctgccggtaggtgtggctgagcgaccacagggtccgacgggcagcaccgctgaccgaggcagcgtaggtggacagtggcgtcagggactcgtgagcagacagagtcctgaatcccctgtcacctgcatccatcaccctgacgtggatgcgagtgatgtaatagcaagcccggggaggctcgctcactcgccttatttcgtataggggccggacgtaggtgcctagcgcgtgcagcacctcttgcagcaggttggggaagtgccccgtcttgaacattgatgtgtaatgttcgacaacaggaccaaaccccatgaagttgtcctgctgggcttagtcagcttcctcgttgacgtgtccgtcttctccatcgtcttcgtcgtcgtcatcctcgtcatcgccgtctccggagtcgtcggggtcgtcgcctccaggtgcaggtgcttggaaggctggtgcagacgatgctgacgtcgatgacccagctgcgaaggccagggattctgccaacggagtgggggtcggcagctactcctccgagctgtcctccaggttgattacattctccactcggatgggagggagatccgccggaacttcctcgactaccactggg

SEQ ID NO: 9839 - DNA, 1110 bp, Zea Mays
gggaggtccacgacgacggtgagcgcggtggagctccagcgagctagcagatcggcctaacggggcaatgactggcgttcccgagcggcggacaccaaatccgacctactccgagcattttccctaagttaattgcacggttggtgacctactccgccctgcccacgagaacaacgaaggctaaggacttttgctcgtgttcccggcaatgggtggcggcctaattcaattggacgggttggagagcatcaccagaatacagagacatgagaacaatgcgcgaattggatggtgccttaccagaacgggctggccacggtgaggttggtttcacggtggcggaaacttgatttggggagactccaaaattcgtgagctctggcgaacgattgctagcgattttcggtggctgggggcgatgaccttgcggggctggcgggggcttcaatttatagggctcaacggcggtggccgggaatttcagtggggacacgcggcggtcggaggaagaagaagagtactggcgcagtggattcgtggctagcgccatggcaattactccggcgagccacagagagtcgcaaaggttcacggtgacacggtggaaacactcgggtacgtggcacaaggccagtagtcggccatcaccggtgaacctatctcctaaagccgtaaagcaaaaggggttccacggtgagtcaccggagtggcgtccagcgcacggggtgatgatcttttctacccaaatcgttatctccaagcccggtgcacgaatcaggacggcggcggcgtgaatcttcgcgcagagaggtcgccgacggtgaggatatgacgctggcgatctgatccacatcgggctaccgtacttgtaccatcagaaatccttttcagaacatctgacagggtgatttgaagcccgattttctccacagtttctctagtaactcactcaactctctgtagcaaaggtgcagagctacaaaccagctacaaatcgactatagggattaaactcagttgagcactggaccaaggttgaatccaagtccaaagttagctctgttacactgcaattctgaattttagagttccatcagcctgacagtccaa

SEQ ID NO: 9840 - DNA, 445 bp, Zea Mays
aggagcggagcgacttgactcagatacgaaagaagacccctcaataggcctcggcactttggtcgtttcaatgcgcttggggcggtgtgttaaaaccttaactttttcggcttcagcgtgctagaaatcaccgaagcaacagtttttcttttctttcctgccttttgcgaaggataacaataatccgggtatacaaacccgatgacatcaaaaactctattcaatctctttttgcctcgacccccaaaggctattgtcatagcatcatcttcagccttcgagtaggcaccaagcaattcatcactggttgcttcgatggcatctagccagtcatcattcggctcattgaattgattcatgtacccaaaggtgcagtttaggtaaactagaccgccttggctagatccagcagcagcttccttcggcatctcccacccacttgtga

SEQ ID NO: 9841 - DNA, 661 bp, Zea Mays
cctaacccaattgaattggtcgaggagcttcaagaggacttaaggatgctagaacaagagagtggtgagtacgaacagacctagaatacgccgaccacggtgagggctctttcacggtggcggagaacagattcggggagaatgagaaattagcgagctctggtgatcaattgagggcacgacttggtggcttggtgcttgactaccctatggagcttatggtgtgcccaatttatagagaccgtgagcggtggccggtgaattggatgaagacatgcggcggccggagaggaagaggggcactggcgcaagcgcttagtggctttcaccgtggcggaccctccggcgatcactggatatgcttgacacgactaaccatgacgtggtaagatgcctgggcacgtggcatatgatcggcaggcagccaacgtcggtgagcttatctccgccggccgcaaggcaagggggtacggcggctagccaccggagttatccccaagcgaagatttttacctataagtgttatctagtcactagtgagcacggatcgcaatggcggcgtggatctaggcgcacggtcgctggcggcgagatactctgaatcggttgatattttcgttactgtaccattgcaaacttcttcagtcagcctgacaaagcg

SEQ ID NO: 9842 - DNA, 517 bp, Zea Mays
ggcggtataatgacgagatgcggaggcggcaacaggtcccagttttcttttatacgctcacactggtaaagcctgattccaagggccgttcgggcgatccgatttcagcggacgacaaagcggtgtaggcgagtttgttacgaggaagacgaagtttccggcggcgctggcgtggggaaagtgaagaggagtttcagtccgatggggtccacccgccattgccacaaatgcgaccatcgacgtggagtcggagccagggagtgggccccataggtcggtgaaggtggagagcggtgagactagcctgcatccatgcagacagtgccagaggtttatgtactcgcgtgatggctcggctgagctgctgccgcgcgggcccggcctggtagtgacacgaggtgaaggtggactggctaattcctgggccgtggtgagaagttgggctgtgcaggtttgggagtagagtggactgggccgcgcggatgaatggccgagattggagtgaaatcggcccaag

SEQ ID NO: 9843 - DNA, 723 bp, Zea Mays
cgcgagtttgtaacctcatcctttgttgtgcttttgtttcttattgcctttacccttctcatctctcaatcttaccttgctgattacgctatgttcgttatctaaaacctccaatctcccaccttagttcaagcgtggtctcttacttatctcacccgtggttatagcctatactttaccacttgcaagacttatcttaactctattcttggttgtacctagattcctggttttttatgcacattaacctcttcctttatatccttgcctattatcacctttgacccttgacctctctccatatttaccatgatgtttaccttttttttgcctcacttattccatttcaatccgagagtgttgttttccctatcccgctcttgtttgtttcctttccctttgtcgctttgcaagtcttgtcttaccttgacttcatcctttgttgagcttttgtttgatatcatccttacctttttaatctgtagatcttgccttgatacttatcttaggtccgcttgttgaaatcccctcttttctatctcaattcgagagctatgttttacttatctcacccttggctatacgctcttctttaccgcgtgtagacctagacttaactccattctttattgtatttgtaccactagctcttctgtgccttcatcttttctctcatacccttgtctgctgtcgcttttgacccttgcgatattgaggtcttct

SEQ ID NO: 9844 - DNA, 601 bp, Zea Mays
atgtttggtgctgttaagtaatatgaatgtcttatgttgagtttgaaaatgatgaaaatgattccagaaaaacgccaaacatgaacaacaaatgatgttgattccatggcttcagttagtttttctttgtacgttttcacccttttattagattgtgttatggtgttaaattattgctcaattagttattatcattcgtagttgggggtcatatcttttctttaagcgcagtcctgaaaataacacacctctacaattatgttgcataggcatttgtttgaagcaatgtgcacatctcaatgattcttgctgtcagttacacttgacagtaataaccatctaagaccccctcacgcagtgcctctaggtgggagaaaacaaaaaaaggttcacaggcagctctggatacttcaatcctgaggggacagcttcgccttcgtccaggtcaccaggttcagcgaatccggctccttgcatcgctcctccggtaaccttctcttcctcagtttccctttgagaatattccgcactcaattttcctcacttcattttagatcctttatttttatacctacaacatatactttctctactatttcga

SEQ ID NO: 9845 - DNA, 443 bp, Zea Mays
gcatcgccatggtcatgtaggcatggagcggtggccgacaatcaacgaagaggttgagcagagaagttagggttagaggactagaattgatgattatatactgttagcattatttttggacaggttgagtgaaattgtggatgggctaggttgcatgctgcttgagagccggaggaggcatattgtattattttttatcgggttggcaggctgatacatgggctaaaattgtggcccatgcccaatctgaattttttactcgatttagaattatggcctagcgcccacttgggtcattgttcgggttgggtcagattggtttttttgtgtgggttgggccaggttgatcggtttggtgtctgtgttcagatctacgtgtctagtgctggcactatacaccacattggacatggaactcaaagaacttataaaatgggtccatt

SEQ ID NO: 9846 - DNA, 791 bp, Zea Mays
ctggatgcttctttgttcgtagaagtcaaagaattcagagctagtgaaattggatcccaagttagttataatgctatttggtattccaaacctgaatattatatcttgtatgaattccactgccttcgctgaggtcagagaagcaataggtttgcactctatccatttagtgaatttgtcaatggcaaccaacacgtgagtgtatcctccttgagctttcttgaagggtccaatcatgtccagtccccagcacgcaaatgtccatgttacgggtatggttggcaattgctgtgctggtaaatgctgctgttttgataagtattggcaagcttcacacctctggactaactcggctgcatcactctttgttgttggctagtagaaatcagacctgaagaccttcccaactagagtcctggatgctacgtgtatcctgcattgcccggcgtggatctcatctagtagttgcttcccagtggccgaaagaatgcacttcatgaggactcctgttgcgccccttctgtacagtgcttccccaatgagagtgtagtgagctgactgccttgcgatgcgttctgctgcagttttgtcatccggcacctcttcattctttatatatctgatgattggctcccattagtcatcagaatctgactctggctggctcagaacattgcactcttctgcccgatctaaggaaatacttgggcatggtacttcttggacgaaaaccccaggtgggacctgggtccgactggatcctagtttgacaatgcgtctgctgcctcgtg

SEQ ID NO: 9847 - DNA, 313 bp, Zea Mays
tcacgcaacgagtcacgtgttcttgctatcacgcgaccggatcgtgtgctgctcacaaggaagaagaagggttaaggaatccactcaccgataactagagaagaggttttgaaacagtggtcacgacatgacggtggtgacgggcaagacgatggaggcaccatccactattggagtgggagatgacaacggagcaaagctggtggtagggtagtcacgatgcaggtgatttggggagggcaaggtcgcgaggggaagtaggatatgaatgacatggtgaggtagccgccaaccgtagaagacgggactagag

SEQ ID NO: 9848 - DNA, 807 bp, Zea Mays
acacctttaggtacacgtgatcaccctcctcaaattccagtggtcttcttcgattattagcataactcttttgccgggtctgtgctaccctcaagttctcctagattatacagacttgttcttctgcctcttgaataacctcaggcccaaagaactgtctttctttagtctgatcccaatatagaggagtcctacactttctgccatataaagcttcaaatggtgacatcttcagactggcctggtaactattattataagagaactcaacatatggtagactcttgtcccaactgcatccattcttaagggcacaagctctcaacatatcctccagtatttggttagttctctcggtttggccatcagtttgaggatgatagcacgaactgaagttcatgttctcatgaaagcttttccaaaatcttgaggtaaactgtgatcctctatcagaaacgatcttcttcggtacaccgtgtaaacacacaatccgagccatatataactctgccaactgagaacctttataagtaaccttgaccggaatgaagtgagccactttggtcagtctattcacaatcacccgtatcgaatcataaccctttgaggtgcgaggcagcccgataatgaaatccgtatcaatttcttcccacttccattcgggtacctttaacgggtgcagtagtctagctggtctttggtgttccgctttgactctttgacatacatcacacacagccacgtgtgcagctacatctcttttcagcccataccaccagtaattttgcttcagatcctgatacgtat

SEQ ID NO: 9849 - DNA, 523 bp, Zea Mays
tttcagtctgtccatcagtctgagggtgataagccgtactgaaattcaactttgtactcatattctcatgaaaacttttccaaaatctataggtaaactgtgatcctctatccaaaatgatcttcttcggtacaccatgttgagacacaatccgagccatatataactcagtcaattgagatcacttataagtagtcttgaccggaatgaaatgagccactttggtcagtctatccataataattcatatcgaatcatatcctttctgggtgcgagacaatatagtaatgaagtccataccaatctcttcccacttccactcgggtatcttaagtgggtgcagtcgtctagctggtctttggtgttcagccttaactctttgacacacatcgcatgtgcatccacatctctcttcaatccataccaccaatacttccacttcaaatcatgatacatcttggtactaccaggatgaatagaataatccgagtcatgggcctcttttaaaatagtctctcgaagg

SEQ ID NO: 9850 - DNA, 337 bp, Zea Mays
caaccttcaggatgatacccatctccctatagttgaacaacattatcctcaattcctcacccgcaaacagacttcgcagctccccctcacccacactcgccccagccgacgaggacaacaattcccgcttgccagccctgtccacacgaaggcgaccacctcccacctcaccacgatgacgcctatcacctcgcggcaactcactcacccttcgtttcgccaccgcccttcgccgcctatgcccaacactcgcacccggaagatcctcatcacccattacacacggtgaagcctccgctgcagccacatccaatgccgcaaagtaatccaaatcctc

SEQ ID NO: 9851 - DNA, 658 bp, Zea Mays
ctgtttgtaagcggtattgaccgcgtcctttgtaacgctgtgtcccctcccttttatagtttaagggaggtacatacaaggatgctgagctccgacatgtgggcccaggagcataatggaaggaatacattatgtgaataattaatgctgatagcacacatgagtagaggcgtataggcggagccgtttagattccctccgccttagtaacgcatgagtaatcagcgggagtcatgatgactacagcccatgcagcattgataggcagtgacccttttcttggaaacgcacgagtaatggtgagtcattgtccttgctatggtaacgtgtgagtaacagcacgacccacacagcgtggactgggcacaccgcctgtcactggaatggacacgcgcacgtcttatccgtaatgaatgcaacgacgcacgtagcccagaggcttcatgctaggttccgcccgttggcttacgccgcacgcagtaggccacgtggcagcatcgggtctccgcctgggcggggagcaggagtgtatgtgataaggtccggatcctaccagatcaggtctggacacgtgtcggcaccggacccccgcctgggtcctgattaaggcccgggtatgttctgtcctggaaccctgggaccccactgtgggtggccc

SEQ ID NO: 9852 - DNA, 407 bp, Zea Mays
cggttgcgggaagagtgaatataggggagggaatcttgctgacatggctgcatagtaacatttagggggaaatttagggggcgccgctgcggacagtctaatgggtgtgcccctgtaggtcatggatgtaacacccctagtgttactaccactaaaacttgagcataacatcataagcattggcatatcatgtgtttgttacacttagaatgcattcagtaggcaaaaagttcaaacgagttgtactgatgtgactggtcatgggtaaaaaccctagagtagagtgcttaaccctaaattgggcttaatagagtaaactaagcctaaataagagaaaacttcaaaacttattagtaatgatcataaaatgtcaccattaatggactgatgtggcatccaaaccctag

SEQ ID NO: 9853 - DNA, 1253 bp, Zea Mays
gcgctttgagtcaccggccgagtgggcccgcgtcgccagcctccatgttcgcgcgcttgctccgtctcactaatgtgtggggtccggctgtcataaccatccccttgctccgagttcacctcaactgaatccgctgattccgcgtgggcacataacaatcaacgcctggaatccggagccgttgctgcgcccagatctcacctcggggctacttaaggcggtaatccgcagtgccctacccctcccttatccatcctggcggacctccgcgcccagcagagagtgacgaaaggggattgtgggggccgccgcggtagacctgcatactccgatccgctttgcttcaaccgctggcctggacgtgtcgccggagtgcctttgagttgcccgcagctcaatcgggggaaagggagggacctggtggccgggaattgataaacggagcagtagtcgccgccgtggtccacacttcactgtgggcggggcttggtgtgccgcgatccgaggtatgaagccccccatgcttttcgtctttctcctctcaacgtattgcatgcgctagtggtgggtttgaataccggggcactgggttgggagatcgccggcgatgaaagccgtcgtgttctgcttgggccccgccgtggccggtacccaggagagagaaaagtggggtccatcggatagcccatcgatggatgagattaaatgtatgggcgagtagtgcctggccatcggattcagatggacgctcccgattaagtgatgcataccccttcgttcttttgatccgagacgttgatcggcgatccgatgggttagatcggatcggaccttaatgaaatccgggtcgtagggtgtcctgtgggcggctgtgattaaaaggttgttaccctttcagttatgtggattttgggccctcggattgggatcggacggtccatatcgcgtactggttcgtacctatgctgatctaatcagggtcgtctatatttgatttggcggcccaaagacatgagtaccctttcgtccgacagcttttacagaagaacccctgtagattttataaaataacctgttgtcagtgtggtgttggaggaatagggtttcggaccctggaattttgcgcatagcaccctggaagagttcaatatagtatccgaagtccaaatatgatatctggaatcataaaacccattaagaaatggatttttatatagaaagttaatcctaaaacttcacaaattcataacttc

SEQ ID NO: 9854 - DNA, 406 bp, Zea Mays
gtctgtttcttccgttcgcctggagctaaatacagctgagcagccccacgtctcgtccataaaaaaaggaagccacagctctgcatggtagaagccacgtaccgcaaaacccagcccagaaacaaccacgtgagcgagagagaaaccacaggtggaggcttccatcctcacccatgggccatgctgccgctcggtgtcaaacggggctgggtgattcgccggaggccactgaagctgttcttggcagaggatggcggccgggaacgctcctatgcgatagcaaccgtgccccgcgacaactgcatgcgcgcggccgcaccagcacaatggatgtcacaaaggaccagtcggatgcgggacctctccgcggccgggactctcgtgattgcgcgggctctgaaactgg

SEQ ID NO: 9855 - DNA, 477 bp, Zea Mays
tttttaagtcattctgtcgtgctcacacaaaatactccgcgaatacaagcttgacgtaggtaccctatagattatgggggcatgcatggaccctaacccaagtttggaagagcatcatttccttgctttgcttggcaaaccggcccaattcctcagcctagcttgcgctcttgcacggcagagcatgcatcatctccttctattcttccctttccctcgcatgcaatgcaatccaatcctttgcttgcgagccggtcatgcacggatcgcctgcaaagaccgactcctcggcgacgtataagacgccggcggcggcggcacgtccttttcgcacctcctgctgtctccatccggctccatggactccaccctgctgctgccgcgtcttcctcctcctcccctcccgtcgtcgcttcgtcgccgtcaccggcagccgcactgtcttcctccgcaccgccgacccaaaaccgtcccgag

SEQ ID NO: 9856 - DNA, 887 bp, Zea Mays
acgccaaccgtggacctcggggttcatgaccgcgccaggatataagtgccgcaccagccgccatgcctcccaaaaccctaggtctcctttgttccccgtgccaccgctgtcgtgataggaatagaggagagagaaaatccatgcgctgcagcttgcttgtgaagccacgagacctcgactggtcgctcaggagggatctcactggagggcgctagaagggtggacatcgatgtcggtggccagggacaacaggtgtcgcggggtgtgaatctcgccggacttggggtcgctgggcgttgctgccatgaggatttgctgcatggatgaaggtaaggaagtgtaccattacgttctcctgagagccctctgcgtgtagtccgtttggatccgaataatacggccggggttcaaactttgggtggtccagccatggcgcttccatggcgggttggccgccaccgtcatggcctgggtgctgctgcggtctggtgttgagaaggggggaagaagggccgctggctgttagattggagattgacggctaggttcggatctggggaaaatagctatgagtcgttgatcctggcgcctacggtggagattagatcaagaccgtgatgaatccgagccatcgagatgagatcgaaggagtgataatagatcgggctataataaaatctagatcgttgcttttagatccagtggaatagattgggtaccgtttcagtttgagatgagtctaatctaggtcgtctgatgtagatcggacggttgatgccacccgataccccttcggccatgaccttttgttaaagagcccctgctctttttcgtatttaacccgccatccactccagctattcatcgagtcttagaatacttgcgtc

SEQ ID NO: 9857 - DNA, 365 bp, Zea Mays
ggattttccccaattcgggtttccgccacccgaaatcgacctcatcgcggccagctcccttcctggtcagtccaaccctccctctccctcgtttaagctttctcacatgtctacgatgcttgccgaaccaccaatttggactgcgggctcaccaatcaccgggaacacgatcatctgtccgccacccattcggttcgcgtggacagagcttgatagctcaccatttgtgcaattaagttaggggaaatactctctaggtcgtggatttggtttagtctaaagctgagcaccggtcttggccccctccggtcggtctagctcgtcggagttgcgctccccgtgctcaccgtcgtcggggacctccc

SEQ ID NO: 9858 - DNA, 432 bp, Zea Mays
aaaaaacgtgcttacgtcagtgtttttctaatccttgtgtgttttacccttgaatttacacctgcactgtttgtagatttccatagcttgacccctaaatcggctaaagcttccttgtgcacttattgtgtcaaaaaaacacatcgtttggtatctagttgcgcaaaccatgatcaaggccatgtttctttccatagatccagtcctgaatcttcgttgcatttctgctgctcatcctagcagatcttgttttcctacctctcctttgaccgaatctggtaatcattttccttgcgaatcacgttgtggctttatcatccaaatctctagatccttcatcgattttgccccattatctggttatctgctataaccgttctcaagtatcgaatgttgatcttgcctaaatctctcatttctggtcattctcat

SEQ ID NO: 9859 - DNA, 424 bp, Zea Mays
ggcgaggatagcaggggcggggccagctgcgggggcaacctggaatggcgttcgtctaagcttggagagcgaggcagagacgcgaatcatggaggcacaaaaagatctcactgagcggaatttggaaagccagcagcgccaaatcggtaaattcgaaaccagttccttacgcagatcctcactcccctcagttaggcacatcacacatgtaccaatcacaacaattctccacggctgcaaccacacaacagatgaaacacgatgtctgatccggctgccaactaatccagcaggaaatccgcgcaacccggatcgaacaccgactgcatctagagcccccatccgcggatctgaaacccaattcccagcgagcaagcgagcccggtcatggggaagtggagtgctcacctcagatggccaccgc

SEQ ID NO: 9860 - DNA, 869 bp, Zea Mays
cgcgcacgcgcgggcgagcactgacaagcgggccaggggcatcagcgacagagggggagggcgcactgaccgagcgggcccagcgctaggggacttgggcgctgataggtgggccagggcgtcagggcacgcgtgcgcgaagcggtatcctgcggtccgagccgttcgatccgaatcagacggaggggaccagaccaggggggatgagcggtccgggccgtgcgatcaagatcggacgggggaaatcagaccaggaaggatgagcggtccgggtcgtgcgatcaagatcggacgggggaaatcagaccgataaggatgagaggtctgggccgtgcgatcaagatcggacaggggaaatcagatcgggaagcatgagcggtccgggccatgtgatcaagatcagacgggggaaatcagaccgggaaggatgagcggctgcgggcggcgctgttcgtctccgcagcggtgatgtcgccggagttgaggctggcgcgagctagggtggctccagggtcgctggagttaggcagagagggagagggcaccacggtgaactcaatggcggggaagaggccatgaatccatgggcagagaagggagaacggcggtgagaagttctcgggtgggccggagtaactccggtgagccattctggccacggggaggggacttaaggcgcgctaaggcctaggctagcttcagcagaggcaggggtgacacagggacctactccggggaactagaccgggctaaattggccggccaccgcgcgagcacggcggaccgccacgaccgagcaacggcgaaggcgaaattggccgagcatagggcgcaataagggaaattgggcacggggacgggtgtctcac

SEQ ID NO: 9861 - DNA, 338 bp, Zea Mays
agagcaagatcctaatattgttgcgatccaatttctccatttctgggaaaaacctagagctctcagaacctctaacagatatgcccagttgatggaatcaaaagcttttgatatgtcaagcttgacaaaaagggctggctgattattcttatgaagttcctgaataactttttggacgtagagaaagttatcatgaattgaacgtttttgaatgaacgcgttttgagcagtggagacgatctcattcattcttagcgcaagcctgtttgctaaaatcttggtcaatattttcatgaagctattgatgagactgatcggtctaaacatgtcaatcctgt

SEQ ID NO: 9862 - DNA, 516 bp, Zea Mays
acatgatcaagcacgatatgcttcaatcatgtttgatattgcgcaagtagccaattgtgttgatactcatacatataaatagacacataatttagattgaaatattatctaagtgttataagtttttagttgtctcattaaaaacttttctagattaaacatcatgagaaaaaactagaaagaaaaagggcacaccctagctcaaatgtttaatgcatacattacatgcaattatgtaacaacctacatgctaagtgagccacacattaataataccaaccccttatgcttttatccttgcttcatttaaaaggattatcccaagaatggtggtatggaatatataagccatatatattggcctaacccacactcaacatccaacactacttcataacacacatatccacctattactgttaggattgctagagccagtagtgaatttagttcattgttgggttcctaagactaggatattgacaatgattggaatccattgacccaacagtaaag

SEQ ID NO: 9863 - DNA, 902 bp, Zea Mays
aatgtcgcgacccatctgtaaacgaaggtctgaacagggtagcgacatgagctgtggttggaacaactctgtcattagggcgacagggaggatctgatgtgccaaagcacaagatgtggagcctcatcgttgattcaggaaatccaaagagctctttgatctgagtggcatgtagagtgacatcctctcgctcgaacctgaacctcagccactagtgatctagatctatccaaattgtggcatagaaaactctgacccactgctcaatgtatctaccaccagaggtcaaaagagaaagtaaacatggcagataggataggtgaccctctgactcggcaccggcggctgacagaaatgctgggagatccaaaagccggtgcgccctcaaagcaatccgagctgacaactgcaccctgaagaatgactcctgagtcctggtgctgaagagcggtgcagctgttgggtccctctgtactggcaaccaagaatccatgggtacgtgtctgaaccgacgtacccgggtagcagtggctcgctgaagatcaagcagacatggatcagcagcaagcggtctcacctcggtcttgtcacgctccctgaagcgaggtggaggaataggcagagcggaagcgggagcgagagcagtggaagctagagtggtggaggtggtggacacaccaggtgtggtggacgtgagcgacaagagctggcgaagtgggaggtggagtggagactatggcggaaggagtgggggggcagaggagcgaggtcgaggcgcgaggcaatgaactctataggcaatctgatcagaagaaatctagagctagcctccctactcagcctgatctgcagctactgccgctgcaagtgctgcacgtgtggctctgtccatacgccttttc

SEQ ID NO: 9864 - DNA, 392 bp, Zea Mays
cttggtgaggccgaggactccggtgcggcctccggtgtggcagaggttatctggcatggacaaggttcactctctggagggcgcgcgcaagacctcggtctggaggcgccttgcttcgtcgcatgatcatgccgcgatggagcctgtcatggatctggagaggcagccgcccttacagcccaagcgaaaaagaagacgttcaaaacgcgggaaaggggctgcggtgttggggaacagtcagtctccccctgctgacatggttcctctcacgtcgaacttgccctcttgtgttctggaactttcaacggacatggcaagagaagaagttgcactccgtcgagcattttttgtctctgttactggtaccagacccgctgttctcggctcggagg

SEQ ID NO: 9865 - DNA, 751 bp, Zea Mays
atggagccctgccgtgcgtgtaaaaaaccgctgcctatttttttcgggggtgtttgaatctcgaaatggtatagagaagcattttgctttcggctttcggctgtccattcaaacagcttgtctcttccaatcgcgtcgctctgtcatccaatataccttggccttctttgcttctgctctggtgcactttgcagaggacggcagaagacaagacagaaagcatccgatcgcccggacggctcctcctccccgtggcagcgagcgagattcacggcttctcatcaccgtccctgtttaaagtgcttttggcgctgcgcccgtgttctcttcttcatctggacgtcgccgctcgtttgtttgctcccgtcgatcaatctcttcgtctgtttccttccgtcgaccaaggaccatgatttccccccccagcgccaataggtttccgtgacacgcgatttggcagtatgcgttggcaacatcttggggaggcaggcgatcgaagaggttggccgttgccgggctcgtgttgcatttgtactagaacgagctccattctacctctgcttgggccttgtcactcatggcgctgtcctgctactggtgctacctcactcccatgctttgcttgttatctgctctctgacggccgtctctctttcgtttgtcccgcgctgtccttgtcgcctttttttcccttcctttcttcagtgatagaaagaaagaaagaaaccgcagcagggcgcgttgctgtctc

SEQ ID NO: 9866 - DNA, 770 bp, Zea Mays
aaggcttcaaaaggtgacatcttaatgctggcttggtaactgttgttgtacgagaattttgcaaacggcaaactggactcccagtttctgtcgaaggtcaacacacaagctcttaacaaatcctcgaggactttgttgactctctctatctgtccatctgattggggatggtaggcggtgcttaagtctagcttggtgcccatagcttgctgaaggctcatccaaaattttgaggtgaattgcgttcccatatctgacactattctttgtggaatgccatgaagtttgactatttccttgagatatatctgggcaagggtggctcctctgaaggtagtcttcacaggaatgaagtgagctaccttggtaagacggtcaattataaccaagatagaatcgttccctttttgggtccggggcagtccgattatgaaatccatgtctatttcttcccacttccatttgggcactgggaggggttgcagtaggcctgcaggcttctgatgttctgccttagttcgttgacaagtatcacaccgggccacatattgagctatctcctttttcatccctctccaccagtatctggtcttgaggtctaggtacatcttggtagaccctgggtggatagaataggctgagttgtgggcctcatctagtaggattcctcgtgtctctcccttcagcacacacagatggtttctgaaccaaagggcccccttttcacctgtcttgagattcgaaagttgttccttgctagctttttctgc

SEQ ID NO: 9867 - DNA, 397 bp, Zea Mays
ccgaaggggtatatgttattcctaaccgtccgatccacaatcgatgatccggattagatcaaagctccgtgaaacggtacccagggatagccatcagattagatctcgacgacctaggtttaatgttacctacatcgatcacaagcgccagatctagatcggacgaaccagattggttcagccgaaccggtacgggtgttctaatcctagccacccacaccgagatctacgactcaggactcatcggcgaaggggatacactagactatatctaggccactgatctggaaactgacggcatgattttgtttgacgcatagatatggatgaattgaatcacaaccgttgactcatggatccagggccttggctgtttcttccccgccgcggtgagcac

SEQ ID NO: 9868 - DNA, 289 bp, Zea Mays
caaagtttttatatcagcttatgagacggacacttctgccgcggatggggtacagggaggctgccactcatatccagctctggctccttggtgccctggtctctcactccgagtttgatgttgtggatttccttatttgtgagattgaggacaccatattggatggtctacgtgctcgtcgacagctgccatatgctcactatctatgtcacatttttgctcagctgattcggcctccacagttccagggcacacttgaggcctcacgcctcgtctttgggtcctaccg

SEQ ID NO: 9869 - DNA, 659 bp, Zea Mays
gacgtcttctaggcctagtcaaccaacgttccctcctctcccttgttggctgccatacgaggcccatgtgtcagccactttttttaccatcgttctcacactcgctcgctgcgctcgttcgaatttcagccgtttctttgcgcagtgttgaagccgccatttatagcattcattaactgcgaacgtttcatggtagcgtttcaatggtcatcaaggccacgttcttcctcgcctataaaacgcgacaccgggcgtgttctcctcctcttccacgctcgttgttctcttgcgttctagctctttgctgcttgtagctcgccgcaggcacgcccacctcgctggagccctgttccttgacccccagcactaccacatccagcaaaagccttccccaacgccactgttctgattccctgccgaaacgctgcccgtcgtcgtgtcatcgaagacccgccatctctgcctgctgctcagcacaaccactcagtccctgctggttgcaccaagttgcggtcgctagagcgattcctgtgctgtgttgtgacagcgatcccctcctgcaaccgaagcctcgtcgaccggcgtcttgttctacttcttctctgtgctacgtacctgtgcctgaaagtcatgtcagaggcagaagaagctaaagtttg

SEQ ID NO: 9870 - DNA, 520 bp, Zea Mays
gcctgtgactgaatttactgatgctgatcccaatgggtgtacccaatgtgctgctgatcccaatgtgggtgctccatctgttgttgatcccaatgggggtgctgcttgtgttgctaatgtggacgacgaggaggaagaagatgaagttcctttgactcggaaaaacagtcggcagttcattgctagcggtgaaagtagtggagttccttctcctgctttgtttgccctcattggtctgcaagaactatccctggccaattttgatcagactcttgaggatatggttccagaggatttgttatcgaagccagcagatgatggtgtgatggaggtttgtgctgatgtgcttgatgctgggttgaggtcatcccgtgcctcgtcgaccttggagcgcgatctcgagggtcgggatactgacttggatcgtcccggtcctatggaagtaactgagggcccatcagccttagaggtggctatcgcagagaacttggacccccaggatggtgttgacacgtgccca

SEQ ID NO: 9871 - DNA, 599 bp, Zea Mays
tatagttccagctttcaaagtgatatgataggaggcatccaaaccagccacccattcgatgacaatgagaggggcaaaggggcacgacaagcagaggaacactcgaggcagctggcgcaaccatcgttgcaactacgagaaaagggtgggacgggaaaggagaagagaggtacaaaggaggagggttgtctatggcagggaggggccaacgacgccgttgtaggggctggcagctaggggagggagggaggagaatgaaggctagcttgataccatgttagagtaactagaaaccctaaccgtaattcgagtagacaattgtatatatgttatggaagtaagtacatgggttgggccaaagcccattagaacaacacacaagtaatctaacaactagtacttgtatgtttagactttgtgcacttttactcactagtataggtaggagatttgtggattgtttgagtactcgttaagtactttattaccttaccaactagaattatgtaggtgagctctacctagcttaacaccttagttgcttaactaagttcttgtcggagaggaaatctccggccgggtggcagaatgcacccgcc

SEQ ID NO: 9872 - DNA, 575 bp, Zea Mays
cttgtcacactcttggaaccgaggtggaggaactggtggagtggaagagggagcagtagcagtggaagcaggtgtggtggaggctataataggtgtggtggtaggctcaagagaggcggaagctggcatagtggaggaaggatgagtggtagtagtgactggggctaaggggccgaagcgagcaggagtggagtgagtccgagacaagaggcgacatacccgaaaagcaatctgatcagaggctatcctcagctaaccttcgtgctctacccgatctgctactgctgctgctgctcgagtagctctgtccaacttcctcttctttttgcctccctgctgctcaaggtacaaatccttgcccttgtcctgtctgaaaggacgaggaggttcctggtcatctcctcccccttacggtgtgacattcttcgtactcaccatcctgcactgactactgacacactgcatgagaaatagagaagataagcaagagcagcaaagcagtagataagtatataaataggaaagatttgctacccgggcacatctctcgagagaaaagctaggtaggaggggag

SEQ ID NO: 9873 - DNA, 519 bp, Zea Mays
taagtcggcaacgacttaaggcggtgcaacatgctcacgcttacctaactcggggtgaccactatgccctgctaacggagcaatcggcttaagtcggcaacgacttaaggcggtgcaacatgctcacgcttacctaactcggggtgaccactatgccctgctaacggagcaatcggcttaagtcggcaacgacttaaggaggtgcaacatgctcacgcttacctaactcggggtgaccactatgccctgctaactgagcaatcggcttaagtcggcaacgacttaaggcggtgcaacatgctcacgcttacctaactcggggtgaccactatgccctgctaatagagcaatcggcttaagtcggcaacgacttaaggcggtccaacatgctcacgcttacctaactcggggtgaccactatgccctgctaacggagcaatcggcttaagtcagcagcgacttaaggcgatctgacgtgattacaattactcatataaggatgacttccatatcctgcaa

SEQ ID NO: 9874 - DNA, 450 bp, Zea Mays
gttcaataaccaatctactttattgatgattgtagatctgtctttgtacctctatgttttttaacagaagtatttgcctgctatttgaacaaaaggaaaaacatgagtgttaagtgtaggtgtgtcatgcatttttagatcttcataaaaggcagagcttcttccattgttcctgaaaaaggtaaggttatgtgaattgtgtgtgtccatgtgtgcgttggaggggaatggccaggtaacaaaacttgaaaccttccaatgcagtctctgcttggatgaaatgctggaaaagctttggagttaagacttaaggattgtgggacatttgaattgcctagatctagtatttattcgcacatggtagacaacatcttgtcttggttctaatcgatctccttgtcggggataagatacctagcccctggggaccatcggtcagcgagcgcacta

SEQ ID NO: 9875 - DNA, 336 bp, Zea Mays
gggccgatgtcgcgacgacgacggggcgggggtggaggcgccaggaagggtcggggtcgggcagcgttgcgtcaagaggaggcgacagtcgaaacgggcatcgaggcaaactggtttaggtggcatcgaaaagattagggtcgaagtgatagatgcgaggactgggttggagaggatctgacgaggaggctcatgacaaggttgttttaggcagctaacaactgggttggagaggatccgacgaggaggctcatgacatgattgttttagacagctaattgttaactggttttagctaggttgaggtagctaaggactaatgattatttaaagggt

SEQ ID NO: 9876 - DNA, 746 bp, Zea Mays
gctcatgtgtaactttgcagttaagcttttctgggacgagcataaagtctgaggcttcttcctggctgcttctatttgaccacttcactgcttgccgaggttgcagttgatctgctaaagtatcatcattttgccttggattccttcgcaagtcgcaactgtgcatactctctcggacagctatcatacctgtactcctgggctacctaccacaagtccttgcctgtttgatctgtaaaagatgtacatgcaagatcacaatgccttaagcacatgtaagaatccttctggacaggaaatatatgccaaccaaagaattactatggcaacttttgcagaggtggtgagggaccaactggaactgcagtgttggatacaattacatacagggtccgggtggcaggccgaggaggcgaggacatcaccgagctggcatgggtcagggaatttgctctttttttctttccctgccccaccaaccgcctttctcgcagagtcgcagtgacctttgtttggttggctgcggtactgtcactgctgctgtgcctgtcctgcggcaggcatggcacgaacgagtgaaaaagagagagagagagggaatctgatgcatttcttgttcgtgtgttttactactttccggcttgccgcaagaaaaatgtcacaaatctaccaggcaacacctccttcctttcgaactttggtgcgttgataggaccgtcctttgaaatctccagttcatttcgtcc

SEQ ID NO: 9877 - DNA, 870 bp, Zea Mays
gtgggatgatgcttatattactcacacaaaagtgctcgtggtaggggttacaagcatagcgggagaggggtggatcctaagtcccagctggtgattgaggcaagtcccaataccaggtaggggagaagaatgatcaagtgttcgcctgccttgtgtctccctgttccttgtggagccgtgaactatcctatttataagctcggggagagttgccttgtagatgggagccaactacatgctgtgaaggggtgtcttcataacctatagacaatatggccttgtactttgccgttgacttgggcttgcttgttttctgctgagagcagaggccgaggctgagggcttggtcacgtacccgagccccctggcgtgggatttcccataccgtagtggttgacatagtgcctgtcatgggaaaaagcttcttatgggatgcgtcagctctactatttctgatgatgttgggaagtcctctgccataggtatcgagggaagaactgagctcgggcaaggcggaggtccgtctgaggttgcgaccgagtcttgtcttgagatttgatgacgtgtgccacactcgatggagtggccttccacgggattcacaggggacaggtagccgaggctgggttcgagcgaggcggagcctacgcccaaggtcgagttctgtattgggcgaggcgaaacttgcgcccgaggtcttggtccgcatcatgtcatattacgcgtcccatcaagggttatcaagcggcatgcacatgcgtaatgatgttggtgaatctttgataagaccgcggtcctgttgaacgattcgcctgtagcccaacgtgaggtaggtgtccgcattgaatgcggttgtctcccaacggccct

SEQ ID NO: 9878 - DNA, 611 bp, Zea Mays
gtggaggcatgctggcgccggtggcggtaggcttcgcgctaggccgttccatcttcgccttgtgccttgggtccgccaacctagcgtacgcctgacgtttccgtagcgcatcttggcgatccttctccatcactgccgaacaacagcaccaacattccgtccgtaagggaaaatcttcatctcacgagctaatcgagatgtaaacatgtcttcaccggccgcccagggtatcggaccattcctaggccagcgaccctcggtaaccttcagcattcatgaaaaagattctcggagctcgggcgaagacatcgtctccccggagccacacacgtctccaacaaatccacaacaaaacgatcagaaaccctcaacccctcagctgctgtaccaaatttccttttcttgacggtcgcgcccggagccttgtcccgtgaggggccctcgtcgaccgttgacatcgcctgtttcccccagcgaacaacaacatcagcatagtcatcccctgggtaaccaacatacgacaaatggtttaactcaaaaacacggttcaacctaacatttgaaccgcggatgtcccaactcctcagagtctccgtctttggcacatattt

SEQ ID NO: 9879 - DNA, 312 bp, Zea Mays
ttgagctgagctgatttcccagatccttgcggagcatttgattgattctgcttgggatatgggcagtctttgatgaaatgtcccgacttgccacaattaaaacacccggttgaggagctgggcaaagcagggaatcgagtgcccggggcacccggctgatttggggtagtgggggcattgttggggcgaataatgattggctgcttgaagggaaatgagggcggtcaagaaaaagagcgattttggctagaaggccggatcacaaaccgttgcctctttgcctggccctgattaggcttctcaccaccaaat

SEQ ID NO: 9880 - DNA, 319 bp, Zea Mays
gagaagaggaggacatggtcgtggaaagggagagtggttgctctgattgtgtcgtgagcatccatggagaacgaaggctgcctacacaaagatgatgagcagacacacctatttctcatgaaatctgggccacaccaaaacatctagcccaggacgtctgatctgttgttttccattaaatctgcgccgaaccaaagcacccagtccagaatgcctatggctttcgtcttgacggtttatgaactgaggatttgtaccagaccgaccatcgaacgatgctaccaccggcttatatgctccgctgctactatcgtcttgt

SEQ ID NO: 9881 - DNA, 376 bp, Zea Mays
ctgacttgtaaatttgattaaaatcaccagccaccatccatggccccacacatgtattcctgatatcccttaattcctaaagaaaggcagatttcaaattgtcttgatgaggcccatacgcccccgtgaaccaccactgaagaccatcatcaccttgcaactgaaccgaaacagaattgtccttgattattgaggctgctgaaacaaaggaaccatcacgccaagcaactaaaatacctcctctggacccatgggcaggactaaaaacaaaattactgaatccggacccaagaatagaaagaatgttgaagtctgagatggagaccattttggtttcttgaagacatacaacagcaggtctgaggcttacaaccaa

SEQ ID NO: 9882 - DNA, 579 bp, Zea Mays
cgtgcgtcgtgggatgcagatagctcataaggataggaaatagcgcggcgtgggtgcactccggtcactattttactccggccgccgtaccaagcatggatcacgaccacttcggataagctcgtcggagttagccacttcgcgactgtgcgccacgtgcctcggtggtttaccacgtcgcagtagttcaccttgtgcatatccggtgctcgccggtgaccccgccacggtgacagccacctatctcttgcaacagcactcttttcattctccgaccgccaccgcgccatccaaaattcaccggccaccgcccttggagcctataaattgagggcagggatagttgcgccatgtaatcgtcaagctattgcacctactctcatctccactcgctcaccgtagctccgcaattcgggttttccccaaattggtctccgccaccgtaaaacaccactcccccgtggactgcccgttctggtaaggcgccatccaattcgcgcgttgttctcatgtccctatatgctggtgatgctctccaaaccgtttaattaaactagaagcccaccaatcactgggaac

SEQ ID NO: 9883 - DNA, 278 bp, Zea Mays
aagaaagtctccctgtctaagccctctcctatgggctaccgttgaatccctaatgaacactagaactccatgcaaactaggcgagatcccatcaaatgcacatcgattgcggtgattccaggttgcccatgctctaaggatgatatggaattgagacctttccggactggaccatccactctttcattagatttgggccattatctcttacatatcaacttttgaattggtagctgcatggggttttgttgtgttagcataacctcgtctgcagtttg

SEQ ID NO: 9884 - DNA, 483 bp, Zea Mays
gccattcgctctgttaggctgactgaagaagttcttgatggtacagtaagcaaaaagatctgctggttcagtgaacttgccgctggcgacccccgtgcgtggattcatgccgccgaggtgattcgtgctcactggtgcccggataaagccacggggtggaaagatcttcaccgctattgagcttaaggcactgttccgccccggtcgccgtgtccgcttggctcacggccgaattcagataagttcaccggagttagccgcctgccactcggatgacacgtgcctagacgcagtacttcatcatagtgactcgctctagcacatccagtcatcgccgatgagcccgccatggtaaatgccactaatcgcttgtgccagagcacctccttctctccagccgccgcgcgtctccttcaaattagccgccaccgctcaagggccctataaattgagcacacccttggctccgttaggtattcaagc

SEQ ID NO: 9885 - DNA, 1267 bp, Zea Mays
cctagccgcaaccgccgccttctcgcgcctccgcgatcccgacacagccgtctacgtttcggcctccccgccgcagccgccacgccaggccttttcctcctccgccgccgccgagggcctccgctccggcacctgcctcttctccccgtatctgctcccatatccgttccaaggtccgttttcgccaccccctccctcgcctatctacatcggtacaccctagaccatcggatagactgtctttttgctgcgtggcggagtcgggagtggttgcctgtccaactgtccaaggtggtttgggttcgaggtttttggaatgccactcgattgggcttgcgtttgctctctgctagacatccatctgactatctgcgtacggcgttatgcgcattggcgggtctcgttacttcaattcagtagagggacctgtggttggactcaagttttcagccgtactttgaactactatagtcaatggaccaatgtatgtcgagacgaacacaagttgtaatgtgcaaaggcatgccataaaaagttgcaggtgttggatcatccagataggtggctgtttttaaatatcatagcatcagcctgcttgcaaggtctttgtttgagtccggggaataatcctttttcacaatatgataaactttgatttttacctatgtgcatcatagttacagttgacagattagcaccttcaaggtgtccttagtaactctgatgagactgatgcatttttgttttacctgaatctgcagttgccttgtttgttgttatcttcgcctgggtaagatagagctctgtatcaaagatcttactgtgtccaaatgtgtttgtagggttcccagtactgaataccttcacgtctgcatcggtttcacctgctaacaatggcgaccaaggttctgacggaagctctggtgatccaagatgctgcccagcgtgtctaggcaggaattcgattgccaaggcggcatctgcagttggtcctgctgttgtaaacatttcttctatgcatggtgagaacatatccgtctatttgaaaactgtcaaattcctcaccagtgttgtggctatgtgcagtgaacttctcgaattaccttttgtagatatgcatggatgggtaaacgagcagagcattggatctggaactataatagatccagatgggactatattgacatgtgcgcatgttgttgcagattttcaaagcacaaaagcaattgtgaggagaaaggttgctaacttggcactacacaaccct

SEQ ID NO: 9886 - DNA, 328 bp, Zea Mays
tggcaatatgatctcagccgttcactcagcatcccacggttccgattcaacagaacgatgaggtgttcccagtatgatctccaccatccggtaaagcatcaacagaccaggcatgttcatcttcctcacacccctgcctaatcccacgccggtggctgggtgcggaccgaggaagagagggagcagcgtcgaggctcattctcttagcgcggcaaggggcccacggcggccagggagcccaccgcggcggacgctatgccagagcataagccggactagcctcgcgcaggagcagaggggtacggtggagcaggagcttgggaacgag

SEQ ID NO: 9887 - DNA, 416 bp, Zea Mays
gagggagagagtttagggtttaggatggctctggtaccatgttggattgtgacaaaacctaaccctaaccagggttggagttgtattgatagattagagtacttgggcctggcccattacaaagggatagtctaacatggaggatgagttgcatgctatggctcttgcgacggcagagacgacctggctacggtggttgtttgctgattttgatgtttttgtgtctatgcccactcctcttttgtctgacagtaccagtgttattagtattgcttgtgatccggtaaagcatgaactttatcagaagggactgtctctggcgcagtaacagtgaaactgcacgccgaaatcctctggttgcctgggacaaagtgtgctgccctaggaatagagggggcttgggtgtcctcaatttg

SEQ ID NO: 9888 - DNA, 441 bp, Zea Mays
cgcgggagcacacagccacggagcatcgctcgccgtagctagcgttcaaccctgcctcaagtgcggtaagaaggcctctaacgagttcgctgctatctgttctacgcatagcgctaggcaatcgagaattgaatgttgtgggcactggattgggaacacgtcggcgatgccccgccgtggtgtgctctgcgccgccggtgggtcagccgatggggagaagaagctgggtgggccgttggatcggcaatggatgggcgaggggtcgcggaccggtgatccatccgtgaacggtcgagattaaaacgtcgacaccgtttcgagttgatcgcttccacaccattgatcttcacgtctagggtcgggatcgagtccatgttactttgaatcgccaccctcggttccggatctatgggttcatataagcatactacggtgatctaa

SEQ ID NO: 9889 - DNA, 529 bp, Zea Mays
caccaaatggggagaagtatccgcgagctggttccagcggcaccccgagcggcgctccgaccgcggccccccgggtggcgcgacaatctcccgcgctcgggcggaaggttccacggcgcggcgatgagggagggcggcgagggagggtgtgtgcttcgtcggcggcgaaactcggccggagaggtgggcattgcaagcgaaacgggttgagatcggtttggaggtgggcggcatcacagccgcccgcgcgcggcgtggaggaaggacgtcggagaagaggaccgccgcggcaccgcacaccgtcgtcgattggaggcaaccttctgcagcaacgtcgacaagattggcggcttcccccaacggtaccatgtcgccgtgagcccgcatcacctagcgccgccgtcgaagtagcaatagaaggttgaaccgttggcgtcgggggtgggtcctcgcgctcgaccgttggccagaatggatgggggagagctccgagcctcgcggatatgggggcgacgggggtggccggtgg

SEQ ID NO: 9890 - DNA, 722 bp, Zea Mays
gacactgatgaccttgagcataagtcataccacatttgtagcaaaggccttttgccttgctataggcataaactgaagatagatgatcccccacacctggttggtgatctacacccgacatatttaggtcaggatcctatactacaaccccattgggaggaggcaatggaagggggcctcgctaataattcttggtgtagagccctttgtccaacttcttgaattccccggcttggaagcgtggacaatttcatcctgcaattgagcaagaacaaaggcagtatccagatctttttggcactgaatcataacgacagatttaattgtggtgtaaaccatctaggaaacacatggtataatatagaggatcaaacatcacttgatagctattgagttgatcgaccaattgtgcaaactgatcgataaactctatgaccgacccacgctatttgatatgcaataagttcatgactaagagggcatgctaatcgttcccaaaattttccatttgcattagcccaaattcagaccatgtcatatgaactagcttaggctcaatagactgtaaccacctagccacagcccccaaaaaatgcatcatggtcgtggccaccttgacccatactcgacgatggacctcatacattgagaagtagtcctcacatcgagtttgccatgggtttagattctcgctttcgaaacatggaaagttaactcgtggc

SEQ ID NO: 9891 - DNA, 372 bp, Zea Mays
taaatcctcactgtgccttgtcaagtccagtgacttccagggctggttctttgtgtcctgccactccttcacacctgtattcactctccaatcatccctgaccccggttgtgttgcccaagtctaaactcgggcctgaagcatgctggtggtgaccaccctcgctgtgatcctcggttcaccgcggccaaggttgctcggcaccgtttcatgccttagttcttgtgttcggactctttttgcttatggtgaagctcacagacctggtggtttgaactctactatgataggtagaccgaaacgtggccgcgacgccatcggccgacgccgtgaactacccttagcgtggaccaatccactcattgcttctccg

SEQ ID NO: 9892 - DNA, 740 bp, Zea Mays
agcatatgtcataaaaacaagatatataattgtataccttctggtggctgggggaacctgtccgcataagttatcaaagtatcttgtactactctagtgtcatgtacggatctaggccatcctgtgacaacaaatgtgaacctcatatcgaagtcacaaacggccattacattctgcgatgtgtaaccgtgccgtccaatatatttggcttgctctgaggccgggactgccgctggaaagtgactaccatcaattgctcttatgcagtccttgaagtgtggccaaaatctcgcctctcgcaaacgcggatgaatctcggtgaaatatgggtctttgggcttaatgatgtcagatgacatcttaaacagtgcatcaaggacttcactatacttgcgactaattgtttccaaggagtgaccaaacttattttgtatttgcctaaaggactgtggacccccacatgcccacaagaaaatgccaagtgcttccatagtactgacaccccggcttggaatcagaccataattgtccaccaatgtgtcatgcaatcgtctaaacacagttcgtcgcatgtgaaacatatcgaagcagtcgttactattctccaacgttctctccacccattgaataccagtttcaaccaatgttcttctaggaacctgactgatattcctgccccaaacatctacagcacatatagcaaccaccaattctgcatctctgtcatccatttcattatc

SEQ ID NO: 9893 - DNA, 622 bp, Zea Mays
gtggaccaccaccatggacataggacactaagagggaaataggcgtaaaaaccattttcacgcttgttttggtgattaaccatcaccacacccatttgcgctgactagtttgctaagtacatgcacacatgtacataagaaattaattcaagaagatcaattctcaactcagcacatcgcggaccattcgaacctctaccccggaccgtccgaataaaaagagacctcatgcgctgcctgttgaaaatcagaccaacccgaagatgtcaggttcggtaaaataaattttagcgtcactcatggaccgtccggaggcacgaacggatcgtcgcacgaacggatcgtctgtaatacattttatctgacatctaataacacatttaatacaattttagctgctgatataaccattataactgaccgttgcgatctagccattgatcgcgcaggggtgaattgttcgagccagggtcgcggaccgcgcgcatgtggcagatcgactgtaatggctaggatatggttggaccgttggagactataaataaaacctcaaccacccccttcaatggcatccaagcttctcaagcaattaactcattcattgcaagaggaagaactccac

SEQ ID NO: 9894 - DNA, 589 bp, Zea Mays
atcaatttgattgtgttgctctattttggtttcttacatgaatcttggactgtgaccaacagacaatgctacaaggacacgtagggctccgagggcttataccaccagatgtcccgtgatgtgagggtccatgggcttgccctaggatgagaggagcctcgaggcttacgggtgtgaggggggcagtggtttatggtgccatgtgccctgggacaagaggagccctatggacttacaccatcgcgtgcagttgcctcgaggcacaagaggctccgagggcttacaatgttatgtgccctatggcacgagagatcctagggatttatatcattaattgcctcgagtaggaggagcctcgaggatctatcgttgggtgccccggggcacgaaaggcaccagtggttgtcttcatattaaccatgttatgtggtgtgtggattagttaggaacatccttgtgtaaccagagttagtatcggggtttcttcgttaatcaagaccagcgtggcctcctagtaacgaggtcccaagagtaatgacccttctattgtatgtctcctagtcatgaggtcacatgatttttatctaaa

SEQ ID NO: 9895 - DNA, 1001 bp, Zea Mays
gttgggtactagggcactcgataggggctgtgggttgccgtcaagactctgttgaccatggcaaaccatgtaagcttgcattgtgggtgctcacaatggccctggtgaacttcattgagcagtcgaggtcggtttagcacacgtttggataagggaacggatgggttagttctaatagctggttacacacctccttgtactaggtagagcatccacacgtggctagaggcatcattcgacggtggtggggcacggcgaggtcaggagctccatggtctagggtgtcgaagtcagtagagtttcctccctagtaagttgtagatgccccaaacaccggcgaagctcatggcatctgtggtgaggacaaaggtactctggtggggggaggatcatacttggaagtctcgacgatggcggtattggcactggtgtgagggctcggggtctaagaaggttgtagagctcttggtgaagtaagcatggggtgccatgggtcaacttttagagggccatgccattgatgatggggaggggtgatgacaagggtagcacggctagggccattgttttatgctagtgaaatcgcttgagtttatggcacgggcatccgacgaggaaaatgggggagcaacgaccaaggtgaagacatgaggtctctactgctagatgacgggcgcgagagtggtgtcctagtcaggggcaaaatcagcgttgatgtgtgcgccgttgaatagagagcaagcaggaggtcgtggatgactgccgcgcccgcgtgtcagataggtagagagacagcgcgcggatggagttgactgattggcactgcttgtcagtgagtgcgacgaggaggggcgcgtgcagcattgggccgaaagccactaggtcgcctgcttggccttgttttcttttttttatttttagaattggaatttaagtttaattttcaaattaaaatcaaataaagtccaaaccacatcaaatatttttaggaaataaaaaat

SEQ ID NO: 9896 - DNA, 648 bp, Zea Mays
gccctatgtagtctggagccttcgaactcaacgtaaccatacactgcaaggaaacaccctttcttcatggtgtatggatcagaagcaatgttcctgcagacttggcattcagggcacctaggctgactttcaaagacatcacagatgcagaagcaacctgacttgaagagattgatgtactagaagaagaacgattgaatgtggtcattcatttggccaggtaccagcaaaacctaaggtgttaccacgacaaggcaatacgtcctcgagcatttgcggttggggatctagtgctccactggatactgttaggggatggacgccacaagttatcaccaccttaggaaggacctttcatcgtcacagaggtcactcagccgggctcataccgattctcacagatggatgatactccaattggaaactcttggaacatcgaacacctttagaagttctacccttagcagcaccataaactctagacggtagtctaccacttgtactctgtaaactcatttcaacaaagcattattttcccccttatcctctccgtactattatgcatgcgcacataagtaatggagcaattggctcaagttgagatttggcttgagtcggtgttacatgctcacgcatacagagaaaggg

SEQ ID NO: 9897 - DNA, 409 bp, Zea Mays
aaacaatgaagatcagagaactggaaatatctgtagaaggaaaagatcgctggttaatgtagttttggatgtgtgcagttgaagtggagataggaacgaccgcggaaagataactacaggctgattcatggtcccgcgagcctagctggagcctggccagagatttttcgttggtgctcgccatggcgcggtattttgtcactgtgtcactcacgccaccaccttacctcattgtgcctcttccttacatcgtagccatgcgttaatgacatgtttcgtggccgctgatcgttagccggaccgccgtgcctataaatagtgctatgaaccacggcgaggcactcaccatttcaccagtgagctcgattgaagccaaaatttgcactgcctcctccacctctccccaaat

SEQ ID NO: 9898 - DNA, 298 bp, Zea Mays
ctagtcctcaaaccagccaaccgagccaccaccgaccaactagctaaagatctattgttgtacatctcatgcacgactcatgtggtaagcaccactttagtagtcgagtgaacagaagaagggcatgcacatccagtccaacactccgtggacttcattagaaaaggtatcagcctctccaagatcagataccctcaagtaaagaagttgctaaacgtagtactcctcaccgcacgaaatttgtgtcactacttcgacaatcacaaggttgttgtggttataggcttcttgataggag

SEQ ID NO: 9899 - DNA, 380 bp, Zea Mays
tcgcaaaagcgacagatcgaaggggtatctttgcactggggccgatggatcttggatctacggttaggattagattccaattcaagcaaaccggtatgttctactggccattggatcgtggaccagcagcttggatcttaggtaagccagatcgacagggatccgaccgatctcagatcgatggtccccgaccaatctccgaaacgttatgtcaccgactaattcctacgcattcatctcggaatcattggcccagatgttgtttgattttgatcaaatctgtaccgttggtgaccgatccaacgaccacgacctaacccaacccaggtgaccgcgccagcggcggcgcgcacgctggacacggcggcgccatcgccggc

SEQ ID NO: 9900 - DNA, 518 bp, Zea Mays
tcaacaagacatttatttatccgataggcatggaaggcaataattgataaagtgaagcatcacattgccatacaacaaaaatcatgacaacaccgatagatactatccactaactgtttgaaaaactaaacttacttctcgcttgccactacatcactcctcaatcacacaaccatcacgagcatccttcacacgattatataatagcaacctaaacgtcgtgttacacaatacatacatctttcctcgtcgtgagtataaccatattacggcatatacccatgcacctcaaataaatatctcacgccaccactactatatcacaccacggcacatacgcacatatgtgtccccactgccttctcatgcccaattttagcacaattatttatgacaacgtttatcgactagacaagtgaaacactaaccgatcattcgcacatctcgtctttaaaacacgaatcacatgtcacataatttagattttcaacccacgctatcctacaccatgatgaata

SEQ ID NO: 9901 - DNA, 690 bp, Zea Mays
gttctccggggtcatggtgtcatcgcgcgagggtattgaccgcgtttatacttgcatattatgactgcaacggttacataaatcgacacagcgatgtggtctggtcggtgtggtgtagtgtttgcgatttatgcttgtatacttcgatgttaacaactgcgtatcaatcgggctcgcagtgtttacgatcatatacacaacaaattatgatctttgtaaactgttttatattatgtacttagcgtggttcttgattaatgctttttttgtaaactatttacgacactttgcatagttatttatgcttaatatgaacacacagtaaccaaacagtccaactgatcgtgcgctgactagtggaccccacagtcccgcgtcgctcccccacgggccgaccgagccaatatggtcaacgagcgagacccacccgcacaatcaattaactccgctcgggtccacccaaaccctaaaaaatcagctcctccccgtcgccgtcactcgctcctacgatcaccatcaacgaccgcccccaccgcttccacccgccgtaatctccgcgcttcatcgattgaccgtcgtcgttctcctcccctggttcatttcccctctccttctttcgagttccccacattcttttgcatagttcagtcgccaatggccatcaggtttgccacgccccttctacatccc

SEQ ID NO: 9902 - DNA, 536 bp, Zea Mays
cttgtaccggccgggatgcgcaacgaccggtgccctaactcggtcgacacctaattctactcctggcgatcctaatccgaccctcaattgcacgaatccgtccaggagttcatctgttcacgacgacggcgagacccgagggaaaactgaggtgttctaggtgactcaacacggtcaagttcaatcaatcaggtctacgagcaacaagagacttaagggatgctagaacaccaagcagagaggcatgaaccaacctgtagatgggtggccacggtgagaagctcacggcggcgcggaaaaccgatttggggaaaagcctgaattaaggcgctatggtggacgattggaggcgaggagcgatgcactaggcgcgtaacaacctagaggagctagctatgcactcaatttatagagatcaacagcggtggcgcccaatttgaggaagacacgctggcgggcggagagaggggtaagctactggcgtgagctaccgtggcagtcactggctaatgagctacgacggtcactggttactc

SEQ ID NO: 9903 - DNA, 922 bp, Zea Mays
tcgccacctgcaatggcaaggacaagaggaggcaagcgatcagggagcgcaacaaggttggtggaggaaatcctagcagactaaggaccaacaaaaagggaggagaaaagaacggatgagagccaacaaagagaaaggaggggcaccaaccatggtggcgatagcctagcggctagccaacaactaggaggggtagagggagaaaaaaattggttggatagcatgttagaaagtgaaaaccctaatccattgattataagctaaatattacatacactcggcactagttacatacacggactgggctctaggctcataacacttagacatatacaaacaatctaacaagcatgaccataaacaatcaaatgctcaagaaactaaactaagaaatcaaccagcaatgaagtaatattttccaatgtagtgtgcatctcaaggctgctgagtgatcactgtagtagatcggaaaatggatagcagcatccagaattttgatcacaattcattagattacatgcattttctgctggtataaacagattgttaacatgattcaaccaaactgaaacacgaaccataaccaaattctcaattgaatatacagctccgttttgaggcggtaggcaagcaaaatacgaacacacgttgccagttcttaactatatgttgtcttgatcagaacatgctctagcctccaatttaggctgagttacagagctcatctgcactgaccctgatggcaacaagtgttatctaacgatatttggaaaaagagaagaatagcttctggatgtttgttaatgaacaggttgaagctgaaatttggcttgagaaagagcaccacgacataccaatgaatagcaagaataacatccattgccttaatcaattcataaacaataatctgaaatgattaaac

SEQ ID NO: 9904 - DNA, 513 bp, Zea Mays
actgtccgctcaaattaagcgccaccgcccctaggatctataaattgaccccgcagagagcttcacaacatcatcacccacccagccaccacgtattgctagcaattgttcgcccgagctcgcgaattttgaattcgccccaaatcaattctccgccacccgaaacccaacctcaccgcggccagtcttattccggtcagttcatctccttctctccctcgtttaagctttcccttaagtctacgatgcttgccgacccacataatcgagctaggagccctttggtcaccgggaacacgtaccaattgtcctcatcgtccgcggttcacgtggacagagcttgatagcttaccaattgtgaaattgatttaggggaatcattcggggagggttcaatccggtgtatgtcgctcgagagcatcggtcgtagcgtaaattcgccagtacaatctcaccggagttcgttcctcgcgctgcccccgtcgtggccttcaaaccgagaatagatagaag

SEQ ID NO: 9905 - DNA, 369 bp, Zea Mays
cccaaacacaatggatgtcaccaaaaacaattcccctaaattgttatgtataaaaaatgaagacagaaaggaaaaattcggcagcaactcccttggaagttgcataacgaggaaaccacagtgttcaaacatgatgcaagagaaaggtaatccacagtgtataatcatgatgcaagagaaaagtaaacattcaaaacaagattaattcagctaaccaaaaatacgaccaccataatgactagaacatattagaccacttgcacacactatttaaaaatgaccaacatccttgacccgaatcccctgattaaaatcattactaagcagtggtaaagttgtttagaggtgtagtgatcgtgctgctacttc

SEQ ID NO: 9906 - DNA, 481 bp, Zea Mays
ggccttcatgagaattttggttgctacagttttgcatatcgaaaggatacgaaggcaccagttcttagctaccgtactaagtggccaactggttggaaaagtgaatggttttatatgaaggcagacgagaaaaagagggagaagctgatgactatggtcatgagtccactaatattgagcttcggaatgacaaggcccttgtgccatatgcaacttggctccccatgccaagtagctgaagtggagtttaaagtggtagcggccgaagtcagcactagagatctggcgcaagaactcttggcaaatagagtatttctgacctctagtggctgggggatgcccaagaagaaggatgggggtaaaaagcacgaacttgttcggttcccctaccgtttcaagtttgagaaagagttcaagaagccatgccaagagtggttagaaatgattgaaactatgtgcaatgaaatccttggcaactaca

SEQ ID NO: 9907 - DNA, 472 bp, Zea Mays
ggtggatcctcatgcagtggttgtacaagacgtctagactttctttcttttgctgcctattgagcgagacttatgcgagggcatctgtctcgggtctataaacttgaaagtttagaaggaatttgtcgcggagtgttttccatgaatcaattgataatggcggcagtcttgagtaccatgtgagagttgggccctcgaggaatatgatgaatggcttggccatgatggtgtcgtccccccggatgatgcgattgcaacctgataactcatgatgtacagagttgggtctgcactgccattatacttttggtaagtgcctgctctaaaattttgcggccaggggaggcctgaagctgtggtgcaagagggctccgttcatcaaggtaatttaacccttggaaagcagctagtgcgaaggctggcatgtgggggagacgagggtttatgttgaatgcgggggcgtgctgctggt

SEQ ID NO: 9908 - DNA, 557 bp, Zea Mays
ttaccggtgtgcacctactatcaaggatgagatcaaagctcgggttaaggaaatgctctagtcaaggataattcaacccagtaccggtccattttcaagcccagttttgatggttcgcaaaaggatcaaacctgacatttttgtgttgactttcgccactcaatgctcacacaatcaaacgaaaatacccagtcccaatcattgccgagtttttggacgagctgcccgggctagctggttctccagccttgatctgcgagctggattccaccagatattattcaaggagggcgaagagttcaaaacagcatttcagacacatactgatcactacgaattccgtgttatggcgttcgggttgacaggcgcaccagcaaccttctagagtgcaatgaacaacaccttgctgcctgttttacgcaagtttgccctagtattttttgatgatattctggtttacaacccttcactggaagcacatattgaacaccgacgtgtggtgctggaattggtctagaaatacaattggaaggttaagttgtccaagtgtacatttg

SEQ ID NO: 9909 - DNA, 443 bp, Zea Mays
cttaagaccatcctcgccagccaagatttcctcagtttctcgcagctctcgaacaaggccatccaggtggaaagagctcgagaagaagaaaagggtcacctcaagaggaagtttcaagttctccgagctcagcaacaggataggcactagagagttcaatcctttgggtttcctcccaaaggaccgagtttcagcaagccagcggggtccgctccatcacgtttcagccaaccgagtcaaagttccctccacaccccatttgtggcaagcagccaacctccagccaatgcttgttggcactgtggagatcccagtcactacaagaataattgccctcagttgaagacatccatacctacctactccaactcggtgaatggccccaagaatgtttcagcacccgcctccaaggcaccctcctccaatagccagctaagcaagac

SEQ ID NO: 9910 - DNA, 434 bp, Zea Mays
ctccaaagtcagatcctgctgcaccgcaattggttccatctcaatctgatggtccggatcccgaaagaactttctcaacatatagacatgaaaaatcgggtgtacccctgccatggaatccggcagtagcaagcgataagccaagctgcccactcgggccaagatagtgaatggtccaatgtatctcgggctgagcttcccagagacaccgaaccgcacaactcctttagtaggtgataccctgagaatgacttggtcacccatagcaaattccagatcccgcctcctcacatcagcataactcttctgacggctctgagctgccaaaatattctgacatatttcccgaaccttttcagacgtctgctgaacccaatcaggaccaaccagggatctctctcccaaagtctcccagcacataggggagatacacc

SEQ ID NO: 9911 - DNA, 830 bp, Zea Mays
gagagatcgaccaagtccccaccgagcaagtctgcgagacagagatccaagtccagcgctacgagcccacgatggctatgacaagacgcatcaccctaggtcgtgactggacatacgcgcgacataacgagggtgcgtcgagaggtcgctatcaacatgactgcacatctccacgtacggtcccgggtcatggaggaccttagcaccgaagcttcgacagtgatccgtatattgcacaacacacggttgatacaccataccaggtgtacacctacgcatgtcggtgagtcatgcaggctcgtgacgacaggcgagaccgcacaacacacgactacaccatatgactgactcgtgggacccccacgcactactatgatgatgtcagtagaagactcgttacagggacccgtatgacaaatgaatgggatagtacgccatgccgggggtacgactacgcacgaccctgtggacgatgtcagaaggactatgccatctaggagtaacgaaccatgcccttgctagcagaatacaaagtctccaatgtaaggttctggccttgagctataaaagggtaggatcccttccatctacacacaagcacaccagttgtaacacgcatccaagcaatacaacgatcaatactacactagactagggagtgaaccctaactagtataagccctctgtctcaatcaacatctaattctccgcgattcaacattcggagtgagtccacactagcacccccgctgaacatagatcttattgtcccccagtttccaaaaccacgacacatggtgccactaaagttactacttttgagataaaaa

SEQ ID NO: 9912 - DNA, 615 bp, Zea Mays
ggttgcacaaaatcgtctctggacagcggatagacttgctaaaagagggctgagtcatcttgagaagtgccccttttgtgatcaagaagatgaaactattgatcatctccttgttacctgttccttctccagggaattctggtacctgttgttacggatttttggtctgcattctttggctcctcaacctgatgttggctcatatctagctggtaggaatcggtggggaatattgctgctgggctcactagaaaagggcttgattcccttatcattctggagcctggaccttgtggaagcatagaaacaaatgtgtttttgatggctgcaaccccagtgttgccatgagtcttagagctgctaatgaggaaaggatgcaatgggagattgctggtgccaaggggctttgccatctagctgtacctttagctgagagctaaggaaactctaatggattcttttttgtatgcttcttactggcctccgtaaggaggctgttttgtactggtctttcttggcccccttttatctcttcttaatatattatgaggcgcaattctcctgcgctttcgagaaaaaataaagatttaggtgtttaatatagaataaattaag

SEQ ID NO: 9913 - DNA, 601 bp, Zea Mays
ttgtagaactctttggctgccaatagtaatatgggaacaaaaaccaacagcaagtttctgcaacaaagtaaacaatgtagttaataaaacaaacatgccagcataacagcaattttctaaaacaaaattaacaatgtagtttttgcaatattcgacaattatgttgtgaacactttcattggaaagcaataaactaggaacaagaaggcgccagcagccaccagtatctaattctgggccatagttatctgttaggggagctgctactgcaagttaggatctggagagtaagaatagggggattggtcagagtaagaatagggggactgggcagcagtttgttagtagacagccagcattaggcgatataactaagggccgcctgattgtgaggggcatgcagaagtagaggactgtcgatcatagccttttgaccctaactctaataatgttagtttgagtatcccaactttcaattcagtttagttttggcccctaaggccagttaaagtggttctggctgatgtggcagcggtttttggattgaggaagaaatactcaaacagctctatttttttggaagaaacgaatgttttcggac

SEQ ID NO: 9914 - DNA, 357 bp, Zea Mays
gttgaccttttggtctcacgctgagcaattaaattgtatagtgggtgcttggacatgtcgaccatgttacgtcattaatcggctgagtaatgacattggataagtattggctgcgccctggcaacacgacacattatttgtgtagtacgaatttggctacgtcatttgattgttatgtcgacattcacgcttatttggaccactcttgttgagtcggactgccatcatcgagtcacgtattttttgtatgccctgttggcactattcgtctatcgtgatcatcgagacacaaatgcgcctgttgcgcacgttgtgtggacatttcgtgtaccccgactatcaagccatatatgcgcc

SEQ ID NO: 9915 - DNA, 464 bp, Zea Mays
tgctaacaaccgttggatcccagatccgtggtccacggcgcacgatacgcacgccaatttacagccctcgatccaaagatctatggtcccagagggaaccgatcaaatcggtaggctaagccccaatccggtttgtctattcacagatctacggtccgatgaccatcttcatcccacggacagaccccgacgacgccgtgcatccacggtggcgcgatggacattcacggcggcgacagcggaatacaggacttctacaccaacccgatgcccttcatcaattaactcgcgcctcgcaaaattgatgctcccctaagctcaatcccccaaccaattttggccgacctcgagtgcacgactcggtacacggcacgccgcggcggcaccatggccggatagcggacccaggggcatagctacaccattttacaattcgctagcgcatagcctaaaggaagggagga

SEQ ID NO: 9916 - DNA, 586 bp, Zea Mays
tacacaatgcactagggacatcacaacgtctacccccatggaccatgagaaagcatgaccattcaacacatgtcactcccccaatgtcgcatcataaccaaggtgaggtgacctctaatcatgaaggctcctccctgcactagtcaatttagcaaactcgtcggtgccttgactctagtgctaacaacaatgtcagccctctcaacaccacataagctctccttcacaatacatagggctcgaaggccattgaggctactactaaatagtggtaacaagatattgctaggttcatagcaacagccaaggtcaagcttgacccttctctccccatgcaacctgacctagagaaggctacatcagtctaggatgtatctttaacatgctctcggaccacaatcatggtttctctagctttagtcaccaaggctgcacctttgaccccaccttgacaccaacattaggaaccattccaaccgctagagcagtaccatgagacacttggcatacccctaaggtctcataatgagggatgggggtccaacgctagtttcttgtactgatccctcctacactgcatatcagc

SEQ ID NO: 9917 - DNA, 363 bp, Zea Mays
gctctgcgagtgcaccggcttttggatcttctagcttttctgcttgccgccggtgctgactctgaggcgcacctcacatatctgcctggccttctgacccttttgactaccagcggcaggtatgttgaggagtgggtccgagtcttctacgcgtctgtatggatagactcggatcatcactggatgaggtttcattttgagcgagaggatgtcaccattactgccactcagattcgccagctctttggatttcccgagtcgacgactcgacttcacagcctctgctacggcacctctgaccctcctcgtcgccctcacggcggtgtggctccgggtacagctcacgtcgcggctctgttccgc

SEQ ID NO: 9918 - DNA, 473 bp, Zea Mays
gtcgtgtcttgcggtccatttggctatctacacagacaatgagacaaggtcacaagaacccaagtccaagtctaccaacagacaaacgactgatagttcggaaaaataaaacgaactagaactgttactttaattatatctctgataatcgtatctccatgacgacgatgcaagcgaaacaagtacaatcgatagtataatgcttcccttttataagaagcacaacaatgtatgttcacacccattccaaggcaaccacacagatttgtcgatgccacctcttgcacctccaatcctaatggagctatcgtcgtcgccaatgttactcacctgccttggcatggtgctcaccatcgtgatcctgatcctccgcagtctgaaatgcaagtcccgccgccgtgtttatcgcctcccgccgggcccgaggccatggcctgtcatcggcaacctgaacctggtcggcgcgctcccgc

SEQ ID NO: 9919 - DNA, 586 bp, Zea Mays
ggccgcggatggaaggtgccacagatcctcccaccctcctccccacaccgcctgtgctccacctccccagccaccgacaaccacgcgtcctcggctcctcgcctccccgaccagcctccaccgtgccatggttgccgcctttcctctcacctcctcatctcccactccgcagccaacggtgacagggatggggttgggtgtagtgcggtgccgctcgatgcgctgctcctcgcccacgctcgcgcaacgcaggaagaccttccccaaccgcgacgacagatcctcttccacacacccgacggcgcctccacctctctgggttcccctctgctcctcgtgccccgcagtagagcaaccacaaaattagggttccgttctcgatctggtcggcactcttcctccgccgccaccacaccttgcgcatcctccgcgggcgaggcacactctccctccgccgccaccacacctcgcgcatccaggagcgctgtcgccaagatcttcgctggcctccggccgcgcggtggctacaagctgcgcatcctccgcgggcgaggcacactctccctccgccgccaccacacctcgc

SEQ ID NO: 9920 - DNA, 530 bp, Zea Mays
gtgtttccaatggcaggatccgatgacgagattgaggtagtcattcccacacaattttctgattgtgtcagccgcgaagactttgatgttatttgcaagcgcatggaagaaaatatggaggaaacggtccacaagtctgtccatgatgcgattattgcaatggatcttggcaaagtgctagatagagtggagagacggataaccgagcttgtcgatcgggttgccacgttggagacacgtccattacatcagcagcctcctccaccaccacaaccccagcagcatccaccacggcatcagcaacctccaccacaggctcaagatgacgccattttcgatgcacgtggcaattttgatgaggtagctaccagagacgctcgcctacgacgccgtcttcatcggaacagggtaggtatgggtgacaaccagcgaggtaataacaatcgtattcctgatgacccttttgctaagattaagttcagcataccttctttttcgggtcattatgatgctgaggcatatcttgattg

SEQ ID NO: 9921 - DNA, 403 bp, Zea Mays
tatgtatattgttagaagtctgcgtctcctaaaagcagtttgaaacacaagtttgttattataccaagcaaaaatgttagatattaagtgctaatatgtgttggtccttagttgtttgtgcatgtgatacttgtccatccattctatttttgaaataatcagaaggtggtgcatgccatgcttgcgctattgtaaacaacttgatgtcacattatatgtgtcggatcatcttgaattagaaattagcaattcaatgtccatgtggaactgtttatgcaatggaagaagagaaaggtagcattcaaaagaaaggtgcccacctgatacaatcttcctaaagtaaacttgtcatttcctgcttgtggttttgtaagtgacatctacaagtctcatatgacaagat

SEQ ID NO: 9922 - DNA, 492 bp, Zea Mays
ttgctccgttagtagggcatagtggtcaccccgagttaagtaagcgtgagcatgttgcaccgccttaagtcggcaacgacttaagccgattgctccgttagcagggcatagtggtcaccccgagttaagtaagcgtgagcatgtcgcaccgccttaagtggttgccgacttaagccgattgctccgttagcagggcatagtggtcaccccgagttaagtaagcgtgagcatgtcgcaccgccttaagtcgttgccgacttaagctgattgctccgttagcagggcatagtggtcaccccgagttaagtaagcgtgagcatgtcgcaccgccttaagtcgttgccgacttaagccgattgctccgttagcagggcatagtggtcaccccgagttaagtaagaatgcaagtcaatcgtgaacaaactgagtatctttgaaacctcttttttattgatgacatatttccactttacagagtacatcgtcgttccg

SEQ ID NO: 9923 - DNA, 519 bp, Zea Mays
atttcacagaatagaacatgttccttgcacccaaaaatatatggaattttgagataaatgaaggaattcagaaagcagaggcacccagtatttctagcagtgcctacaacagagcatggtctagctacttattgtcctttactggtggcactacacagaaggaaccacaaaacagttctcttgaaggtcacacttcctagtaaggaacccttgctccgtaggtgatcagacagtccataaacatctttgatgaaaccagcaacatgatattatagatcctaccccaacataagatgccatgacacaaaacacacgaacaaaaggagagatgccacactacagcagacagaagcacatggcagatgaacccaagaaagatgaaccacatcaccagagaagaacaatactaaaggctcgttgtagcacaggcagccaagcacacaaaaggcacaaaaggcaaaagcatattgaagaaagttttgactaaactcaccttgagaaattgaaggccgatcagca

SEQ ID NO: 9924 - DNA, 440 bp, Zea Mays
caggcacgcaattattggattcgcttttttgtactgggtgagtcgtgactcgtgagtgcacgcagccacacaccgacagacacacgcactgcacgggcgtggctgtgcatggcaagccacccgtacgtggtctccatggataggaggaccacagtcaggaccatcccccgttgtctcaccaacacccaatatatatgtaacaagtgtacatatagtcttcaaatttagcaacaagagcatgtttaagtgtagaattagctaatactccggttagctattttttgctagtagaattagctggctaactattagttgattttagcaggccgggttgaaccagctaacaaactaatgagtacttggtagtgtagctaatttcagctagattgaacgagctaatgaactaatgtgtatttgatagtgcagcaaataccctctcg

SEQ ID NO: 9925 - DNA, 698 bp, Zea Mays
aaggggtacagggctggctggactattagattatatctgatcagcccagatccaatgaacaacgaggttatgtgctatggtgtcagaaccgctcaattcggaatctacggtcacaatcaccttcctcccgatcaaatcttagccgatggatagaaatccaacggaccgaccacattcttcctcccctagcccacaagacggcgactctagacatccccacggcggatcttccgctggagctccagatttggtgctaccgcagtcccaatccgagaacccgcgtgtgcagcacgaacagcaggtcaaggcgaatacgacggagtgcaccataccatggattatcgcgatggagaagcctgccacgcggaggtgcaggtcagcggtggcataaaaccttcggtgagaaatttttccgcgccaaccgaaccaccagtccagacgagcagcagccaaccactagaggtctcgtgcgagcacccggggtccactagtgcacttcgatcggaccctttggcggagatcccagacgcgacggcgcacgatcatacttccctcttcttcttcgccgaaagtggagatgggcaggtagcctggatgacaggaagtcccccccgagagtcccgttttatagtcctcatcaggagacagagtccgcgcggggaccaagcttttcccccgacgatagcagtggccgttgc

SEQ ID NO: 9926 - DNA, 638 bp, Zea Mays
tcgcctaagggtgcagccggacaagcacaacaagtgcacgatacgaagtctttatcaaaagacaaatccgtgcaaaagttgcctaagggtgcagccggacaagcacaacaagtgcatgatacgaagtctttatcaaaagacaaatccgtgcaaaagtcgcctaagggtgcagccggacaagcacaacaagtgcacgatacgaagtctttatcaaaagacaaatccgtgcaaaagtcgcctaagggtgcaaccggacagtcacaacacaggaattccccatctcattcaacgaagggtaaccgaccacattacacaaacaataaacagatagtcacaggttacatacacacagcgagaggccaccaatcctaccgcacgaataaatacaatcgcattttttcctctctttattgcgagccgagggagggcagcgctttcactcactactgcaagacaagagcgagggtaccaaacatactacatcggctcagccttcgggataatgcccgcctctcgataattaaacaacatcattttcaattcctcaccctcaaaaagattctgcagatccccctcaccaatactcgtcccaaacgacgaggacaacagatctcgttggccaccccgatccactcgaa

SEQ ID NO: 9927 - DNA, 759 bp, Zea Mays
tgaaggaccagcccacgaatcacaggggcgtgggccgggggaagatcaacttcatcatccttcccgccttcgtcatcactcgtagcctcccacgcctgcggattcgtcgcgggtcgggaccgaccggaaggattccgggatgtccgatcgcgaacactttgagacccggaggcctcagcaccttgcatgacatttccgcttcctctcccacgcttggatcgagagcatgggggagtatctccgtgtatttcttggtcatccgaggagtcggattcaaccacggacgggttcctccgacgcaccattctaagaaacaaaaatagaacctatgatgagcaaggatcaaacacgtttgagtagaaacgcataagatattgagcatgcacttcaaccgttcatatgagcggttcaactacaatgaacaatatcaaatcgctaaactctaacaatgtttgtgacaaatgaaagtaatctaagtgttgtaagcacttaaactaaaatatacccaacgaatgatacattagataatcaagaacgcgtaggatcgagtacaaggaaatgaaatagggcaatacctcgatccggagatttagtcaagaaatcccaacgagattgaggaagatgatggagaacgccgggatgaacggatctccaacaactcttccaaagatgagagggcacaagtgagtttttggagtggagtgtgaaggagagagcgaggaagaagagtgggcggcggcggctggaaaatgaaactga

SEQ ID NO: 9928 - DNA, 521 bp, Zea Mays
ctcaattctaagcatgatccagtggggatctgattagtgatgctatagcaaaagtgaagatggtttgtagggctacaactttgatacagagtgttggtcgggtcactacacaaaatctggcacgaattgccctcaaaggagctctgtcagaccaactgaatggaattcaccatagtacagtaactgaagaagattccaagttcatcccccttcaccgccgacgaccgtcgcgccatgattcacgttggtcgttgtgattcgtgcgttgtgacttgtggataaaggtgagcgggtaaagatctgggcgcctagatcaacttgggtccggtcgcggctaagctccccgtaccacttgctcatcgatcgatcgggatagacctcgctgccgttggccgattaccgtcgtgcgccacgtgctaaagcgttagaccacatcgctgtgaatcgcgtcttgcatgcacggtgatcgccggtgtgctgccacggtgaaagccactaacccaagcaccagtgacctccca

SEQ ID NO: 9929 - DNA, 767 bp, Zea Mays
ccgttgcaacgcacgggcactcagctagtggttaatgaagagtgtcgttttcgctatcctcgacaattctgtgctgcaacacaacaaggaaaggattcataccctttgtataggaggagagatgatgggcgtcgtgtaaaggtaagaggatgtgtgttagataacaggtgggtggttccatacaatcctggattgtttatgaggtataactgccacataaatgttgaagcttgctcaagcatcaaagccattaagtacatgtgcaaatatgtttacaaaggccacgatcgtgcatcattctcagtttaccctgctcataaggaagatggagtaatcaatgagattcggcagtacatggatgccagatacatatccccacctgaagctgtacataggattcttggttttccattgtttggtgtcaatccatctgttttgcaactccaatgccatttaccaggtatgcagtctgttattattgacgagacagctaaactacaagacattgtcaatgagccatcttcttctatgacaacactcatagagtacttcactaagaatcgtgctgatagttttgcaaggacattattgtctaaagattttccagaatactacaggtggattcatggtagcaagcgctggcagagacaaaaacaaaggggacagattggtcgaattgtgtatgcacaccctgctgaaggggagagatatttcttgagagtacttctaaatcatgttagaggtgcatactcatttgaggatttaag

SEQ ID NO: 9930 - DNA, 314 bp, Zea Mays
cgcgcgcgcgtgtccgcggcagccatggcgtctttacagaaagggcctcggagtttttactaaccgaaacaggttctttcactgtttaacagagtcactgaccgtttacaaaaagacccccgcactcctatccattctcggtttgaagtccacgacggcgtcgagcgtggggaagctccggcgagcacctgtaccggccgaatggggcaatgactagggtctccgagcgactaacacccaattgaaccctccccgatccattcccccaacccaatttcatcaacgactaactaactagctctggccacggcgac

SEQ ID NO: 9931 - DNA, 466 bp, Zea Mays
aggctcctccataaatcaacatgcaattcttcctcaagggaagatcataacgcaaacgaccaagggtcaatcatcaacgcaccgaattctaaccctccaaactatccccaaatacgaacatgatctgcacagagatttggtaacccggacagaacaacgccacgactaaaccaacacatcggtccactaggcaatcacgcggccttcctccatatcgcgcatcaaaaatggtcacgatcaaaggtgctgaaggaatgggaaaacatggaggaagggtaagagatcatacgtggccctcgaacatggcggatgtcgtggggatgggcccgtcaatggggtggcagtgctcgacgcgccctaggacgacggcagcggctgcgcagtcgcgaatccactccctccttgcgcgcggcgaatctccgtcataggcctcctgtgccaagagggagttagggtttccgcgggg

SEQ ID NO: 9932 - DNA, 435 bp, Zea Mays
gttctacggagcagaggagtgttccggtgatgggactctggcaaacttcaattggtcggctccgagagcagtaggaagctataaacaagctagaacaggaagcaattggggagttactgacccgaggagtgctggccacggaggagttcttcacggcagcgcgaaaaacagggcggaatggttttgtggactgtgtgagttcttctggtgaaattgagtcgattgctcaagtgcttgtgtgcgctatgtggtgaagaagcaggatccgagctcaatttataggccgatggctggagttggatgagaatcgcggagctgtaaccgccctggcgagctcacccgcgcgggcagagccacgacgattatccggtgaccgccgattaaccgggcagtgccaccgcaacattttaacgccacatcatggatgatctttac

SEQ ID NO: 9933 - DNA, 385 bp, Zea Mays
ggcagggtcgccatcgtctagggtggccatccgcgacctcaattggaaggcggaccttggggagcgcgggcaattcctcaccgtgatcccgccaccgtcgtgcttccgcccatcgccgtggccatactcctgtgcttcaacccctcggtaagaaatcagtccctcttgttcgtcttgccttccacatggtatatctcgagtcaatttaatgcttagcgcgcggggaacaccgattggcgacctcaccggagctcggctgggtgtggagcagggggcggcgccgtcgtgcgtgtgtgcgctgttggggcagagatcgtgcgccgttggatgaccagcaacggctgcgattagatcatgtgcataccgattcgcgtaatgggctcga

SEQ ID NO: 9934 - DNA, 589 bp, Zea Mays
agaaagggcgacgcgcaacttcaagctcttttttcatagtaacgggaggggttttgaggatacctgtgtgacctccctcaccagcagacgaagcgccaatgtcttctttggtctcagcttttccaataatcggcttcaacctccaacttggattacggatcttgttccacgactgtgaaccttgaggattatctttctgattccatcgatcccagttagggtttcttcccttcggatccatcttatgcgacgacaccacgcgcgacagcgccggccactcctcgtccaccggcgggggacgaaacggagattcaatccacccaccgcgaaagctagcacgaaacgacgacggaagcgaccaaagacgcgagagcgaagaagcaaggtgcgggaaggagtgcgaaccgataaaatccgaaggaaaccctaaaacagaataagaggccctcacctcgccacgggaaggggaccggggagagaactgggccgcagcacgcgacgcttggtttccgtcggcgagagtaccacacggaggaatggaggtgcgcgaagaaaacggcccaggaaggccctggtccacgcagctaca

SEQ ID NO: 9935 - DNA, 437 bp, Zea Mays
ggagtgctggccatggaggggtccttcacggcggtgctaagaacagggaggaggggatttgtggaatttgtgagttctccagtgagattgagtcgattgcacaagtgctcgtgtgtgtgatgtggtgaagaagcagtgctcgggctcaatttataggcagatggccggagatggatgaggttcacggagctgtaaacgcgctggcgagctcacccgcgcgagaagagccacgatgagggtccgatgaccgccgattaaccgggcagcgccacctcaagaatttagcgccacgtcgcagaagatttttaccgaggccgcagacccatcctcagtcgtggtggcggtcttatccccggcgagatttttctgaactccggtgaacagtacgccaatcagcccgatttcaaacggcaatttcttcaaattttatgtgacaa

SEQ ID NO: 9936 - DNA, 824 bp, Zea Mays
gagtctaatgatcctggatggaaccatggatattggacagagattgggaatcgagataagctcacatgcaacctttgcaagactgacaacgggatgaatcaggaggttaaaagaacatcttgccggtggttatgcagacacattaatatgttttaagactacaactgagattagaaaagaaatgaaggcatatttggacaagaacaagaggtctaggcctattttccttgatgatgatgatcatgatggtcaggggcagcaagacgaagaggattccaccacatctaagcaacaacttagctcggggatagctgccaaaaggaagagagctgcatttcagtttagaatagctgcacagccacaaacatcaaacaaggaaaaagaaaaaggggaaattgcaactatgtttcgaagaactcctgaacaagttatggatgagaggctcccctcagggtcacaccaccaaaccaccatggaagcatgcactaagtctaaggctgacagagattatgtcaacaagcaatgggctatgtggttctatgagtgtggtgtaccttttaacgccattaattctagacagtttcacattacttgtgaggccactgctcaatatggtactagatatgttcctcctagtattcatgaggttaaagagcctttacttgctgaatgtgtcaaaaatgtgactaacttgagagctcatcatgagttagcttggaagacttatggttgcacacttatgtcatatggatggactgacaggaggggacatcagttgatcaactttcttgtgaacagtcctgaggggacttactacttagaat

SEQ ID NO: 9937 - DNA, 547 bp, Zea Mays
gtcgaggatcccggtggacgacgacagtgtagaataaacaggaaaggggagaatcaccacacacccaatgtgggtggggagcctttcatatatagagccaatcaggcatacatggaaggtacataagtagaaggctatcacctatacaaggaagctattcctgggtgctatacatagcaactagcctgtctacaggatcactctaattgatcctgatttacatatcctaatacccgcccgcagtcgcagcgggagactcacggacgcacagactggtcctgaaatcagtgaagagctggacgggtagacccttggtcatcatatccgcgaactggtaggcggagggaacatgaagaactcgaaactgccctagggcgaccttctcacggacgaagtggatgtcaatctcgatgtgcttcgtgcgacgatgatggactgggttggcggtcatatagacaacactcacattgtcgcagttgactaccgtggcaagcggaatcgagatgtgcagctcctggagcagctgacacagccagcagcactcagc

SEQ ID NO: 9938 - DNA, 599 bp, Zea Mays
caaacaaagcctaatcgtctgttaactccttggccgactcgttcaaatggaagaaggttaaggtcctgtcgtcctgatgctcccgataacaacaacaactccgttcggcaggcggtccaaatcgccgccgctccgatccatcatccacgctcgcattatctatcccttctgattaaaattaatctccgtgacgatatcgcactgattccttcttcctcgttcccgctgagcggtcagcggctgcagagtgcagactgagtgatcgctacttctacgcgcgccgcgagcaccaccgaacaagtagcaaccggggtggattgagcgtggtcccaacacgggccagaattccgccatgatgaggccatcgccgccgcggcgcctatccctcgccgcccccttcctcatcctcctgctgctcacgctcctctcgccgcctcgagcggcggcggcgggcggctcatccgcgtgggtggcgctccgcggggcggcgggcagccgaaaggcgtctccggcggagcaggaaggggcggccgcggggctgctgcgccggctgctccctttccactctggcagcttcagcttccagatcgactccaagg

SEQ ID NO: 9939 - DNA, 777 bp, Zea Mays
tgcgattcgagcctaatccagtaagaatttaggagtgattgctatagtaagattgaagctggatagtagagcaacaactttcttaaagatggattaggaagtcactacatgaaaaatcaagattcaagccctacaagaaggtttgtcagactaactgatagagctttgcgatggtacagtaaccaaaagatcagtagattcagtgagctggccgccggtgaccctctgccgtgattaacgccgatcgtcgcaattcgtgcgtttggtctgtggattgagttcgccggtgaaaagatctcgtcacggatgggttcaagttactgtggccacgctgtctctcagttcctcgcgctggcgacgtggccttacggacatcaccggaatccacgatattcaccgcggttgcgccacacctccagcctttaaccgcaccgccgtgactcacgttagccatccgatcatcgccggtgagtctgccacggtattctccacgaatcaactgcgccagtacccttctccctctccggccgccagcgcgtcttcgcgaaattgaacaccaccaccttgcactcctataaattgatggcctggcctattgcaccatactatcacgaagccagagcacccattaccgccttcaattagccaccatagccggtgaatttccttcttcccccaattctgtttccgccgccgtggtagaaccctcaccgtggtcagtgaaccccaggtctgttcatgctccctgctgtcttgtttcaacatccgtggatcctc

SEQ ID NO: 9940 - DNA, 436 bp, Zea Mays
gtcggccattgactcgaagggctctggaggaggagatagttcagctgcgatacaaaacgtaaataagttcgaagtcacaaaaataaaaaataaagttaaaaacaattaggcaatacatatccgccttttgagttctgcagtcttttcagctgcctccgctgcttctcttgcatcgtgagaatatttttcactcttttttattatctcgtgggccatccctcggccgccattctcccagatgtcagtaaagaattttccgccaactaagctcgcttcagccgaggggtccttcgtgtcatcaatagataaagtagcttcggtttgggccaaagctttcacatgatcgcaacctgacttctccaaaatagccgcaattcccctggcacctgagaaggcgcagacatctccacgaccactcaaaattttctcaaaagct

SEQ ID NO: 9941 - DNA, 558 bp, Zea Mays
aatgttccaagagtgctctaggtcttcgccggatggagttgtgagcctgtacgcgctgggggatgccttcgtcttgacgatgaaagggccctcccactttggctctagcttgccccgggactctgtccgggctgtccggacgagtacgaggtctccttcgctgaattcccttgggatgactgtgtggtcgcgccatgcttttgtttgagcttggtatttgtttagagcctgtagggcgaagacgcggtctccgccgatgaggtccttcgaagtaggctcgtctacatcggggacggtggacgtgactgtccgtggtgacccatgttttatttcttgcggggtcatggcctccgatccatataaaaggcggaaaggggtgaacccagtcgccctgcactcagtcgtgttcagcgcccagaccgctttaggtaacaggtcggcccacttgcctttcttgtcatcgaggagcattttcttgtcggctgtgaaaattttaccattggcgcgttccacgactccgttggattgcgggtggtacactgaggcgaaggcaagctt

SEQ ID NO: 9942 - DNA, 535 bp, Zea Mays
cttccgatagcttctttgttgtggagaatgtcccctattggaaatcctgtgactactatgactttgtggtcatcaaagtagtgacggagcctgcgagcgattagaagtaccgcgtatagcagtttctggacttggggatacttcattttttaggacctgagaacttcactgatgaagtagaccggatgctgcatcgggtatgcatgttcttcctccacccgttggactactaatgcggtccttaccatgtgagttgtgtaggagatatacaacagtagatcttccgccgactgattcggcgcagctcggcgtggtggcttgagtactggtggtgtagtcagaaactttttcagtgcctctagagcttcttgtgcctctgtggtccactgaaacttgtccacctttttgagcaacttgtagaatggcatgcctttttcgcctagccttgatatgaatttgctcagggctgccatgcatccagtaagcctctgtacctttttctgtgatcgtggcgcttccattctcatgatggcct

SEQ ID NO: 9943 - DNA, 295 bp, Zea Mays
cacgatcctgatagtggcgcgttgcacgctcagcacgcaattccgcaacctccacccgaaccttgcccaactcgtcaagggcgtggtccagctcggtgttgagcacgatgaccaggttgaccatactgttcagcctgggattgccctcactacgggtgagacaatcacacctccagcactgtcggtcgaacggcgagggtagtacttcaggtcgaccgcatcagctaccccgctgaacaatgagcaatactatgaaagcgcacgacatgcagcatcttgcatggctgcctcggca

SEQ ID NO: 9944 - DNA, 585 bp, Zea Mays
caccaacatagccttgcctcgtgcttgccctccggcagatctataaccttctcgacctcgtctcgcacgcatccggccaattagccagcgttgcgttggcccctgcctctcgttccgatccgcacaccactgattgacccaggtcccagacacacgtccactatctaggtagacatcggcagcttcacaagacaccgaagaagcaacaagtaccgtgtcagtcagccgctaggtagctaatgaccaaaattctcctcctcctgctgctcctcgcattgccgctgccggcagccctggcgctcaccgccgagggcctggcgctgctgacgttcaaggcggcggcgaccgacgacccgcactcggcgctctcgcggtggtccgagtccgaccaggatccgtgccggtggccgggtgtcatctgcgccaacgcctcgtcctcggcgccgtccgcggccccgcgcgtcgtcggcttggccgtggcgggcaagaacatctccgggtacatcccctcggagctggggtcgctgctcttcctccgccgcctcaacctccatggcaaccggctgtcgggcgtcatccccgccg

SEQ ID NO: 9945 - DNA, 432 bp, Zea Mays
agtacttaatcaaaatctgatattgaaagcccctgaagactgacaagggccgacagagctggagagggaatatcactacccccctcgctacctctatagtgccggctgttcttgcggatctgcggaacttcctcttcttcttcctcttcgtcctcgttaaacaggtagacaacaacctgtgcacgatcacaacccttggcatcaacctcaggaatggcctctgccggtacatcatcaggaaccagtgcagaagggcctgcaccctggtccaagcacgacagtcgcctcttcttccttttctcctcgacaggtgcagtcgggcggctcactcggcatggacgctttgggcgggcacctttgggtttccgagtttccacctcttcaccaagttcttgcccagctgtgatggccattggctcagtgtgggctaag

SEQ ID NO: 9946 - DNA, 394 bp, Zea Mays
caccctttttcaaccaaatgaacctgagagcttccttgcaaactgggcatgggaacttactgtgaacacaccaggcgcagaatagcccatacaccggtaagtcatgcatggagtactggtaccaaacatacattctaaagtttgtcttcgtagctcggtcatatgtccataccccttcctcccaggcacgtaccaattcatcgatcaaaggctccatgtacacacccattttattccccgggtgtccgggaattatcaacgacatgaatatattctgcctttgaaagaacacaccaggggggagattgattgggataacaaacacgggccaacatgtgtacgaggcagtgctcattccatagggattgaacccatctacggccaatgcagcatg

SEQ ID NO: 9947 - DNA, 730 bp, Zea Mays
gtcactatgagtggacccctagggtcggactcatctttttcccaagcttggtctggtgcgagtccttcagccgggtatctcgcgctgccctgagtctgccctaggctttacctcctgagtatttatatgatcttgttcacccccacatccatcggatcacaaaaccatgccaactcaaaacggctgcaccgcgtggtcaaccaaagccatcgacaggagtggtgcttggtgccgctgccatcattcatgacctgcacaatcgatcgggcgttaggaattgtgcatgcggtgatcactgggtggccatcgtagagttctctgtctcggcgagtgattactgcgggtcgctggtgctcgctgcgatcaccggattctagccgagctggtggtctagggtagccactgggaaacgatcagtggagcttgcgcctcgccgtggacccacactacatcgccagccagctcctcctacatctatggtaagacctcatcttctatgcccgccggtgtcaagtcaccgtaccttaggcatcgttgctacggctggggtttggcaagtagagagaataggaggcagcagcgtaaggttgaggacgcacgggttcggtagatcccagaaccaagggttgggattagaccttcgtggcgattcggcgggagtaacccagagctatcggatgaggaaagcaagcactatccagattagatcctagggatatcctttcgatgg

SEQ ID NO: 9948 - DNA, 605 bp, Zea Mays
ccacaccgaagtcaccgtgtggggcagcgctgactaccctcgcgtgcgacactccatgcaaaagtcgcctacgggtgcagccggaatagcacaataagtgcgcaaaatcgaagtcttctccaaaagactacccgtgcaaaagttgcctacgggtgcagccggactagcacaataagtgcgcaaaatcaaagtcttctccaaaagactccccgtgcaaaagtcgcctacgggtgcagccggactagcataataagtacgcaaaatcgaagtattttccaaaaggttccccgcgcacaagtcgcctacgggcacgaccggatcaacgaaggcacgcagcttcacataaattacggttacatacatacagcgagggcatcgcactttacattggctcaaccttcgggatgatacccatctccctgtagttgaacagcattatcctcagctcctcaccctcaaaaagatttcgcaactctccctcacctacactcgccccagccggcgaggacaacaattcccgtttgctagccccgttcacacgaagacgaccaccctccatctcactcaccctccgtttcgccaccgcccttcaccgcctacgccca

SEQ ID NO: 9949 - DNA, 615 bp, Zea Mays
ttaacctctgtttgtttgttgttggcttgttgcttataagagtcctctaattatttgtagcagcggcagcaagtcagagtcagtgtattatatccacatcgtctgcaacaccatcaagtgtagtgccaattggtggtgcaaatcgtgatgacacaattaatgtagatgtggacatggacagtgacgacgatgatgatgagccttctggcaaaagggcaaagaagagcacatctgaagtctggcaatatttcaccaagtattgggtgatagtggaggtggatggcaagcaagagagatagaggtgggcaaagtgcaatttcaaagggtgtgagaccaagaatagcaagcatagagctgagggaaaatttggaacaactggtttttggacacatctgaataattaccaccatgtaaagaaaggacaacagcagctcacagccggtaaggatagtgagacaggaattgctatagttaaaccttacaagtatgatcaagaagctagcttgaaaaagttctatgaagctatgattgttcatgagtatcctttcaatatggttgagcatgaagtatttgtagaatgggtcaaatcgatgcgcccacattttcctttaaagt

SEQ ID NO: 9950 - DNA, 3982 bp, Zea Mays
aaaacgctggcgcagagcagcctcgtcctcccaagtatcaagggcagcatcataaccagaccagcgcactcgaacttattggtcgacgttgtggccgccccaagaaaaggatcgtcggtcgagcacatgtataaggtaaagaagtgctgaccagaatagaagatttgacactgggcttcagctgggacacatggaatacgggatggattgacggagatgatggtaactgcagcctgtatgccacactgccgacacgttggagtaccttgtaaggaccaaaatatatgtaggagagcttatggttggcgcgagtagccactgaattctggatataaggctgaagcttaagatacaccatgtcgccgacagcaaagacacgttccgataggcgtttgtccgcttgaggcttcatacgttgctgtgcacatagcagatgatgacggacatcatgggtcataagctccctctgctataaccatgattgcaagtctgacaagggaattgcatctactgtagatatacccaggtggtgtggatgatagccatacaacacctcaaacggagatttacccaaggaggaattgaatgaggagttgtaccaatactctgcaagaggcagccacttgctccattggctcggttgagaactgacaaaacaacgcaagaaggtttcaaggcattgatttactcgctctgtctggccatctggccatctgtttgcgaatggtaagatgtgctcatgcgtaactcagttcctgaaagcttgaacaagccttgccaaaaggcacttgtgaatatccgatcgcgatccgagataatagccgagtgcataccatgtaagcggtagatactgtccaagaacacctgagctatcttgtaggcagtaaaaggatgagcgaggacaatgaaatgggcaaatttcgaaaatttatccaccacgatgacaatgcagtcaaacttgccagatttggggaggccttcgatgaaatccaaagacaacacctgccaagcatgtgaaggaacttgcaacagctgtaacaacctagggtactgagatctatccgatttggcacgcgagcagatgtcacaggagtagacgtattgtcggacaacatacttcattgctggctaggcaaacagatgtttcaggcgactgtacgttactggaaaaccagagtggccaaccgaactgtcgtgcaatgagaagattatctgttgttgtagtgtgggattgtggacaatccaaatgcggcctttgtaccgaataatgccttcctacaacttgtaaggaccatctgttgtagaggaattagacagatctgccaacagtttaaggcgtgagaatcttgatgatatcctaccaccacattcgatagccattgaagagtgcccactgatattgcattgagtgaaagaggcgaatgaggacaccgagagagggcatccacagccctgttggccgatccctgcttgtataccacctggtattggagtcccaacaatttagtgaagacacactactgccaaggagtcttcagacgctgttcattgagatgagttaagcttcactgattcgtgaagatgaggaatgttccatgctgcaagtatgatctccagtgattcactgcaagcaagatggcgaggttctccttttcataagcagaaagacccatattcttgacacccaaaggcttgcttacgtaagcgagaggatggttgttttgtagcaggactgcccccacacctgctctagaagcatttgtttcaatggcaaattgtttggtaaaatctaggaggcccaacacgggtgctgaagacaaaggctgatttcaacaaggcaaaagcagtagcatgatccgatgttcataaaaaaacacaacatgcttcttcaggagagcagtaaggggcttggcaatgacaccgaagttttgaacgaatttgcggtaataacctgtcaacccaagaaaacctcgcaactccttagagttagttggtgtaggccaggatacaactgcctccactttggccggaccagtggccacgccaactttactaataatatggtccaagtaagctatttcttgttttgcaaatgtgcacttagtaagcttgacttgccagtggtcttgaagcaataactgcaacacatgttccaaatgttttagatgatgtttccaagtgtcagtgtatatcaggatgtcatcaaagaataccagggcgcgctgccgcaataatggcttcagggtgcagttcattgctccttgaaatgtagccagtgcccccgtgagaccaaatgccataaaacgaaactcaaaatgcccatggtacgtttggaacgttgttttgtacagatcaggaggtgccattctgatctgatgaaacctagcgcggagatccaaagtggagaaccatgctgccccatggagttcatcaagaaactcatcaattatgggtacatgaaacttggccttagccatgatggcatttagatggcgataatccacacaaaaccgatgagtcccatccttcttttttaccaaaattaccgatgatgcgaagggacttttgctatgctggattatgtcagaatccaacatctcattcacctatttctcaatctcagatttgaaagaaggagcatatctatacggacacatttgcataggattagctccgggtagcagagggatctggtgatcacagtccctgacaggaggaagactagtaggtaactaaaacactgatgagtacttgtccaataacagttgaagatctgtgggaagctctttgactagttcttgttcagatgcgggcaaggtatccaggctacatagctacaccagagcaccgtgtgtttgtgatgcctgcacgccaaaaagcttaactgaaatgccactagttgatagagatagccacttatctgcccaatgcacgaccataggactatgtgtagacaaccaatccatccccacaatcatatcataggttgggagatccaatatcttgaggtcagaggtgaaatggtatccttgaatagactaatcagctgtgagcacctctgaaacacaagacacactagcaccattcgctacttggatccataaaggagtcgagagtggaacaatatttggacagtgccttgttatggtggagctgacaaaggaaactgaaccacccgattctaataaaaatgagcaatgaaaatcttgctagctagctgacaaatctcatggttttcaggtttgctccagtggttacaaccgactgacatagatggagcaccctgagctcggctttgatccccaacactgattgattatctttagatggaggttgaaactgatgccataattcttctaccaagtgaagcggaacagtatccggacattgatggcctcggaaatatgacaatccacatttgtagcagaggccctaggccttacaaaaagcatagacggagtagagacaatccgccataactggtgcatcaagatgttctagggctttagagtccactagcttgccaggagcagacttgggcggtggaggtagcggaaaaggaccacgagatggagtcttgctggctgtactggaatcaaatttcttgtactcccgaattcttgatgcctccacaatctcctcctgtagttgagcaagaacaaacacagtatccaagtatttcaagagttgaatcataaccatagatttgacatcatgacgaagaccatctaggaagcgcatagtatagtaaagaggataaaaatgggttggtagctattcaattggtctactaattaagcaaactaatcaacatattctgctacagaccccttttgtgtaatatgaaacagttgatgcgctagatgggcatgttgatccttgccaaaacgctcacacagtaggtgacaaaacacataccatgacatgtacactaatttttgtttaacagattgcaaccaacaggcagctgcacctaaaaaac

SEQ ID NO: 9951 - DNA, 609 bp, Zea Mays
aaggggagcccgttcggacaccctcgggggctgggtcgcaacccgcactgcccattggagccggatcaccatcgacaacaccctcgggggctaggttgcagctcgcactacccacctgagtcagatcattaccggcaacaccctcgggggctgggtaaccgctggcgccatccttggggaccgggttctccacagcagccacctctaaggctgaaggattctcagtcacctccatgggaatggagcaacctaaaccagcttcttgactccaaagaccgcactccaaggtcgacgaggcacgagacggtgctcgagataactctaacccaacattcggaatgtcagagcaaacgtccatcataccaccatctgttggctcagacagcagatcttcaggaaccatatcctcgagagcctgatcaaaatttgctatggacaactcttccagaccaatgagagcagacaaagctggagaaggaatatcactactctccccactgactaggtagcgccgactgttcttccgaattaaggggatttcctcctcttcttcctcatcatcgtcaacaatacgaacaacacacccattggggtcatctctggccggat

SEQ ID NO: 9952 - DNA, 1626 bp, Zea Mays
agaaatagatcaattgtaaccatgtaaaacttatcctttcctagaatagatctaaagctggccatactcatctatatatatgtaactcgcgccttgtttttgtgccaccagaaatatcaaacacgaagccgtcgtgatctctggagcggagaccgacgttccacctatttccatcgcgcctctgatttctacatggtaccagagcctagggttaatcatcctagcaatggcgtcctcaaactcgtcatcgaatcctctccttggtgttcaagtcacagagaaactcactcgccagaatcacggtatgtggtcggcgcaagttcttgcgatcttacgaggcgcaagactggagcggtatgtcaacggcaaagccgtcgctccatctgaagaaattgatgagaagcagagcgacggcaagatcgctaaggtttccaatccagcctacgacgaatggttcgccacggaccaacaagtcctaggatttcttctcacctccctgtccagggatatcttggcacaagtcgccattgcaagaaccgccgctgaagcatggaagatcatcaccgacatgttcgcctctcacacgcgtgcacgtgctactaatgtgcgtcttgccctcgccacgacgaagaaggacaacatgactgttgcccaatactatggcaagatgaaggggcttgcagacgagatggctgcagcaggaagaccccttgacgatgaggaactggtgatgtatatctgcaacggtcttgatcttgagtacaatcctctagtttctgctcttgtaactagactagaacctgttactccttcagaattgtactcccaacttttgagctttgagactagattagagttacagcttggcatcgggtcatcgtcatcagcgaattcagcaggaagaggcggcggccgtggtgggagccagcaaatgcgtggcccaaatcgtggccgaggtggacggcagaactccggccgtagctctggtggccgtggccgtgggcagcagcagccactacggcaaaaccagcaacgcaggagcttccccacgggcccaactgcaacccacgacaacaatgggcgcccaatctgtcaggtctgcttcaagacgggacacacggcgattgactgttggcacaggtttgatgaaaactatgttccagaggaacgccatgttgctgctgcaatgagcccttattctatggatcaaaactggtacatggactctggtgctacagacaatatcactagtgatcttgagaagctcgccgttcgtgacaagtatcatggaagtgaccagattcatacagcaagcggcgcaggtatggaaatcaaacatattggtcattcattagttcacaccccaactcgcaatttacatctaaacaatattcttcatgttccaaaggccactaaaaatcttgtttcagttcatcgcctcaccaaagataattctgctttccttgaatttcatcctgattattttttgatcaaggatcaggcaacgaagaacaccatccttaaggggccatgccgcaagggtctttaccctcttcctctacccgccataaagcaagcctttggagttgtcaaaccatctttcgaaagatggcacagtcgtttggg

SEQ ID NO: 9953 - DNA, 545 bp, Zea Mays
ttttagaattcggcagtatctaaatttgcagaagtaaaatgttgtatgctgattttgaaacttgttcacgggacatagaggtcgcccctatatgagtaatcgtaagcacgtggaaccgtcttaagtcgttgctgactcaaaccgattacttttgttaatagggcatagtagtaacccgagttaagtaagagcgagcatgttgcaccgtcttaagtcgttgccgacttaagccgattgctctattagccgggcatagtggtcaccctgagttaagtaagcgcgagcatgttgcaccgtcttaagtcattgccgacttaagccgattgctccgttggtagggcatagtggtcaccccaagttaagtaagcgtgagcatgttgcaccgtcttaagtcgttgccgacttaagccgattgctccgttagcagggcatagtggtcaccccgagttaagtaagcacgggcatgttgcaccgtcttaagtcgttgccgacttaagctgattgctccgttagcagggcatagtggtcaccccgagttaagtaag

SEQ ID NO: 9954 - DNA, 390 bp, Zea Mays
agctttgtaccaagtatccctgtatagtcacatacttcaaaagccactaatatataattattttatgtttttatcccaaaattattaactttacttatttatttttatattgatccatgagtcaaatgcacaacaaaatacctgaaagtatgagcattgttcgaaaactgtagaagctagatgtatgggttgcaacatttgataacacacaatcacacattcatattcccaaaacactaagatctcacagccgtactattgttgtatactacttgtcttctattcttactttaaaatgtatgtttgccttcatcacgaaacgtgtcagtatttgccttaatacagtccacctatccctgtccagtcatttgtcagtctatttgtttaaat

SEQ ID NO: 9955 - DNA, 678 bp, Zea Mays
gagacttttggggcttcagggagtttgttaccgctgattagggagcataagacccgcagccgtgcgcatcatgacccgaccccagctcatacccagtgccaaccccccatagccgagagggcattccgccgccgccgtgttgtgtgaaccaccattgtggggctggggcatcgccattggttgggtctgcgggttcagcaatactcgtggagtcttgccgtcgcgtctgcgaacgaagtggtgtacgacgggcgtggtgatttcacgcctgtgttgcgctctgccgcgggtcgtgtgggtatcgcggctaggttgcttcccctacattatcgctggtatgatgtcgttcatgttattcgtcgtgacctcccctccacgcttagaccgtttgtaccgaggtttagggcacctgggctgttcaccttcgctccgatgatggtccgtcgggggaaggggcggcgccgccgtgggtcatgtcgagtaatggggagaacgactccttaccgttcgatctcgttgtgcggtcgggattagttagccgcataccccttcgccgtgtgcagtctggtccattggtctagatcaggcgattaggatcgggtttagggcaaaaatggacctctgtcgttggatttcgatgtggcggttctggttatctgccaacgtatgcgcagcaag

SEQ ID NO: 9956 - DNA, 764 bp, Zea Mays
gcatggtgtggcaagtgttatggtgtgcttgaaatgggaggagagcggccggagctgtgagtccactagacctgttcaaatgtcgggttgggtcaagatcaggtcgtggatcagatatcagggctcgtacccaacacgcgcctagtgttaggtcatcccattccttcttgtttgatgtgacaggtcgggggttttcaggttgggttgggttttttttatgagtcgagttttttcgggttgggtcagattttgggtcaaaaatcatagcacgtgtccggcacgtgaattattgcgggtcgaaaattatgatccatacccgaccgttgcattggtcaggtcagattagtcaggtcggttgacccataatcaggtttagtgtccactgaaaggaacctcgacggcaatggtgctcgcggtaacggtgactcgagtacaactgaccggcggtgagggcagtgcgaggcgaggaggaaccacgctattacctctacattcacctacatcaacatcactcactcctaatagttggtgtgcatatagaaaaccgagtcgtagcagtaaatgtctccatgatgggccggggcgatggatcataatctcgtagtgttttccatgtggcgctggtaagggaaagacgtggtgaccttatcaccgtccaacgttcaccgctagggaagcagtgtgacgatccatccttggctcgtagtctcgtacgacatcgatattagatgtcaggcggaacgcttctttgacaatgatcggag

SEQ ID NO: 9957 - DNA, 1052 bp, Zea Mays
ccaaagtgcttatgcagagaagataatagatatttgtgggatgaagggctgcaacccggtggacacaccaatggaacatcagacaaagctattgccattggaagcctgaacaaattctggatgccaccagatacagaagtattgtgggcagcttaaggtatttggtaaataccaaaccagatctagccttttcagttagaataattagcaggtttatggaaacaccaaatgttgaacattggtctgctgtcaagagggttgtcagatattttgcaagaacaagtcagcttggctgtaagtactcaaaaggtttagattcagaactgcttgggtactctgacagcgaccatgctggtgatctcgaaagaggaagagaactagtggagtaatatttttcctgggaagaaacataatcacctggacatctcaaaaacaaagagtggtctctctatcatcctgtgaatcagagtacattgctgctgctacagctgcttgtcagtgggtgtggctaagtagaccgttgagaaatctaacaagcaccaaggcaaagaagttcaaactccttatcgataacaggtctgcacaagagctaagaaaaaaccctgtgtaccatgaaagaagcaaacatattgatactagatatcactacatcagagaatgtgttggcaatggagtggtggatgtgaatcatgtgagtaccgatgaacagctcgccgacatccttaccaagccacttgggaggattagcttcactgaaatgagaagacagctggggttcatcagagttcaaggttgacaagattaggggtgattgttgcataagcatcctgtaataatcatgtcaagtactttagcctgcatatatgtgcattagcttgcatatatgtgcattagctgttggtttagtttgctagttttccatgtatttagcgtagattcgcgggtgctgttgaagactgctcaacgcacgccgtgaccacgtctttagcctccccgtcatggcgctcgtcgtgcatgtcgcacacgatgacaggaaaataggcatgtcgtgc

SEQ ID NO: 9958 - DNA, 630 bp, Zea Mays
cgctttacctcgtcgcggtgagtcaccataaaccgctttatagtcctggctcgtcgtcggtgagtctgccacggtgaaggccacgactcacagcgccagtgactcagtccccctctcgaccgccagtgcaatttgtacaaattgaacaccaccgctcaagcacactataaattgagcacaccgacgggtccgtagggtaatcaagcaccaagccaccaagccgtgcctctaattgatcaccagagctcgccaattccagatttcccccaaatctgttctccgccaccgtgaaagaggccttgccttggctagcttgtctcaggtctgctcatgccatctgctctttcgtttcagtgtccttgtgtgtccctgatgctccccgaccccgccaattaggctaggaccccttagatcgctgggaacacgtcgtgctgtccattgtgcccgctgtcaccgtggatagagcgagttagagctccgctagtgaaattaattgaggggaaactcttgttagggcttgaattaggtctcagccgaagtagagcaccggtcatcgattgatccggctggtatgagctcgccggagctcggttcttcgtcgtgcagcgtcgtggaccgcgggttgtaaag

SEQ ID NO: 9959 - DNA, 689 bp, Zea Mays
cttgtcaccctgcaggtctcccactgctcccgagtgagatgtagcttcccgccgatagtgataggcctagagggagcatgtggttcgtcgccgtcgaccatcttgagatgacctatcgcctcttttattgtcatcgtggagaggtctagcagagactcaatcgagcaagcaatatgcttgtacttctcggggatgcaacggaagagcttctcaacagctctctcctcatcgtaggtgtcgtcgccgaactgcaccatcttctgcaacagagtgttgaggcagagagcaaagtcatcaacatcctcacgtggcttgaaggctaggttctcccactccttgcgaaatgcctgcaatgtggtcttgcgggcacggtcgctgccgatgcgggtcgcagcgatggcgtcccaggcctccttggcagtctgcttctgggaaagcgaaaactgcatctcggacgggactgcagcaatgagggcatccagcgcccgccgatcctggtggtagtcgacgtcgccgtaccgaactgcttcccacatgtggcaaacctggagccgtaccctcatgaccgtggcccactcgacgtagttggtcttggtgagggtaggccaccaaccgccgggactgatgttcctgacaatggcctgggccatgcggcgaccatggtaccgatccggggagggagagtcacg

SEQ ID NO: 9960 - DNA, 648 bp, Zea Mays
agtcacgcactggacgtccaggtattttctgtgcttgcggcgtggagcgttctgggcctcctcgccgggcattgaggacagcgcgggcaccgtcgtctggttgggtcgcagaccagggcgtgctcgaaagtggtgggcgcagctcggcgtgattcacggtaaggactccttcccccgactcgcgttcatctctagttcgtgtagtgtcgttcggataaggaaataggcccgggaggggcaggagcacgccgctccggcgggttcgccatcgtcgggtgggcggcgctgccgcctaggcgctctggggttgggggcgattacgctgggtcgtcggatcatgggtgaatggcggggattcgaagcacgggataccggttcgccctgcttgatccgggccgtcgatcctgtaacgagtgtatagggttagatcttggtcacctaaaatcatgatcgtcgatctgtgatcgtgcggtggccgttgcgttccggttcattaaaatgcttgtctaatctgagccctaggtttctaatcggacaactagagtttacccgtaccccttcgcccgggccattttgcataagagaccctgagtaatataagaatcaacccgcagtccacactatgggaatcctgagtcttgggaaaat

SEQ ID NO: 9961 - DNA, 442 bp, Zea Mays
gtgcttattaccgacaatggcgaggtggaggagccgcgccacagcacgaggcggaagcgcggtacgaacacggctccgacgagcaattcgcctagcccactggtgattccttccaattgcggccgcgaaccaccctcctaggcacaggcgaactcccctacaagttccaccggagcgacggtggtccctagttcacccgcggcggtactccgccttctctcttccctcggttcacggagctggcagtggaatggagggacgtgttgcgcccgagctgccgggagagtatttatccatggcggacgatccggaaggtggagtcgcggaaaaccccaggagcctcgagatctccgcgaaggttgcaacggcgggtcagcgaccatggcggaagaagcggtccgttcggccacgacacagctggggcgacaagatgacaggtggg

SEQ ID NO: 9962 - DNA, 608 bp, Zea Mays
gcaaaattggttctacagcatcaaaagttcctgacttaagcaaactagcagtaaaatgttaactttttctagcattttgtcaactactagtagcgtttttcacaatgagaatgagaagtaccagaagtacccatgatcctttttggctactgctatttttcttatttctcgctctgctcatgtctgctcacagacaatgagacaaaggtgactgagcagctcttacgtgccaggcgcccaggcccaaatgtgccgacctcctgtcggtgacccagtggcttgctttctcgttggtgggtccctggtggccttctgctggggtggcactgcctgcccatgcgcccagcaggtagtgtggcctgcagagcaagtcacactgcctccgttgtcttcctccctccctgtcatgcagcaggtcctatggtccacagagcaattgtctgattggtttgtcggtgacgatggctacaagctcttgcagtatgtacactgttcaatcaggcatgagacggagaggcgttgataacaagcaatgccttgttggaattagccttgtggtattttcatcatggataactgcagtggatggaaaaagctaggtgcgctag

SEQ ID NO: 9963 - DNA, 447 bp, Zea Mays
ctttctttctctcgtcgagctcgttccagaactcgtttcctttttgcgagaccgaccatcgcctctcctcgcgaacgacataccactcacatctgttaacccagtctaccctttgtctactcctcagcatctacccctccgtctaaccttgtctacccccgacatctaacttcatctacccctatccacccccatcttgccatgtttcgtcgtgcaaatgtctcatgcgtcgtgcacgcatccacctgtatctctcactcgttcctctcactgtcatcctgggcgcacgcccgcgtgtcagtttcttctcttctcaaattgttgcctgtttgcacgcgcgtctgacttagacgtgatccacggtgaatttggtaacctccatccgcgctcttttttatatatatctacccctaccgtcacataacccttggtacggatatgcacctc

SEQ ID NO: 9964 - DNA, 434 bp, Zea Mays
gacgaatcgccctagcgacgcctgaagaatcacggcgagtcagccaggaaggttgaccgcgcggggattaggttatagaaatgtttgaccgcgtgggaagtggggtagtgggcctaatcctgtatttctggaacgtgggtcggatgaagtagttacgctaaattgttattgtgtataaacaggagaatggaatagtgtaaccatgtgttgactaaggaagatatggttgaccacgtggaaagtgggcctaagccgcttttcctggaacgagggctcgcggctgttactctgtttacactaaagtgattttccgtttacgctaaattagttcgtttgcataaaaagtgatcggacgtgggcttaaacggatttgcagagttgatggtcggagctctccacagttatatagagcccagggctcttaatagataaac

SEQ ID NO: 9965 - DNA, 634 bp, Zea Mays
gcgtcgtttaagatgtcaaatttaaactgcaagtcattcgaataatgaaaaaggtatagttacaagaccacaagctggactttggaaggtacttaatatgatttatgtttctttatgctaattttaattttttattgatggatagcattgacaaagctcctgggcacatctacttgatgaaaatgcaggaaacgactttctaggaactatgtatacaatttgtcacacttcatttgatggggggatggtgtacgcacatttgtatcttcaatttttttttggagttggaggtgaccggaatccatgatatctggccacagcagcatgacgtcatctatttgcttcatgcaaccaattgatcaatggattaaaattatgtcttgtgtaaagaagtttgtctttcccttatacattacgtgagctgtaagcctgaccccagcatcactagctacctctagtaaatgtataatcatgtttccctattgttattttcgttgtttttttcagaattattaggacatgtttggtattttggttatgcgcgtcaatttggttggagatagatagatacaatttggtcggatccatctgagcttgcaacttcccaccgtcatatgcatgcatggtgtcccac

SEQ ID NO: 9966 - DNA, 574 bp, Zea Mays
gtacagaggcctagctgacccgactcgggttaccgacagaaggattccctctgtagacttggtgaaccgacttgagatgattcttagaggcaaggtatcaaatgttggtgccccagtggcatactcagcctggaacctacctccttccaaggccttcactctttttgtgtcgaatccacctgtcgctgatggcagtttgggccttagagtgcgaccctctgctgaagaagttagcgccttagtttcttcgattggagaaattcccgatgatgaacggcaagtccactttgaggtgcctttggatcctaatgatgcagaaataagtgctatgcttgatatgctggccgaagatttttctgatgctgctcctgctgggacattggcagtggcgcctctcccagaagctggtacaaccttggatgttcagagacctgtcagtgttcgcctgagacatccttaccgagccaatcaacttgatccttctgctgatgagcagaaaaggaaaaagagacgtcttcggcaagtatctagtttggatcggggcgctggtccctcggttcctgctgctgaagaa

SEQ ID NO: 9967 - DNA, 346 bp, Zea Mays
tacgagtactatacacaactaactctcgctgaacatgtaccgcgctctgaccgtatgcatgagcactgtgaacgggtctgctgtcgtcggggtgacaactatatatacctgtccgttccactgttcgcgtccgtgctctctcacatgcatgtgtgcgctgccatgcacatgtccagcttgggttggcttggcctgctgcgccgtgcctgcatgcgtgcgtgcagtgcagtgcagatctctcgtctctctgggtcaggggtctctcatcagggggtggtaggcagccgatgcaagcgatcgacggcagacgatgaagaagacgccgctgccgccgcctccaaattcc

SEQ ID NO: 9968 - DNA, 703 bp, Zea Mays
gcggagctgctcctgacgtggcagtactcggcgccgttcgccgccaacctgagcgcgtccgcggccttcttcgcgctcctcggcggcgcgcccatctccgtggccgtccccgtcaccaacgccgtcactttcgccgccacggccgccgccgccgcggcccttggcgagcgcgtccggccagcgcccgcggtccttggtaccacgctcatcgtcctcggcgtctgggtctgcatctcgtaggcttaggctgaagatctgcttggtttagttctggcattacagtcgtcgcatggggggaaaaaaggaagttttgagggcaattctcagattccatttcactcctctgtgctgtgttgccaattgccatatgagtgaattattcccagtttgttgatggcagcggcgtttcattagctagatggtcagaatataatgcagtttcattctggtaattttggttactgaatccatttctgcttaggtgatgaatgaatataacactacggttccattcattacatcctgagggttgacatcccacagcagagcattcttctacccttggagctaatttgagaaccttattttatcaattgatttctaaattctccttggcattgaattggatcaacagagttgtttttccaaattcatttcaagctgaaatggtattggggcacgtttctgtttcatatgttttgat

SEQ ID NO: 9969 - DNA, 659 bp, Zea Mays
ggagtactgatagttgctcggggtagtaaatatcgccttgaggatgaacttaggccactgttcaacctcggccgccgtcgtctgactcacggccggttcagataagatcaccagagttggccgcctatcgaccgcgcgccacgtgcctaggtgccttaccacgtcgtagtaatctcgtattacgcatgtccgttgatcgccggtgagctcgccacggtgaaagccaccaattccttgcgacagtgctctcccctctctccgacggccaccacgtcatctcaaattcacgggccaccaccctcggccctataaattgagcgtgccattggctccgctgggtagtcacgcacccaatacaccaactcgtgcctcaaatcgtccaccagagctcaccaatttgggatttcccccaaatcggtcaagaacaccgtgtgtgagagctcatcgcggtcagccctccacaggtccgatcatgttctcctcgctcttgttctagcattcctgtgtgcccttgaagctcgtcggcccaaccaattgcaatgaaccggagtagatcgacgggaacactttgaattgtccctggattgtgcagtcaccgtgagcagagaaattgggggatagaaccttgcaattgatcgaggggaaatgattgttagggg

SEQ ID NO: 9970 - DNA, 511 bp, Zea Mays
gacgtgcggtcgttggcaggggcggtgcgcggtcgctgatttaggtaggcacgtttgtgtgctggcgggctcaagatttggggaaggggaaaatggttggagtagggttggcttctgtgttttcacgcgggcgcggcgtgcccaaattgcacactgcttttatgccgactcacggtgcgagactattggtacgaattgccgactaacgaagcgacgctattcacgtatacatttagtgactgatgctcagttggactatagatttataccgactcattatctgtggcaagatatgccgactaacagttcaatgataatagtatatttatagcgacagttgtccgatgctaatttggtgttgtggtatagtgagcctcgctggttcccttagttcaatatgccacaattcctgtctctcacactaggcggatttccccggcacaccggagggctccgaactgcactacgacgcaagctcaacggcggcgttgcccctcgtttccctcccggc

SEQ ID NO: 9971 - DNA, 675 bp, Zea Mays
gcgagataccccgaaacgaaatacctcgatctaatcacacacgttcgtggtcagatcgacgacccggatctaaaacacccctgactcgatctcgttcgtccatatttgatcagtgacccagatccaacgatccaggggctgtcttcatcccctagaggaccccaatgaaaccgaggtcacacggcggcggacagaacacatggccgcggagctcgccggtgatctacgccccgacgatttcccccaaaatttcgcgggctaaacaacgcaaagatcactgcgcatcaggtggaggtacctcaccggttcatgcagggccgatcgatccagtaagcaatgtaaggcgggtggcggcgcttcttccccaacggcgtggaatccgcgatgccacggtcgatgaagccacataggaaaaccaagattatgcgcaggaggcccaggcgactagcattgaccgcatgccaattccagagccgcgccgccgatgagatgcccatgaggcggccaggatcttctcttaccccgcggcgacaaattttcttctctctctcgctttgatgtcctcatcactccatggatgatggaggcaaggtagggccgacggaagtgcttttataccccaagaacggatagagtccgcggcgttccgttgagatggggtgaagcgcggccgaa

SEQ ID NO: 9972 - DNA, 316 bp, Zea Mays
cgatttaatagttatggttaaccaggatacaactatagatgtcatcctagggatgaattggctaaccaagtatcaagccagtcttagttgcgatgagagaacaacgaagttagtgtccctatcaggagaagtgttagtggaattggtcttgtcaggaccgaggaaagggagttgtcaccaagtcactgctcatattgaggagattaaaccatcagaggctatcagtgtagtatcagaattcccagatgtgtttcccgaggagttaccaggtatgccacctaaaaggaaggttgaatttgccatagagcttattcca

SEQ ID NO: 9973 - DNA, 469 bp, Zea Mays
gttctctttacggtattgattacacaataccctgtctgacgggtgcatagtagataaagttttttgtatcttttctgcatccgttggttctttttcacaaaatttcaaccttgtgcatatgttatgaactgtatgattgtaatcagttacagatttaaaatcttgtaagcgtaggtgattccactcatgctgtgcttcaggacatataatttccttttgctgttcataacgttcttgaagtgcgacccataggtttcgaggattttcttccaaaagatattcttttttgagatccttatggatggaagtccttaacaagagtaatgcagtgtacttcgcaatatcagttatatttggattgtttgcgtcaggtgcattaatggtatgtaaaatccctctagatgcaaaaccaattttgatatctgatgcccatgcaagataattgctaccatcgatagcaagttcctca

SEQ ID NO: 9974 - DNA, 527 bp, Zea Mays
caagtcttgtataagatttgtagagtatacatcaagaaacatatcttttgcagtgatccaggtccgattccaaacaaaaaaggacgaaaaatgccgcccgatgttggcactgtcacagctgccactgctcactgtcaccagacatgtccagagctcctgctctataaatggcagcagcatgccttctcccttctccccccacgccactcctccctcccagcacacgagtcttctcccaaccatgagacctcctctctaccccgcgcctaggaacacaccagccttcttccccacgtcgagctcgtcacccatggcccctcctagatcttctgcacgacttcttcatcgtcgtgctcccctctactcgcacccagccgactgagagtggctgcctaggaccggctaagcccctcccaacgtgcagtggcccttggctgagcgccatgtgccatggccgaaccccctccatgccatgttcctgtacgtacgtgagatggaggaagaagaagacccccctctctataaca

SEQ ID NO: 9975 - DNA, 360 bp, Zea Mays
cgcaaattctagggctcagttttaaatgttttctaattcctgtggatggcaggtttattccccacaaacccagggactcttttgcaaattaaccacagcaaaagggtatgaatggttctcggccgtcggattaaaacctacagtcacgattagatttatccgcgctcgaaccagtacgcgaccctggcccttggatccgagatcgtcgctcgagatccgaccacgcctgtgccatccgatcggtggccgatatcgcccctgatgaaacgataccctgtgatctaatcaaaaccatccctcaacaatccaacagctagaggtcatgcctgctgcttcgaccgcgagcaccggcgacgcaca

SEQ ID NO: 9976 - DNA, 314 bp, Zea Mays
tccccctcacccacactcgccccagccggcgaggacaacaattcccgtttgccagtcccatccacacgaagacgaccagcctccatctcaccacgatgacgcctttcacctcgtgacaactcacccactctccgtttcgccaccgctcttcgccgcctacgcctagcactcgcacccggatgatcctcagcacccatcacacacgaaggagtctccgccgcagccacatccaacgctgcaaaataatccaagtcctcttccgaagacccctccgtccacacaatcgaactcccagaatcatcagactcaaaaaa

SEQ ID NO: 9977 - DNA, 788 bp, Zea Mays
gtacttcctctgctttatcagtagaaaatgggtatgcgacaaaccccgcttctgaaactccacgacatagacgtaggctcgaaccttaccaagaaaatcatgtttagtcagcctatgctttaactcttgtagctttgcatgaaagacacgcactacaagatccggatgatcttgcggtgtctgctcagggagaagctccctccttatctcatcccagtgagggttacatgtcatggtaagaaatatgtctggtttaccaaacttctgcaccagagccatagcatccatataccaacatctcatgtcacgaggaccgccaataaacgatgtcaacaacacggtttgcttgccaaccttctctgctctaatatcttcatctagcatgctatccacgaagccctggtataggtctgcccttaaccgatcctgattcttgcgtatatgccccccagtttacacagaacgccactccatacaatgtatatgtagatccttgctggagtaaggcgtcaaagcgttggaaattatcgtggtatgaaattgcttcaatttttgatccctagacatttcagaatgcaggtcataggagtcaaagaattacatggttatatgttgatttattttaatgttgatgaagtcactcacggtgatgtcctataaaatgtagtgttggctgtcatgacgtctagggaacttaacaactattctcgctacgacactctttagtcttggtaagccagttacttcaacgtcatcaaataacacgaatctacatgaaacacaaactt

SEQ ID NO: 9978 - DNA, 735 bp, Zea Mays
atgagttccaacaaagggctaaaagcgccattgccaaaacaaacctccgtaggatggcaggagcatcaggctccttcggaaggtattgctaggggtgagtaacatgggtatggcgtggatcgagattaacatgcattgatgggttagcaaatgaagaaatttcgtctgaacccaacgagaacaacacattttatttgatccccatgaaaagtcccgactcacggctctacctcaaccgacccaacctgtcaaatccgaaattcttgtgatcatacgataaccattcatagtattgggtatgcacgagtcagctttgacacgggcgtgcggatggaatgacatcacattggttggtatgtcaacataaaggctcctcccatcgcagagtggtccatagtgctagttcaactactccctaggatagcaggacagtcactagttcactacaatgttatgatagaagtcattcggtcgacacaaatcctagaggacaagaaacaacacaacaaaacctagtctccgcccatctcacccaaccccacttatataacaagacattccctctccttggtctaaaagaaggggatgatcacgatatgaggacaagcaaacataagtggccaacacacttgcaacacatagcacctcactcgttcaccagacttggaaattcttccctcacctggacgtagggacattccaaccagaccaatataaaactcttgtatgctcatc

SEQ ID NO: 9979 - DNA, 873 bp, Zea Mays
tgatggacgcacaacacgctgaatggcactggggtctctatagtgacccgtacaacggaaggacgggacaacgcgccatacctagtgtacgtgtacgcacgttgacaggcgacaaagggctcatgacgacaggagaaaccacgccacgtacgaccaccatgagactgatccatgggatccaccacgcactacaaagacatcagcgatggactcgctacaggagccagagtaacaaacaatgccatatcgggagtacgacaacacatgaccgtacagatgacccacgatgacaacccgggaagagatctccctctctttctctttttctagaagaatacaagtcccattataaggtcctacccctgaggtataaaaggcagggccccccctccttcaggggggcacagaggcacatgagtacactagcacacccattgtaacacaccctactgcaatactatgatcatcactacactagactagggcttcggccaaaaccaatattacctagtgtctcagttctctgcatggatctctgtgatccaccattcggagtgagtctgcacttgcatccccactgaacacaaatcttattgtcatccggtttctgaaaccacaacagttggtgagcaggttggggaccgcaagcgtgccaagcggcgtttttttcactccgatggccagttcaacagcttctgctgggtgtgaaatctttgcccctcagagccgcatcaagtttggctctctcaacctcctcgacaccgccaccagcaaacctgaggttgtcatcgtcggccaccagccaagctctaccctcgacaccaacgacgatgacccaagtcgccacctaatcgaagaaacccgacgcccgtt

SEQ ID NO: 9980 - DNA, 679 bp, Zea Mays
ggtcggtcgccgccacgctgcccgctgtcgccgcgcttcgctgggccatcctcgcctcaggtacgtacaacacgtacaaaccgtttgcgtgcccacacgctgtcagatttccacgctcctcgtcattcgtctgactactgttccacttgtgttgtaaggattgacgtcactatggtactacgcgtcgacgacatcaaatatgtgatggacggtggattcatgctgtgatcgacaactgcccttcaaacaacagtacacaccacctagagaaagacgatgcgtttcaggagcttgaaacgatcgaatttcagaacccacgatcactatccatactggtttatgtttacaatcactcgtaatggacaaaaggccaaagacgatcatgtttgttgtagcaaggatatttttcccgtttggatgtatccctttatgtcaacagactcgtttggatgtgagttttgtcgcacattagtagctgcacgatgttgtacgggtcagtcggctgtatactgacgatggtttgatggttgatggacatatggttaaacgtagcgtccgagctgtttttgcttttttacaaagttttcattaatataacaacgagagctaattcatttgtcgaaacataaggcatcggtgacaccggctagaggagtcggtgtaagatctaggacaccgg

SEQ ID NO: 9981 - DNA, 492 bp, Zea Mays
tggtacgtagcaatgtcgtcttcttcttcatctactgcgaatgcaccgttggtcgaatcatcgtcggaggatacgctaagtgatttggcggcggtggagttacatccagaccgcacggtggagtttggcgtttcgaggatctcctcggttcgtgtgcaagacatgcaacggttggggtactttgggaatggagttgggcaagttccaggggcggaagagattcctgagccggagggtgagttagttgtgttcgaggcattctttatcgtcggccttcgcctacctgcgcatcgttttgtggcagaggtcttgcagaggtttgaagtacagatccaccaattgacacctaatgtcgtggtggccctagcgaagtatgtctgggcggtgacttcgtatggcggtcagccctccgtagaggtcttcgccaagaattattgtctgcactggcagaagagaaaaattggaagcaagattgcacagtttggatcgtgc

SEQ ID NO: 9982 - DNA, 770 bp, Zea Mays
caaggccttagaggatgatcgcgtcgttatgaacgtgatgtgcgacaaggccatggataaggctattcacgccgggcggatcctgatgaggaatcctggcgttgtggtgcctgaagacattatcgccgatgttcttgccatgcctgctgtcgtgagtcgaccatcttcttctgctactcctgcagccgaggcttcctgcaaaaatgctcctgcgtagtgattcgttcaaatcgaaaacatctctttatttagttagtacttcttagtgaaacaatgtactatgaattccgtgcgtatgtaattgtgctatgtttgaactgatcgttctgtctgcagggtgctaaaaacacccttgaggatgtgaacgagttattttctttgaagtactccagatttgagttgactattttgttggtagggtatagtgatcaccctgagtcgtgtaagtgtgaccatgccacaccgacttaaggcgtttccgacttaagccgattgctccattagtagggtatagtgatcaccctgagtcgtgtaagcgtgagcatgtcgcaccgacttaaggcgtttctgacttaagccgattgctccgttagtagggtatagtgatcaccctgagtcgtgtaagcgtgagcctgtcgcaccgacttaaggcgtttccgacttaagccgattgctccattagtagggtatagtgatcaccctgagtcgtgtaagcgtgagcatgtcgcaccgacttaagacgtttccgacttaagccgattgctccgtta

SEQ ID NO: 9983 - DNA, 453 bp, Zea Mays
cagtagaaatagtctcatcccaaaagtgagaaggaacataataggcaagcataagggcatgggcagtaccaagaagaggacgatgcttgcgctctgccacaccattttgagcattagtgctaagacatgaaaactgggcaagagtcctttgctcagaaagtagctgaagaagagcattagagaaatattcacgtgcaaagtcagcacagaagacacgaatagaggtgtcaaaaagagtgtgaaccataatagagaaaatcttataaatggataaagtctcactatgatgttttatgaaagaaatccatatgtggcaagaaaaatcatctataaaatgataataatatcgacgaccccttttagagataaaggtgtaggaccccatatattagagtgaacaagatcaaaaggatgctgagaaacagaatactagaatcgtaattgtatcttctt

SEQ ID NO: 9984 - DNA, 602 bp, Zea Mays
cgtatcagcactagcttcggttggcacgacagggacaacctcggcactttcaataaactttggcactttagtcgtcccaataggcttcggcctgcgagtcatgatcttgactctttttggcttcggcgcgctggaagacgtcaaggtggcaattttccttttccctccttgctttcgaacagggaaataataatctgtatacacaaacccgatcacatcaaaaactctattcagtctcctttttccttgagcaccgaagacaacgatcatggcctcatcctctgccttcgtgtaggctcctagcaactcatcactggttgcctcaatagcatctaaccaatcgtcatttggttcgtcaaactggcttctgtatcagaaggtgtatctaagataaaccaaaccaccctagctagagccaacagtggtttccttcggcatctcccactcactcacaagaggccataccttgtaagcaatgtgttcccaaaccaaatccctggtaccaatgtaagtgcacacggtgttgaaagccattaagcacgcctgcacctcattcccaattgcattcgatggccttctaatgccaaagcgtgaccatatgg

SEQ ID NO: 9985 - DNA, 386 bp, Zea Mays
cttgggaaaggccgcgttagtaacccttaaaaaataatccataatggtgggtgtgcaatgaaatagtgctatcttagaactgccaaaggcttatcaaaagggtgaccttatggacaactgttagatatatggcaaattggaactaacatgtgaaacatatagtaacacagtgcaagcagagaaatagagaactatcctctcaaatttctcccttcatgttgttaccactatcaaattacatgatattctgatataatataaaatcaccaattgattcttttagatataaagggtggtctactgtgtaaccagtttcaaatggtcatatgagtgaaagccaccatacaaactacctagtagaaacacatatggcagcatggcatgag

SEQ ID NO: 9986 - DNA, 790 bp, Zea Mays
gtttcgatggtacagtgttaagatcagatcgccaggatcagttcatctcacctctggcgaccatgcgctcggattggtgcctgacgctacgattcgtgctcaacgaagtactgattgttgctcggggtagtaaatatcatcgtgtggatgaacttgagccactgttcactccagtcgccgagtccgcctagctcacggctgattcggatgaactcaccggagttagccacattgagatcttgcgccacgtgctttggtgctttaaccacgtcgcagtgagtcaccttagcccacccgttcatcgccggtgagcttgccacggtgaacgcgacgaattgcttgcgccaataacctcttccctcttcgactgccaccgcgccaactccaaatcacgagccaccgtccccaaatcctataaattgagcacaccctcagctctgctatgtaattatgcacccaacacacccactcgtgcctccaattactcaccagagagcctcaatttgaaactttccccaattcagtccagagcaccccgctacgtgagcttgccgtggccagcgtgctacaggtccgttcatgccctccgctctcccattttagtacccttctgttctcctgatgctcctcgacccattcaattaagctagactgcgctagatcattgggaacacctctgttcatccatagttcgtgctgtcaccgtggacagtgtgattaagagctcagatcgtgcaattgatcgaggggaaacgattattaggtgttgaattaggagtcaaccaagtta

SEQ ID NO: 9987 - DNA, 442 bp, Zea Mays
gtggtatgatttttgccaaatcgtgcagaagaaagacttagtttcatttttttcacgtatgtaattctatgatgcagatggaatgaaggatatataatgatgaagttgagagattatcagttgaatggttagaagccactggactgttagtgtttgatgcatgcaggaacaagcctactcaaatgaggggaacttagatggagtgcaggtcatttcgtggtgaacccttcagagttgtctgatgaagatgaggaattaggagcaatagaagatggtggctgcacttccaagcttgctcaagataaactacgcattacttctttgttcaagggcatcaaacatagtcattagactacatacatgattatatcactgctgcgacatcaaatccttttttgtattattttcttgtgcatctccctggttttgttacaggataaac

SEQ ID NO: 9988 - DNA, 300 bp, Zea Mays
tggctgataggggggacccgttggtcagtcgacttctttccttccctacgcacacccgttctttgcagtcgctgtcatgtgggcccattaggtcggtcttgccataccacccacgctcttaggttacactagcacgtggggcccatttgttagatgaatcttccttcttagagtcggacttagctccctgggctataacagatctgagtgaaacatatgccatcgcagaattcgcaacaacccaccttggacgtagggaatataaatcccaactccgtactcttgactcctccatccgag

SEQ ID NO: 9989 - DNA, 773 bp, Zea Mays
tgcctcgcccgcggaggatgccacgcgaggtgtggtggcggtggagggagagtgccgaccagatctacagcggggcacgaggagcagaggggaacctagagaggtggaggcgccgtcgggagacgcttgttgtcgttcgccccgtcccgcgcagacgccgccgccgtggaccagaacctggaggtgtcgtcgagagggaaccaccatatcacccgtgggagcgccttcgagtcagtctggtcactatttatcttcattgttgcgccctcaagcggtagaggtggaggtcgtggactgggatcgtgctgcacgccgaagggagagcaaggcggtccgcggttgcgccgagatgcccgagcttgacgaggaacaggagagcacggggtgagaccaggagagcaggaccgctgggctgggaaggaggtggtacaagaggatttggtatgggccgcaacaagcagatgggccttcgaggacgcatgcactttctatttgcaagctaaacttagtaccacatcgaccactgaattgtgcagacacatgtttataagtttttgtgcggaacatcttgtgtattcttacctgaccattgctgtcaccccaaatagcaggcttttttggtcaaatgcgcggtgcatgaagacaaggaccccacatgcaagaccaggggtgtgggacccacctatcagacgttgtacgacagggtgtgggaccccatatgtcagacggccaaaaatgtgggacccgctatacgacagagttgtgggcagaac

SEQ ID NO: 9990 - DNA, 371 bp, Zea Mays
ggggaggttactggagcaaggaattcatggctttcaccgtggcgagctcatcggcgatcaccggacatgagtaatacgagctactgcgacgtggtaagataccaaggcacgtggcacatggtcgataggtggctaactccggtgagttcatccgaatcggccgtgagtcaggcggacacggcggccggagtgaaaaagtggctcaagttcatccacaagacgatatttactacccgagcaactatcagtactccgttgagtatgaatcgtagcgtcaggcatgaatccgagcgcacggtcgccggcggcgaagttctttgaacctgggatatttgtgtagcactgtaccatcggaattcatattcagagcg

SEQ ID NO: 9991 - DNA, 681 bp, Zea Mays
gagacaaccagagcttaagatcagcatggttcaccgaatcatcaactgacagaccaaagtgccgaggagaatggccatacaatacttcgaaaggagactggcccagagaagtatggaagcagcaattataccaatactcaaccattggaagccatgaaaaagaccatttggaggggcaggattgaacaaaatggcgcaaatatgtctccacacactgatttacccgctcagtttgtccatccgtttgggagtggtacgaagagctcatatggaggcatgtacctgacaactgaaacagctccttccataacgcactggtaaatattcgatccctatcagacataatggactcaggcatgccatggagacggtataccgatgtcatgaaaatcttggcaactttcagtgctgtaaaaggatgatgcatggccacaaagtgagcatacttggacaatctgtccacaaccaccaatattgtattgtagaccccggatagcggtaatccttcaatgaaatctaaggaaatcgcctgccaagcatgttgtggtaccggaaggggctgcaggattccaggataccgagaacggtcgggcttagcttgatgacaaactgaacaagcatcaacaaggtccttaatagtctgcttcatatgtggccaatagaaaagctgcttaatgcgat

SEQ ID NO: 9992 - DNA, 769 bp, Zea Mays
caaggctcctcaaatcacgctgtcagaacgattgaacatgatcgccatggtacagtgaccataaagatctccggtgctgtgagctcaatgccggtgatccgccgccacaattcgcgcccgcctaggagattcgtgccacgggaagagtagataacgttggggcaaggtgaaaatatccagtgcggggtgaatctggtcgctggccggaccggccgtcgtgtcccgccgcggtcaatcgcgttggcatcaccggagttcactattatctggccaagctacgtgcctcaaagccttaccacgtcgcagtagaccgccttaggtagcttgttcgtcgcctgagacacagccccgataaatgccacgttacgtggctccggtgactcacctctctctccgaccgcgagctttctctttcgaaattgggtggcaccgctgatggacactataaattgatgccccagtgagctccgttaggttgtcacgaagccagagcacccgcccttacctccgattagccaccatagcgatctaatttctttcttcccccaattcggttctccgcactgccgtgagtcgtcgcgtcgtggaccaccgttcccaggtccgttcataccctccttgccctcgtttcagcacccttgtgtgccatagatgcttatcgacccagccaattgaactagaccacgttagatcgccgggaacacctcgggttgtcctcagtttgtgccatcaccatggaccgagagattttgagctagaacttcgcaat

SEQ ID NO: 9993 - DNA, 445 bp, Zea Mays
cgaaattggatttctcatctgttgtcatccaagataaacaaccaagatgtgctgcaatcgactcaattacgccctgatgactgatgagccacacgtactaggatggatcacctgtgtaggctgtaaaatccttaacagatctaggtcatgcaacaagttataaaggtgatcatgctcaaaagttttaacgaagattggaactcttgaccagttagcaatggattacagctaataagtttacatgcatgacctgaagaagatcagaagaagtctaaacctctcgcatggttccataagtttaaatataaacagtgaaacacctgaacacacagagccagtccaaccaccagccggcaaaggtaacagttcactggcaagtaggtccacaaaatccttcctcagcccaacagtgagtgaccatggaaaccagatttacctaccccgc

SEQ ID NO: 9994 - DNA, 1544 bp, Zea Mays
ggcgctcctctgatttgagtccctacgcattctgatccgccagattcgtgcgtgttgtcaatgccacaatcaacaacaatcgtgttgtcgtcctcataatcataccatgtttcacttgcattaactacgatgctagcataaggagcaaggtactcatatccgagagataggtgtgggtgtggcgatttgaatcgatttgcatctagctgggtacacccaaacacgtgatgcatcaacccaaagggatcacacacaccaaccttccccacactcgctgactccacatgccacgtcccagacaattactcaactgttagtatttgcaacatccacggctgccataatatcaggagctgctggtgtttaagacgactagacgagtctctttagctagtagattagacaatgccttggacatagtgagagtataagaactgttgagcaatcgtgcatgaagtgagtcatattcaatccgaacactcataacaaatatatatttgaagaatttctcaataaacctatgagatggacatggattagttgtataggccggtaccatgtgtcagcagtaccaaaggcaatgacgatgggcaagaagtactgaaagaaaagatgaaggctgaagcaggaagaaaaagggaacgcatgccaaatcccaagtacataggcgagcagtggagaaattaggccagtcggaccaggcccatcggatgatatatatatactatgtgctgtaataagacatgtgaacttggctgaacctaggcggcggcagacactatcacaatacgaaataccacccagcggcggatttgctgcggaggcgcacctgtgtgttcgtcttgaggagtgaaagtaatagcgatcgtaacagttggtattcggagccgtgctggagcaccaccacgactaccggacgaggctgcaattgaaggccgaagctatggcaccggcgaagagtgatgatctggtgacgtagttgttggcgaaaattgaggaagggaacaaagagacacatccgagaatggaggtgacgcagacggcgattggcaacatggaatccacggtgaagagcgtgatgggggaacaagtggagttccagaggtggcgacccgaagtggagaccagggtgacagagatcgccgaggcgctccaagccatccagccaaggtgaatgaagtggcgcagagatctgtatctgcttcatcgaaggcagaaattaaggcgacgaatggtgcgtcgggtttcgcacatctggaaccaccttctacggagacgatgcacgggcataatcgccaccactcgtcagacccttaccggagagcgggtgctgtcgggaacgatatgttccggtcacccactccggtcggagttacgatcccacccctcaaattgtgatccattccaattcgaaaccatggggtgaaattcttttgggggttggtctcacggatcggggatgggttctgcagttcggaatatggatttcccttcatgtgatggacccaaccccaaaattatggaaacgacggtgtgaaacttat

SEQ ID NO: 9995 - DNA, 721 bp, Zea Mays
gtgatcagcggagtacccaaggaagacacaacgagtggaacttggcacaagcttatgaggggcaggggtagaaaagattaggatagcagatgcacccaaaaacacgaaagtgatcgtagggggagagaggtgccaaagagagcaaagtaaggggtgggtgaggaactgtcttggtggggaggtggttcagcagataggtagtagcagttagccccttggcccaatagcaggcgggaagggaggcctagaaaagcagggaacatatgatgttgttcatggtgcagatcatgcgtttagccctgctattatggcattaatatggtggtaatccacacaaaatcgctaggtgttgtctttctttttgactagtaacacagaggatgagaatggaccagcacttggttggatgataccattaagcagcatgtcgtgcaactgtttctcgatctcatccttgagggctagggcgtaacgataaggttgggctataactagagatgcaccgagtactagggggatagcgtgatcacagtcatgcaccagaggcaactcaatgggtacaacaagtaattttgcaaagacgaacatgatatattgcgcttcagggtgaagggctgagcaactgtctgaatcaagcggaacaatatccactgagaaaatctgaaccactatgccatctggaatggatcatgatgctccttgtaacataacaaaattccct

SEQ ID NO: 9996 - DNA, 385 bp, Zea Mays
tgggagaggggtgtcgtgttcttgttcgctgccgtcgtcatcaacgatacgcggtaagaaaaggctaaaaagaccggacggacgagagtagcagcgaccgacttgcttggttggcaccggcagggggtgccgtggaacgctacgactgtgacgagaagcgccgcgaacacacacacgggtgcctgatcttaaacacggagacggatcagcagctggtttcttgaatccaagactcctgcagccaccaggacgtacttgtcgtcttctacaagccgacgtcgtctgctctgatcttattaaacgcaacgagatgcaaactggcgcaagctttccaggcagccagcctgccttgccggccgaacccgccgaggacgaaccacctggc

SEQ ID NO: 9997 - DNA, 415 bp, Zea Mays
ggcagggggctccagccaaacaaggctgagagggcctccacatggcactgagaaagggggtgcttgaatagattgacatattcctcaaaagcctcatggctaaaaccatcagaattagagatgatcttcaaagatttcataaccttcttaatggacctgcctcccagatcttgcatgttgaactcgacctgatgccatccacctgaagacttcttctaggtgtagatacaactggtggtgggggaagacaaacgagttttccttatgagttttggggcaggaaagattccagaaggcttactgcagatgcagttaaagaaggcatccttcttcgattccaggcctgtgcctaattccggatgagaaatctagacggtggggtccggagcattcatcagtggaacatgagcctgca

SEQ ID NO: 9998 - DNA, 403 bp, Zea Mays
ctccaatacttgattagtcctttcagtctgtccatcagtctgaggatggtaggccgaactaaatttcaacttcgtatccatattctcaagattttttttcaaaatctggaggtaaactgtgaccctctatccaaaacgatcttcttcggtacaccgtgtagagacacaatccgagccatatatactctgccaattgagatcccttataagtagtcttgaccggaatgaaatgagcaactttggccagtctatccacaataactaatatcgaatcatatcctttcagggtgcgaggcaatccagtaatgaagtccataccaatctcttcccacttccactcgggtatctttagtggatgcagtagtccagctggtctctggtgttcagccttcactctttgaca

SEQ ID NO: 9999 - DNA, 827 bp, Zea Mays
cgggacgactacccaggtcccaacccaaaaagggaagcaagacagaaatccaagtcaaacgtctcaaagtctacgacgaccgagataagacgtaacaccctaggttgtgaccattcgcccgaatgacgggtcgaaggcatattgagtggcagctatcgacaatgatcgcaccaccccaagtatggccctcggcgtgctctcacatctccgaggggacgaacaaccctattcataaaacacctcagcaccagaacttctacaattgcccaaatatagggtagcacacaacagatacgtcataccaggtgtacacctacacatgccaacgagtgacgcagactcatgaggcaggcaaggcttcacgacacccacctgctccgtgcagctgacatgcgggaccccctcccactcactatcacgagaatgttgtcatcggaagaccaggaaaagggaacccatactatgagccgatgggacagtacacgacgataggagtacggctatgcacgactttatggggagtagcagaggagccacgctaccaacgaccaccagcatgcccctccaagcgggaggcaagaccctggaatacaagtctcctgaatatgagtctcctttgtaaggttcagcccttgaactataaaagggaaggacccctcttttctgaacatacaagcatactggttgtaacacgttccagatccatactacgattattattacattggactagggcgcaagcctgaaccagtatagccaccgtctcaaaatcaaccgcttgagtccatgcgattcaccattcggagtgagtccacgctaaatctccc

SEQ ID NO: 10000 - DNA, 505 bp, Zea Mays
gtcaactgccccaagaatgctccaacactagcctccaagacacccaccaccaatagccaagtatgcaaacaacaattccacaacagggcccgagtaaaccacatcgacgcacagaaagctcatcaggcacctagagtagtgctcggtgagttcttggtagaatttaccgctgctgcagtactttttttattctggagcatctcattctttcatagccacgcatttcatggaaaagcatagattccaactgcaccgttagatgtcatcttgatcacctgaactccagggccagaccttctatgccacctcaaatgttcctaagtcagaatccttttaagtggtgtagtgtttctagcagacctagcagtgataccttcacagggaatcgatgtaatcctagatatggattggttgtcccaacataatggtgtcataggatgtgtagacaagattgtccttctcaccgatcatcaagggaaatcagtttcttgcctatcccgaccaa

SEQ ID NO: 10001 - DNA, 408 bp, Zea Mays
atagcggtaggtatatttcaggtaaactagaccaccttcgcttgaactagcagcagtttccttcggcatctcccattcataaacaaggggccacactttgaaggctatgtgctcttggatcaagttcccggtaccaatgtagctacacacagtgttgaaggccaccaggcacgcttgagcttttcattattcaagatcaaaggccttctgatgccgaagcgtgattctatgggtcgctgaattacatccttcacatcctccctctcaaccaaatcattcttaacatagaaccactacttcatccaggatcatggccactttttctgaaatgttggaatggggcatctcacattagaacaataaacgaaggagtaacaaccaaagttgttgtgatattgttccttccca

SEQ ID NO: 10002 - DNA, 458 bp, Zea Mays
agaagcttcaactgaagggtccttagtgttgtcagcagagagaatggattctggctgggccgcggccttgacatgttcacacccaaccttttctaagattgtcgtaatccctcgggcaccgaaaaaagcacaaaagtctccatgatcgctaaggatctcatcaaaagcttcgacttcttcacctatccattggataaccccttcgtgatcgccgcgaataaatttttgttctgaggaatacgcccccaccttcgcaaagctatattttagcttctttgcgcagtccaaggatttttcataacacctttccctagaatcacgaagctcttcaacattcttttctagccttgaacttgtccattcacttatatcttgctttgccttcgcaacttaaaatttttcattcatttcggcaagttttttctttagatcgtcaacttcggctttgtgagtttcgg

SEQ ID NO: 10003 - DNA, 704 bp, Zea Mays
gtaacgctgccattgcagctgcacggatatgggtcgagatcgaccatgtcgaaggtgctgaaatcatacataggatcgtcattctgtggtaggaaaaggctgcccaagtccaagccagggaggcaagctaaatcggctgcccagttttgttgcatctctgaatggagtaggcttggtggcttgcaatgtggagaaagaagggaagaggcagtacgtggtgttctactgcaattgcaaaaggagtgtgctggatggatggaggggggaggatgagcaggcaagtgttccttttaaatcgcaagaaaaccagccagccacgcagctagcccctaaaggagaagacactgacccacctgtgctgtaagcaaaatatgcttttctaactttgtggccgcttgagattatcgtcttgatttatcagacacagccatttgttggcattttgttgcaaatgcgtcagcgtcatgaggaaagctgctagggctttctaaaaaaacgcctttcgatgcggaaattctgtcgaaagttacaactattttgctctgatctagtactagctaggcacaatatgcaaagcaccagcagttaaatcatgccgtcaaacgtgcatgtgatgtgagtgagactacctggggggagaaaagagctaggtcagaagtatcacatgagtacatcctctgttcatgcatttgcattttgcaaac

SEQ ID NO: 10004 - DNA, 275 bp, Zea Mays
tgaaccatggagtacaggggatcaggctccagggactcaaggctaccttccaataaatctgagaatgacagttgtaccaaaagttcaattacaatgcagtttaataatccaaccatgcatatataccaattctagtaatctagtttaatccctgaaaaataaattaacagaaaccacaatacaaattggatgcagtttgacaagttaaatgctccatctccaattcaacatttcgcaatgaatatataccaattaaaatttggatgagtcttggg

SEQ ID NO: 10005 - DNA, 720 bp, Zea Mays
ctgggattggcaagaaaaattgctcatgctgcactcaaagtacccccctctatgcatcttgacgtcatcaagaaattgggtgctgaattctgtaaaatgtccccttccaagctaaatccggaagacttgaacagatccaaggccactggtactgccattcagaggccggctgcttcctccgacagcaaggatgaggaatccgtcttctctgatgaacaggtgggggaccatcacttcaatgatgacaatgatgatgatgacaatacctcggcggggttgtaaggctttggcctcccccttttgggtcgtctggtattttcttttcactggttggcaactattttgttggttaacggttggtgctggcgcgcatgtggcgctttttgctttttttgaaacgtactctgatggaatcgaggtctctttcctgtttgatacaattaaatatgttggagtcaatgactctgtgctgcctgaaatggttaattttgatggttggaggttcggttatttgttatgtggactatccttgcactttgccggtcgggcccattggaggccatattcccctcttgacatgttggttatgtggcccttccaattcttctgcttatggatttatactggaacaaggacctattggtgtatgctacgcataccggtatttcttaattgtaagactgatagttttccatgtcttccggccctcagaacttacac

SEQ ID NO: 10006 - DNA, 384 bp, Zea Mays
gttagtatcttcaactaagccacctattagtccttaacttattatagtactaattgcacttcttactaccaggcatgtaatcctagttttagaattttccaaaaattcatttgaactcaaattcctttaaagataggttctgacgattattctattacttgcaaattgtgtgaagggctccgataccagctctcacaacccaaccaagttatcgggcccacgtacaccaatcctttccctcaaggcctcggatagatatgtaagtggatcagataacttactcgaggtgccgagtttcgatgaactcgttcatttccaaggaccattcacgcaaagttgcaaatattacaataaccaatccagaacatagactttaaaaaaata

SEQ ID NO: 10007 - DNA, 879 bp, Zea Mays
cgttcgccaatgttcggagattctcgatcaagttggacccagagaaatgtgtcttcagggttctaaaaggaaagctcctgggcttcatggtcttggactgcagaatcgaggctaaccaagaaaagatagaggtcatctagtgcacgaccccatctagaatctaaaaggagtgcagcggctggtcgggtgtgtggctgcactcatccgtttcgtctctaggcgcggggaaaaagggatgccactctacaagatgttgcggaatagtggccatttcacctaaacagtggaggcctaggaagcccttgaccggatcaaggtattcctgacctcaccattagtattagtcttgcccgatctaggcgagactgtcctcctctatgtggcggccaccactcaagtggtcagcgtgacactggtggtgaaaagggaaagtacgggtcacatgctcatggtacagaagcccttatacttcgtcagtgaggtgctgaccgagtccaagacgcagtacccacagatctagtagttgttgtacgcattgctcattgctaagaggaaggtgatccactacttcgaccggcactccgtgtcggtagtatccacggtgccactcggcgagatcgtatgaaatcgtgatgtgtccgggtgcatcgcgaaatggtccctcgaactcaacgaactcgacatcagttacgtccgcaggacgattatcaattctcatgcccttgccgacttcgtcgcggagaggatggaggctcaggaaccaccccccgtcgagcacccagagtactagaccatgtaattcaatggatcctacctcaatattgaaagcggcacaaacattgtcctcacattgcctcaaggacacaagcttcgctacac

SEQ ID NO: 10008 - DNA, 836 bp, Zea Mays
cggcctccatggtttggtggtgaactcggtcggctgcccatcagctcctcctccaccctggccgccgcctccaccaacgcctccgcgtcttcagaatatcactgcacaatgtcaaagcattattgcgaatcctgtctcctattcgacacgtatgattatggatattgcgacactgacatgaccgtagaaacctgcaacagcaaattcaatcatcatctagaccagtggcggagccggcccgaaatcaaagcatggacactcattgaacacgagcggttgcacctcttagtcgaaggaagcaaagcagtcaagtttggaagccttagccaatagcatctggttacattgtcctgaggcccccttctcgtcgagggtgccgtggagaagcgtgattggtgcggtgtcgtgtttcacctaacactcttctaatgaaaggtaaggaagactcaaagcacgtggttatagaagagaaaaaataatatagctagtttcacgaagggagttcccgctcactactctgccgagtctgttgttcattcgtcccatgtcgtttggctcctggcatgcttcctatcttgaaaatcatcaatgagaaacgagaagaaggaaagagaaaggattaaatagggagagaggacaccagggtccgaccgtggctcctctcgctcaccctgttcgtcgtaaagagcgtttttaaaagcacattttatttataaccgttcgagggttttacaaagaaggcgcggatccgctccggccgggcatctactacaagctcttttgtcataggcgctacatcgggtgatcccttcgaccgtaccatgcacggtgcccca

SEQ ID NO: 10009 - DNA, 461 bp, Zea Mays
gcgtatggaaaacaattctgtgttcgcgatgcatgcaggtgtctaaattttagccaggcagaccagcgggtcccatgagtcagcgacacgtatgccatgtatcactctaccaccaaaccaacggaagtttcaactattttcttcaccagacgtccagacctgctcacggcctcccaaactccgccgccgccctgttgcttccagtctcccctggcaatctccgtcttgcaaaccctagccgctgccatggcatatctagctcccgcgaccgccgcctcttctctccgcacccccatctacgtagccgcctcttcccggcgccgttcctttctccccgccgccgtcaaagccatcgccagttctgcacatcccatcctctcctccctccgcatggccgcctccgccgccgttctcttcgccgccacttccccggcactcgcgtgcaccccctccgttcctcc

SEQ ID NO: 10010 - DNA, 520 bp, Zea Mays
taaacaactatatcaatgtctctggccacggtgagcgcgcggatgaactaacaatctacacgttcccggtgactcatgggatcttagctcaattgggcgagttggtgagcatcaccagcatacaaagatgctaaaacaagaacaaagagggcatgatcagacctgtggagggctggccacggtgagggtgcgctttgcggtggcggagaccagtttgggggaaaactaaaattcaagctctctgacgaacgattgctagtgatttttggtggctgggtgtgtgatgaccttgcagggctggtgggggcttcaattttatagggatcaacggcggtggccgggaattttagtggggacgcgcggcggtcggaggaggaagaagagtactggcgcagtggcttggtgtccagcgtcgtggcaattgctccggcgatcaacggggagccactaaggcttacggcgatgcggtggaaagttagagccacgcggcggacgccggtgatggcttaacggcggtgag

SEQ ID NO: 10011 - DNA, 377 bp, Zea Mays
gtttcgtctcgtgatgcctcagtggtactacttgttagggtttgctctatggggaactggcctgtatcattgtggtgattctgattcgcatggtttatggacgcttgtagtagaaattcggcgactttcgtttcagcgtgaaaattctcatagattgggtgcaaagttgtgctgtttcagttggttggttccttcctcaagtgccttgcattacacttaaaactggtgttattactcttgaactgtgttgatgtagtcgtgctacattggtactcctagtggaacaaggtgtactcctagtcgaatccctttgtgcatagttttataaattggaagttttgctcacaaacgaaatgctgccacgggttacatatgct

SEQ ID NO: 10012 - DNA, 673 bp, Zea Mays
gtgaaacgactgaaatcatcaaggaaactaacataatatttaaaaccaccaacagatgtaacagctggcccccaaacatcggagtggactagttcaagaggggaagaggttacatgctttgatttttgaaatggcaattggtgagccttggcgcgttgacaaggatcacagactctagatgactgacgcggtgtacacgctaacttattggacttgacaataaagtcgacgacgctaaaggatggatgaccaagccgacagtgccacagatcagaggaaactgagtggctggacagagcagcatggcgggacataggtgatgaagacttagagcatggcaccgggtacagaccattgaagcttttaccgcgtagaagtgttctccgtgattttttatccttgatacagaaaaaggatgggtgaagttccacaaatgcatcattatcatgagctaatttttgaatggacagaagattcttacgaacactaggaacatgtaaaatattgtgaagatagagtggacgtgaggaaccaggtattaacgagtgaccaatatgagcaatagacaaacctgatccgttagccacctgaactgtgtctttgccagtgtaacgttcatgcagactgagttgatcaaggtcgctggtcagatgatcattggcaccactgtcga

SEQ ID NO: 10013 - DNA, 326 bp, Zea Mays
gactagctccgtgaggtcgtcagctaactagccaccgctaatcagccacaatcatccaccagtgagctcgaattcgcgttttcccccaaatctctttccgccaccgtgaaacaagcttcaccgtcgtcagccctttttccggtcagtccaaccctccctttgcttcgtttaagcttctccccgtgtctgtgatgcttaccgaaccgtccaattgagctagaagtcccctgaccgtcgggaacacatggatctttggtccatccacgcgctctccgtggccagaccaaattaatccaccaattatgcaattaacttaggggaatcgt

SEQ ID NO: 10014 - DNA, 1027 bp, Zea Mays
ccggaatagcacaacaaatgcgttaatcgaagtcttttatttaaaagacactccgcgcaaaagtcgtctaagggtgcagccggaatagcacaacaagtgcgttaatcaaagtcttttatttaaaagacactccacacaaaagtcgcctaagggtgcagccggaatagcacaacaagtgcgttaatcgaagtcttttacttaaaagacactccgcacaaaagtagcctaagggtgcagccggaatagcacaacaagtgcgttaattgaagtcttttacttaaaagacactccgcgcaaaagtcgtctaagggtgcagctggaatagcacaataagtgcgttaatcgaagtcttttatttaaaagacactccacgcaaaagtcgcctaaaggtgcagccagaatagcacaccaagtgcgttaatcgaagtcttttatttaaaaacaacgctccgcgcaaaagtcgcctaggggtgcagccggaatagcacaccaagtgcattaaccgaagtctctcataaaaaagacactccatgcaaagtcgcccacgggcgtagccagatcaacacaggcatacgaatacggccaacaaaccacattaccatacaaattacagttacatacacacggcgagggcgtcacatattacatcggctcaaccttcgggatgatacccatctccctgtaattgaacaacattatcctcaattcctcaccctcaaaaagattctgaagatccccctcgcctatactcgccccaatcggcgaggacaacaattctctcttaccaacccggtctactcgaagacggccatgctccatcccctaacgacggtgcctaccacttcgcgaaaattcacccacactatgttttcccaccacccttcgccgcctacacccagtactcgcacttggaagatccccggaaccctccacacgcggcgaagtctccaccgcagccacatccaacacaacaaaataatccaagccttcatccgaggactcctccgtccaaggaaacaaactcaca

SEQ ID NO: 10015 - DNA, 574 bp, Zea Mays
aaaaaatgagagttgcccacttagcgaatgaaagatttgagatggaagcacagcaaattcgagcccaagggatgggaagagccgcgtgtggtggtagatcacatgaattgatggatggggcgatgatgtcactcggagcagcggggcaccggattccggattggtcgtcgggaggggaggaaaccgaccgctaaagaactcggcatcgccgcaacgccacgctcgagaatgccggtggatgacggcgaggatcaccgcgatgtgagcacgagaaaggccgccaacgagaacgacaatgctcgaatttggggtaaattctgtattctgttatttcataccgatcactgttttcttacaggtatttaaccacaccctcctcggctggcccatcactccacacacaagccggcccactggcccatcacacttacagcttaacccacacactccactcttcctctgctactattcaccacttgacaccagctttagaacgccctctcagcctcctgcttgtctacagacattcggcatctgcaattcagcaccctggtcaccttaagtcgtgacagtt

SEQ ID NO: 10016 - DNA, 522 bp, Zea Mays
tttcgattatcttccctattattattaaatatgaatttcatcatttttatactattttaatccctaaaacttaatatttgctaaaaccaaaatattctgggaacccaacaatatatatatatctttctcttgctgatcctgttctagatcttatgtcctttcctcgagatcatcaaccgtctgtccgtctcttctccttaatgtcgtgctcctcgcgtctagcccctcctcctcgacatctaccagcgtctatcccttggaactaccttcatctacccctaccaaccctacctcgcctcgcttcgccgtgcaacccctgcttccctgaccgcgcgcacttctcaccgctacatatcctactagcttgaacccccgtgtcagcttcctcttgccaaatcgtcgtctgtttcacacacacgtgtgacacggctgcagttgcaaccacctcgccttgccttgtcggggaatgcccacacgtcaatgcgtgcaaccattttaccgcatcccttaatacatatgcac

SEQ ID NO: 10017 - DNA, 466 bp, Zea Mays
gtcgaggcccaacatatttggtaactagtttgtcagatttgtttgtaagaacataagtgacatcaaaagtatgaaatgacatatgtggtcaagttgatgcatttttaaccttcatctcaagcatttgagcagatttaacatgtgaatcattatgcctagaacgagatgcttttgctttagaaacatgggcatggtgctcatgagcattcttagcataaacattcttatgagaagcatgaaaacttgggcataatcctaatggagaattggacctttgcccttaacaagttttggaaattctttcccactaacattaattttggtgttctctttgcctccggtttggaagccaacaccatccttaatgcccgggcatctcccactcaaaagaacacttctagcaaatttatatttctcattttgtagttcacgctcaacaactctaccttctaattttaccacatga

SEQ ID NO: 10018 - DNA, 511 bp, Zea Mays
ccccgcgccatggcgcgacacgaaccagcaacctgacaggcgctaggagaagagacctaatgaggaggtgcacgcccactggggccacccgtcgctcgagcccacggcgcgccccacggaggtgtatagacactagatgaaatccttgatgctagtgcccgtaccacaaggacatgcgccacaccctacgaaactgcagggacttcaagcactccgtcgggcatggccgaccattccagcctctaccaccacccccaccgtgaggagagcctatcgagcctaggcagcctcagcagtagggagggggaggaggtggagcttttccacgcattgatagggaggtcaacatcatcttcggagggtacggagcacaagagaactggaggcagcaaaagctcaatgactggcaggtcctgatggctactaccactgcccgagctccttactagtggtcggagcacgcaataaccttcagccaagctgatcaatggctcaactttgatcatcccgg

SEQ ID NO: 10019 - DNA, 714 bp, Zea Mays
gattgataagagcaagaggtcttacctctactagggaactgcaacattagctggtagtcattctaaagtgtcttggcagtttgagtgcagtcctttggtgtatggtagacttcacattttggacctcgtgttctttggcttcacacttaagtttgaagggagtggcttaggcagacaaagaacagtaaagtgtagaagttgttgcctccaaatataataacatgtgttactgccatgctcagtttgtccctctctaggatccttggtaatcgcaagttagtgaaatgctggtaaggaacttggctacatgaatgccctctcgatcgtgtcatcatcaggataggtcattcatacatggtgcttgaagctctattaataagtggtgggttacaaatgtttttgaagctataatagataggatgacatctgtgtatgggagcccatggaaggcattgcattgcataaacacaacaaaatgttgcatggaagtggtcctctaatggcatccacttagcaccctccacataacatgcattctttaatggctctagcatcctagaaggggtggtagagctgtgaaaaatgattgcaccaccaaaggtcaaaattttcttttggctttatttatatagtagatttgggaccatagaacaaaagcatagacacaacctgcaagatgataatcagtgtatgttgtgagcaaaaggtatcgag

SEQ ID NO: 10020 - DNA, 785 bp, Zea Mays
ggcaagaccgtaaagctgcagattgtaagtggcctcctcaacgcttgtacaagtaatattattagttttccatcaacacttgtaagtggctatgtttggctcctgatcttctttttatttgtttttttatatattcaaagcatcaactgtaatatgcaatccggtcagatatttgtttcagcagctactgcaataagctttcccccatagatttggtgacagctaggaatacattgaacatacactaatgtgtgctagcaattgctgactcagaaacttaatattttgtgcttgatgcggcatataccgtgcattatctgagtattggaaattcaatgtggacactgctgttatttgctttaatatatttgcagagatgtttctgctggtctatatcatttaaatactcaccaattttaccatacaaaataacaggatgttctttgtcaccctgatttcaccttttttcatgttttgttattaatgtgaggcatgcagtagatcacaatcaattctgattgttttgtcattttgtcggttttatatggccacatgaatgattctgactgcatagatgcttccttccaagaccagtaaattagatcaatgcaaaggtttgccgttgactaattttgtcagttttgtactatagggatgtgcaagccagcagcatccttcttgatgataaatttgatgtacgccttggtagcttgagcgaggtgtgtcctcaagaaggggaaggtcaccaaaatgtcatcacaaagctgttaagattttcttcgtaa

SEQ ID NO: 10021 - DNA, 629 bp, Zea Mays
ggcgtgaacggacctgcagaaggttgggcacgacgctgcgttcacggaggcgtggaaacccgatttgggggaaaagaggaactagagagctatggtggctaatcagagacaggagcgggtgctttggattcgtgattacctaacgaagctagcggtatgctcaatttatagagtccaagagcggtggctcctatttttggaatggcgtgctggcggccggagagaaggaaggttactggcgcaagggatttgtggctttcaccgtggcatgtcctctggcaatggacgggcttgctacatacgttcactgcgacgtgctaagcttccaagatgcgtggcgcacgatcgttaagcagctaacgccggtgaggatcatcccggccaaccgcagtccaagtgggtacggcgagctcaccgtcgaccgggtccgagccaatccgagcgctaagatctttactcccctcagttatccacttgcactgggcacaaatcgtagcggccggcgcgaatccgggcacaagataaccggcggcgaggggcgatgaccctggggatctttttcagttactgtacaatgggatccttattcagagcgcctgaccgagcacatttggggatgatttattcca

SEQ ID NO: 10022 - DNA, 901 bp, Zea Mays
tggagatgcgccgtgggaggaaaaccgagtacctcgacatcccgctcaaggacagcatcaaaggatggcacctggaatggtttatcgtggagaatcacgggaattccctccccctcggtcaaggagacagccatatgttcgcactccaagctggactgaatcccccacagacttggaggtagctgaggccggggctctgcttgccaaggttggattgttcaaggagaggggtctgactgtcgaggctgtggttgccgattttgttttcaagaacattcagtcactaaaagacagagtgtatccagcttatctgtatcgaggccttgctgattcaacccgggttaccaacagaaagatttctgctgtggatttggtgagccggcttgagatgatactcagaggcaaggtgtctaatgtcggtgctcctgttgcatactcagcctggaatctgcctcctttcaaggccttcatcagttttgtgtcaaatcctcctactggtgatagcggtttgggtcttagagtgcgaccttctcccgaagaggttgaggctttggttgcttcacttggcgaaatccccgacgacgagaaacaggttcatttcgaggtgcctttgaatccgagtgacgcagaaataagtgccatgctagacatgttggctgaagattcctctgatgcagcccctgctaaaacactggttgtagcacccatccccgagtctggcaaagctttggatactcagaggtctgatagtattcgcccgaagcgtcctcgccgaaccaatcctccaacttctcctgctgaggggaagaaaaagaaaaagaaaaagagacgtcttcgtcgggtgtcatgcttgaatcaggatgccagcccttctgctcctgttgctgaggcagtgtcattt

SEQ ID NO: 10023 - DNA, 802 bp, Zea Mays
ccgactcaaagatccaaagaggaaagggttcctctccccaaggcagtttttgggtggcgacttgaggaaggaggcggcactccagcgccacgggatgacgaggtggttgttcttgcctctttttatgagtatggatttgtgtttcccccgcatccattcgttcgggggattttgttctactatgggctagagttgcaaaatatccactcgaacactatccttcgcatagcgtgctttgtcacgctgtgcgaggcctacctaagcatggccgcacactagaagctctggaagcacctgttcagcatgcgagtgagcccaggtcggggcgaacagtcgttcgtcagctccttcaatgtccaacactgtggatcacgtatggcatcgtacctgtctattccccttccttcttcggtgcgtggctagaggggggctggttctacattcggaacctggagggggggcgcctgtgttcatcagttgcattgcatcccgatgacccagcctcattgaacttatggtgtggagaagaggttcaggccaatgattgactacatgcttgccgctaccgccaacaatgtgagaggttagtccgcaccttcatgcagcaccgccttcagcaactagtggcccgccagaggacaatgtagcagttcatcgacgaggtcgactctaatcaccactctgccgtgaacctgacgaaggatgtggtggtgggccgtgtccttgctgtcacataaaatttcatggacgaaagcggtcccctgccattcaaccaggcaaggttgagtgacctggagagtct

SEQ ID NO: 10024 - DNA, 608 bp, Zea Mays
gaaaaagagatttgggcactcggcttggaaacgatcgctcgaaacggggaatttagtgaaattgaagcctggaatctcggattggcgtgaaatttgacaaatatgttactggaagtgttgtgaaggtgcctgaaaaatttgggttcaattggagcatttttggctggtttgggcatttcaccgagcacgtgacgtgcggagttctagggtttcggtgaaacggctatttgaggtgggaaaaccctcccgaaggagctaggaacctgcaaggacactcaatggccacaagggaacacatttcacaacttggtttcactggatttcacaggaaataggaattcactcacaagggtggaaaagggtgcttcacaggagacaggagcacatacagagagaaaaagggaaagagagagagagggattctcaccagagagagggaaggggatgagcaggagcagggtcgccggaggatcgccggagaggagggaggtcgccggcgacgggggggaaaagcgccagagacagagagaggacgctggcaggggagaagaaatgagcctgggctcgggctcgggcagagaagagttttttaaaaaccgagtatgggc

SEQ ID NO: 10025 - DNA, 719 bp, Zea Mays
cctaaggttggcgggtagcactgcctccgaaccatagaccatgaagaacagggtatttccatgcagagctcgactaggttgagttctcaagctccaaaccacatacggtagctctctgatccactttcctgtaaacttttcatttttgtcaaacactttcttcctgagtgcttccagtatcattccattggccctttccacctgaccattggctcttgggtgtgctactgatgcgtacttgatctggatactccgttgttcgcagaaatcaaagaattcagagctagtgaagttggatcccaggtcggttatgatgctattcggtatcccaaatctgaatattatgtcttgtatgaactccacttccttggctgaggttaaaaaagcaatatgcttgtactctatccatttggtgaacttatcaatggcaaccaacatgtgggtatggcctccctgagcttttttgaaggctccaatcatgtccagcccccagcacgcaaatgttcatgttacaggtataatctgcagctgctgtgccggtaaatgttgttgctttgacaagaactggcaagcttcacatctctggactaactcggtgacatcattctttgttgttggccaatagaaaccagacctaaaaactttcccaaccagagttctggatgctgcatgtattccacattgtccggcgtggatttcatccaatagttacttccccg

SEQ ID NO: 10026 - DNA, 381 bp, Zea Mays
caccattggaccatctcgcatggtcggacgagacacaacagtaacaattgcactactatgttagaactagccatttgaaacaccgccttgagcatatggtctgacgcccatcatccggccagtctaattcctagtagaaactatatggtcactgcatagaagctgacaaacccatcagctttggaccaatgaggcaactattcatagggtccagcaactttgtagaacaacccctagcataaacagtaccattgtatggtattatgcatgccatcaaaccaatccaacgcacccctataactctcgagtttgactacacggactatcagacccgatgtattaattattctgatgagctactgttcactgggtctaatgatc

SEQ ID NO: 10027 - DNA, 623 bp, Zea Mays
ataaaataatgaccatggaaaatttatccaaattgagtgagagaactgtccaaacataggttaaggttgtaaggcacattttttccaccatatcgttgctaaaaagttggaatatagagaattcaaacaatagatcaccttttaaaccacaaatgacgtttctatgattttgagggcactatattcgcacgagagggtattagagtgcaactagtggatgaagacgttattgggctagctaatgacttttgtgataccaggtttccaataatcccctctattcaaggcatacctagatggtgtttatgtccactcaaatataacaccatacatcattatgccacactatttctcaaagtaaaataaagaccatgggaaatttagccaaattgcgtgagagaactgtccaaatataggttaaggttgtaaggcaccttttttccaccgtacaattgctaaaaagttggaatataaagaattcaaaacaatagatcaccttttataccacaaaagacgtttcctagatgtcaagggcattgtaattgcacgtgagggtattagagtacaactagtggatgaagacgtcattgggctagcaaatgacattttgtgataccaggttt

SEQ ID NO: 10028 - DNA, 590 bp, Zea Mays
taaacacggtggcggcgtcctgaccgcggcagagcgccaccagcgactcccaaaaccgatccccggcgcgccaaattctactgagtagtactataaacattgctggggactagtcgaattacatgggtgtgcccataccttgtattacagcggcattaatgcggtccacgacggagagcggtgatggcggcacatgaggacgacgacgaggaatcccaaggtgcggtgtcccgattcgccccaagaacgtcgctggcaaccttcaccgcgaccgggtgaatccaattgaacacccgcccagagctttggttaggcacgactcgagattctaatgcggcggcaatttccccccttatcgacgatggcgcggtcgggagaagaaaaatgagctatggggcggcgcttggatgggatgcggagaaaaggccacggtgctttggttcttataccccggttgggtgggaatggcctgcccgagcatcgcggcgatcctggctgggcggacgtgcctccgttggcgagatatgcggagaagaaagcgcccagacaatgcgggcccgctagtcagtttcacggtgcatgcgtgcggt

SEQ ID NO: 10029 - DNA, 457 bp, Zea Mays
cctgcatttacgtggagaaagaacggctgagttaccgccggtgtctttagaggtaacagccgaatggttcttgacgacatcagcgttttagattgtaacctccgagttctgctgagccacgtcggcgttatagaggtaacaccgagtggtgcttggtgacgtcggtgttttagaggtaacagtcgagtcgtgcttggccatgtcggtgttttagaaataacggccgagtgacgactggcgacgtcaacgtttttagaggtaacagctgagtggtatcaggccacgtcggcattttagaaataacgaccgagtgatgaataagcacttttagaaacagtgtctgacccgggaaaaccccatttgtatcacgtcgtcgtacgcctctgcattccaagccctagcctcacttttgcctccgagtttcctctgtttccctttgatttcgcttccgctcagc

SEQ ID NO: 10030 - DNA, 346 bp, Zea Mays
attcagtgtaataccatgatactatagattactaccagactcaaagcaatttaggtcgggaatcaggttatgatatttagactcattaaataactttattgttattgacactactattgttttttgaattttagtaacttatgtgtaacgtatacagtgatctgattagtgtcacctgatgagctgtgtttcgcgacaataatgtcctgttggctttgataactttgttttagggctctcaagcttgctgaacacgaagggcgaggaggggtgggcaccttttcattctccgacaactctctctctaatcattgacatcctgcttgagcgaggtatgacaattcca

SEQ ID NO: 10031 - DNA, 782 bp, Zea Mays
gccaggaagcccaaagctctaccacgcacgcgcccgcgtcctccttcgcacgcaccggcggtggcgtcaaactccggcagcaacacactgtccaacagcatgatagagctcgaaacaagaagagggaaagcaccagtggctcaccccgaagtggattgatccgtagcgtgcacgcaaccagttcccaacaaggccggccacgacgaggttgccccaagcggtaatcaccgacgacgccacgatgttcccgaggaattattgcggcagagatggaaagggaagctcggagagtttcactgacccaaggggatgatggaacatgcacacaacaaacaaacaaccccccggaaagccctggccacggcagggtggggaaactggacggtgtggtcacaggctacaggaagacggcgcgcgatagacctgggcaaacaactggggtgacatgggaggattaacgtagacgtgggaacatgaaacacaacaacacacggtgagctgggttagacccggggatagaggtagggctttactgaaccaagattgtggcaatatggagcaggcaaacagacgccggtcgagcatgatcagaccacgcaagacaagggccctgaggtgtcaatggttgcatgagcttggctacgtggctttactcacccatcaccacgctggttcaaagggacagcggggcagtgaaccaggtccggcaatgggtaaggattttatcggataactctgaattccacccatgtgcagatattttcattagtgaaacccatcag

SEQ ID NO: 10032 - DNA, 1028 bp, Zea Mays
cagcgccgggagctgtaggcgcgccaggaacagcttgggcgctaggagcagcagcgcctgtaggtttgctgggagcagcaacattctccggtatgagtcctgaaagaatcagaggtggtgggcctataggtggcggcaccgggttagtggtaattgtatctaggaagtcaaaatcttgggaggaggcagtgggttgctgttcagcaaagggaaaagtggactcatcgaaaacaacgtggcgggaaaggatgacacggttggataggaggtcaagacaccggtaccctttgtgatgtgacgagtagccaagaaaaacacacttagcggaacggggatcaagtttgtggctagtggtggcagataggttgggatagcaggtgcaaccgaacacgcgaagatgttcataggagggtatggttttgaagagggcaaagtgaggagtggaaaaatgaagggtcttggtgggtagaatgttgagaagaagtgttgccgtgtggagtgcttcaacccagaaggttggtgggatgctggcctgaaagagaagggagcgaatggtgttattggtagtacggatgatgcgctcagctttaccgttctgagatgaggtgtaggggcaggacatgtgtaggaggacaccgtgggtgaggaagaatgttcgagaattggagttatcaaactcgcgcccgttgtcacattgcacggctttaatcgtgacaccaaactgtgttttcacataggcgaaaaactgagtgagagtcgggaaagcatcggactttagtcgtaaagggaaagtccataagtaatgggagcaatcatcaagaacgactaagtaatatttgaaacccgagacacttaaaataggggatgtccacaagtcacagtgaataagatcaaaattgttgaccgcacgagaagtagacgtacggaacgaaaggcgaacatgacgactcaactgacaagcatggcataaaggagagctagcatctttattacacatgggaacgattgatgcgagcttggagagggac

SEQ ID NO: 10033 - DNA, 515 bp, Zea Mays
gcaaaagagcattcagatcaaatatgcttcggtggcacacccaagagccaacgggcaggttgaaagagctaacgagatgatattggaggcactcaggaaaaaagtcttcgataaaaatgaaaagttcgcaggaaaatggataagggagttgccctacgtcgtttggagcctaagaacccaacctagtcgagctctgcatggaaatactcctttctttatggtctatggttcagaagcagtactacctgctgatctcaagtttggggcgccaaggttgatctttgaaaacatagcagaagccgaggctactaggctggaggatgttgatatactcgaagaagaatggttgaacacggtaattcaatcagcatggtaccaacaaactctgaggcgctatcacgataagaccatgcgacatcgatccttcacagtaggagatctcgtcctccgccgaattctaacgggggaaggacgacacaagttgtcacctctatgggaaggaccgttcatagtag

SEQ ID NO: 10034 - DNA, 277 bp, Zea Mays
ggcacacctagagcatctaaatcagtagtgatatcacattcctcagaagaacccagaagaccattaaagaaaccgaagaattggtctgctatatcatcatgcgaaatgagggtattaccagccgcatcagtgatcttagtgatcaagttcttgccctttctatatctagcatgggaatggaataaggccatgtttgcatctccatccttgatctagctaatccgagatctcaatctggcaatagtgcgccttgttaaggcccattaggcctaggcct

SEQ ID NO: 10035 - DNA, 877 bp, Zea Mays
ccgcaagtcagctgtttccctgttatccggccgaaaacgaaacagcctgcactgctcgccgtgcatgccgccgccgctgcatccccttaggttgttgagatttctccgctctcggccttacccttgactacttgtaggacctcgttcgccctgcatctctcagatcacaaaactatgtcagctcgaactgccacatcaccataggcctctcaccgacgaagcaggtcaccatgcgaagcttctgctcgacgtcagatccacgtgcggtgaagcgcctgggagcaccaccagggttgggcgggacttgcactgcgccaaatcagcagtggggcgccgccgtggcccggtaattcctcgccgtcgcgcagcgacgccattaacccgctgagccgctgtggactgcacccgtgaaactccaatcttgggtaaggactaactcattcgattcgttgcacgccctggatcgtttagcacctggttgggttgtggaaccggctcggtaacgccaattcatttgccgccggcgatgcgccgccgcacagcttcgtcaccaccacgctcggtagttgggattggggaagaaaggagacggtcgcccgaccgttggatgcccaacggatggctataataggatagagggatcccacttcattcagttgaatcgcgcccgtcgatcggtggatgaacgccagagattagatcttaggttattttaaatctggcgcgttcatttggatcggacggctctccggacccgataccgcttcgctggccattttgctaaagagaccctggggatttctggaatcaacccgccatccccgtttaactgtttcctgagtctaggttatcttacgcaggggcccctgacattcct

SEQ ID NO: 10036 - DNA, 440 bp, Zea Mays
gcaacacagattttgggaagagaacttgaacattattatgccgcctcctagtctcatctgtagtgtgaataacaactcaagaggtgcaacatcaaatgaacgattgaagaaccaaaagaacacagagattaccatctgaagaggtgctcatgtcggttaagttcagaacagactagtgaagtgagcactgaactctgaagtgagcactgaacagagttcagaacagactggtgcaacactggagcagaggcgagcgccggagctgagcagaggcgagcgtgacggagcagatgttcgctagagctgaggaccaccggagcagagggcagggcagcaatggagcagagtgtgagagggggcagaggcggaggcttaggtatttagggtttctaactttctactgtgcggcacagtggcagtagagcttctttctactgtgg

SEQ ID NO: 10037 - DNA, 1054 bp, Zea Mays
aacggcagaaacgcgcgcgcgcccgtggtgaagattttgcataaaggcccttgcctttctgaacaaccagaaacagaaccgaagcactattcaatgagtcactgacgtattacagaaaacccctccacgttctaattcttcacaaggtgaggtccccgacgacgacgagcgcagccgagctccggtgagctcctggaccggccgaatggggcaacgactggggttcccgagcggctaacaccaaattggaccctcctcgaaccattcccctaacttaattgcacgaatggtgacctattctactctgcccacgagaacagcgaaggttatgggcatttgctcgtgttcccggtgattggtgagctctcagtccaaattggtggtttggcaagcatcacagagttatgagaatgctcaaacgagggagaggggaggatgaactaaacggagttgtactggccacggtgaggtaggtttcacggtggcggaaacccaaattggggagactccaaaattcgtgagctccggcgaaacgattgctagcgattttcggtggctgggtgggcgatgaccttgcggggctggcggggggctcaatttataggaagcaagagcggcggtcgggaattttagcggtgacgcgcagcggtcggaggggcagggagttactggcgcgcgtgaactcgtgtctaccgtcgtggcgacctcaccggcgacgattagacggccatagagagtcacggcgacgcggtggaaaggcagggccacgcggcacaaggccgagaggcggcggtcaccggcaaagttatcggattctaccacggtgaatatggtacgacgaccggaattgtttatcggccggagtttatccccggcgacgtacaccgggtgttatccactcaccctgagaacagattggaccggcggcggcacgaatcatggtggaattcgatcgtcggcgatgaagcggctgcgctggcggtctgatctaattcagggtactgtaccatcgtgaacccccatcagagcacctgacagccaatctttgggctgg

SEQ ID NO: 10038 - DNA, 540 bp, Zea Mays
aatgcccggctgctgcacatagcccttggcgacgaggcgggccttgtacttgacggtgttgccgttctcatcgtgcttgaccttgtacacccatttgaggccaatggcgtggtgaccacgcgggagctcgaccagcgaccatgttctgttgtcgcggatcgaggaaagctcctcctccatcgcggcgacccaacttggatcaccgttggcttccttcaaggtcctgggctcctccacgctcacgacatgcagctcagcctcctcgtcgccatgatgcatcggcccggccgctgcacccacgcagcgaatattgtctagagtccggtaccgacgctctcctacatcatcgtcgtcgaagcttgggtcagtggaaagtggcgtcgcgaactcgatgtctgttccagcgtgtgctggtgtcgaaggcagctgctcggcttgctgcgggctttgcgctgctggagatgctgcccgcgtcacagaacatggtggcgcgtcctgggagctcccacctccaggggacagggagcgcgctggcgagcc

SEQ ID NO: 10039 - DNA, 311 bp, Zea Mays
agaaagccgaagaggctcataatgtacgtgttgcgctggccacagatgggttcaatccctatggaatgagcgctgccctgtacacatgttggtccgtgtttgttatcccaatcaatctcccccccggtgtgtgctttcaaaggcagaatatatttgtgtcgttgataattcccggacacccggggaataaaatgggtgtgtacatggagcctttgatcgatgaattggtacatgcttgggaggaaggggtatggacgtatgaccgagctatgaagacaaacttcagaatgcatgtttggtaccagtactca

SEQ ID NO: 10040 - DNA, 386 bp, Zea Mays
ctgcaaatgggcatgcccaatcccagcccctttatgggatgctggtgaactcctataatggctagctgcatcctccaccgcctatatgggaacaactcgtgcccctgcacacggtcggacagtccaggcctgagaccggacggtctggcacagcggcggttggctctgtcccccgcgatgagccactgaagatcgcgctaggggtagtagagatgctcggatcgtccggctatacgagtgattcgtccgagcacgtcaccgaaccgtccgggtattacatctgaccgtccgtggtagggtatgaggagcaaaacgcagaatattaccagcaatcctactaccagccccaaactaacgtctctctagcacccacggctccttaagta

SEQ ID NO: 10041 - DNA, 985 bp, Zea Mays
gaccacgccccgtcgcgccattggcgggttgctggtgcagttcatgattttgtcgtagcttcttttggtgatttcaaggaggatctcttctcgtgtggagttgctatgcggtgtagagttccctctacatcgaccactcaggagatagtctcgaagcataaaaccgctcctgggcgaaaggtgaacttgctcttgaaaacaatggccatggagtcagcgttgattgacgacacaccctctacctgtcgtgctagctgtcggtgttttgtatctgaccgcacacctagggttaccctcgtggtgcttttgggtaggatggtgtcgcagattgtgacttgatggttcgtggtttggcacgagagagaaacaagtgaaattcagcaggtttgggccgctttgaggagtgtaataccctacttcctagggtggctttctgaataaggatggggttacaggttgtgaccgctaaactgatgggaggctgatgagatgaaaatggagggggtcccccttggccttatatacacgaccatggggggctttcccgcacaagtgtttattgcgatctccctacttatctcctttgaggtagcaaacagccttcactaactcgaggaaaatccggcactcccatgctgagctatcgctggcggtttaggtgtcgggtgcgtggaaacaaactggccagacatacttgcacctatgccgcggctagctcgaacgtgggcgtttttcgcctctggatcgtcctgcctccactgtctctgtctgcccggcccatagcgggacacttcaaaggggcaactgttgtgtttccctgggcaaaattccacccttgcgtgcatctctatagagtatagggagatcctcgggtcgaactgtctgtaaagcttttcagacaagggattcctatgcttccttcttcttgaatctgtagcgggttttctcgaactagtggaactttagaaaggcctcgtagtgctac

SEQ ID NO: 10042 - DNA, 482 bp, Zea Mays
cgcaggagagttgcgcatcattatattaagaagaaagaaaaaaagtccaaaatgggccagtacaaagagaaccaccctacggtggccaaacccgcacatacacgaactgatccatgctaaccaaaaaacacaccactcctgcaccagaactaggtatggccatatcttccttagcccagtcgccccggccaagcaccacattctcgtgtcttccttgatgtcttgaacaataatggagatacttggagacactccctcaaaaacacaagtattactatgtttccatagccaccacgccacaagggccaccattgtgttaaaacctcgccttttctccttaggtaccctaggagaggaagcacaccaccaatcctggaacacagaggagcccagtcctgccgtgaactgttacaaaccgaccatagacaacactataaactagacctgcctagcaaacacatatgtcaccaagagatgtcgca

SEQ ID NO: 10043 - DNA, 527 bp, Zea Mays
ggtatttataggcttgtccaggggtaggtggtccaaagtacaatcctatccccgactaccacctatatcctagggacatcccatgtaactgagtaattaaagtgctactcgtacaacagacggtgcgcaccagataatgcactcgcactctacgttgaatggtgggcccttgtagatgtcttctggtggactggtggcgtatagggtcgacatgtagccttcgtccctagccttcgcatcatcgcttccttcgctgcacctggcggaatgaagtcgtttagtcaacgtaatggcgaaggcctcagtcattgtcaacctattgtggtcgtccgctagatcagagaccattcacttgtggatccctcgtcaacgtatgctgcttgagtcgagaaccccttcgccggtgggcctctcatcaactgttgatccctgagtcgaggaccccctttgcctatgggcctatgtatggctagcatgacaaaaagtatggtgcccgctctgtgatcgaggctgtgtttggcctccac

SEQ ID NO: 10044 - DNA, 470 bp, Zea Mays
gcgaccgtggcgtgcggctacgaggatgtggcgctagcctgcatggcgagggagttgcttgtcttcccttcctcgcataacatccctgatgtcattgctgcagcaatggacccgaaggtgaagctcttgcaccggtgtatagggtagtaaacctggccagctggtcaaagaaaagaaaggtgctagcatccagagtgcccaccaccgtgaagtctcctaaaggggcaaagactgttgccgatgctggtgcagtcgaggcgactgccagaggatgtaacaccctaggtctcacttaggatttctaccctagagccacaccctaatatgttatcacatgtggattagtggagtctttgatgaacataatttaacaacaaaggggttagctactgtttaagatcatatgatgcttaccttgaccatatggtgtccatgataagagaaaaaaattcagaaatccttagtctaaa

SEQ ID NO: 10045 - DNA, 475 bp, Zea Mays
gacggttacttgaacttcacgctggtattcaatctgaatggtgagactatcttcctaagttcacttctatggtcaatgttggctaagtcctggttataggttgtagagtaactcatgccttagtatttcttgtaaccattcctcaaatgtgtgctggcatccagattttgcttgcagctgcaaattcaggggcatcttcaaagatggtaagggaacaatctgacatctctgggatggtgactatagttgtgtcctttgtgatctccactgtgaagaaacaacttatcacctattcaattgtcctttgctggaaccatatgggtattcattgggaccattcattggacttctctatgatcatatccgcaatggagcatttcggaaataagttctttatgcaaataatggtcgtttcgccctgggaaatttggaagcaaaggaatgtggtcatattcagagaatatattcctttttt

SEQ ID NO: 10046 - DNA, 742 bp, Zea Mays
ctggtagcaaggagataatcatcgttgtcgaaatactgcaaactcttaaggtagtgtttgattctgtagtattgtgggacggagccgctacacttctaatttgttgttgtttggattggtttcgtgtatctaaaataggaaaattatccataaatgttgaaccatctggctccaccaaaatatctagaacagagccacttcatcccaaccggctccggaagcaaacaatacctaattggatggtttgcttccagatccataacaatcattattatggtcacaatattctcaaaagcaatttcaccaagaatcatcagtggactggtagcaaggagataatagctttcctatgcccgctaatacttcaccaagcaaacatcccaattaagtagagctgccctaaacaatgaacatgaacgttgcaacttaaaaaccgcctacaacatgaaagccagccaaaagcccaaaaacaagcaaacatccacgagaaccttcccacccaatagttcttaggttctagcagctcgtaaaacgctaatgcaaatggtcacttcacgttaaagctcactatgtacaaaattatatacagttctggtatctaaaattagttgaacaggcaaccatacagaaatggtcacaccactactccgaaaacaataaattttggatattcttagttgtacccctcacagagaatgtacacgatataaattaaatcaaccaaataccagtcttgaatcat

SEQ ID NO: 10047 - DNA, 359 bp, Zea Mays
tggtgaccacgtcgccgacgcctcagcctctcgtggcaaagcgactacggtatggttcgacgtatatgcatccatgttctagtgtccttatagactggtgaagctcaccgaggtatccgtttagtctttgcggtcataatttagttggaacacgggatcgacgccacttgaactgctccgatgttaacccactaaaactcagtcggtcagatgccaattcatgtaagcgtcgcgtcgtccgtatcctgctagtgctccccgtgcccttaattcgaatcctctggtgcttgtatcatctgggcagacgccacggaaccgggaccccgtcgtaggcgcggttaggtcattctgggggttta

SEQ ID NO: 10048 - DNA, 980 bp, Zea Mays
cggtgattggtgagctctcagtccaaattggtggttcggcaagcatcacagagttatgagaatgctcaaacaagggagaggggaggatgaactgaccagagttgtactggccgcggtgaggttggtttcacggtgtcggaaacccgaattggggagactccaaaattcgtgagctctggcgaacgattgctagcattttcggcggctgggtgggtgatgaccttgcggggctggcgggggctcaatttataggaagcaagagcggcggccggtaattttagaggtgacgcacgacggtcggaggggcagggagttactggcgcgcgtgaactcgtgtctaccatcgtggcgacctcaccggcgacaattagacgaccatagagagtcacggcgatgcggtggaaaggcagagccacgcggcacaaggccgagcggcggcggtcaccggcaaagttatcggattccaccgcggtgaatatggtacggcggccggaattgtttatcgtccggagtttatccccggcgacgtacaccgggtgttatccactcaccctgagcacatattggaccgacggcggcacgaatcgcggcgaaattcggtcgtcggcgatgaagcggctgcgctggcggtctgatcttattcagggtactgtaccatcgtgaacccccatcagagcacctgacagccaatctttgggctggtttttctctcaaagcttcatgtcaactcataccaagttctgcagcaaagttgttcttgtataatagctccacaattttgttatagcaaccctaggtagattctcactggatcttagtcgaaatggctctcaaacttggatcaaagtcactgttaatctgaagttcagactgtaccagcctgacagtccaactttggacctaattatctccaatttattctcaacaactatgcttacacccttaagcaaagttgttctcctttgataggtctataattt

SEQ ID NO: 10049 - DNA, 670 bp, Zea Mays
ggtatgctgagcttcttattacacgggttccaagtgattcttggagctgctcccaaaagcatgccacaaacagtgctcctctgtcagatacaatcgtcttcggaattccatgcaaacgtactatttgatcaacatagatttctgcatatttctctgtcttgtgggtggtatgcactggcaagaaatgagccgtcttggtcaacctatccacgatgacccaaatagaatcatggtgtcgggaggtattgggcaatcccacgataaaatccatgcaaatatcctcccatttccaagatgggatgggaaggggccgtagagtgcctgctaccttcaagtgactggccttgactctctggcaggtgtcacattcagatatatacttagcaatttccctcttcattctggtccaccagtataaggatctgagatcatgatacatcttgttactaccggggtacatggagaattttgaaaggtgagcctcatccaatatcttctttctgagctcagggttcttgggaacaaccaatcggtctccaaaccataggattcctttgctatcctgatggaagcatttgtatttgtccaccttttgtttgatcatttccttaatgacttgaacacccttgtcaccaatctgtgccatgactatttgctcttgtaatgtggg

SEQ ID NO: 10050 - DNA, 1377 bp, Zea Mays
aaaattgttccatattgttattgtaggtatgtcaataatcaaggaaaggttgtggaacgatttcttgcactacaacatgtcattgataccacatccgagtcactaaaggtatctttgcttgctcttcttgacaaatacaacttatcaatttcgaagataagaggacaaggatatgatggtgcatcaaatatgagaggtgaatttaatggcttgcaaaggaaaatcttagaggaaaatccatatgctacatatgtccattgctttgcccatcaattgcaattagtggttgtctcagttgtagttgttgctcttctattcgagatttctttgattatgtctctttaattgtgaccactacaagtacatcttgtaagagaagagaagctttggtagaacatcatcatgaaagacttctgttgctacttgatagtggtgaggtaagtacaggaaggggacaactacaggaaaccaaccttactaggcctggtgatactaggtggggttcacatcaaaaaactttgctacgtatagagctaatgtgggactctgtcatagaagtgcttgggattgttgaaagggatggacgcatatcgtctgcagctggagggttgattgaaaaaatggagaattttaagtttgtcttcattttaaagcttatgggtaacttgttttctatcacaaatgatctttcacaagtcttgcaaaggaaggatataaatattatccatgccattgatttagttgatgatgtgaaatatcaattgattgccttgagggatcatggttgggaagactttcttgatgaggtcaaaaagttttgtgaagcaaaatgtgttctagtgccaaatatggatgatgagataccatgtagaagccgctcaaggcgtgaaaggcttatcatcacaaatcttcatcactaccgtgttgagcttttttatgtcacaattgatcaaatcattgctgatatgaatcatcggtttaatgaagcaactacagagatcttaacatgcttttcatgtcttgatccaaagaataatttctccaagtttgacaccgataagctcttccggcttgctgaaatttatgatgcagatttctctaatagtgatcgttctttaataaggggccaacttgagacttatatactacaagttagaaggcatgctgcttttgcatcttgtaaagatgtagcaagtttggctataaagatggttgaaacggggaagcacttggtttttccattggtatacaaattaattgagttggttttgatattgcctgtgtcaacagcatctgttgaaagatctttctcagccatgaaaattattaagtccaaattacgcaataagattggagatgagtggttcaatcatttga

SEQ ID NO: 10051 - DNA, 856 bp, Zea Mays
gctgaaagacaagggcctgactgccgaagctgttgttgctgactttgtcttcaagaacatccaacctctaaaagatagagtgtacccagcttatctgtacaccgggctcaatgaccctacccgaattaccaatagacggattcctcacgaggacctgctgagccggattgacttgatgttaaggggcaaggtttcgaatgctggtgctcccctatcttattatgcctccacagagtcccttttctgaattcatttccaatcctcatgttcaagatggtagtctgggtcatagagtgcgaccctcattgggtgacatcgaggctttcatcgcttcattccggaatcttcctgaagcagagaggtagactcatttccagatgccgatcagtgctgatgaggtcgaggtgaacgtagttcttagtatgctggatggagaatcgtctgaccctgcccgtactgagtcgatagctgttgcgattgggtagaatcttggtgaggacgaagaagttcagaatcctgaaggtgtttgtcgcaaccgatcgcgccggacaaactacccaactgcgcctgatgaggggaaaaagagaaagaaaagacttcggcgaatatcatgcttagaacaagatgctggtccctcgacatcactcctcggtggtggctcggcgagcaccaccctcgaggacgatatcagaggttgtggtgatgatagagttggcggttgtgtgcttgatgaggacgaagaggaggaagaagaagaaattcccttgattcgtaagaacacccgtagcagcaggagtagtgacattccgacacaggccttatcaggacttgttagcctccagggggttgacaatgt

SEQ ID NO: 10052 - DNA, 882 bp, Zea Mays
cttttgtcacacttacgaatgaaagggaggctcaacagacatttacgggaggagtctgatgtgagctgggtagcagagtgctcccagtctgttgacccacactttcgaaatactgagaacattgtagttgtatgattaatttttttgctctgctttgcagtttgcacgcacaactcgatcgccccccttcacttctccgagttcttaataatggtgcacggagtgcagtaccaccagacggtcatggtgcctcgggagtccatcctcaagaccgaggcggagtggctcaactctatcaaggccgaccttgtggtaccaatactatgatcactgatcgttaccggtttatgttgtcactcttctgtctgaacatctctacacaccgagtagagcttaactgaacccacttgagcaaacgctggcaggtttcagatgttgtacccgtcgtgtgtagggcagctacagatgctggcattcgatccgtgtgtgtcacgaatttcaggtaagcggtggtcctgttgcttctttgtttccacgtgtcgttaagagtgataaacactagaatacgctatagtctattatatttaattttgattcgtcaggtaagtgtctgggcgatctgtctgtagttactacaagcaacatgtaaatttggggatcggatcccctgacgtcgaagtcacctgacgcacctatattttctgcagctgggacttcacttatgcagagtacgttgtagctgctggacatcatcatcgctcaattgtgtggcaggtaccttactcacatagttcgtgaattgtgacacctacgtaagatggttgggctggtggggtgtaaagcagcacaaatgataaaatttagatccaagcttctctctgg

SEQ ID NO: 10053 - DNA, 971 bp, Zea Mays
tgataggcggggctaactggtcgagcctagcagtagaggcgcatggtaaggggtaatctgggctattggattttaagcgggggatcaggattgagttcgattaatttaaaacggggccatccgatccaaggtggacgcctcggatcagacgaccaaccctggttagctttccttggccactagtggtggcgccttccgtccttgtggtggagactcgctggagacgagggcacgggcgcactgggggcctagggcgacgaaaagggctcaggaaggtcaggcggagtgtgacgagcacgagtgagggcatggcaccgacgctgaggcaccggagggtagtgatccacgacgaggcagctctgtggcaacgctacctcgctccagtgagaaattgcgcgcaacagagagcgggggaggggaattagaggccaaggaggttggttacctcgagggaagtctccgagacccttgaacggtggtgggggtacaaggtggctcgggtcgacggtggcagtgctccggctgcacgaaagaagtccattgagcgcgacagaggaaaccagagggggaggaagtgaatcaaggtgcgtcccgagtcgaggacgccgtggcaaagctcatcgaggaaccgggcacgacgaggcctcaacgccggtggtggaacgataacgcaacgacgacgatggcgctgtgagctgggtgggaacaaaagggacagggagagagtgaatgggaggcaagggtgtgctgggggttcagggtctccaccttgaggcccgagtgacgcacgtgggatggggtcgtgggggtgtgggtggcggtttgtccgcacggatcgtgtggcgtagccgtgggtgcggcagttgcggtgaaggagatgggaatgaccggtggggccagggcgtcagtgggtgagcgcgaatgagcgagcagcgcgcgctgatggggtgggcccatggcgcagagagcgg

SEQ ID NO: 10054 - DNA, 1133 bp, Zea Mays
gaagagtcagctgttggggcggcgcgggcagagcgggtcgaggcggcggtggtggaagcagaccgcgcgctttcggtcggaccagaatcgacggcgaccggtcgtgctccatgagctccacttgccgcgccaggctcatcgcagcggcgagcgtggccggattgtgtatgcgcaccgcatgactgagaggcggaaggaggcctccggtgaagagttgcaccctctgagcttcgtcaaccggaccggcacggggcaggagtgtctagaaacgatttgagtactcctccacggttccggtgcgccggcactccgaaagcttgaacatcgaggcagagcggagtggaggtccgaacctctcgttcaggaagtctttgaattgaccccaggatggggcaccatcatcttcttcaagctagttgtaccacagctgcgcgacgtcgtctagatggtacgatgacatccgaacacgttcctcccccaaggtgcggtgatgccggaagtatgactcacatttgttgatgaacagcatcagatcaacggagctatttggggatctccatctacgctaatgatgttgctcttttttacaccctactgatgctgatatttccactactcttgacatcctccagctatttggggatgcttctggtcttcataacaacgcacagaagtctagtgtgtactccatcagatgttcagaagagattactttagaggtttagagcaggccgccatgtgaggttgcttcctttccctggaaatatttgggtctccctctttccctgcataaactatccaagcagcatttccagcccattatagaaaaaatagctgaccagctcccaaattagaaagctgatttgatgaatagggctggtagaagaattctagtgcagcatgtccttactggtatggttgtttatacagtaatggcaattgatttcccccaatgggctttggatgcaattgataaaatacgaaaagggttcttatggagaggtagaaaagaagcaaaaggacactgcttggttgcttggggaaaagtgtgtcggcctttgaatatgggaggcttgggaatttctagtctcccacaccttcgttgggctctccgaatgagatggttatggttg

SEQ ID NO: 10055 - DNA, 644 bp, Zea Mays
ccgggggctaactcgaaagattccctagacacagcaaccccgagtagtactgcgggtttatttcccaaaagcccgagggttcatatattaatacgctacaacgaatgggtatcaatcaacaggagccacacgatcaggaaacaacggatccggtttaaaacagtcgagatcgagtctgtgccacgcgatcccgatcggacgatccgagatgatcccaccgaagggtatccctaatctaatccgagccctagattcacgaatcaacgatccacggcgttcagacctactgtagggtgacgatctaatcctggccatccgcaatcgatccaacggtcacggcagccttcactctcattttctctctccccgacgaaccacacagcggcgctcaggaacccaacggcggctccatcgccagaaggcgaaattccgacgcccccaacacccgatcatgcagagcaagtgatgtacgtagagaagccaaatacggagaactgtatgggggaaaatctctaccgtgggtcatgcggccgtgtgttttggcagtcgaacgtcagagagcagagcgccattcatggcgttcgctgggccatcgatggttgaggggggtctcgggacctcgtcgatggtgtacgccaccgcgg

SEQ ID NO: 10056 - DNA, 413 bp, Zea Mays
ataagaataacacaggataatcgtctattgatgtgcctctgtagtttcattgttggcattcttctgcttccgtggctttttagtctcattatcggcattctttcgcttgcgtggcttgggtagttctttagatttcttaattcttttactccttccctttgaacgaacatcggttggaggatgtatgtcaactttctccgggattttgcaaccaatgaaagtctcatattcttcttgtggggcttgcatattggtaggaacaatttgactgaaagaagcctctaggttcataacacctgatactaagaaattcatgccttcatttgaactctttgctctttgaatcaaatcttcgaccttgtttcgcaccgccgtgatctttttccttttttccacctctttagcatctttgg

SEQ ID NO: 10057 - DNA, 364 bp, Zea Mays
taagcccaaactgtcccacgtggagcacaacagacatatgaagatttttctctgctcccagaaccgaaccacacatcaaccacttgagacaaaaatgcagcagcagccgactgaaccttccctactgacccccttcaatctatcaatttcctaaagtaacaggccaaccgcagttaataaaacttgctcccaaaacatagctttaccaacctgctgcagcaactcaaggtcgaaagctcacagatagaattattgtgcctcaaagtggggtgaaaatgctgaatcgtggcttttactaactgaataaaattcagcatttcccccgactgacaactcgacttggagcagaatttgctgtcaattt

SEQ ID NO: 10058 - DNA, 382 bp, Zea Mays
ctcttttacaaaacgggatcgacgaaggggtatctagccacgtgagccatccgatctagtatctacggtccggattagatccgacacacttcaaaccagcgagttacccaggctgcctgatttgtatcctacggtgcagattttaaatacccgcgaccacacggacacgtccgatcgaaaaccaatgctccagattagatttgtcgttgaattcaaccggtatgctaccagagtcgatggatccgcgatctacgacaataacttaatggaacacaatctgttttgatccgcaggatgccgattcgacggcacagatccaatcacccaacagcgatacggctaaactaatctgggccattcaacaatggatccacggccccgc

SEQ ID NO: 10059 - DNA, 824 bp, Zea Mays
cgcgagcatgtcgcaccgtcttaaatcatcgccgacttaagccgattgctctgttagtagggtatagtggtcacctcgagttaagtaagcgtgagcatgtcgcactgtcttaagtcatcgccgacttaagccgattgctccattagtagggtatagtggtcaccccaagttgagcaagaatgcagattgaaaatgaacaattcttgaagtctttttattgatgacgtatctccgggtttacagaatacattgtcgccccaatagcttttgaaatatagctaaggataaaacttcctgagatgttctatgttccctgagttcccaacttctgtgccatccatctgtgtgagacgatatgatccaggccgagtgacttcagctactatgaatggtccttcccatagaggtgacaatttgtgtcgtccctcccccgttagaattcggcggaggacgagatctcccactgcgaaggatcgaggtcatatggccttatcgtgatagcgcctcagagtttgctgataccgtgctgattgaattaccgcgttcagtcgttcttcttcgagcacatcaacatccttcagcctagtagcctcagcttctgctatgttttcaaagatcaaccttggtgccccaaacttgagatcagtaggtagcactgcctccgaaccatagaccataaagaaaggagtgtttctatgcagggctcgactaggttgagttctcaggctccaaacaacgtacgacaattctctgatccactttcctgcgaacttttcatttttgtcgaaaactttctttctcagcgcctccaatatcatcctgtt

SEQ ID NO: 10060 - DNA, 1204 bp, Zea Mays
tgtgaatagtattgggccaattctaacctggcggcccagcaacacagggaacaggggagcgcgccctcgcgcgctctggcaactttgcacagaggccctcggcttaatggctaaaccgaagtaggctcattcactattgcaataagtcgctgacggtttgcagaaacaccccccaaacttctatttcttcgcagaatggggtccccgacgatggtgaacgcggtcgagctatggtgagctcctgtaccggctgaatggggcaacgactggggttcccgagcggctaacaccgaattggaccttccccgaaccattcccctaacctaatttcatcaaggaccacatggcacgctctggccacggtgaccgaggatgttgcggacagatgagtgcgttctcggtgatctaaggctactcagtgcaattgagtgggtcgatgggcatcacgggtatatgagagcactcaaacgagggagaaggcagcatgaactgacctaaacggtgctggccacgacgaactcggttcttgcgatgcggcggaccaatttgggggaaaacagcgattctccgactgggggggctaatcagggacgggagtggttgctatggcttcgcaatttggagacgaaggttggagctcggttgatttgagcgaagggagcgaggatgtggtgaatttatagccgcggtgagtcacacccgcggccatggtgataaccatcgccggtcttagctggcgatcaacggcgacgtcaagtgctacccttttcttaaggcttgccacgtctctgctgcgacagtaatacgaccgagtcgatgcggcgtggaagaacgacggtgaacggcaccgatgatcggacacggccgggaggagggatggtcgcgtggcagccggagttagtgccctccaccgcggcggtcttatccggagcaaaaagatcttcgcacggagatactcactgcccgatcatcccgatcccggcgcagattgcagcgcggacaggtcgtcggcgtcgaggaactgtcgcgctggcagtctgatccacatggggcactgtaccatggtgaatgctcttcagtcggtctgacagacagagtttgagcctcattttctctcaaattcaaatggcaactcgtccagatctctgcagcaatattatagtgttataaaccagctacaactcgactatagggattaaactta

SEQ ID NO: 10061 - DNA, 704 bp, Zea Mays
cccatgcagcttgattactgaatctaccatgatttgggccactccctgagcagtgaaagggtgctttaagggaaagaagtgagcatactttgtgaatcgatctaccacctctaaaatagtatcatatccttctgaccggggtaacttctcaataaaatccatagtcaagtcttgccaagcacctactggcacaagcaatgggtgaagtaacccagaaggatactgcttggggcttttggcttgctgacaaactgcacactgtttcacaaataattccacatcagttttcaggcccaacaactttttaattctatggtaagtagcagtgattccagaatgaccacccaatgatgaatcatgcaaagctgcaataattttggttctgagggcagaattctcccctacctaaatttgttggtcttttctgatcactccctgctgaagaaaatagccatcttcatcaggactctttattaccaatttttgtaaaagttgttgggcctgcaaatctatggcataagagttcaaaatttcctgaagccaaaccggttggacctcagaaactagtgctaaagtcatggctgcccccactctagacaaaagcatctgccaccgcattctcttttcccttcttgtacactatcttgaactggagacccatgagcttagccatagcttttctttgcaattcagactgaagctgc

SEQ ID NO: 10062 - DNA, 558 bp, Zea Mays
ctgttgatttcatttgagtgtcgtcaatgataagaaaaggcaataacttgagaaatgtgaagcgcttacttaaggattgacaaaatatctccgtgcatcccacgtccaacatacaatctaggctggacatagcaaaacattgtgtaaccactaatgatgtgcaatgcttcaagcaaccgtgtgaagacattgcgttcaaaaaaaccgtgtgaagacaaaaaggagggacagacctgaatccaccacatcaggagaaccaacactcgtgaatctgagcgctccatgacattctgaagttgtggcaacaagaaaaacaaggcagcaagaatatccggaaccatatatatgacgatcgcaatgttataaactgattgattataccaatccccaatccaactatttaggattttgccagcaccggatgggtatttgatggaactagaataggtcaatggaagaataattatccaagcaatggcgacaacaaattttagtaaatatctgactaactttgtccactccatactaccccatgcttgtacagtaaacattatatcc

SEQ ID NO: 10063 - DNA, 545 bp, Zea Mays
gctagacactcgacgaagacgtctcttcttctttttctgcccctcagcaggagaagtgggctgattggctcggcgagggcgtttcgagtgaatactgtcagacctttgattatccaaagcgtcgctagcttctgggagaggcgctaccaccgatgtttcagcaggggccacatcagaggaatcttcagctaacatatccagcatggcacttatctctgcatcactgggattcaaaggcacctcaaaatgaacctgcctctcgtcgtcaggaatttcttccagtgaggcaaccaaagcattaacttcttcgggagagggtcgcactctaaggcccaaaccgctatcaccggcaggaggattcgacacaaaactggtaaaggccttggaaggaggcagattccaggccgagtacgcaacaggaaagccgatgttcgacaccttgcctctgagtatcatttcgagccggctcaccaagtccacagcaggaattcttctgttggttacccgggttgaatcagccaagcctcggtacagataggccggat

SEQ ID NO: 10064 - DNA, 402 bp, Zea Mays
gtgaggatcttttcaccacgaagcgttatccgggcaccggtgagcacgaatcacctcaccggcgtgaatccaggcgcaggggtctccggcggcaaggtgcactgcacctgcgatctcgttcagtccactgtaccatcagaattctcattagggtgcctgacagagctatttgcagagcccatatctcaaatttccatgtgacaacttgctaatccacctttagcaaggttgttctcctacaatctggctttaatttcactatagtcacatacttcaattctcattagatcatgctcaaattagctctcaaacctggtcctagtttactgtcagtccagtttcagggttgtgctcgactgacagaccatcttcaggtctatttttctcccatttccatgtagc

SEQ ID NO: 10065 - DNA, 1353 bp, Zea Mays
aaagcgagggcaatggaaagctcagtcaccgacaccgcgccgcatagtatattcctgtatactatagaggtagtaggaccgttgggtccgtgtctgctatggactccgctgtcacacgacacgtaaagagaaagggttcctgcccccgggagattagggtggtcgtgctttattacgatatggaccgactcttctcagtggcggacgcagaacaaaattctaggtggggccgacagtgcaagagacaaatcaatagactagaccataaatatagattaatgataataacatgaatattaaatgataatatctagtgtttccaaaatgatatgaataccaaaaaacctttttggctaccaaaaggagatctagagagagaaaataggtggactgaccgaggacgaggcactagggcggagcagccgcatcggcgcgttgttctggcgaatcattgaaattgtcgtgagatggcgttggtgagacgacgacagctaggaggagcgagtgcaggaagcaaggtagcgatagatgacggtgacagcaagcgacacccattgtcgtgttgcaacggcgcgatgggactctaatgagttagcgagggacaggtgacgccacggtcccaccaacaacttgcccatctgctggtgcggactaggagacaaaatatcaacattgtctgcaggatcccgacgagtcgacaagctgatgagtgatgagaaggcaaggtgcgctgcagcgggcggattaggtcaccgacttactggtcagtcgatgaccgaagaagcgagtgagctacgactgggcttgcgctagggaagagaatcaaatggcttaggtgaagagtggactgagcagtgaagcgtcggcagaaaaatagatcaaaacttagttttcattagatttgtccacgctaactatacaaaaatttgtttattttagtgtgtacctaaatcttggtataaggagttaaaaaaattgaggtggggccatggcccaccttgcccaccccttggatccgcccctgactcttctagcgtcgttggcgactgcaacttgctgacttgagcatgcgtagcaataacacgcatggtgggggtggtggttgggaacaaactaactacccctgctacggttacggacggttacgtccgcagcactcatggttgccgcacggttggtcccccgtcgctttcctttcatgcgcgcccgcccgatccgcttcatgggatgctggttagttgcgggctttatggctgtctgccattcgtcttccccgggacggcctctttacactttgagtttcagctcagctgcacctgcacgcgcgcgcggcgatgatcacactctcatcag

SEQ ID NO: 10066 - DNA, 559 bp, Zea Mays
tactcacacatagatgtctacaacttcacactgtagatgcactaggcaaatggttcgatcaaggcgttcgttgtgcatatccgaaataggaacaattttatatttttcacattttacagagttcatatgcttgtgttgatctttgcacatgagcatacaactagaaatcaagagtaatgcatcatgactgataagaggctatatgtttgtcagagaactgttgtgacttgtgacaaccattgattcaaattgaaataaagtgcttcaccatgttatttaatcctcatcaaagcaaccataggttttaagtgattaagtccacttgtctaaagaaaagtgctttcttcaatttcatttttaatgggggtactgtggttatatgttaaatcatattaacaaattagctccatagtccctgggaacgtgaaaccatgccagattccttgtccaaaaatgtttttcctgttcgaagaacacagaagcaatctcgtccccaccgtgtggcctgtcaaaaccttcctgggaacttggtgactgtgatcaatccgttccatgctac

SEQ ID NO: 10067 - DNA, 486 bp, Zea Mays
aggagacgcagaggcgacaatcgaatctaggaggccaccacggcggaaccccggcgtccttcggtccatcgtcttgggcgacaactataggtggacctccgccgtgggtgcatgtggtgtgccggtgaatcggcggtggtcctccggcgtggcagatcggcggctgggcgagggcgaccaccatatgacggcttggcggtagatcgactatgctcctccaacttggccatgagcactaggcagtgagcctctgtcgtgggtgcctgtgcggtggctcgttgccgtgtaaccacggccgtctccgtggatggtggttcctacgatgctaggattggggaatggatactggggaagcaggagactcatcagggctggcggctgcgagtctgcgaggggaacaggagcaggtgattcaggttaggtcaccgctacagtcagggaggaagatcgagcctgtgttctaatattataaatgttattgtacta

SEQ ID NO: 10068 - DNA, 339 bp, Zea Mays
gtaaccggcggagttaagcacttcccacaagatggaaggaaagccatcgtgagaaaggaagtcagagctgaaacgagtatctcctccactggtggggttgggtgaattcatctgctgaagggtatcaaaggtaaagattatggtggaaggaagaaaaataaaagagcctggatggtttttcaaaggaagtgggttagctcaagttttaattcctttttgtgtttataatgcatgcatgctgaaagtaacgtctcctctccaaataatagggtgctcttagggcatccttaaaagtctaagtactggcccacggggcctacttaattagccacctatttc

SEQ ID NO: 10069 - DNA, 895 bp, Zea Mays
gaccggtgttgatctaggtatagcacatgtcgacgtggttctcggcggtgactggatgagccattgcgggagagaggaggcgacgccaacctcgatgaagcggaggagccgccgatgcatcgcatgagaaagaattgggaggagcgcgatatggtggtgttcgggcagataagatctccaccgagggcaggctcaaatgagtccaaaggtgatattttcctttcccctcaaactgatccaaacttcagttattacacaatgttcagaacactccacttcttatctccacactgatattttgaatccctccatactgggatactttctacggctgaggcctctagaacctttgttgaccagcccaaccatatatcaactcgagcacactagagaaaccagcagggaggggaaagatcttcaatttccaattcagtaatgaactccactaaaacagccttactgtccagcacagcccagtccaaacttgatacttcccaattgggaggggcctctagatccttgtccatatacttcctccatatctccaactatacacacaagtgcaaccataacagggagaggggattctttttcagctactcaaaccagcattgcatccactgcatcaggcttgttgctccttttgctcacctccatatttaatccatgtcacctctcaatttcatatggcaacaggtcaagcttaattaacaaaacttgttctttaaccatagctctacaagattgttgcagcatcccaagattacaagtaaatagatcaagaactatagtgctccaaattggggtggggatacttaaaagttcagttctggtagattgaaaccatatgtctgtcagggaagattttggaacactttactccattttttacaca

SEQ ID NO: 10070 - DNA, 1337 bp, Zea Mays
gcgggagacgccgagagactgacctggccataatatcccggtgaaggaccaccgaagcgctgaagcccggagggaggaagggttcgggatcaacgcgcctaaacgccatctgagcaggaagcgaggatcggcaaccagcagacgaagacggagcaagttggggttttgttgaagtgacgcctagagaaagcgtcagggactgaggaggtgccgattcagatttttttaatacttctcgggcgaactcctcgaagcaactgaaaatgggcggtccaccggacagagacgcatccggagtgcgaaaccaggagttgcgaacaggagaaatttggtttcccaccaaaagggcccgactcccaaaggcagggaacgaagtcagaggagaaccaaaggaagtaaacttgctgggacaaaagaaatccacgtgtccccggcccttacagaattgacagcatagagtcttagagcccggcagcccagcaggcccgcgagcacgcacgggacgccattgcaggttgcagggacgagaccggccggagttcaaattttgaaatttaggacggttagagggtctgtcaccaatagcaacaccagagcaattagggtccaagaaccgagagagaccagttcttccgttagaagcagaaagccacggtcccgaagcctgtgggtgaagacggtggaacacggagaccctcgggcgaggccgagacaaagcttgcggagctagggcacgagtagcgggaggatggcccaaacggttgaaaaccgaagaaccagcccggacagcatgccgagcaccaccaggcggcctggcaaggttccgaatcggaacagcattggcaccggtgagagggagcttaaccacgtccgcatacgacggagaattcctgacccggaccgtcgaccaggaggcaacttcctcatccaaaaaagcctgaattcatgcttccaattgggtccaccacgattccagaggttgaagaaagctttgaactccttacgctcaatggagcccaagttataaatgtgaaaacccaccgccatcgaggaaaccgaaaaccgaaaaacgcggtcagccagctgaagcacttcgaaatccttggcgagcccaccaagagcagcctggagaagatgaccgaccgagaccgaattcaacttgaagatgcatctgccaaaggacaccaccagccagaagggcgaccgcaaacaggggcaagcagggcaaaccgaggcttccaaggaatcccagagggattccgcgaaggccaagcctggccgaaagtccaggagggagaaatccatagcagaaaagcaagaagaccggagagaaggac

SEQ ID NO: 10071 - DNA, 375 bp, Zea Mays
ctattccctatcacatgccgtccgagcccgacagcgcaagggcacgcacggtggtgccaccgccagcgaacggtagaccatcgccctagtgaacctaatcaccccccgctaggtggtacacgaagataagggccagagtactttagtgtggcactaaccataaaggacgatggcagcgaaggcaggccccacggaatggtggtgcaggtggcaatccgtggctccggtgagaaattgtgagagacccccgccacgactcgccaagccagagccatcaacacattccagacacaagggtgagtctcatgggcctgtgatcaaaggtttgtcgcaagcgtgcttcaacagcgacgagtactccctcgcggcgccagt

SEQ ID NO: 10072 - DNA, 558 bp, Zea Mays
ccacggtggggtgacacacggcggcgcagacggccgatttgggtgaaaacccaaattcgcggtctatggtggttaatcagaggcgagagtgggtgctatgggttcgtaataagctaatggagctggctgtgcactcaatttatagcactcgctagcggtggctttgaattttgaagagggaagcacgcgaccggagagggggtgagtcaccggtgcgaactaccgtggcgttcactagggcaatgtctctggcgatggacatgctacctacgacggtctactataacgtggtaacgcttctaaatacgtgtcatcctggcggcaagcggcaaactccagcgagggtcatcttgaccggccgcggggcaagtggctacgacggccagctcacggtctcatccgcggtcaagatcttttcaccgtcggctgttatccacacaccagagtgcatgaatcgcaacgccgacgaggatcacggtgcaggcccaccggtggcgacatgttcactgaatccacgatctggttcagttactgtaccatcacgttcttcgttagtcc

SEQ ID NO: 10073 - DNA, 303 bp, Zea Mays
tgaagccgaaggggttgtcgtggacgactatggtgtaaacactgtgcagctccacaatgtagactacaaagatgactagtgggttctagcaagccgtgtcgtacaagtatcctaccatgcgatgcccaaggaaaatagcaagaagtcgatgaggcatgcagttgtgtcaggaaagcagagaattgcgggagctgatgggatctagagtcctgaagaatataacacctacgaagaggttgggatctttatcgatcatccacaaaagatcaaggccgtcgaggcacgcttcaacaagaccaagat

SEQ ID NO: 10074 - DNA, 426 bp, Zea Mays
aaaacaagttagatggacaacattttctataggtataccactatagaagataatatcggtcttaatctacggatttcatgcaacgtaactatgaaaatctcgtgtgattgatcaaatcaacctaaatcggagacattcaaactaaaagaagattacactcatgatgtcaatctgttgcctcaatctggtgattgtgtacgcgattagcctcaatggtgattctagctggtaggggcaagttgcgcacacaagagatgaggatgaattgatcccttcagtcatgtatgatgcaatctacttcagcctggtatgaactattgatctaatcaaatcgtgcatcatgaagatccatctcatgaacctagatccatacaatacggctataagagaacaagatagacacatctaccacatgacccagaaatc

SEQ ID NO: 10075 - DNA, 641 bp, Zea Mays
gatgagtcgatgcaagcagatagcagagtggacttgagtcgaccaggagtccgggatgctaggagaggatgaggagtcggcacgagcgaatagcggagtggactcaagccgactcgagatcgtccaagcgagcgaggggacgcgcacggaggcaagaagctaggacactgtatgactgtgtggatgaggttgagcaggtgagtcgacagacaatggcgacccacatggaggtaggatggatggcgctgatgaatggcaccagcaagggcgagcccacatgaggcgaggtgaaaggaatggagggaaagaaacctcaccactacgggagtggaggaggagaagcacgggcggagggtgtaaggagggagcagagatgagggaagaggaagagtagagaggaaggagtggagatgagacgtgactgtggtgggagcagaggcggaccccgcatcatggcctctgccatcactcaagacggcgagacggccgtgtccatgcctcactgcctcacacagtggcctggcacgaatcgatgcagccaacagggtgcttgtacgcatgaagtgcggtggtgaggactaaggagaaatcagatgtggtttagaatagattcacgtccgctaccgcagccgtccacgcgt

SEQ ID NO: 10076 - DNA, 355 bp, Zea Mays
gagaaatcatcggtgagcaagaaatggcgacggtcaccagagcatgatggggaagaagcagggggtgcttagctcacctatggaggaagaaagggagaggcgattgtgccatttatagggagaggagagggagaaagatatttgggcgaatcgatgtgatctgcagcttccattcaaggaggatcggagaaggaaataaatcacatgatcgaagaaatggagcaggggaaaatcgagaaagtatcgtggccaggagggaagggaatcacggttggggggcttgtcatgaacaccactagtgagagacgggctacagacgcatgcaactgatcgcacacgctgtgtgagcacgtgc

SEQ ID NO: 10077 - DNA, 625 bp, Zea Mays
ctactgaacatgtggcacgcggaagtgaatagttgcatgaaaatagatatcataattgcatgctgtagtggcctcgatatagatagcttgcttgaagagatggctatatactagaaacacatatttagttgagttccgccagggattgcaacttaagatgtcatgataacacatgaggatatttggttcaccaatgtgtagcacagtagcactgcaacaaacaacatatgttccaaagtttactatctatcgatgttcattttgtagcactagatataatccgttcataaggaaaatggattgctccgatcgctttcagttgttagactgtctctaacaagactctgtaaaaggtcctctccgctaaatgtagcaaacaaagttgtccggtacgcctccaacaagaacctatacaacgcccgttaaattgtagggtgcattcatcatccgccaaatgtagcggacacatgaaagctctctatccactgttcgctcccacatcgtctccgttcgctcgctccctcgtcggttcggcatccacacatcgctcctctgctcccttcgtagcgtgcttgcgtcaaagaagacaaaggacgggaatccaaggcagccatggatattgggg

SEQ ID NO: 10078 - DNA, 1062 bp, Zea Mays
gtagtagagatagaagggaacagaggataggcggcaacgtgaagaacacgttgatcagagagtagctagaggaatataattctgttacctttcataaccctctctctcatgcactcacgcctttatgcagccaggcaacacgccggcatctcatctcccataggccacgcacacgttacatggagttcacccactccgggcccaacagcctctggttcaacttacgctcacgtgtacctctccttggcccagctggctcctctttctcctttgaacggcccacattgtccagtttaactcccgcgccttcaggttcagcagcttgtggcgccctgctggtaacatccccccggcgacgagaacctgcttgcccccaagcaggtgcattgggaaatgtttgcttcaatgtctccagatcttcccaagttgccaacgacgatgacaatcctgaccacttgataagcccttgagccacaccactggtattcatccgacgttgtaacacttgtacagggatttgtagaccttgcaaagcaactggtaattcagcaaccgcgacagtagaaggaatagctttcttcaattgagaaacatgaaaaacgggatgtatattagaggaagaaggcaactccaacttgtaagcaacagacccgactttggacaccactggaaatggcccaaagaacttaaatgccaacttctgatttgctcttggagctagcgaagactgcacatacggctgcaacttgagatacactgtatcccccacctcaaacaccctctctgaacggttcttatcggcctgtaccttcatacggtgttgggcgcgagccaaatgctgttgaaccaattcagtcatcactgccttctcctggatccaatcggccaaagcaggaactggacaaactgcctgagcatcgattccaaagtgttttggctgatacccatatagcacttcaaaagggagaaaagcccacagcagagtgcaaggaacaattgtaccagtactcagccaagtatatccactgacaccatttatgaggacaggcactcacaaagcaa

SEQ ID NO: 10079 - DNA, 796 bp, Zea Mays
ggccaaaccctaggcaatccacccgttgtcgcgagcaccatatccaacgctgagtccgacccgccgtcaacttcagcgtcccctacgcattgacctagccgcacatcgccttgggcttctccattgtagagggtcccgaaatcgatcggccttcaggcacctccactcatgggtaagtcctcaaccgccaactcttacatttgcatatttacacaatctgaatcgtaaatcggtttcaccttattagtaactcaattgtttcatttatcaaaaaacaattcagcataaattcattgttaaacggatacacaaatttatactcttcaatgtctcacatgtttatgcactaaacaataacgtgttatgctgttttgttgacaaaattatgatatatacgtcaacatgttatgccataaacatctcgccgtacatttagggccagtacgcacgaaatagccatcttatacattaattggatgttgcatatgagcagaatttttattgctccattacgtttttatgtatatgtgttgtttgatttggcaggaacatcatacatgaagaacgtagaccgacctccatctaatccaaagcggattataattcagtctactcaagagtgctttagtgtcgacatacctcgtgttccggcgaaaactgttagacacaaaccaatgcaggctggtgatgaggacgatgactttatgccattatcgaagaagcgtaactttgatgacagtcctccaaaagtcttgaagaagatagttacaaagcggaggaaagtagtggatccccc

SEQ ID NO: 10080 - DNA, 1045 bp, Zea Mays
cgagtgaggtcggaggggtcctggctcaaatcacaaactgcctaccgtgcactccagacgcggagggctatctgcaggtactcacccaagtggtgaaccaccttatccccctcgctctcccaccaaatgatctacaccacgccaataacagtcgacgagacacacgtagctgtatcaatgcttcgcacaatcgcctacatgaggcggcgagaagagtacgaccgggatcatggtgcgctagcacacaaccgtaccaccaggaccgagttagcagtagcctccaccaacagtcagccccgggtcgatcgaggtagcacgacgcccgaaatcacttgactctccgggaccgttgacgtgatcatcgccgagaggaccgagggacgtgtggagtctccgcccttaccccctaactccaagcgatccaatgactgccaaacttcaaggtgtccaacgtcgacaattatgaacccaagcaagacccgggcggctggctagctgtctacacgaccgctgcccgggccgctacggcgatggaagatgtcttgatagcgtacatacccattgtcctgtggcaggacacgctgcaacggctccgacaactacctcgacattgcatcgacgactaggacgacatcagccgctggtttgtcgctaactttcaatccctttctgataactcgacgtagccctaggacctcaagtccatcaagcaccaaagctatgagaccctccgctcattcctcaggcgcattcagacaatgagaaaccgcatccccgatgtcatggaggcagccgtgatcgaggacttctaccatgggtccaatgactcggcctttgtccgggatattttccagaaggcacccgccacctcggaacatctacatcatcaccgatgagtgagctcagtacctcattgggaacacgaagcctacacccccaatgctgaagaaagacataaactggcatcaggacaagcgctgggacaagaggcctcgagaggaagtgcacgccgctgagccactgactacccagccctacggcacgc

SEQ ID NO: 10081 - DNA, 983 bp, Zea Mays
gttatatgctctttgcaccaccatttgaaatcttgggattaattgtatacatgccactctacttgaggaagacactttgtttatgtgcaaaattacctagatcttctttgcacaaatagttaggtagtggtgtttactgtttttccttgcatttgaggggtatcctcagattttgttaattgtggttattgctctaacattttgcatgataagcagctaggttccggtgtcggtctggtgggcatttgtcttaatcatgttggtgcctctaaggtatataagtctattatgccactccatttgacatattgtctagggtgaagaagtgaatcatgtatggttttctaactctgtgaagtgggggtgtgtatgcacattttcaactgcttaattttgactgtacttgtggagctaagagtggcaattaagcatgaattattcagatcaattatgttcatgattttcttctgaaatcaaaagattgtttataaatataatatgccacgcggaattcattaatatgcaggttattcttactgatggtgacccatgtacactcagaaacatgaaggaaaatatggaactgaataacttatgcattgagcaggaagattctagagcgctaaaagaaagtaagaataaggtgagttagtttccttgcataactcagtgttgtgtgcagatggttcctcttacatcatttggcattcaacagttggatcacattgtggcatgcaggtcgagtgcaaatatctttcttgggaagaagtgtccgaaagtgatttatggggctaccagccggacgtagtgtgagtatagaactgtactttttcactttttctctgttcggttgtacacaaaatcataatcatgggaactgggaaccatgctattcatttttaattggattcctacagcttcaaatggcccctggtaaaccgtagtctttttctgagtaagatactcaacaatgttaacaaaat

SEQ ID NO: 10082 - DNA, 449 bp, Zea Mays
aagaactattctagcagccttgggttcggacttctgccagttctcctttctaccgtctagtggtgctagtggtggcatcctggtcgcttggaagcgccaccttggtgtgactgggttgactaggattgacagacacaacatctcaattcaattctgcaatgaacataatcgttgctggtggctaacttgtgtttatggccctcaaagtaacagtgataagatgttgtttctttaagaattgagagactttagggctgtttgttttggaccttggttgattgccggtgatttcaacctcatctacagggcttcagacaaaaacaactcaaatattaacagagctatgatggggagatttaggaagttggttgaggacttgagtctcaaagaggttccactatacgggcgtaaatatacatggtcaaatcagcaagacagtcctgtccttg

SEQ ID NO: 10083 - DNA, 539 bp, Zea Mays
attcggccatgtagacgatggtggggtcatcctcggtaggatctcttcctgacagagcctgaagtcttttcctccaggcaggggtatttttgttgctgggtggaaagtagtgaaggggggtttcaaagacctttctgctgtagttttggcatagctgtcggagggcttttcgggcaacattttggcaagtgtctgggaagcggtgtccggtgaaagtgacttggaaaggagggtggtttgggtagcttcggctttctcccaggtagactgccatagagcacttctctattccattctcgagatattccttccagacatattctggcttcttgcggatccccatgcgaagcgcacaacttcgcaacagatgtaggaacccttcaacctctgagcagtaggatgtcctaatgaccagagagtcttccatctggaataggaaaagaaggatctgttaatatcgggggaaaggagagaagatttttttgggtaagaggtattttcttttaaggcaaacttttaaggtcagggctgcgacctac

SEQ ID NO: 10084 - DNA, 845 bp, Zea Mays
tggacaacaatattgatgcaggcaagtgaccgagttgttacatgaaaaagagagaacgatgctctccaaatcgcgctgtcagaacgtttgatgaagatcgccatggtacagtgacaataaagatctccggtgccatgcgctcgacgccggtgatcctccaccacaattcgcgccggcctagttgattcgttccatgggaagagtagataacgtcagggcgaggtgaaaatatccagtgcagggtgaatccggtcgctggccagaccggccgtcgtgtcccgccgtggtcaatcacgctggcatcgccggagttcgccgttatccggctaggctacgtgcctcaaagccttaccacgtcacaatagaccactttaggtagcttgttcatcgcctaagacactgccccggtaaaagccatgataacgcttgcaccagtaacttcccctttctccggccgccagcacccttccttcaaattggacgccaccaccgtggaactctataaatttctgcccccgtgagttccgctaggtatttacgcatccaacgcaccagcccttgcctcggatcatccaccagagcctcccaatttcccacttcccccaaatcagttagaacgccgccgtgagagagctcgccgtggccagacatctacgggttagttcatactcttctatgtgatattctagccttcctcatgtcttctgttactcatagacccatttgattgaactagaccgctctagattgccctgaacaccatagtttcttctcggtttttgccgtcgccgtgagcaggcgtgcttcgggccggtttagtgcaattggttgagggattagtgttg

SEQ ID NO: 10085 - DNA, 347 bp, Zea Mays
ggatcgtctattgcaggaagctcgaaagagggttggtgatggtaaacctcgggagttcaccattgatgagaatgatttggtttgttttagtggccgtctttgtgtgccttagaaattagaggtgaagatggatatcttgagagaagctcataaaacgccttacaccgttcaccctggcgaaaccaaaatgtaccgagacttgaagcaaaacttctggtggaagcggatgaaggttgacgtttctaagtatgtggccgcctgtgaagtatgtcagcgcgtgaaggccgagcataagcggcctgcaggtttactgaagccattggaaattccagagtggaaatgggagc

SEQ ID NO: 10086 - DNA, 587 bp, Zea Mays
tggggtgcatcatcgtccttgcgcgggatgacattgtgattccctgtcgcgtttatctaggttagagccctactcgggcgaggcgaaagtcttcccgaggtgttcgacgagccaaaccattgatgtgtgccatagttgatggagtggccgcccgtgggattcgtggtggattaggtggacgaggccgagctcaggcgagacagagaatttacccgaggccaaactcagtgtcgggcaaggcgaaagaatcgcccgaaggccagagtcagcgtcgggcgaggcggagatttgcgttcgagggccggtccgctttaccagtcgtattaggtgtcccatcgggggatggaaggcggcatgcgcgcactgtagcggatacataatcatgttgttgcgccttgatgtgatcgctgtcttgttagccagcgtgctcttgttgccatgacgtggtgtaggtatgcacatgaaatgcgggtgttcccttcctattttcgggcacttttgccttatctacctgggattagctcaggcgagacggacggagcggtagcaacctcgggcgaggcagagttctgctcgaggtgggagag

SEQ ID NO: 10087 - DNA, 572 bp, Zea Mays
ccttttcaacgcatgtgccctccattttatagcctaagaggagcacgtacaagggagatgaaccccaataggtgggttcaggactactaaaatatggatcatggagcgacggatagagctggtggaccaaggtcttcttcgacggtgggcatgattcttcttttggtcgccatgcgggctcctctggccagactcgtctttgccccatcttatcaacgtgtggatgaaggctctgtcataggctgtgacgtaggctggcttgtcgacttgcgtacgggagcaggttgacaatgtcatcctttcccctccacctgtctccatcgcctgcctctgtagcggaaatactagaagtcatgatgggagttgcccacgcacgacacagtgggtcaatggtcttttcctcggtaacacacatgttactgctgtgccccaggccttgcggattgcacacaccgcctacatttaatgcggggcgcaatgccgcctagcagtggtgtgaacaggcgggcaccttgaccatctctaatgcgggcagaggcccgcgccaggccatgcatgatagcttatgtgat

SEQ ID NO: 10088 - DNA, 874 bp, Zea Mays
cccttaaccattatgatagaggccatttcgcaccaacaacaacaccctagcaacaggagcacacaacagctctgacaagacgagcacacaacagctctgacaagacgagcacacaacaaaaagccacccaacacaacaaagacaatctgatgaaaaggcaaatgaacctctgccacaaagtttcaaaaggcatgaccttttaaactcaaaagcttcttaaggaggtctggtggcaacaactcctttagatgatctgcacatgcttgaattgaactctcgttgggcttcctgtcaatcccaacaatgccaaaatatttaaacgcaccacgctgagcaagacaggcacttcgacgaagtgacgagctattataggacttacaccgacacctaattgtcgtagtcgatggcaaggatggagctaaaggagggcatgcaaggtcctcatccactctagctctagtggatgaataagaccttgtcgctatcggaagatcctctaccagtcgaggttttgtattgttcaaccatagaaagagaaggaccatgcacaaccaaggtagcttcctcatcatttggtgcgtcctccatcaaaacaggctttgtatagccctcaaccatagaatgagaaagaccgtcttcgatggtggtaagaaagatggggtcctcaaaagtactttgcggtttgcgcaaccaatgcagcttcctcatcatctgatgcatcctccaccacaacaagatcctcgacatatgtgacaacctaaagcaacgtggaggtctctgaaggcacttcaatggtctgcttggtggacatcatttggcgagaatcaacttcaaatgcccctacgaccacctcattagtggtaaggtctgtctc

SEQ ID NO: 10089 - DNA, 659 bp, Zea Mays
gcggccggcttcgtgtgggcagggctggcaagcaggaattgttgtcctcgtcggctggggcgagtgcaggtgagggggagttgcgaagtctttttgagggtgaggagcttaggataatgctatttaactatagggagatgggaatccttccgaaggttgaaccgatgtaaggtgtgatgccctcgctgtacatatgtaactatagtttgtatggtgaggctgtgcgccatcgcgcttccggctatgttcagaaaggcattgcgcacttggtctagtacgtttattatgttggtccggctgcgcctgtagtcggtctttgcgcggacagtttggcgtagggttttgcacgggtagtcttttgaggaagacttcgatttttcgcacttgttgtgctagtccggctgcacccttaggcgacttttgcacggatagtctttttgaggaagacttcgattttccgcacttgttgtgctagtccggttgcacccttaggcgacttttgcacggatagtctttttgaggaagacttcgatttttcgcacttgttgtgctagtccggctgcacccttaggcgtcttttgcacggatagtctttttgaggaagacttcgatttttcgcacttgttgtgctagtccggctacacccttaggcgactttt

SEQ ID NO: 10090 - DNA, 605 bp, Zea Mays
ggaggacctgacctctacggcttccgccggagcggggaacccttcgtccgttggcgttccttcccgccctgatgacgtcgaggcgagctccagcgccctcctccgaagggagggcgccgtcgcggcgcccactgccccgacgaccatgccgacggggcatcgcaaagggatgtcgagggcgaacgagtcgtcttctactccccctgcgttggcaggccgcgagatggtgtcgcctcctctagcgccaactaatccggcagtgcgccacgaggaggttttaccactgatcacggatggaagcgacgtatcctggggtgctcctctcctagcccccgagcgggatgtggcagtttggtcgacatgttccgctttcttgatcctgaaaacaaggtggactgatctagcttacccacgggtaaaattttcttaggttctcgatgttccatgtgttagtcagaaggttgtcgtcgctgttcttgagtcggtaggctcccgggcgcatgatctgggcaatgatgtaaggtccctcccaaggcgtcgagagcttatgtttgtccttggtggtcattacccttcgcagtatcatgtctccgacgttaaatgac

SEQ ID NO: 10091 - DNA, 1463 bp, Zea Mays
gaaaaagggcgcccgcgcccgcgcgctggctgttttgcgcagagaccctcacgtctttgtctaacagcgaacgagccctttcactatttaacacagtcactgatgtttgcataaaagtccttcctcttctatctattctgagtttaaagtccccgacgccgttcacacgcggtcgtgctctggcgagcacctgtaccggccgaacggggcaacggctgggttctccgagcaacagacaccgaattggatcgaccctaagcctttcccccaacccaatttcatctaagaccacctaaggagcactggccacggcaaccgtgatcatggcggctatacggtcgtgttcccggcgaccagaggactcctagtccaattggatggtccagtaagcatcgcagacatgtgagagagcttaaacgagggagagggagggttggactgaccggaaagggggctggcctcggcgaggttagttcgcggtgttcttgaaccgaattggggagaatgcgcaattcgggcgtgctggtggacgatcgagggtgggagcgggtgctacagcttcacaactacatggcgcagctacgggcgaggtcaatttatagagctagcgagcggtggccgcgaatttgagcaagacgcgcggcggccggagggaaagaagaacactggcgcaagtaaattcgtggcaaacggcgtggcaatctccccggcgacgatgggacagccttaaggtgtcacggtggtgcggtggaaaggctaagccacgcggcacatggccgggaggcggcggtcaccggcgagttaatccgctcagccgcaaagagggagagagggccacgggggtcaccagagtgatcgccagctcaccgtcggcgaaggtcttttaccgtgtgcccttatctgcccatcccgtgcacaagtcgggccggcaacggcacgaatcacggcggaggtatcgtcggcggtgagagttccgcgctggcagcctgatccaatccaggctactgtaccatcacgagtttcagtcagatgaaactgacagccaatgttgaactcgaatttcctccaaatttactgtggtgactgatttaagtctctatactaaagttatagacctatagttcatcttcaactttgccatggagctcaccataaaatagttaccgaatccaactcaaaatcaggttcaaagtctgcccaatttcactgttactggaatctcagacttaagatgtcctgacagcctgactttgagggtgattatctccaaattctttacaagaacatggcttgcactcttaagcaaaaatgttctcctttgtttggtctacaattttgatgtggtgacctagggcaaaaaccctagaatttgaaagatgcaaagctccaaagttgagccaattctctgattttcagacttagaatagaacctaattgaggtccattttgcatttaagtccaaa

SEQ ID NO: 10092 - DNA, 495 bp, Zea Mays
aaattagggcgctacggtggctaatcggaggcgggagtgggtgctctgggttcgtgataagctaacgaagctgtctgtgcaatcaatttatagcagctggccacggttgtctcgaatttgaaggagatttggatcacggtggtgaccggatgttgcactggtgagcttgtcgtggcattcaacgacactatgactcaagggcggtaactcttagcttgccacggcttcgagtacgtggtgaaaagactacggcatggcgcaatcgcggtgaatgacgatctccacggcgacgaccgtctggccatgtcgctgcgcaagtgggtacggcaactatgcagtaacagtgccccaactttatcccctgcacgagatctttcactttatgtaggtatccgcgcgccaccgggcacgaatcgcaacgccagcgaggatcatggcgcaggatcaccggcggcggtgcaccgaacctagcgatcttcgtcaggttactgtacc

SEQ ID NO: 10093 - DNA, 524 bp, Zea Mays
cgcggcccttggatctaaatccaacggtacggatataatgaagatgagatcttgccgcagcccgatggattggagatctgcggtccttgtttaatgaagccaaatctcatcctagccaagggatcgtagatctatggtcacgattcaattgcacgaacgggtgcgcgactgtatgatctcgaccgttgcgcagaagatcaacggccacgagctcaaacccctccgtcgacggccaccctacggcggtgcactctaaaccgcggcggcgccatagccggtgagcgcgaaagctctaatccccggcccatgtttcaaggtaaacagagctacacacataggagaacagcgcagagagtagggaggtgaatttaccgaggattgggcacacaggcgggctgaccacgacacgaggcggcttgacggcgttccgccctctccggcgaacaactacggggcacgcggtcgatgattcggcacgcatacaccacggatggttacgcgcccgctcggtgtggactctcgac

SEQ ID NO: 10094 - DNA, 781 bp, Zea Mays
ccagccgccgcctccccttttctctcctctcctcccctctttctctctttactctttcatttgttatagccgccgacgccttcacccttctctctctctctcaaaacacacactccaaatccctcccaagctatcaaatctttgtggagtttgttggagacttgatcccctcggactcctccatcatctctacactcttcgttggaattttcatggtcgattcgacagatcgaagtattgtctcattttccccatttttgactcgatccaacaccgttcttgattatcttaagtatcttttcaaggatattgtgtagtttaggtgcttggcacacttaaactgttttcattgtctcgaacattgtttgagttaagtagtttggtattgttcattgtagttaaaccgctcacatgaacggttgaagtgcatgctcaatatcatacgtgtctttcctcaaacgtgttcattaaaatccttgaacatcgattacctctctcaccatatgttcttctttttatcttaaggatggtgcgtcatagaaatccgtctgtagttgagtccgactcagatgacgacgctccagagattcatgaagaaactcctcctcggtccagatccaagcgcgagcgcagatctgacaatgtgctgccaggcggtgaggcctcagggtctcatggggctcgcggtcgaacgacccggaatccctccggtcggtctcgacccgcggcaaatccacaagcctgggaggctaccagcgatgatgagggaggaaaagatgat

SEQ ID NO: 10095 - DNA, 540 bp, Zea Mays
cgacccgttcctcactggctgaagctgctactcgcaccttgctgcgtacgtcgtcgtcgtcgcgaggagatctgcccctgcacctagctcgccctgttctgggttcgccgcagtgtctctaattcgtcggttttgctctttgctgcacgtgctactcatcggagactcctcgccatgaggccctgttgttcgtgaatttcccttaccgaagcattattcgtgaagccatgccgtcgtcgccgtttgtcacctctgcgccgcgtaagctgttgcccgccattgctgcgtacctctgcttgccaccgtgctgcgcagtacctcgccgaaactcctgctgcatgcgtcgagaagtcagccacctggtttgttgtcgcttgacactgttgtaactactcgcccgacgtcatcgccattcatcgttcaacggatttcatcaccgcgcaacgaccacacccttcctgctgctgttcgctgcgacttgaccacctcatcgacttccgtgttggtgccctccttattgccgctataaatccatccccg

SEQ ID NO: 10096 - DNA, 374 bp, Zea Mays
cttttttccactcttattttaatgaacaagcaaccttaaaaacaagaattcgtcacgtcactcttattggttgatttctcagctcctggaaacatcttcattgccacgttattttcatcgtgtcactccaccatgccgagtccctattccaccgccgttctgttctcctttatctcccaccactcaaaactctctccatgatcttttcatcgtgtgactgtgtggaggcacttcctcttcaccggtgcctagccatagaactgagcttgtcagtgcactctgctcctctggtgctgctctaggttcagccggcgtcttcgtcacgttgccggtcggcaaagcttgcctaggccccagctgtcgctcaccttgac

SEQ ID NO: 10097 - DNA, 357 bp, Zea Mays
gggaatgtgactgagtacaattctcggcccatttaaataggcctggtcggtccatggcccagcggcgagctcgcgtacaattcgcactaccaggctgcgcggctgctgcctgctagtagtatcaccacagtgggaggcgagcattttagtaccacatcgacggaacgcagtagggtgcacaccaacggctgcattatagaggtccggaatgccacaggcacaaaccatgatccttcaggcagttaaagggacatgatgagcggtatgatctcgcaactgctatgcgagaggggtgtctgccccaactacgcctgttacgacaacaggcaccccaatgatttaccgtctgatcccgac

SEQ ID NO: 10098 - DNA, 656 bp, Zea Mays
ccagctgaccccaacgagtgtatccgtgcaccagctgaacccaatgggtgtgaccttgttgaagctgaccccaatgggtgtaaccttgttgaagctgaacccaatgggtgtgatcgtgcaccagctattgtttgtatttttgacgaggacggagaagagaaaagaagaagttccgctaattcgtaagaatagccgacgttacagaggtagtaggggggatagtgatattccttctccagctctgtctgctcttgttagccttcaagaattatccataacagattttgatcaggccctcgaggatgtcattcctgaagatatgctgtcggagccgactgctggtgatatgatggatgtttgctctgaaattccagacgtgggattagaggtatcctgggcagtatctcgcgcatcgtcgaccttggaaggtagtcttcggtgtcaagaagttggtcaggattgctcgactcccatggaggtgattgaggatccttcagccttagaggtgattgtctcagaaaacctagcccccaagggtggtgctggcggttacccagcccccgagggtgtcgccggtaatgatctggctcgagtgggtagcacaagctgcaacccagccctcgagggtgttgtcggtagtgatccggctctggtgg

SEQ ID NO: 10099 - DNA, 604 bp, Zea Mays
gcagtagcagcagatgtgggcggctgatgtcgtcacgtcagtgtcaaagaactagcggcggcagagaggcagggacctagcagcggggaggggaggagccgaacctagttgtgcagccgtcgaggattaagagccgtagtggctgggacctagcagtggggtaggggaggagccgaacctagctgtgcagccgtcgaggattaagagccgtagtggctgggggacctgcgtccctagcggcggctgggcgatctgtgtcccgggcgccgacggctgggggatctgcgtgcctatgtctgtagcggcgcgtctggcggcgagacgaggaagaaatcaatttacgtctgttttttatcgtctggaatacgcggtgaaggaaaaatttggcgccagattaattttcgggagctctcaggagttggaatactctagctaaatatattgataaaataggataggatagaaacttgataaatttgttaagttcatttcgggagctgttggagagcagatttaatactatttctctaaatcatcaatttaagaagtttttttaggaactactggagatgctcttagtcactgaactttagtcaccccaaac

SEQ ID NO: 10100 - DNA, 716 bp, Zea Mays
gctgagagcccgtccgcgctgccgtcgtcgatttcggtcgtggttccgttggggactcaaatccgggtggtagccttccgccattgtccctgtcaggtgctcgtggcggaagtgagcgtgatcggcgattggtgcgacctcaattgctcaccgacgaagagcaccgagcctggatccgcccatcgccgtggcctacaccggtcaagcgtccatttgcagtaagatgcatacctgtgtgctcgttatactccgtacttcgtgaaaaccctgagacccgttggaattggtgcaccatgtggtcgattcaccttgctccggcgatcccccgtcgagaacggtggcggcgccgccgaaattcacgtcgggtagaagggggagcggctcctagccgtccgatctggacgtgtggtcaggattagggagggcgtgtaccccttcgtcccattaagtaacagccgtggatcccagatcctgtggctacgactagatctctttatttgaaacctaggtcgtcagatccaaaaccgagggcctagattgcatactgatttgtaaagtctgggatctaatcgtggcccatgaaatctaatcgggcgactgatctcgtgcaatacccctttgcgcgcgcaaattgctaaagagcccctggaacctttataaattaacccgccgtccattagtcactatgcgttgtgtctcgggtttcttgtcccgag

SEQ ID NO: 10101 - DNA, 449 bp, Zea Mays
gtttgtcgagggaatatatctgagtggaagtggagatgttcctaggcacgattgctacgcgggcgatggaactaaagcagagagagagagaaacgagagcgggtagaacatacatatagtgcgctctttgctgccgcctgccggccagccgtcgttgccccctccccgtcggccgcccttattcccggtcccatcgctaacacacaccacccagcacttcctccagtcctagctagtgctccttgtctcctctctgatgtggaggtcaccgcaggatgataccgcaattatgtgttttgtagctcacagcctcccgccgtacgtacacatgcacgtaactagcagtagccatcgtgtgtgcgacgtataagtgcaatcatccatgtatctaaattaagtactatcttattatacctccctggtagcgccaactcccggcacttatttct

SEQ ID NO: 10102 - DNA, 640 bp, Zea Mays
caaggactggcacccttctttggcctaaaccaaattcgggatctaatgaacgtttcccccaacctaattccaagaatagttaaccggttggctttggccatggcgaccgtgggcatcgcggacagttaaacgcgttcctggcgatcattggctttctagttcaattgggtgggtcgatgagcatcacaggcacatgagaacacttaaacgagggagcaaaaggtttgaattgacctgaattgcactggccacggcgagggtgttcttgcggtgggttagagaagatttgggggaaattcgaaattcaagctctcggttgcaagattggaggcaatactgggtggtgtggtgcgtgatgatcttgcggagcttacggagggctcaatttatactaagcgagagtggtggccagtaattggagcgatgacgagcggcggtcggaggagggaaagttcactagcgcgtgtgattggtggcaaaccccggggcaaggccttaggtaatagaaggacggtgtgttgcgatcgactgcaacgtggtaagatggctgacggcgtggcataactggaaagaacggcggcacgccggtgatggacatgcggccacgtcgccggtaagtggatgagcgacagagtggcta

SEQ ID NO: 10103 - DNA, 737 bp, Zea Mays
tcggagggagaatgacatactaactacagcactaggcaatcctaaacacactggacaggctcggggaatatcttctaagatttcttggagagaggcgtttccagagtatgcaaagtcatataggaaacacgagaagtcgaaaaggacccttgaagagactattgatgaaagggtacaaaaggctattaatgacgtgatgaagaaaatgaagaaaacataatgcatatcatgtgaactcaagccaggccacatgagtccacctctagtacctagcagcgtaggatctgtgcaagacttcgtatcgggcaccaagtaccctgtagacgatattgttgaggacaagccttgctttcttcatattccaatcaattgatctgggacaaaaacaaaacaagcttctactggtttggtaaaaccaggacttgttaactaccaggataatcctgtcccgccacactatgctatggtccaagttctagagatcacagacaatggttgtgaagattgggagatagactttccagttgaggggatcataactttgcaggaggcaatgaatgagttggtcctttggcatcaacgcgacatcaagttgggtgatgagccgatcttaagccgtctatcgcgtcataagtcaccaacgccgaattcaacaccaatgcaacagaaagatagttcgatcattccataccccatggtgcaggaaaatatagcaccgacctccacaaaaaccgttg

SEQ ID NO: 10104 - DNA, 549 bp, Zea Mays
tgaaccaacagtacagatgcatgtattgtacatttagtagatgtagatcaaacccaactctcaaagcaatatgatggtatggtccagagcaaaggtggaaggagcgaattaacaactccatttggaagtctggatcgtcggctgagattgggagatagtaccctgctctttttggttgtgctgttgtgcagtcgagataaatctgtgcaggtgcagtgtaaggggaagagttagggattgctttgtaatgtggagactggagagaggtcagagaacctttattttagtcttgtgatacatttgagtttgggggttcgtctacacgtctgctttaaactggtccaatatcatctgtgaactgtggtgtggtgggggcggcgattcctacagcatcctgcagaagcttggtcgaattcttttcatttgaatgcatagcgtgtagctaggggacatcctaaacatcatccaaaagcaagcaagctactaccttcagatcttaaggtctttatatttaagtttctagatcaccttcagcttgttgttctagac

SEQ ID NO: 10105 - DNA, 726 bp, Zea Mays
ccactaagtgaaaatattttgtattagcatcaccttgtaacaaacccttagtattggctctttgataccatttaacctcctcttctcttagtaattctgcaagtctattttgcaagaattgttttaagtcaagctcttgcgctgacaaaacagatacttctgcttttttatccaacacatccaaactgttcaaaattcctttcttttcttttttgtacgccccacttacattttttgcccaccctcttaagtgatgcctaagcttcctaattttagcttgccaattctccataggtgactgacccctagactcgtatgaccgaagttctctaaccatatcgtagaactcgaccctcagaagccaaacaagctcgaacttaaaagaatgttgggaggaactagagtttggttccccagaattcagtaatagaggagtatggtcggaaatgtcacggcttagggccctcacagaagacaaaggatatttttgatcccactctgtggttaccaggattctatccaacttttcatacttaggtctttcgaggttatttgcccaagtgaattggcgaccagtcatctctagttccttaagacatagaccatcaataacgacattaaaaagaaatgaccaccgatgatcaaaattgtctttatttttttcgctagagaatcttaagatattaaaatcaccaccaatcacaagaggcagtgtctcatggttgc

SEQ ID NO: 10106 - DNA, 686 bp, Zea Mays
tttcctttccacacccaactagcagccaatagaaagaggagggagattattcagtccaccgcagaaggtgcgctagctgtgaagttcctgagagccgtaaaaatttacagttcctgttgcagtccaccgctgtatcgtttgtgagagctgtaaaaatttacagttcctgtttgcagtcgcgactgcggatagccttagtgccgagctccacagacgcaccgcgtgttacacgaccgcacgtcgcaccgctcaccactctctattcctcttctctagctctgtctactctctgtgtcatgcccagtgtactgctctctctgtatctcggccaccatggcgcagaggtgcctggccgaggcagcccctgacagcgcctatgaggagtagccccgtggatccttaccaccggcgagtggatccccacgggagggtgcgccgccgtcggtcggggtgccgacatgggctcttctgtgttcggcttgagtgaaaggctaacggtcactacaactgtccatgtgtgcctttgcaccttggttcttcttctacaactcgatcccatcctctgtgaatgaatgcttgtaagaaatgtgacttgatgtaatttgcggggataaagttgagtgtttatgtgatttgttgggtgcaacgttgtctttctgttcggctgttcttttgttctttcactg

SEQ ID NO: 10107 - DNA, 549 bp, Zea Mays
gagaacttgtccttagacgtcttgttgtttagcatgtggtagttgatgcaaaaccttttggagctctctactttcttgactagcagcatcggtgccgagaacaaagtgcttggctgaatgatgccttgctccagcatggctgcgcactgtatctcaagcttgtccttctatagttgtgggtagcaataagggcagacgcccaccaacgatgtacctggcagcaagtggatcaagtgatcatagggacgcgcaggcgcctgtgaggctcgtcgaaaactgcacagtactattagaggaggcgagtctaacaacggttggtggtggtcaccggtgatggagcagagcaccggttgtggtgtgtcgtcgcgaggggagcctatgcccttctagaggacgcgttgatcacccctccagaataccatgtagaggacctcgaaatcccataggatgggccccaagctctagaggtagtcgatgtccaagacgaggttgaacccatctaggtggatgtcgaagcagctggtgatgaactcctaaccacacatggct

SEQ ID NO: 10108 - DNA, 828 bp, Zea Mays
caaaatttctggacctgcgacaacctgggcggcctgctgggacccgttacaccatccgcgcaaactctattgaccgctgctggtgggaccaggccgttggtcatccgctccgactacctcgccaccaatggcggaggtcacccacggactcgggaattccgttgttcaaactccgtcctccgcacccgccgccgtgaactgcggactcggccccggaactctgggctatataagtgcagggtgccgcaaacaccagctcgtgcaaggaggcaaacgaagcagagagagcaaagcgcagagggaacatggagggcagtgaggtccgcggggcttcgtgggcagcgaatttcgttactcgaatccaggtattagggctttcctcgagttcacctatctccctacgttcgattacacttagccgcggtctttagagcatgctggggcacggcattggctgctctccgacgagcgcaccaccgcgtcggggccctgtgccgctgcgccgaccgtctggggaggaagacgccctctgggccgtccgttgtgtaatgagcgacttagattagatctagccgtgggtccgacatgaaccattgatcacagatcatggggctcagatagcacgggctctttaaccacgatgacctgatctgagccgtccggatcagatcgtgcggccctaatttctccataccccttcggccaacctttttgctaaagagtccctgtagtttatagaaatcaacccgccatccatgtgtcactattcactgtgtcttggcggtcttgcgagttagccccctgcacatttcggtaattgaggcccag

SEQ ID NO: 10109 - DNA, 585 bp, Zea Mays
gttcgtcgaaccgcggggaagccgtatgcgcactcaaaccgaggaggctagcactggaacggcgggaattgctcgccgaccctcaccctcaccctccgccatgaagccgccccgctccgtgggcagactcatcaccgaaccaatcgtgagtacaaaccttctgcctaggttcgtcgtcgtcctaactccgttttgcacctaacgtctcgatcaatcgtgcgtcgtaggtcagcggggagtagcctagccatggcgtgctgccgcagcctcacttttggtcgccgacgttcatctgagggaaggaagacgtgttctggccgtcgatccgcaatcgagcggctaggattagatattaccattccttttcgtattatgatgctgagacgtcgatccttggatcaacgacgcgaatcaaatcaagtagtaccctcctgccgcgttaaatcaggaccgtggatatggcttcagatggccatgattagacatagcgcaccagttcggatatttaaatcagattcgttgatatggaaatcgaaggcttgagttagatcagtgatgtgggagctcctacaccgtgaatctggg

SEQ ID NO: 10110 - DNA, 505 bp, Zea Mays
caaataaaaatcccgaatttgttttcaaacaaaaatgtaaaagtgaaagcaagaagggaacatatctggtgcaaaccaactcttttatgcaaccatgcaaacttctaatttgaaccacctctagttgcatgagtcaacgtccgggtctaaaaacaaaggtccaaagtaggggactagtacagggttgcactggcaatggggcgaatcgaaagagagccacggactgccatgggagtgcaagcttttcactttcaacagttcccaatcacactctgcttacatggcgttccagaagaaagagccgatgcaaacctttccgggttttgcatcgaccccgatgtcccaagtgctcgcccagtcgccaaagtacgaagcaagtgctcgacaagtcgctattgcgtttgcgtgagcggccgatgaaacacgccactgggataattcgcgccacgatgtgtgtggcccggcgctgtaggaccgtggacccgggcacgtcattggtcctatt

SEQ ID NO: 10111 - DNA, 378 bp, Zea Mays
gggcaggctatatgaggtaggttgaaatctggtttgatgttgggttggaatggatggccatcatgaatggataggttagaatctcgttttgaaatagacagattaagcaacctatcaagaatacttaggttgtttgtgtatggccaagttggtctaagtcaccaatttaggcttaagtgaattaggggtatggccttatactttgtgccagtattaagtaactcacactagattgggtcatataagcttagataggatctagattagactgaatatgactagattaaactagttaagatctcattattttggactagatcatgatcatggtgggataaatcaagtggtttggataatatgaatctttcaagataagat

SEQ ID NO: 10112 - DNA, 657 bp, Zea Mays
agccctgcaaaatggtctgtcagacactctgatggtaaccaccatggtacagtaactgaaacagattacaagttcagcccccctcgccgccggtgacctttgcgccgtcgccgcgattcgctctctctggtaagtggataaccacggcggagtaaagatcttggcaccagatcagctcgggctcggtcgcggatgagtttcaccgtacccacttgctcgtcgtgcgaccgggatagacctcgccgccgttggccgctcaccgctatgcaccacatgctaaagcgctagaccacgtcgcagtgaagcaagtcatgcatgcccggtgattgccggagagctgctacggtgaaagccactaaccccaagtgccagtaacattcttcctctccgaccgccagcgcatcgtcgtgaaaatggacgccaccgctcaatcctgctataaattgccgaccccgcctgctccgctaggtagttgtgcaaccagtgaagcaacccgtgcctcgaatcatcccctagaactccccaatttgggatttcccccaaatcactcaagaacaccgagcggtttgacctcgccctggccagcgcatctcaggttcgttcatgtcctctgagtcctcgtttcagtatccttggatgctcctgatactctctgac

SEQ ID NO: 10113 - DNA, 919 bp, Zea Mays
gcccatcgctcggtatttctaggatcgggctgaccataacgccaataacagattctgtgccgatctcctcggtgcagactcgcctcctgctcctataaatgtatggcatcgtgaccccgtgccatcgcaccgcagcgcctggtattgcaaacagaccaagggagagagaaagcttgccgccatggaggaagtcggagttcggtcgccgccggggcctccaagctttgctggggtgttcgccgtgccctgaggttcgtgttcatgggtgcgattgatcacgtagggcttcaatggcgccctaattgctcatcggagcatcaccgtcgccactcaccgtggcctggccctactacgtcgcgttttcgggtgagttcctcccccactggttcgcgttgctctctgcttcgtgtcgcacatgtgggatttggttgggagctctaggttgccggggcgtcgaggtccggtggcgcggccatggcgccgccgcggttggggcaaggcgtcacccaactcggactgaggaagaagaatagagcttggtcgttggatttggaatctgtgaccacaattagttttgcggcttgaatatatctgagccgtggggataggcatcaaccgtcacaattagatctagatgagttatgggttgcggccttcggatcgaatcgcggcggccaagatctgtttgcgcgtaccggttcggtgtgtgcgtggtgagccatccgatgcagatcgggcgtgggagaatcgatcaccctggtttaagtcctgtccgtccatcgtggatcctgcggctagtactgcgtacccgttcatatcgggccgatctaatctggtcggtcagattgtgatcggatggctgataatcaaggatacccctttgtggtgtaacaattgctaaagagaccctagggaatca

SEQ ID NO: 10114 - DNA, 717 bp, Zea Mays
gttcaagaaagctcaagggggagatacccacatactagttaccatcgacaagttcacaaagtggatagaatacaagcccatcgcctctttgacctcagcaaaggcggtggagttcaatcaggaaataatgtttaggtttggaatacctaacaacatcattaccgtcctggggttaatttcactagtttggaattctttgacttctacgagcagaggagcatctagatcaagtatgcatcagtagcacacccaagagctaatgggcaggtggaaagagccaacgagatgatactcgatgcactcaggaaaaaggtgtttgataaaagcgagaagcttgtagggaaatggatcaaggaactgccatatgtagtctggagctcgcgaactcagtcgagccgagctttacatgaaaacaccccattcttcatggtgtatgggtcggaggcagtgctaccagccgatctgatctttggagcacccatattaacatttgaaagcatagctgaagcagaagcaaccaggctagaggacatcgatgtactagaggaagaacggctaaatgtagtcattcagtcggccaagtaccagcagaccttgaggcgctatcacgacaaagcagtacgacatcgatccttcgcaatgggagatttggtcctccaccgagtactgacgggggagggacgacacaaactgtcaccaccatggcaaggaccattc

SEQ ID NO: 10115 - DNA, 453 bp, Zea Mays
cctatggatgaattaaagagacacacttattgcaagtggctgataaaggcaaaggcgaaaacatcgtcattggtgatcctcgcacgtcgaacatattgcaaggagggattgctcggaaggctctagacaagaagactaacaagtccggaggcggcgggggcagactcaattgagcagccgagcacgaatccctaactcgagcatcgcggattgttcgccatatgtgcgcggatggtctggtgctcatgcagacggtccgactgactcagcgggacagtctacccatggccagaggcctcagcctccacacaaaacggaaaaggagacgcaggagcaaagcacatataacacacatggtcagttggtcaaagctggccctatttttgaccaattgctctccaaatacgttagcaagaaggtcgttctacgcgatcgacccgtggaacatacata

SEQ ID NO: 10116 - DNA, 1415 bp, Zea Mays
tgcgcatccaatcgtctgcatcgagggggttgcttgatccggcgaacgtgggaggtttgagtctcaggaaatcccccattctgtcttgtggtcttccaccattcggccgttgattttctagatttcgagtgaggacctcgatgagtcgggtttgattggctagaacgtgggctagatctaagggtaatggtggaggtgcggggaggtgggtttcactttcttctctaacgacttccccttcagctctttggggaaacccttctccaatcccagaggcggtaggcgtggttttatccgaagccatctgccagggaagagagtcactattatgcacatgcaaattgtttttaaccaagttattttattcattacaccatcacattacaagcataagactactacaggtggaattacacgagagcgttccccgaggtactagcgaattccttatctaaggtgtccccaaatgccttgagaagatcatcgaggcttgctagggatacatcctcgtcgtcggaccaatcatctattctggggggaggtagggctagaggggccttcttcttcttcttcttctctgtctggcatccttggttggtggtcttcttctgtattttcttcttgggggcgagtttctttagcttcttatcatagtccatcttcaaagtccgataggcttcacgggtgttggcttcctcgccttctgctatgttgagactttcctggagggatgccttctcttgcttaagttctttgacttgctgctcgaggctttccactcgggagtttaggtggttgcagtgggaggagagctcgtcatagtggttgtcgagggtgtggaggtatctggccatgtagacgatagtggggtcatcttctgtggggtttcctcctgacagagcctggagtcttttcctccaggtgggggtgtttttgttgctgggtgggaaatatcggaggggggtctcggagatctctcgactatagttttggcacagttgtttgagggcttttcgagcaacgctctggcaagtgtctgggaagcggtgcacgatgaaggtaatttggaagggagggtggtttgggtagttccggctttctcccaagtagaccgccatagagcacttttctattccattttcacggtactccttccagacatattcaggattcttgcggatccccaagcgtagcgtgcaactccgaagaaggtgaggaaagccttcctcctctgagcaataggatgtcctaatcacccaggggttttccatctggtagacgaaaagaaaggtctattaatatcggggaaaaggggaagagtgtttcttgggggtaagaggtgttttcttgttaaggcaacttttaaggtcagggctgtggtctacggtcagtcctataggcttttgataccacct

SEQ ID NO: 10117 - DNA, 369 bp, Zea Mays
aagaaaacgccgtgaccgtagatgagcgcggacgactgtgattagctagcagatctggccgtcgtttgtgtagcggacgtcttagatcagatcggggatagcgttgattcttggtcattggatcaggatcggtagacaggaaggcgtggtcggctttgaaccgtaggatagagatctgacgaccgtagtcacgtatcggtttataatgttggggttctaatctgatccatcagtattgaatcggacggctaggatcgccctataccccttcgccgcgcctcttttgctaaaacgaccccgagttaaatagaatctaacccgtagtccactcggtggttggctgtgtctgggatatcttgtgagttaaac

SEQ ID NO: 10118 - DNA, 928 bp, Zea Mays
cttagaagcataccggttgggatgggcgcggatgtaatctgagccgtagaagtaagatcatgcggccctggtcgaaacataccccttgggctagggatttttgttaaagagaccccgccaaacattgaaaacaacccatagtccacgtaacagtagtctgtgtcttaggaactttctttattattaaagcaggacagaaatggcctctatgaggctatccacgtcgccaaaaattcttcacaccgttggattgtgaatcaatggcttctattcatcgctgtatcggtggcgtgtggaatatgctcttctcgctccttccgcttctcgagacttccatggttggcccgtgcagtgcatgcctctcctcgctccctccgcctcgtctctcttcgagtcccttcgtctctctgtcagctgcttcaccttctgccgctttgatcgtccattgccgccttcatcgtctgctctggtgtttggtgatatccatcgctttcttcgtcagctccacttcctcgtcgagttgctgcttctttcattggggtttctaagttcctcttgatattctcagaagtccacaccttctcgcccacccaccagcctctccgtcacgcgatgcttctaggaggatctccacctttccaggctcccatccgtcacccatggccgcacatgttcaccgctatgcctccgccgccagcagctccgactctatgccccgtgccccatgccctgtgcctgccgccaccagcttcacgcccggtgctccgtggcttcgccttggcgtgggtcggtcgtgcccgcagcttcgccgcccctctagcatcggtgcacagccgcgcctgcagagcggcacaacgctccgcacatagcttatgtcgactgcctcggcgtgtgctgcgcgggtccgcgcccggcttcgctttggaac

SEQ ID NO: 10119 - DNA, 513 bp, Zea Mays
tggtcgaaggtggaagtgtttgcgcgtgccgttgatctgggagttgactgccacgattagatctgggaattgggagatttcgcgccgttgatcctcctatgggcgatccagatcactggtattcataccctttcgcgcatacaatctcagttgtagatctcacatccaacgcttgtcgtagcgtaccgtttcacgtatgatttgatttaatctgggcgctccgtttgagatctgacgactgtgagcgcacggtacccctttggccgcactttttgttaaagagcccccgaggaaatcactaatcaacccgccatcctgagaacactattctctgtgtctcggaaatcttacgccagagccccctgacctatccagaaattgaggcccagtccagagatgattaaaaacagagaaataattatagaaattcgtttttaataaaaaaaacaaatctagaaacttgtaaaatgcatagaaaattcatttttaatccaaatcgatccattccaattc

SEQ ID NO: 10120 - DNA, 448 bp, Zea Mays
ctcgatattcctctcaaggacaatatcaaaggatggcgtcttgagtggttcatcgtggaaaaccactacaaatctctccctcctcggtcggggaggcaaccagatgtttgcacacctagctgggtagaatctcctactttttcagagataacagaggccaaagtattacttgctgagatctgcgtgctgaaggatgggggtctaactgctgaaactgtggttgatgacttcgtcttcaaaaacattcaagccttgaaggacatgatttaccttgcctacttgtatagcggcatcaatgattccacccgggttacaaacaggaggattcctaatgaagacttgctgagccaactggacatgattttgaggggcagagtctcaaatgttggtgctcctatggcctattctgcgtggaacccgctgccaaataggccattctctgaatttg

SEQ ID NO: 10121 - DNA, 574 bp, Zea Mays
ctcaaatggtttatctctgtagcagtagcattgttcatctatttatagggtggtatacatcttcctataaaatcacaactatgtcatccttattacagatagccctttgtaattgaggaaatataattttgtcatcttacacccacgacgtgttatatacgacttttgttctacctaaagaccttctttgtctcctttccactcggaaatggtcctaaaggtgtcaaagcctcgctcctccctccttcggttcctcgttgctttcggcttcataacttgtacgaagctttggttacacccttcgtcttcgaagcttccttatcctttggctttgaggccaaatccacaaaaaccgtcgctagatggttttgaggctcaaccatcgaaccttcgtatgtagcatactccatatgcatcccacacatatataccacacacatgttgtgctagtcctcaaccgtgacaacaatatgatccactctaccatgccattgtgcatgctaatgtccataggtgttagaaaacatatatagctagtcactcggcttctccagtccatcagtcaagacctaac

SEQ ID NO: 10122 - DNA, 532 bp, Zea Mays
caaagatgaagatgatctataggtctacaactttggtgcagaaggatgatgatgttgccatggaaaatttggagaaaacctgtcctaaacctcggctgtcaggctaactgaaaaagcttccaatggtacagtaccaaaatatcaacagaagcaggtcccccctcgccgccggcgacctcgcgcgtagattcgcgccgatgaggtgatgtgtgcccacttaagcccggataacgccgcgaggtaaaaagatcgtcaccactgttgggctatgggtactaatccggctagtcgtcgtgctcctttctgctttgcggtcggtccggataattcaccagagttggctgcccatcgaccgaacgccacgtgcctcaacaattaccatgtcgcaatcaccagtgttatgcacgtccaatgatcgtcggggaggccgccacggtgaaggccacgaatcaccatgcccgtgactcatttcttctctgaccaccaccgcgttgaatccaaattcacttgccaccgcttagcaatcctataa

SEQ ID NO: 10123 - DNA, 1089 bp, Zea Mays
caaagttgtagagctattatagaggaacaacttgctgcagagatctggatgtgttgtcatagaaatttggaagaaatctggccctaaactatggctgtcaggttaactgaatggagcatcccatggtacaatgtcttgtgcagatcagaacgccagcacggcaatcttgccgccgacgaccgatctctgccgcaattcacgccgccgccgttgagatttacgccaccagtgaccagataaggccgccaggtaaaagtcatgcgcctaaggttaactccggtgactcgtcgcggtacctctccccttactcaccgcccttggataaggattctcaccgtcgttaagccatcgccgttgtctgccgcgtggctctaactttccaccgcatcgccgtaagccttagtggctccccgttgatcgccggagcaattgccacggcgctggacaccaagccactgcgccagtactcttcttcctcctccgaccgccgcgcgtccccactgaaattctcggccaccgccgttgagccctataaattgaagcccccgccagccccgcaaggtcatcacacacccagccaccgaaaagcactagcaatcgttcgtcagagagcttgaattttagttttcccccaaatcaagtttccgccaccgcagaaccaagctcactgtggccagtcctccacaggtttaatcataccatccttgttcttgttttagcatctctgtgtgctggtgatgctcaccaactcgcccaattgagctaagatcccatcaatcactgggaacgtgtagattgttagttcatccgcgcgctcaccgtggccagagacattggtgtagttgtttatgaaattaacttggggaaaaccttcactaggccctgaatttggtttagaccaacgtagagcgccagtacttgccccaatcggccgacctacgtgcttgccggagctcgaccgcgctcgacgccgtcgtggatcaagcagtgtaaagaaatagaaacttagggtcctttctgcagttgtcagtgacgtgctaaatagtgcttcggtcccgcttccgattattcattaagccaagggccctt

SEQ ID NO: 10124 - DNA, 320 bp, Zea Mays
gtcagccgcggtactcctcccctggctcaccgcccgcgggtaaagttgctcaccgtcgtcgtgccatcgctgttgtccaccgcgtgtcctaaccgcgccaccgcatcgccgtgactccctctaaactccccgtcgaccaccggagttactgccacggcggtgaacacgtgttcactgcaccagcattcttccttatctccgaccgccgcgcgtcgccgttaaaattcccggccaccgtcgaagccgcctataaattgagccctcccctagctgcgtaacatcatcacccacccagccaccaacaatcgttagcaaccgtg

SEQ ID NO: 10125 - DNA, 429 bp, Zea Mays
gcacaggtggttcaacgggagagagaaagtgtactgggtggccgacgcacgtgcctgggaggctggaggaggaagaaggatggcggatcgtcgatctcatcttcaacggtttggattagatctgagtaacgtttcgcgttaaaccgatctggagcgttgatcggagatcgggtggaggctgagcgttccgcgctatttaaaaccttggccgttggatctagatccaaggatctgcgtagcgtaccgattcagggtaattgagatctaatctgggcccttaaattttgatccgacggccagatctggctgataccccttcagctgataaattcgcataagagaccccgcagatattagttatcaacccgccgtccctcgcaactgtacgctgagtcttaagaagttttgcaccgaggaccccgctctttt

SEQ ID NO: 10126 - DNA, 2161 bp, Zea Mays
cagctggacaccttctgcgccaacgtcctgctcaacttctacgcgaagctcggtccactagccaccgcgcgtaggttgttcgacggaatgccagagcggaatagggtgtccttcgtcacgctcatgcagggctacgctctgcgtggggagtttgaggaggcgctggagctgttccgaaggctgcagagggaaggccacgaggtgaaccatttcgtgctcaccacgatcctgaaggtgctggtcaccatggatgctcctgggcttgcctgcggcatccacgcctgtgcgtgcaagttgggccacgacaggaacgcctttgtggggacagcactgattgatgcctactcgctttgtggggccgtctgtcatgcgaggtgcgtgttcgacgggatcgtcgggaaggatgctgtcacttggacagctatggtttcttgctactctgagaatgacattccagagtatgcacttaatactttctccaaaatgaggatgacaggttttaagcctaatccttttgtgcttaccagtgcgctcaaggccgcagtttgcctgtcatctgccttgctaggcaagggcatccatggttgctcagtcaaaacactctatgatactgaacctcatgttggtggtgccttgcttgacatgtatgccaaatgtggagacattgaggatgcccacgccatttttgagatgattccccatgatgatgtcatactctggagctttctgatctcccgttatgctcagagctgtcagaatgaacaggcatttgagatgttcctcagaatgatgcggtctttcgttgtgcctaacgagtttagtttgtccggtgttctccaggcttgtgctaatattgcctttttggagctgggcgagcaaattcataaccttgctataaagttaggctatgagtctgaattatttgttggcaatgcactcatggatatgtatgcgaaatgcagaaatatggaaaattcgcttgagatcttctcgtcattacaggatgccaatgaggtgagctggaacacaattattgttggctactgtcagtctggttttgcagaagatgctttgagtgtgttccatgaaatgcgtgctgcacatatgctctcaactcaagttacattctctagtgtgctccgggcttgtgcaaatacatcatccatcaaacatgctgtccaaattcacagcttgattgaaaaatccacattcaataatgacacaatcgtttgcaattcactgattgatacatatgccaagtgtggattcattagggacgctttgaaggtatttgaatctatagtggaatgcgatgtggtttcatggaattccataatctcagcatatgctctccatggacgagccacaaatgctttggaacttttcgacaggatgaataaaagtgatattaaagcaaatgatgtcacctttgtgtctctcctgtctgtctgcggtagcacaggcttagtcaatcaaggactctggctgtttaactctatgatgatggatcatagaatcaaaccatctatggagcattacacgtgcattgttaggcttctgggacgtgctggccgtctaactgacgctctaaagtttattggggatattccttcaacaccatctcctatggtttggcgagccttacttagctcatgtgtagtccataagaatgtagctctgggaagatatgctgcagagaaggtgcttgacattgaaccacatgatgagaccacctatgtcttactgtcaaatatgtatgctgcagctggaattttggatgaagttgctctttggaggaaatcaatgagaaacgtcggtgtaaagaaagaggctggccttagttgggttgagatcaagggggaagttcatgccttttcagtgggatcagcagaccatccagatatgcggataataaatgcaatgctggaatggttaaacctgaaggctagtagagaaggttatgttccagacataaacgtagtgttgcatgacgtggatgaggaagaaaaagctcgcatgctatgggtgcatagtgagaggctggctttagcatatggcctttctatgacacctcctggccatccaatacggataatgaagaatttgcgttcctgcttggactgccataccatgtttaaagttatatctaaaatagttcaac

SEQ ID NO: 10127 - DNA, 390 bp, Zea Mays
ccaacttgcaggctgagtttgcagcgacatatcatcactggcaatggcgtgaagggctgccaaatcctaccaacttgcagttgcagctgaacacaggctaaattccggcaacacgggtgggaataaagtggttaccgaggcggccggatgacgaagttgacgaactgctcgatcatcgcttgcccgaagcagcgacggcggcctccggggcgcaagtacgtcgcccgcccgcccgcccgaccaccctaccgcccaccaaactctcgcagaccaaccaactgttcctcccggaattcctccctccgcacacctaaactcgccaaatcaactcagcccgactcccgccgcgaggtatcagcccgaattccccagcccgggcagcctcagatc

SEQ ID NO: 10128 - DNA, 1074 bp, Zea Mays
attatctatttcagactcagagcgactcatgttcagtgatctgaataccagtaaatccaactcaggcagcacaccaaggttttcttcaatgaaatcggtgtcaagaatcgataagccacaggtcttgctgaaatacaagggggtaatccagatctcagtagcttgtgaaccctatcatgagttaagaacgggaggtcatcgtcaatatcttcaatgaaacggttcctaggtgccctgtccagcaaagacacttccttgaaatactctgaaatgctgatcactctggtagaggataacttcagaggcccatgctttccactggaagatttaattgagttagtttaaaagaaatcacatttagaagagcacaaaaaagatgtattgaatgttactaggttcatatgacaagaaacttatgttttgtatcacaaaagcatatctgcatattaattaagtaatcattggctaaagctttgtccaaacacaaagaaagatgcattccaaattcaaacaatgtactaaatttgaaggaccacaagctaaaacaaaaattatataccgaactacacataaactatgtttatgatttaagcagaccaaaatatatgaacagagacaatctcacaagaaatatgaaatggtacacatacaagatgtagtagcaatgggcgtcacgtggcacgtatagatcggagacatcggcaacatcgacgacctcgaccaacatggagaaggcgcgcacaaggcctccagagcggtggacgatagaactaagcaaacgtgaaaggcgacctaaagccgtcatctcagccgagcgagcggcgaggaccgacgctgggaagctttgggatctcgggcgtactgtaagtaacataggatcaatgacgtaaagaactggcactaatttaacattaggatcagatactaatttaaacggtccaaccaatagatctatatgcttttttaaacggcgctggaatgcataactctaatcttaggtaaattttgctaggaagtgcatttgtagctgttgaaattattttaactgatcatcatgcaataaaatgatatgtt

SEQ ID NO: 10129 - DNA, 502 bp, Zea Mays
ctctctctctctctcgcccgcgatcggctatcgacgcgatcaccgccggccactgctccgccacatcccctcgccattacttgcccaccagctgaattggcgctttgcgcctgtgccgagccatcatgtcaccaccgtctgccctgagccatcccgtcgccaccactgtgtgccatcaccaccgccgcggcaagcctcgccagtgctcgccacctctcctcccccctccccggtcgcctataaaaggaccgctcgagctctacctttcttcacaccagcttcggtcacccctcttcccccttccccaagctcaatcgagccagcgccaccgccctctccctccgctccggtgagctctctctcccttctctagtggccttgagtcgaattggtttggctcacgagtttcaccacttcaccacgaacacggcgcaccctcctccctcacctatcacacccgtaggcctcgccggcgacttcaccgccgcgggcgcccgccacc

SEQ ID NO: 10130 - DNA, 609 bp, Zea Mays
cgacgctgatccagctcggtcgtcgtggtcgatgccctcacttacaaatagggggagggaaccctggtcgcgtgcaccctccacctgagcccaccaaaccattggaacatcgccaggagtggctcatcgcgagtagcagagggcgcggagtgcgaccgtcgttgaagaactgttggcaccattgttggggcttcggtgtggagttggggcgctgcattggacctcagggagcgcgttcttggccttggcgggggttgcggtgcattgagaccgagcgaatttctcgccatcgtcgcgtcatcaccgcggattcacccttcgtagtgagccgctgcatcttcaacacgtacctcagtgagcatgcccccctatcgcttcgcactatcatcctctacatgtaccatagggcggattggaggatagccgtagaaatcaccgagggcgcgtaatccggtcatggcgctcgcgcgggggataagcccggcagacggagttaggcgggcgtgactgtggccgttggatcccggggcgatgattgagattagaagttgcacacccgttcggctgggatctatgctgaccgtcggatattgatcggacgtgtacgtg

SEQ ID NO: 10131 - DNA, 273 bp, Zea Mays
attttcttgcacttgtcgatgttcttagatgtcagtcaccatggacattgcttcgaattctctaatccctcagtccaagcttcgacgtccatccttcactacttctagtccattagcacgggccctgcttgacctccatcttcgcaccgatccttttgagctccacatcttcgcatcacaagtcaagatcatagacatattgtaccacacaatggttaatctacaaactcaatcaaatccaaccatctcctttacaaccactcgtcacacttg

SEQ ID NO: 10132 - DNA, 763 bp, Zea Mays
cccgccggagctcggtaaacactcgccactggccaacctggaagtgagcaacaacttcctcaccggcgagctcccggacacgctctgcttcaacaagaagctctacgatgtcgtggtgttcaacaacagtttctccggcgcgttccctgcgggctttggggagtgcaacacagtgaacaacataatggcgtacaacaaccgcttcaccggagagttcccgggggcagtatggtcggagttccccgcgctgaccaccgtcatgatacagaacaatagcttcgccggagtcctgccagcggaggtgtcatctaagatcacgaggatcgagatcggaaacaacagattctctggcgcaataccggcatctgccactggcttggaaacattcatggcggagaacaactggttctcccatgggcttccggaggacatgtccaagctcgccagcctcattcagctatctcttgccgggaaccaggtcagtggatccataccagcgtccatcagagcccttgagaggcttaactacctcaatctcagcggcaaccagataacaggagcgatcccggcagcggccattggattgctccccgtactcagcgtgcttgacctctcaaacaacaagctcgacggcgagataccagcggatttcaacgatctccatctctctcacctgaacctctcgttcaatcagctcgtcggagaagtgccaaccacgctagagagccccgtgtttgacgccgccttcttgggcaaccctggc

SEQ ID NO: 10133 - DNA, 314 bp, Zea Mays
ctcgactacgagggttagccgtgaaggagaggagactgaagccactgagacagctccgatctccgaagtcatgagacaatctagattagttgtgacggagggagccattaacgaaggtacttctggtgttgaagctgagcaagctgatattgaggaagaagaaaatgctgatgaggaagaagaagattatagcaccatgatcccatcaaaacccagccacctggattttgagaaatctactatatctgaagccgatgtgcccatgatgatgaagttgggctacttcagagaagctgaaagaaaacttattcgtt

SEQ ID NO: 10134 - DNA, 587 bp, Zea Mays
tcgagttactacataaaatttggagcaaatctcccagccattcgctctgtcaggctaactgaagaagtttgcaatcgggctgtgtggtgcactgttcatcagatttcagaaaaatttcgtcggagataagatcgccaccgtggctggggatgggtctccagccgcggtaaaaatcttccgcggtgtggcatcaaaacattgaggtggcgctgcgcggttagtcggcggtcaccggaccatcgccgtggcgatagcgcgcgggtaagctcgccagcgcggttacaccgccgtgaacctcatccaactccggccatcggcctataaattgagcctgaatcctgcttcttcaccacatcatgcacacaagcacttgagcaatcgactcaatttcaccagaagaactcacaaagtccacaaatccattccgccctgttcttcgcgctgttgtgaaggactcctccgtggccagcactcatcgggttagtacctaccaaattgcttcctgttctagcttgtcttcaaccttctattgctctcggagctggtcaattaaactttatcgaagcctacactccggaacaccaaat

SEQ ID NO: 10135 - DNA, 1064 bp, Zea Mays
gtatgcctgagggggaccccccaggagcccgcccactaaccagggggaccagcgaggaaggcctgaggcagttgggctagagcaggggggccctgaggtcggtggacgagaaggtgctggagattgtagtagcaccctggccacatgtaaatcgaccccgtccaaggattgtagtagctatggccgccttgtggactgagaacttggctggaaccagcggacagtgcaccacggttaccaccggaggtccggccaccgcgcttgcctcgcttgccccgctactggaaggagtcgtcaccgccacgcccaccagtctgttgttgctagttgggtgaaggggacgcggctaggacgactaggatccgctggagctgccggtattggacagagcagcgagggcagcggccggtgcggcctttgccatcgggagttcctcgagagccaggtcatcacgaacctgcaataaattggggagtgggtgggtgcggcgcaggtgaagtccgagaacctggaagtgctcgttgaggcctctaacaatgttgaggaccaaagtccggccagagactggttcgccgagatcgtgtagatcttcggcgagtttcttgtagcggcgacaatattcagcgaccgggagatcgcctggagaaggagcggaattcttggtcggcataaagagcacgtgtggtgcgattgccaagaaactgggactctatagagagccagagagtgcaggcagaggcgtcgcgcttagagacaatgtcagctagggcatcagaaagagtgccaaggagccaagtgcggacgacggcattcatgcggacccaatcggatgactcgtggaagacaaagtcggagaggacgtgacgctccaaggagaatttggtgagcgtgagaaggaaggattcacaccatcaggcgtagaaggtggagttggtgtcaaggaagagcggaacgaaatcccggatgttggttactgcaacagcctgggcgtggagattgagcagcgctgctgcctcgtggtgaagaagggccgcataaagggttgcaggtgggatgtcggcggc

SEQ ID NO: 10136 - DNA, 681 bp, Zea Mays
tgccctctacgccttctacaagtcctggcccaaccccagcgactggaagctgctggcgtccgcgatcctgctcttcatcatcggggtcgtcagcttcagcgagaagccatgggcgctcaagaaagccagcatcaacaggctggcgtctgtgtcggccacgatacaggggaccaagaagcgcacgaggctggcggtgtacttggacgatcttctcttctccgattggtacagctgctccagagccaccgagaagagtagcagcagcggtagtagcctccccgcagccgcagccgcggcaggtgtgggttggcacgactgcttctccttcaccgagccgagcaataaggggcacggcgatcatgtgggcttgtcggaggcagataaagtctacatggtgctctcggacatgtcgctgtccgcggccgccgacgaccttgtgctgcgaggcagggctcgaaatgtggaggatgttcttcggcccctgagcaccaaggcggagcaggcactcaagcgctggctgcgtggcgcgtttgggctcatatacaccagagccaacctggtcttcactcgcacgtacctggtgtaccatgtgctggtggtgccgatcctgcacgtcgccgccctcacgctgttcgcgacgagcgacaagcacgggtacgaccgcaccgacgtgaagatcac

SEQ ID NO: 10137 - DNA, 415 bp, Zea Mays
ggttcaccaccgacaattcctgttccattgagtttgacccttctggtttttctgtgaaggatctggccaccaggacccctctcgtccgatgtgacagcaccgagccactctacacgcttcgcccttcatccaccagcgcgtccccacctcccgtcctggtctctgccaccacctccaccacttggcatcgtcgtctcggccacccaggacctgacgtcatgaccaagctttccagtagtctagattcttctcatagtaggggacattttgagggcctctgtcatgcttgtcagttaagtcgacatacttgtctcccgtttcctacttcgtcttctcgggctgagcaggcttttgacttggttcattgtgatctttggaccacccctgtaatcagtttttctggatacaaatacta

SEQ ID NO: 10138 - DNA, 286 bp, Zea Mays
gccggatgtaacctttctctgacagctcatcgatttgcttcttaagttcaaccaactctggtcctgatactctgtaagctctcttaaagatgggggcggtgccaggaagaagttctatagcaaactcaactttccgctctggtggcatacctggtaagtcctttggaaacacatatgggaattcggacataaccctgatactctcaattgggtctgcttcactgttttcgacatccatctgataacaacttcctttcttcggctcaggcgggactaactcggtcac

SEQ ID NO: 10139 - DNA, 636 bp, Zea Mays
ctgggattcgagcatgatccagtaagaatttgggagtgactgctatagtaagcttgaagctggatagtagagcaacaactttcttaaagatggattaggaagtcgctgcatgaaaaattaagatccaggccttgcaagttgggctgtcaggctgactgaagaatgatcccatggtacagtaactgaaatagattacaagtttagcccccccccctcgccatcggtgacctttgcgccgtgatttgcgctgtcgccgcgattcatgctctctggtaagtggataaccacgatggagtaaagatcttggcaccagatcagctctggctcggtcgctgatgagtttcaccgtacccacttgctcgtcgaccgagatagacctcgccgccgttggccgctcaccgctgtgtgccacatgctaaagcgcttgaccacatcggagtgaaacacgtcatgcatgcccggtgatcgctggagaggtaccacggttaaagccactaaccccgagcgccagtaaccttcttcctgtccggccgccagcacatcatcatgaaattggacgccaccgcacaagcctgctataaattgccgaccccgctttctccgctaggtagttgtgcaaccagtgaagcaaaccgt

SEQ ID NO: 10140 - DNA, 798 bp, Zea Mays
ccgagccctgcaaaatggtctgtcagacactctgatggtaaccaccatggtacagtaactgaaacagattacaagtttagccccccctcaccgtcgatgacctttgcaccgtgatttgcgtcgtcgctgtgattcgtgctctctggtaagtggataaccacggcggagtaaagatcatggcaccagatcatctcgggctcggtcgtggatagtttcaccgtacccacttgctcgtcgtgcgaccgggatagacctcgccgccgttggccgctcaccgttgtgtgccacatgctaaagcgctagaccatgtcgcagtgaagcacgtcatgcatgctcggtaatcgccggagagctgccacggtgaaagccactaaccccgagcgccagtaaacttcttcctctccggccgccagcgcatcgtcgtgaaattggacgccaccgctcaagcctgctataaattgccgaccccacctgctccgctaggtagttgtgcaactagtgaagcaacccgtgcctcgaatcatcccctagaactccccaatttgggatttcccccaaatcactcaagaacaccgagcggtttgacctcgccatggccagcgcatatcagatccgttcatgtcctctgagtcctcgtttcagtatccttggatgctcctgatactctctaacccatccaattgagctagagtccctaggatcaccaggaacgtgttcggttacacgtggtgtccgctgtcaccgtgaacagagcgtgttagtgtcccgttaataaaattagttgaggggaaacactca

SEQ ID NO: 10141 - DNA, 566 bp, Zea Mays
aagaagacaagccgcacaagtcgcgggcgtggcacgcgggaacgcctgcggcgcaccaggagacaccaggtgatggtggcgcaaaagggggggcatcgacgaagacgacaatatagtcaagacagtcgtagagaaagtagccgacgctgaggacgatgttgtcaaaccgccgtggacgaggcgtgctctaggtttgccacgcctagaaacgcgtcgtagactaatacacgtgtcggtgttgccagtaccacatgtaccaggtagaaggccccaaccaagtgtcagcgtctgaagggaataacagagaagacctccacgacgattggggtgcagtatatggcgagagtgccatcgtagctcacgtttgtcatagcggagtagatgaagtagttgaggatgagatgacgacgctggcaacaagtttgtgctggaagaagaagaagacgtaggcgaggtgacgcatcgaggatcctagagttgcggcggcgagagccacgacacacatgaagaagagactcgacgactctagtttagtgtgacaacggtacttgtcggcaaagaaatcg

SEQ ID NO: 10142 - DNA, 799 bp, Zea Mays
caacatgagttcatcatctaacggtacatgcattgattcgttgatctgttgtctactctattccggtgttcccactcttgaattcctttcagcttcgttcaatttctttcgttctttctgaatgtgtagaggggggttggcaccgtgaacgtggagcagctgttgaggtgatcatgggaggctcatacattggagaagagagcactggtggtggtgatgcggctgctatcctagccacgacaacatctgctggtggtagtactggtgctggtggtactgcttcatcggttgctccagatgctgcctctctcactgaaaaggctattgcagcactaccccatgctctggctgcacaagctgttgattctaaaaggaaggcttgatcacaagaccctggatggtggctagatcccacaaagaaagattttgtgcaatgtattttctgtcagaaggtagtccctgcaggaataaagcggttcaaacagcaccttgctggtggatttggtgacacagttaaatgtgcaagagtttcgaaattggtgtcaaaggatatgctttcttatcttagaatgaattcaagggctcttcctttgatcaatgtggatgaagaagaaaatgcaactgaagaggttgcagctgcagaacctagttctgggacaaaatgcaagcaagctaagaagagaagtgctcagagtaccatgacattgtttgttgtttctgcagcaacaaaaccaattactcagaagccttcaaagtcgattgcttccatgctctgcaagacaccagaagaggtagttgc

SEQ ID NO: 10143 - DNA, 567 bp, Zea Mays
gtaaccgagtagttttttgcgacgccggcgttttagaggtaacggccgagtccttttgagccatgtcagcgtttttagggataatggccaagagattactggtgatgtcggcgtattagaaataacaaccgagtgataacgggtcacgtcagtgttttagaaataacgaccgagtggatactggtaacgacagccgttttagaaatagcggctgagttatattgggccacatcgacgttttggaaacaacagccaagtgatgactaggcacgtcagcgttttagaaataacagctgagttatattgggccacgttggcgttttggaaataacggccgagtggtgactgggcactttttagaaatggtgtctggcccgggaaaaccccatttgtaccgcgccgtcgcatgcctttgcattccaagccctagccctgcttttctgcttccagaccttctttgtttccctgtgatatcgcttccgctcagttccccgacgagattgagatggctcccaagcggaaaagtcagaattcctccactgcgatcattcctcccatcgatcccaa

SEQ ID NO: 10144 - DNA, 316 bp, Zea Mays
cgcttcggtcgggtgccgaaggctacaatcatcagctgatcttcttttttagtgtaattccccaaaattttgttgcacatggtttctatcatttctaaccattcttgacatggccctttgaactgtttcttgaatttgaacttataaggtagtcgcacaagttcttttttctcctttgtcccctttagcttcggcatgttccattcactcagcgtcgggaacaccctatatgccatatattcttggactagatctcttgtgctgatctgctcggctaccacccggaattctgccacagcttgttggcatggtgacc

SEQ ID NO: 10145 - DNA, 454 bp, Zea Mays
tctaaccacaatcgtcgatctcccgatcaacggtcgcgaatcgattcggccgagttacgactgtcgctaaatatccaccgtacagggttggatcaacggtacagacgtgttctcccctaactacggtgaaccaggcagcagtgccacaccccgacgacgacaacacgccggagcggcgtgtccctgcccttttccccatctatttcatatacgaaagatgctacacgaacgggtaacaacggtgaatctgaagaggagaatcacactggtgatcgcgcagcaccacggtctggccacgatcgcactgagttccgcggcagcgccacaagtccggcgataaattcacgatccacgggcgctcaaatgaatacaatgttcggtgctaagctatgaggggacagaggtgaaggcgcagaggaaaatctcacacgaggaaggcagtgcaagactccgg

SEQ ID NO: 10146 - DNA, 729 bp, Zea Mays
cccagaaatgtggtacgaacggtgctcctctatctgacacgatagtccttggtattccatgcaaacgcactatttggtcaatatagatttctgcatacttttctaccctgtgggtggtatgtactggcaagaaatgagttgttttggttagcctatccacaatgacccaaatagaatcatggtgccgggatgtgttgggtaaacccacaataaaatccatgttgaggtcctcccatttccaagatggtatgggaagaggctgtaaggtacctgctgccttcaaatgactagccttgattctttgggaagtgtcgcattcagatacatacttagcaatttccctcttcattctggtccaccaatacaaagatctgagatcatgatacatcttgttactgtcggggtgcatagaaaatttggaaagatgagcttcatccaatattttcttcctgagttctggatttttaggaacaactaatcggtcttcaaaccatagaactcccttgttgtcttgacgaaagcatttgtagttatccaccttttgttcgagcataaccttaatgacttgaacaccattgtcaccaatctgtgtcaggactatctgctcatgtagagtgggctctactgagatataattcaaggtacctggggaaataacttccatgttcagcttgcgcaactcatcacacagagtggtgaccttagagtccatagttacacagttacact

SEQ ID NO: 10147 - DNA, 300 bp, Zea Mays
tgccatgctggatatgttagctgaggattcttctgacgccgctcctgctgaaacactggtggttgcgcccatccctgaagccggcaaagctttggatgctcagaagtctgacagtgttcgcccgaagcgttctcgccgagccgatcaacccacttctcctgctgaggggcaacatggttccagaagatctgttgtcagagccggcagatggtggcgtgatggatgtttgtgctgatgtgcccaatgctgggttggggtcatctcgggtagcgtcccgcgcctcatcgaccttagagcgcg

SEQ ID NO: 10148 - DNA, 409 bp, Zea Mays
attcacttccgtagttcgcctgcatgcgatagcccaatcttcacggaaccaggggagggaatgagtgccaccgggtggggtcacgactgtcgcatgggcagctcaccggcggcacaactctgggcctggcatgcgacccaggcaggtcgcctggaggagtattacatgttcgaggtcactatcgtgcgttggggtcgtgaatcgacggcaatcgctcgccgtccagggtcgcccgccatggatttctgccccaactcgtggacgggacggtctgcccccgcatcaccggtatgatgcccttccacgtgcccatccttacttcatgatcgcgtatcattcaaccgcgcttcgaatttggccctctgtgtcgcggaattgctcgcctgagttccaactccgcccatccccg

SEQ ID NO: 10149 - DNA, 365 bp, Zea Mays
gatgaaaaggccgcagcagagcgcatcgcaagacaatcgacccactacaccatcataggggcttgctgtacagaagaggcgcaggaggagtcctcatgaagtgcattcacttggctaccgggaggcagctattagatgagattcatgtcggacagtgtggcgtgcatgtagcatcaaggactctgatgggaaggcttttagatccgggttttactgaccgactgcaaagaatgattccgacgagctagttcagaagtgtgaggcgtgccagttcctgtcaaagcaacatcatctaccagcacagctgctgcaaactattcttgtgaccttgatgtttgcatgctgggggttggacatgatcgggc

SEQ ID NO: 10150 - DNA, 474 bp, Zea Mays
ggtattaccgtcaggtttaccctagtttagtttatgtttttcatcctataactccagaaaattgccataaaaaaattccgctgtcctagaacccttgtttagcctttgcaatttcgttttcagtttggctttgttcagttcgtgtccgtggtcgagttgtgttgctggtttagggtgtatctttgtcgtagatcaactaccctcgctaggcgctatcccatccatcattacccagatcacaagtcgatccacccattaatcgacttgccctcgctagccgccgccgcgccagccctagatagattgcagatacgctgctatccaatccaccattacccagatcacaagtcgatccaccccattaatcgctgtgattgctgtgattgcagatagggaatttttgccctaaccgccgctttctagtcttgcctccaaaaacgtaacttgaggtaccttccttaaaccgggcataac

SEQ ID NO: 10151 - DNA, 656 bp, Zea Mays
gtcagtcaggcacaggggatcccctggtcgctgggcctaatctgtcagcctaacatcccatagtcaccaatacagcccctcgcgccgcaccctgaccaaaccctagggttaaatacgtttatcccctgcccctgtctctcccgcacgcacgcacccgcgtccccgcacccgcccccttcccgaagacctcgcgacgccaaaaaggagagaccgacacgcccacgcccacgccctgctgccgccaaccccgtcccctcgcggcggctacggagctcgagcctgagccctgctcccctagctaggttgcccccctggtctccgcctcagccctccagcctctttggcacaacccgccgccgccgcaggcgcaggcgcaggtggacatggatctaccaagcctcgccgtcgtgctgcgcgccgcgctcagccacgttcctgaggagcgcaaggcggcagaagagagcctcaaccaggtgagtgcctcgccgccctccatattcgctggtggacctgggctcctaagtattaaagtatccaatccacttcgaaggagtcttggcactgtttgatcgcgagtcgtgaactgggtgtttggttctgaatacgcggtgatccgcgcgcgaatctgggaggttgatacttgcgctcgatttttt

SEQ ID NO: 10152 - DNA, 570 bp, Zea Mays
tcatggatcatcgagaaacaagggtggtcaagggaatgtaaaatgaaatatgctaaacagaccttgggatacaaaggttagcataaaaaagatgagagtatgaaagatttcaaggagatgagcatacaaataccaagagacaagaaattgctgaaagataacgacttaacaacagaagaggaaagggtctcaaaagacaggaaggccatggacatataaactgaaatgtttaagtaagcagtagaaatttagaggcaagtatttgaaacaagagtattaaagggatacaagcatgtcaataccaaaggactagagttcgcaagatggtagcaatttaatgacgaaagaggaaagaatcccaaaaagacaagaaggttatggtcagggggcatctacaaagatgtcgcaagcacaagagtaagatcagatctagtagattgagaaaggttagaccataatagaataaaatacttttggcaagggggcatataggagcacaacatagaattaatcgaggtgactaatattttgaagcagaatcaaggatgaggtgtaatcaataagtcctta

SEQ ID NO: 10153 - DNA, 320 bp, Zea Mays
cgcaaacactccacaccgtcgctcctagcttcttcttcttcctacatacgttcatccctatgttcatctcacacatccggagatcggcaggctcaggaaccttagcaggctcaacaccagaggcaacgcgctcacgggcggaatcccaagggagctcatgggttgcggctccctcagcaccatcgacctcagcaggaacggactcgccggaaagatacgggacaccgtgacgtcgctcaagattttgtgcacgctcaatgtcgaggaacaggctgtcggtgcgagctgccagcggcgatggccaacatgacaagccagac

SEQ ID NO: 10154 - DNA, 527 bp, Zea Mays
ggccgggcaaaccgatgggaagccactcgagtggattcctcgcctgacccgagaatgacccaccataaatggctggcctcattaactgcgcctggcatcaagccacagtaaagaaccggtccacctcccactcatgatctgtgagcccctcggccagcggcgcactcatgatttatgagccccttggcctgtggcgcactcatgaccaattgagactaggcctaagtgcgcaagccatctatagggcccacaacatgaagagccacactgagacccaggctacgaaggctaggggtaagcatggtgcagaggcagtaatgatgtcactagggctccacgtcgcccatgccgtctatcataatgagcatgaggagagacaaccatgtgaccaaggcgcatacggaaaatgcagcttcaccagtgccgacccccatcttggcctataaaaataggaggttggtcacgaacgaagggcttgagtttcagaactatagaccaacaatcaatagaagacgaccacacacgct

SEQ ID NO: 10155 - DNA, 420 bp, Zea Mays
aacagtgctcctctatcagacacaatagtccttgggattccatgcaaacgcactatttggtcaatatagatctctgcatatttttctgccttgtgggtggtatgtactagcaagaaatgagctgtcttggttaacctatccacaatgacccaaaatagaatcatggtgccgggaggtattcggcaatcccacaacgaagtccatgcaaatgtcctcccacttccaagaagggatggggagaggctgtaaggtacctgctaccttaaaatgactagctttgattctttggcaagtgtcgcactcagatacatacttagcaatttccctcttcatcctggtccaccaatacaaggatctgaggtcatgatacatcttgttacttccggggtgcatggaaaacttggaaagatgagcttcgtc

SEQ ID NO: 10156 - DNA, 823 bp, Zea Mays
gcgtcaaatgctggaaaagacagggtcttctgcgcaagaattcccaagacacagagtactgctacacagactgcgtgttagttaagtaaaagtccagggtttcttatgtaagaaagcaaggccgaaggggtattcctggtttctggccgcccgatctgcaatctagggtccagatttaattattgattcactcacttcagaccgcccgatcaaacagggacggctaggattaaaatctcgcacgcccgaaccgttacgccacgccaatcgttagatctagatcctagggtttatcacctatccatgccccagcccaacacctgccatctgatgcgatcgaacgacccagattaagtccccacaaaaacgaaccggtactaaatcctaaccctcgactagacgatcaacgactatagggtcttcttcttccctctgactccggacggcgccacaccacaccgagatggtgcaatctctcggtgagccggtgggcaacagccccagcatgtggatcaaggcgtgaaccgcgacagcgcatagcgaagataatggagaactacaggaatgtgctcttactagcgattgaggcgtagttcggccgcgtgacgtgatggtgcttcttcatcaccgccggtgaggttctgcttctttgtctccgtgatgttgcggacgattcccccaccctgaatcagggagacgtcgtgggccatcccccatgctttgacgtcgaagaacccatgccctcctctcggtttcctgcgctcacccgcgatcaaacccactcccttctcccttggtttctctctcttaatggctgcaatcc

SEQ ID NO: 10157 - DNA, 523 bp, Zea Mays
ggcaatcatttcaacataaatgtctaggcagacaatccagccttgaattagtgacagcagctataggagagtttcacagtaataaaacaagacaggcatagagaaaaaaacacaatatagaagatgtacattgctggaattcaatataactgtttgggtcaaatctttatatcagagaagggatcagtatgtgataatagcactccttagtactaaacagttatacaaacaccttgatgaaatttaataccattgcgtatataagcataaaagtagcatagattggattggtacctcttttttccagaccagatttctacaagtgaacacaccgcataaaaatggaagtatcccaagttgcataaattagctgaaagcagctgaaaagcatcatgtagcatgtgcaagctgcaagctaacaaagacattgccatcaaaagaatggtcattccggaataaaatacaaatgagtaacaacccaccggtttcaccagagtcatacctgttagcatcacaacaaaat

SEQ ID NO: 10158 - DNA, 495 bp, Zea Mays
tggtgtgcgtctccgccggtgtccggcctgtgagggagaaacaagcgagtgtcgttggatacgataaggatggtgtgggggacagatatcctgcgggtccactagaaggcaaaaatccttgtgtggggctacaaaccagtcaccccacaaggacgtctcatcgtgggccgggcaaagactacagttgaaatggaccggcccaagaaggtgatgggctcacaaccagaatgtccccggattaggcgtaatcttaagggagctgtccgtctttctcgcgcccgacaccctcaaacatcagagatagatcgagacgaagccatcgggttttccttaagataagcaaagtctgttcgctattagctaggagataagatggaagagtgtgatcagcgtgtgcgtagggagcgccccactgtcgcgtatataaggcctaggggaaccccaccattttcatcttattagcacctctccattcgggaaacaccacttgtaagc

SEQ ID NO: 10159 - DNA, 284 bp, Zea Mays
aaattagcaatacgagaacgtgtagtaactccctttctgatgtcaccaagaatttgatcaccggatgatccctttgaatgttggtgcggatttgggttggaggtgcctatgatacttcttcttcctccttgtctttgtgttcttgcgcccccttgatccataccatcgtcatgaggtacctgttcatcatcttgagttgggggtagcaccaccatcgagaaaaaggttgaccttgtacttgttgttcctgtggtcacacgtcgcctatcgccatagtcctcatt

SEQ ID NO: 10160 - DNA, 392 bp, Zea Mays
aatcgcctcgctccgcggactgcccccttcgccctcaggcgtcgcaccaggggcctcgcacagcagcacggagggtgtgctaagcttcgccttgggcgggttgcgctcaaagccgctgggatttctcatcggagctcccctcgcccattcatccgtcgcgctttgccgcggtaaggactccctacgccaccctctctgttctgaccctatgtcatcgtttcgcttccctctgcacttcgtttagcgcctgtctgattgggatgtcgaacaccagagcgtggggcgcgtgcttcgccgacgaagctccgccatggctctgggcggcgccacccctgttgtggcccaaggttggggaaagccatgatccgttggatctgttgagagcggatagg

SEQ ID NO: 10161 - DNA, 930 bp, Zea Mays
taggatggctggggggcagcaccagctcattggtggtgcaagtttggagatgcgccgcggaaggaagacagaatacctcaacattcccctcaaggatagcattaaagggtggcgccttgagtggtttattgtgaaaaaccactgcaagtccctccccctcagtcggggagacagccggatgtacatactccaagctgggttgagtctgcaacttccttggaggtaacagaggctagagttctgcttgctgagatctgtctgctgaaggagagaggtctggttgttgaagcagtggtggctgactttgttttcaagaatattcagcctttgaaggacagggcgtatctagcttacttgtacagtggtatcaatgactctacccgggtcatcaacaagaaaattcctactgaggatctagtgagccgactagacatgatcctgaggggcaggatatcaaatgttggtgctcctgttgcctattctgcttggaatctgccacctcataggtcatttcacaatttcgtgtccaaccctcctactagtgatggtggtctgggtcttagagtgcgaccctctcctgaggacattgaggctctggttgctccccttcggaatcttcccaatgatgagaaacaaattcactttgagatgccagcaagtccagatgatgcagagatagatgctgtactcagtatgttggctggagaatcttctgaatcgacccatgctgaaccgatggctatcacggttggacaagagcttaacaaagcagtggagacccgaaagcctgagggtacctgcccaaagcgtcctcgccaagttagccgtctgactgcgcctattgaggaaaagaagaagaagaggcagcttcagcgactgtcatgcttggaccaggatgtcggtccttctgctccggtttgtgatgaagtg

SEQ ID NO: 10162 - DNA, 369 bp, Zea Mays
gttttttttaccgtgcacgtaaatatagtgtatgcctcgctctctttggtgcgcgcgtgccggaggagagccagagcagaggtcgtagcatgcagtgttgataggtaggccggccataggtggcataggcagcagccaccgcaatgtcgatggacagagcgatgcaggccagcccgcccatccgatgatctagtgctcgattgagatgcaatagcaagatatggttgggtatagctagagcgcagttggccggccaaaacaatgctaggcgagagagggaagtggtggtgataggaatgtgagaggagagggattgttatctgttaggtcttatgaatatggaggaccggccgacatctgttaaaaaag

SEQ ID NO: 10163 - DNA, 426 bp, Zea Mays
acccgtgatgctcatggagccctccgtttctgctctgctattgttattagtcgggaacggagtgtctgtcgccatgccgtaccaccgagcgcagtgtccacgtcgaccggttgaacccagacccctccggacgttacgacgcacgcatcagtcgtcccatgaatcggtaaaacttcaccagccctaagcatgtgtcctaacatgaagtaggcccgagtcgatgctcaccggacttcaatgtccaccgtcgttgggcacggggtggttaccgtggtctagtgtccgtttgagcctgtacacgcgttctccagtggtcagcgagagctgtgagaccctccccgtttgcataaggtagttgtcccggccgccttgacctcgactcatctgtgtcggtgctcgacggtgtcaggggcatcggggttgtag

SEQ ID NO: 10164 - DNA, 406 bp, Zea Mays
tgacatcttgatactggcctgatggctgttgttatacgagaactctacataaggcaaactggactcccagtttctgtcgaacgttaacacacaggctcttaataaatcttcgagtaccttgttgaccctttctgtctgaccatctgactgggggtgataggtggtgctgaagtctagcttggtgcccatagcctgctaaaggctcatccaaaatttggaggtgaactgggttcccctgtctgacactatctttcttggaatgccatagagtctgactatctctttaagataaatccgggcaagggtggctcctccaaaggtagttttcactgggatgaagtgggctaccttggtaagacggtctattattacccagatagagtcgttccctttttgcgtccggggt

SEQ ID NO: 10165 - DNA, 283 bp, Zea Mays
atctccctgtcttagtccccttctatgctgaattattttctcggggcagccatttagaataacctgagtagaggaggaaccaagcagcccacaaatgatgtctctccaaagatctccgaaacccatatgcttcataacttcaatcaagaaagcccaggaaatagaatcaaaagcttcagaaatatccagcttaaaaaggagtcgtgccttgctttgggaatggaaaagtcttgcagtttgttgcacaagcataaaattatcctgtatgaatctgcctttgatg

SEQ ID NO: 10166 - DNA, 844 bp, Zea Mays
cacccgcggagcttgagactttcccgacgtgttcccgacgacatagtgcaataacatacaaattgggagcacggtaagctttagcatcgtaccaggactcaagaatggcagcttggaaggcgggtggagggacaggacggtgggtcgacgggagggggtgctcacggcggtgcggagaacggatttgggggaaattctgaattagggcgctacgatgggtaatcgggggcgaggagtggttcactgagttcgtaacgagtaggtggaacagggggtgcttccaatttatagacttcggccaagcttatcacgaattttggattgagatcaaggttaccgtgaccaggatattttacggtggccggctcaccgtggcgcgtgagagggaattggtctagggatgatgaccagttgctttccacgacccttacgacatggaggagagatcgttgtgtgtcatggtcggagaaatggtgagctctagtgatgccaacgcgactgatcgcggcgggacacgatggccagtctggccagtgactgggttcacccctccccggatattttcaccctggcccgatgttatctatcactcccgcgacacgaatctcccaggcaagcgtgaattgcggcggaagatcaccgatgtcaggttcacggcaccggagatcttttcggtcactgtaccatggctatcttcgtgagtccctctgtccgagcaacttgtagggccttgttctccaatttttgtgtggcaactcactcacttgcctgtatcaaagttgttgtccaatgtaccagctacaactttggtacaaagaccttgctcaaacatccactaaatccc

SEQ ID NO: 10167 - DNA, 737 bp, Zea Mays
cttggcaactagtccatcgtagaccagcggtagttttcttgctctctagccctgcaccattatctacgtaaactcctatgttcctagccctacatcaatgctataaattcttctgcctctaccggaccatcaaactaccatagtgtgctcgccgggccacattggcgggctgttatgactgatgagtaccatgcactaatcagcaacgacatgcgacgccttgtccctcaacatcctggcaccaatgtggttacgggcaagtggaacttgaagcccaagtcccactaggatggtacacttgctcatcacaagacacgttgggtggtctggggcttctcacagcagcacaacgtcgactataatgagaccttcagcctggtggtcgaacctgccaccattcatgtgatcatgtcatcctcagcactgcgacctctcgtgcctggcccatctaacagttgaacgtcaagaatgtgttccttcatggccacctcgaggagatggtctattgtcagcagctgtctggctttattgactcctttggtcctaatcatgtttgtcagttgcagaattccctctatgaaccgaagcaggctcttgggaatggttccagtgctttgacacatacatacaccgcttcgagttcatcgcttcagcctccgacacgtccctctttgtttacaaagatggagacaatgttgcctacatgcttctctatgttgatgacatcgtcctgatcg

SEQ ID NO: 10168 - DNA, 2878 bp, Zea Mays
ggggaaggctgccaagaggaaggcggagaaagacaagggaaagctagtgctcgctgccagtgttaagaccaacaagaagaaaaaggtcccgactgggatcgatgccagaccaaaggtatagcgcattgcatcgaccatcgacttgctttccatttctgatatcacgattttgtcggcgcagtagaatgtttgtattctcaggcaggtacaggtctgccggagcttgtatgctacaaacaagtggatcttattgttcagctgaccaatgaccatacgcacagattgctaactccttgagagttcctaaatttgtgctcatccattattcgtattcctgcttttgggtaattgctaaccagccaaaaagctttaggtgtgctttgccttcatcattagatacaaggtgtatcagatggcataaatattgccagcgtataattcggatgcatagcaatcagttgtaactaaaacttacttattgactgcttccatattatttgttgtgaatgactaaggtgtgagaaaaaattcccaccaccttctagctgttgttaatgttttggttacttgtcacgttttcccttgagttttcatctgtggtgtctactggcctcatgtgtctaatgccccttattgttcttgatcttcatgttgtttgagttagatacttagattgttttattcaatgtcactttcttagtagtttctattactatgtgatattcatgcctgctcaattgttatagggacacttgcttttgcaaagtgctgaactgctggctaaaatatcatttttgttgtttgttttgttatggaggtatgccatagtttggttgactgagtgtgaatacttaccatgtacaaaatacttgcaacgttcccaagtaatgcggtatatagtatatactgtatagaatggtgaaagtaatagaagtctctcacctcccactttgttgataggttcaaataataccttcaaatacaacttgtagcagaaatacctcaagagatgtgatacatttgtgttttttttctcatttcaggagaaaaacagtggggtaaaggtgaactcagttagcatttctaagtcatttcagcatcctataaaaaatagggaacccaagagttcttgcaagaaaaagggaaaacaagaggtctcagtcttactggataagaaaagtaagaagggaaacagaaagtcagttttggaaatacacaaaaaggatatggcaaacagtgttcaaactcaaagcatttgtaaggatcagtcaaaagcaggttctagcacagcaccgaatacaacagatatgaggtgtaaattaaattcttgttgcaaatcaaagcatgttaccttttctgatggcgctgacatatttggaaggaccgcacatctacctgcagataatacaaagcaaccacaatctgtacagacattccagcaagccactcaggaaggtcgtgaccaccgtgatagagatgatcaacagttggtttatcaacaagctgaagctatatcccggactgttgagattaccaattctttgtctgaaaatgtagtactagctggtgtttgccgtacaatcccacttaccaaaccaaaagatatcactatactgggaaactcagtggatctgaatcactgcatagaaacttgtcatggcagtaactgtttgaactccacgagtttggcaagcttatctagtaagatgccatgtcaaaaattccaaggtgtgaactctcatctgaatggcaacaatgtttcaagtcttgatgttcagtatcttggagaacaaaaccatatgatatcacaagcatcatttaatcctgttagtttggcacccaagggagtatcaggtgatatgagcccattgtcagagccttccagttgttgtttatatgataggagcagtatcacgttccacgagaaggctgatgctaattaccacttgggaaaagttagttctgagattcttagatctggtaacgtggtgagaagcataagctcttcaacaggatcaaataaaccagcacaagccatcgattgtgtatctgctgcattcaggaacatgcacagccgccgtgacgattatgtcggccttcctatcaattcacgaggtgaattcgtcaaggttcatcctggtggcacccctaattctgttgacatttttacgaggcagtgtttgggggagaattcctcatgcccctcagattatccaaccatcttcagttctattacccgcatggatcatgtacccaactatcatgctcgacaattctatacaatagaccagtctgcttttcatgcagatcctcgttttcctccagcgggcccaatggcatatgggatggatgtgaggcagtggccaagttctgaaagagcaaaagttcattactacacaattccaaacaaaaagtatccatgcgccaaacagcaagagctttcaatggatcacaattcacagcagaagctacttgggctgcgaagccgctgtcccagccagaactctgggcagggtatgcagcacaacgccgaaacgacactgcgcctcatgggaaaaacggtcacacttgggaccagcagcagcatgcactgtagaggcctgaacaacggaaccccagcttgttccagtaaacaaagccaagctgaagaccggggaacgcgtacgaaagttttcccacagctgtttcacggaggactggctctggctgatcccgctgctgcgtgtaggatatcagatggagagaggcaaccgtctggacacccgtcacgtttctctttggctccagcagctgttcgggcttttctgcctggtaccagcagtttcagaacaggtggccacaaccagcaacctgaactagcaacagccagtaagaatcc

SEQ ID NO: 10169 - DNA, 661 bp, Zea Mays
gtggtatgtaagagtgctgaaacaagagagtagagggcaagatcggacctgaattgcactgaccatagtgagagcttgttcacagtggcggaaaacagatatgggggaactgagcaattcgtgggctctggtgagtaattggaggcacgagcgggtggattggatgctagaatacctaacggagtcgagggtgtgctcaatttatagggatcttgagcggtggccggtgaatttgaactcgcgcggtggcggtcggagaggaggaggtgcactggcgcacgcgattggtggccattacagtggcaacctcaccggcgatcactggataggctatcatgagtcacgatggtgtggttaaagtgccgaggcacgtggcacaaggccgcgtagtgtctaactccggcgagggtagatccaaagcgaccggggctaagcggacacggcggccggagtgaacagtggccgaagttcatccactggggatatttcgtactccctcagtgttatccagccgtgccgagcacgaatcactgtggcggcgtgaatccacgcgtgggggtcgctgacgatgagtttactgagatagcgatctgatctggttactgtaccatcacgtagttccttcagtcgatctgatagagcatgtttggggtcgatttgc

SEQ ID NO: 10170 - DNA, 433 bp, Zea Mays
cggacacactcaatgaaacattgcataaacacgttgttgagacatgcgccatcagcaaaagattgttgtatgtcacaacaattggcacgatattcaacgaagtcaattatatttctacataagaaaagagtgaacatacaacaatagaaacaaatgttatttgtataaatgagatataaaattacataatatatatgaaacttgaccattgaattgaaggtactatatgggaataatgagatacaaaattacataatatgcaacttgaccaccctctctcagccataataatgggaatatatatgctacttgaccaccctctctcagccattcagccaccaccctctctccgtcttcgagccctctcactctctctcccagccacttctatgcggtggcactgctgctccaccctctatcgcagccacttcta

SEQ ID NO: 10171 - DNA, 712 bp, Zea Mays
agagtggtggactgtgcaggcttatggtatgggaccaggctaagcggctacactgacccagaccaccccatggaacgagcccccgttctctagaaccgccccccaggctatcggacctcccagctttcgtaagggggtcctaatctgcaagcctggttgctcaatctgggtgtcatcatgtcagaacagacaggaaccgtacgggtgggttaggtaaaaataatacccggaaactgtaggataaaattgtggagcaggaagataaagttaacatagaagcacatctgagggggtaaatcttctttttataacttgacatgcacgagtgtataccaacaggccgggtttatgagggcggaccttaccgggctggcgtacgcatatgtgaggcctgactacaaaagaagaaaatcttaacccctcggacttgcttctatgggcagaacttacatacatgctccagagatactcctttagttgtagcaaggtaggcaccccccggggttggcatatttccatcaccttgaagggttcctcccagctaggggagagattgcggaccccttcttggtacttgccgtaggactaggtcctgaccctgggctccctactatgcacgaactgttggccgtagtatatgggcgccgggctaccaagtgcatttcgggttgccgcttgacatctgagctcgccgatggagtcctcgtccttg

SEQ ID NO: 10172 - DNA, 710 bp, Zea Mays
gtgccctcgagccttgctgttgtgaattgcgccatggagtagaactattttgtgctgaaaaagaaacatggcttttataagatccagcaagctgtcgttctgcccttttagcaaaatgaaccaattctgttagatttgtgtagttcgtcatgtccactttatcagcgatgggtttattaaggccaaccaagaatcgagccagtgtagattcctcatcctcagtaattcccgtacagagtaggcacatctccatttcttgaaaatattcatcaacactgcgagtaccttgcacaaggcgtttgagccgcaaatgtaagtcacgagaataatatgcaggaacaaaacgacgtctcatttcccttttcatgtcttcccaagtgatacgatcttgtcccacacgatgatattctgcatggatttgattccaccatgtgatggcataacctttgaattcaagggttgccaactttgccttcttctcagcagggtactcatacaaatcaaatatttgttccacctttgtctcccactcataataagaatcagcattttccttgccgttaaatgcaggtatggacactttaactttgcccagaccatcttcacctcgtcggcgttctggatcaccacgacgctgatcacggtggccatcatcaccagcaaattggtggtcaccaaaaccaccaaagtgaccacctccacgatcatcg

SEQ ID NO: 10173 - DNA, 459 bp, Zea Mays
tgtaaatgtagccctcaagtgttgcattcaataatttatctgaattcgtgaattaatcttttatagttagagttggcagtatgttgtgccttgactaaaggatgcataatagatccttggttcattactttaggatacatatttgtatgttgtttggcttctcttgcctagctaatacattgagaactattaaaggtctgcgcgacgatttatgctaaaattcacatttatttacgctgttttggtttacgttttacgcaaaaatctgctcgagccagaacccgcgcacgatcggacacgcacgatttttacaccgtaatttttgggccacattcgtcattatgaaacagatctacaatttatgctaaaattcgtacacatttaccctgttttggttcacattttacgcaaatatccacccgagccagaacccgcccacgatctgacgcacacgatttt

SEQ ID NO: 10174 - DNA, 428 bp, Zea Mays
caaacaaccttttaggaggcaaagcagcagaccgagagaatagatcctggaactctgtgagtagtgatgtcaattgcccctcctctttcttcatagttaccacctgttccaacaacaaaaatgcccatacctcattgccttcaaccacttatgaacctgtagggcttgcacttgagaggtatcggtgatgttagcacaatctccccgaatctgaatctgctggccattgtggtaaaaacacaatgtcttcttgtccgagtcacacctcataggactatgggccttcaaccaatgaaatcctagaatagagtcataaacccaatgtccaacactctcatgggaaacatagaagtatgccctccactccaccacttcacttcttccaccctctggtcactgaccatgatatcaccactagccacactcac

SEQ ID NO: 10175 - DNA, 408 bp, Zea Mays
ctcggatgttttgttagaggacaccagcttgacatttgaatgctactgttacactcctattgttttagaattcagcagtatctaaatttgcaggagtaaaatgctgtatgatgattttgaaacttcttcacgggacatagaggtcgcccctatatgagtaatcgtaagcatgtggaatcgtcttaagtcgttgctgacttaaaccgattgcttttgttaatagggcatagtagtaatcccgagttaagtaagcgtgagcatgttgcaccgtcttaagtcgttgccgacttaagccgattgcttcgttagcagggcatagtggtcaccccgagttaagtaggcgcgaacatgttgcactgtcttaagtcgttgccgacttaagccgattgctccgttagcagggcatag

SEQ ID NO: 10176 - DNA, 625 bp, Zea Mays
gtaaaaggcttttgcaacgtggcgttaaaacggggaggtggcatggcctggttaatcggcggccaccgtgccatcaccgtggtcctatcgaagctaggctcgccgcacctcccttgcgcgtcgactgatcggataagacctcgccgccggccgattactgccgcgcgccacgtgcttaagcactagtcctcatcatggtgactcatggattgcatgcccggcgatcaccggagccattgccacggtgaaagccactttccccgtaccgagctcgcctctcctctccggccgccagcacccctcagccaaattcttcaccgtcgctcgacgcgcctataaattgagtgcgccactagctccatagggtagtcaagaaccccgccaccaagaattaccctcagtggatccccaacgagcgcgaatcttgcaattcccccaaatcggttcaaacaagccgctagaacacttcgccgtggtcagcccgattcaggtccaatctcgccctcggtttccttgtttcaacatccttgcttgctcttgatgctcgctgacccgctaaatcgaactagaccacccccaatccgcgggaacgtgtgctcccatgctcggtttccgccgtgcacat

SEQ ID NO: 10177 - DNA, 479 bp, Zea Mays
catatctctctaccccgaccatatctttgcttggaactcacatcgaaaaggtaggatttggtgcagagaagcgaccgtacatgggggttttgctaagatctgcacgctaagtcgaccaaatcggccgttgaaccctgacagaagtaaacccccacgtgttcgacgtgggctgacactcgagggcgcgtccagagcacgcccgcacgtgaacccccacgcgccctcggccgccccgtgcccacacccgcgccgtggctataaagcccaccctagtgcatggccatcttccccgttgcctcctctgtgccacgcctaactctctcgagctcgcccgcagctccggcgacctccccgcattccactagagccgcccgagggcaatcaccatggccaattcctttcccgcccacctccgctcgatccaagccctcggatagctatcccgggaggccatgaagcttgcccgagcttgagtcgag

SEQ ID NO: 10178 - DNA, 465 bp, Zea Mays
gtggtggcaaagcgtagattgagtgaagtggatggtggtcggcttcgtgtgggcagggctggcaagcgggaattgttgtcctcaccggttggggtgagtgtaggtgagggggagttgcgaagtctttttgagggtgaggagctgaggataatgctatttaactatagggatatgggaatcattccgaaggttgaaccaatgtaaggtgtgatgccctcgctgtacgtgtgtaactatagtttgtatgatgaggctgtgcgccttcgcgcatccggctatgtccataggggcgttgcacacttggtctagcacgtttattatgtcggtccggcgcctgtagtcggtctttgcgcggacagtttctcgatgtagacttttgcatggatgtaatgtgccttcgattttgcgcactcgttgtgctggtccggctgcacccttaggcgacttttgcacggatagtctttt

SEQ ID NO: 10179 - DNA, 341 bp, Zea Mays
aatggaggagacactcgtttcagttctgatttcctttcccacgagggtttcccttccatcttgtgggaggtgctcagctccaccggttaccctacaccccctctgtacatggtgcagctgtacgaggagcatcgggtgccacgttaccgagtctgactgactctggaggctcaccccctacagccaggttggcgttcccttgactctgagactattggattgaggtcggacgacaccaccgaggctgcagctatgaagaccctgacgactttctgcggctaccatctcttggagatggtaatgcacccactgggactcttccccactgagaaaagggatga

SEQ ID NO: 10180 - DNA, 860 bp, Zea Mays
ggggtttaggcttcagtaaagatcaattgactgacatcgtgagcaacatgaggttaaaggcaaaccaaaacaagaggcaattgggtaagtactgacccgaggagggttgcccatgaatgggtccttcacggtggcactaagaacggtgaggaggagcttatggcttaactgagtccctcggcgaaattggtggtttgcgcaagcactcgtgtgtgtgatgcggtgaggaagcagcgctcgggctcaatttatagaggggtgcccggaggtggacgggattcaaaagatctcccagtgcactggggagctcacccgcgtgggcagggccacggcgagcgtccggtgaactccttttagccggactacgccacctcatggttacatgtgccacgttgtagaagatttttaccgtggccgcaagtccgagcagtgcctcagtcgcggtggtgttcttatccccggcgaggttcactgaaccacggtgaacagtgcgcctgacagcccgaattcaaatggctattgcgccaagttttatgtagttgctcgcaaacaaatctgtatcaaagttgtaccttgatcaatgttctttcattttggtataatgaccataccgaaaatcctcacggattgatcaggccagggcacgcaagttggcgcaataacactgaacctagaccttaatcagatgcagtgaacacatatctatcaggccgactgacagcgctatttcacccctatttatctctcatttctgtgcaacactagtgcttggtcacttaaacaaatttgttctccttacatagctctacaaattttctatactgaccaagagcaaaatcctcaagaatcctgagatgtag

SEQ ID NO: 10181 - DNA, 362 bp, Zea Mays
ttgtagtctgcccgctccggcgccatggctgcggcctccgaccgtggtgaggtcgacactgcacggcccttccggtccgtcaaggaggccgtagccgtgttcggacaccgcatacttgtcggcaacaaccattccagtcacagcagcactgcggccgccgccattgccagcccaagcgctagtgccaatgccactggcgttgctgccaccccgagtgccaagcatgaagcaagcagtagcagcagcaccatgaccttctctcccacaccaatggccgagagcgaggcggagattatacctgccactgtgcccttgtactcggcgccatcctcgccgccatctctcgcgtcgtcaccttcgcc

SEQ ID NO: 10182 - DNA, 500 bp, Zea Mays
gtgaaagctaagaccaagttcgagtggatagtatgagcggagtaaacttcttcgcttaattgctcttcacaaggtgagtattaaacttagagcaataatgtaagtgaagtagataaagagaaaatcgcataggaataaagacatgtgacacaacgatttttatcctgtggttcgatcgagtaaaatacttgcttactccacgttgtggctgtcggtgtttagtgtccaaccgcacacccgtggataccctcgcggtgcttttgggtaggacggtgtcgttgattgtagctcgatggttcgtgccagaagcacgatcaagagagtcagacgattttctgcaggtttgtgccgctttgagaggcgtaacaacctacttcctagggtggctttgtatgtgtggtgtgtttacaggtggtgtttccgaatggagggctgctaatttagatgaaaatgatggggttccccctaggccttatatacacaaccgtggggcacttcct

SEQ ID NO: 10183 - DNA, 590 bp, Zea Mays
cgccggtctctaaggcgacttcctgacccgaagcttgagctgcggccatgcaaccagaatgcggaggagaagaccctacgtgaacgtccatggaagtgtgagagggagaaccgactcgaacaccctcgggggctgggtcatagctcgcgctgcccatccgagctgggtcatccccggcagcaccctcaagggctgggtaaaggctagcgccatccttgagggccgagctctccataacagccacctccaaggctgaaggaccttcacccacttccatgggagcagaacaatccagaccagcctcctgatccttaagaccacgctctaaggtcgatgaggcacgggacgctgctcgagataactccagcctggcatcaggcacatcagcacaaatatccatcattccaccatctgccagctctgacaacagatcttatgggaccatatcttcaagagtctggtcaaagttggccagagacaattcttgtagaccaatgagggcagataaagctagagaaggaacaccactgctttccccgctggctatgtagcgtcggctgttcttctgaactagagggatttcatcctcc

SEQ ID NO: 10184 - DNA, 1369 bp, Zea Mays
cttcccctgtgggcttattagctctgttgatgtcctctacatgatattaaaacagctgctggcaatgagatcactgagtaaaggaaattatatctcaaaatgaaaaaatgacagacaagtgattaggagaaaagaagacaaagatttttaaaaagaaccgtacaatttcagtactctagcacaatccttcatcttttgcatattctcactttgatacgagttgttggctttctagtttctataaaatgttctctttactgtgccattatggtggaggcaacaggattaaattctcgagcactcttcagttcatggatacgatcaacacaatcttgcactcacgtctgttccactgtacatgtgcaaactgaggggtgtttactttcttgtgtgtggacatattattcacccctgttttcatttgggggtcattgcatttatagatgtgtaattgatatatgatttatacctacaggaatgggaatgacgttgactttggatgacctcaaaaccacattattgatgcccaaggagttggctgctggatttatactgcaatacacggtcaggtccccccatttttgttcttcatatgtctgaattcttgtaaccatattctctgatttcaaaatacatatacatttactctattgatgcataatgttagtgtattttgtagttaggattagagttttccttgcacagactccattaagagggggtccaaatgactacgtgagttttttttaactgacatgactacatgagttgatgatttggtatgttgaagattgaatcctgatcattgaggctggcagattagaagagagggaatcaaatgaagttgtcagatagcacagtcatgctatggtccatggtccatgttgtagtgctagtagattcagccatctagtacgatataaatttatagtagtcgttgacactgatttggatcacagactagtaagagttagtacatctctgatcgacacacaccttgaacacgaggaacatagtggatcgttgaaatcgatcgggggggtcagttaggccgatgttgatcctgttcttcgtctggtatactctcgagcacctccagggaagacctatcggggaggagcacacaaaggttgtcctaggatcagcaaggccacctagaacaccactaaatcttttcggaagatgtgacaaacaataaggtagagaggagagagtgtgtaaaaggtctagtagattgatttttgacgattgaaagttgggatacttaatcggtgataatcaacagggcacccggccgacttcatccccacctggccggctttggtcactcgtcctgaccagcttagagggacggccaggccaatttctg

SEQ ID NO: 10185 - DNA, 646 bp, Zea Mays
gagaactggtggactagggttaggttttgctgctaaggctggtagtggcgctagctttagcaaggttggtgagtgtagtggcttgaatccattagagaaacatccagcctccctaaatcttgtgaaacctttccatccaaatctgccacccttgttgtgagagatggagtgcttgtggagccaatgagagcccctacattagaaacaagtgtggtttccaaaaccaaactatatcaggaacacacttgacaccttacctgacatctctagtgatcccatttctagtgctcctcagccgcccaaaaacacccactcacacaaacagattccacccaagagagaggtgaggatccattatgagaattatgagagggatgagcatttggttgctttcttctttaggaagaagagagatgagtggcagggttctgagttgagcataaagaacatgaaccgcccttatcatggttttcatgatcttcctattcaaagacgtcctgctaggcctagaggtgctttatctcctgctgctaggcctcaagtagtgataccatagggtggtcatcctagtggggtgctggttgtctgtgatatatatggacaaggaccccatgccagtggctttggttcaccccgtgtctttcta

SEQ ID NO: 10186 - DNA, 412 bp, Zea Mays
ggatgaagtcatattcaattcatgcggcaagcatgcttatgtatcctattatcatctctggttcattcagtcatacaatttctctgaagttacatctctttcttcatgactgtagtgataatgcagaactgtatgatatgtgttacatgtttttcctttattgactcacagatttttcagcatcctttgagtgacaaagttcctaaaacggtgccatcatgtgctgttagccttatagaacctccggttgctagcgtaaagcgcatccgtacagataagagaactggagacacttctgcgattgctttagctgttcatttttctacatgttgtaggggcttagcacgagtaggagggtgcgctcgcgacgacagcttgcacgggaatcactggaatcgcgtggtaggcgggc

SEQ ID NO: 10187 - DNA, 526 bp, Zea Mays
caccaacgcatccgttgcgcaattatcctttgattggtttatttcccaattagctcccataaaaataggtgatgagatcttagattggtgtatcagtgtgtattaggaagggataaatatccctaaacaattgttaagaagatcaagcaaagcaacaaaattgttgttgggcttctcccatgcgccatcctctctcgctcacacgcatcctcacggcgaccatccgctgccgggggttcaagtcctggccaccggtcacatgcccctacaccctctgcagtcgccctaggatcctccatcctatcaggtatgacaagattttccccactatttgtgtctcattcagaacgaatttccctacaccctctgcagccgccctaggatcctctgcagacgcccagttccacgaacaaacaaagctcaacgacgagatcaacccatctctacctggcctgccaaagcaatcatccatacccccagcgcttcctcaagagaagcggctacaagagccgattttcgctatccc

SEQ ID NO: 10188 - DNA, 486 bp, Zea Mays
ctgaccatcactgatccagacagtggggtagttgtccatcctgtgagaccggttggcatcaagcatggcctgctctacaaggtgcttatccacatgaaggtaattgaagatctcaatttttccctgggtggtggtggggggcctggcaggaagcgtcaccgggtgatggagtggcattatggcgtccctgaccacctgggggagcgtcgggagcgtgggcgcccattggagcgcgaaaaccgttctttgcgccagggaggcgacgatgacgacgagcaggacggtcatggaggtcgccgtcaccgtagtcgctctatgtgggatcgagtgtcccgttgccgtggttcgatcaatgactgctactcatcctctcatcgccagggggagtggtctcgcactcctgcacaatatcgtcgccagcatgctgttcatcttgcctggggccgaggtgctttcatgcccaactccaagctggtgtggtgcccc

SEQ ID NO: 10189 - DNA, 661 bp, Zea Mays
cctcaggacagatgaccaaggagtcctttggttcaaaaaccgtctgtgtgtaccaaaaggggaggcccgagaagtcctactcaaggaagttcacaactcagcctactccatccacccaggaactaccaagatgtacctagacctcaaaaccagatactggtggaaagggatgaagaaagaaatagctcagtatgtggcccaatgtgacatctgccaacgaacgaaggccgaacaccaaaaacctgcaggcctattacaacccctcccgatacccgaatggaagtgggaagaaataggcatggacttcgtaaccggactgccccggacgcaaaaagggaatgattccatctgggtaataatagatcgcctcaccaaggtagcccatttcatcccagtgaaaactacctttggaggagccacccttgcccggatttatctcaaggagatagtcagactccatggcatcccaaggaagatagtgtcagacaggggaacccagttcacatccaaattctggacaagccttcagaaagctatgggcaccaagctagatttcagtaccgcttgtcaccctcagacagatgggcagacagaaagagtcaacaaagtccttgaagatctgttaagagcatgtgtgctagcttttgatagaagttgggaa

SEQ ID NO: 10190 - DNA, 1129 bp, Zea Mays
attctgtaaaaattaggacctttctgtaattactttataactaggttggatgacgggttcattttgcagatttccagggactctttagcaaaacaaccagccgaacgggtatcggccaaggtgggccagtggattacgcacgaacggcgcggattagactgagtcaccagcgaagtggtatgcggcacagaccgtccaatccgcgatctatggcgcagatttaattattctggagtcactctgctccacctgatccaaaatcaagcgccaggatctaatctagcgcgaagggtatgtggatcctaatctggacggttgcccaaggatctgacggtgcccacctgtcttctaccctcggccaatccgcggcggcgcgaacagtctcccccacggccgcgccattaccagagaggctccactatggctccggtgcctaaaacttcaaccgagtggatcctacacaatgcggtgatgaacacgagttcgggcaagcaactattaccgataatcgggcgcgcagtcgcactatccacgacgaggggcggctccaccgcgagtcaatggctccagtgacaaatccaggggtccctggtcgcaaatcccgcccaatgaggtcaccaacgtcttccccgcggcccggtgcaacacttaagcccacgggtttgagcttcgagccacggcgaggatgaaatccccggtggcggaaactccctacactgctccctcacgcaacagcggtggcaagggtaatggcgtttgggtatggcttgaatcaagttaccaaggacacaaaaggggagatttatatcccaagcccgcacaggcgatcccatcccaacggactccggagctgacgcgtggatcacgcaacggcatgcgagggcgacgggtttagttgcgcgaagctaggaaaggactgacaaaccgagccaccgtccagtgacccgcaacccggtgaggcgatccgcgcacgtgatatgagactgggcagcgggccccacgtgtcagtgagatggctggagcgcgggaaaggtgggttgtgtggaagagttggccaaatgggccgaaatgaaggcctgcagcccaggtgagtttttctttttcttttgtttttattttctgttttccc

SEQ ID NO: 10191 - DNA, 854 bp, Zea Mays
gaggcatagagatcgccctaagatgagtgatcgtaagcatgttatactaggtcgagtaggcgtgagcatgttgcaccatcttaagtcattgctgacttaagtcgattgcttcgttagtagggtatagtggtcaccctaagttgagtaagcgtgagcatgttgcactgtcttaagtcactgccgacttaagccgattgctccgttagtagggtatagtggtcaccctaagttgagtaagcgtgagcatgttgtgccgtcttaagtcactgctgacttgagtcgattgctccgttactagggtatagtggtcaccctaagtcgagtaagcgtgagcatgttgcaccgtcttaaatcactgctgacttaagccgattgcaccgttagtagggtatagtggtcaccctaagtcgagtaagcgttagcatgttgcaccgtcttaaatcactgccgacttaagtcgattgctccattagtagggtatagtggtcaccctaagtcgagtaagcatgctgattggtaataaacggttcgagtgcccttgagaacgagatcctttattgatgaggtatttaccgattacagaatacaatgctcccccgatagcttttgaaatcttgctaagggtaaaacttcctgagatgctctatattccatgaattccctatttccgtgccatccatttgagtaagcctatatgatcctggccgagtgacctctgctactataaatgacccttcccatagtggtgacaatttgtgtcgtccttcccccgttagaattcgacgaaggaacaagtctcccactgcgaaggatcgatgtcgtatggccttatcatgatagcgcctcagggtttg

SEQ ID NO: 10192 - DNA, 573 bp, Zea Mays
accgcagtcacgataggccgcaacctggtgctccggtcgccgcagctaaggctgggggccgggacgagcatagcaagcacccccggcaacagggaagtgacagtgggtcatgccctgtccaccccaacagtcgccatagcgccttggaatgccgagagatcctgaagctcgtgaagcacattagcgagcggcacgagcaggcctccaaggatggctcaccgccttgtcgccggcctggcaaggagaaggtcgacgaaggctacctggccacgggaaaacgggacctcgggtatcaggccctcgagcaagtcctcaaggatatcctcactggagactctgacttcggtgatgacaacgaccgtcgcaagaagatgtatgtaatgtatggcggaagctgggagctcacctcccatagggccttgaagtccctgcgccgcgaggtcctttcggcgaccccaggggtcccgaaggcagccccacatcagcggtggcggagcaccactatctccttcggggcatccgactgccccaaaaacatggcaggggccggtatactaccactcatcaccgccc

SEQ ID NO: 10193 - DNA, 382 bp, Zea Mays
ctagcatcagattcttcatggtgttgcgctattgctgtggctggcgatgcccttctggttgctggttatgatccagggtatgtgctaatggtggtggtggtggtaactgagcccatgccgcttgagaatgacttgccgaagcaactgatatcgtgggttgctggttgcccacatattcagggatagatggagaatagcacgaggcagtatggaagacctgcgtcggctgattctgccgtgcttcggcttcagcgatctccttctgcttttggatcgtgacttggctcgtccttgttgtgtgtcctttatcctccccacagaataagcagaacaatctcctaggttgcgtgctgaaccttcctccgaagcttcttcccctttg

SEQ ID NO: 10194 - DNA, 842 bp, Zea Mays
gaactagctgggaagcttcacagagtgtcgtggagtgtgacgacggtcttggtcggagctaaggaggtgcgggatgcactggctctggtggtcgagctccggtgaagaaaagagttcggtggagcttgttcttcttgtgatgtttggtgagcgacttggcaggggcaagttcgatagcttgggcacatttgctaggattcgttgtctagcttttataaacgcgatgagggcacaaggcgcagcggtggctaactagtgtgtaggatcacgcgcacggctagtggcgcctcgctcttgccagccgaggtcgaacacctggcatccttgtgtgtgcccctattattttgtgtgtagtcactcatccaaacccaatcttgccaagattgttgtacaaggattgttccttgtgccttaagctttcttctctatgtggggtcaagatatttcgagctacgggtgaagacatctggtgagctcaagtggggtttgtctctctgcttcaacccgagacaaaaatatgtcttgtcttatcaaacaatgtggtctcgagttgaacttgtaccaggggttagttaagataattatgcacaactttcataatgagggctaaggaatttgagttttgcaggttagggcacatatgtggtatttgccataggactgatttggctttagtgaaaatcttgatttccttatcccctctctcactcatttgaccctttagaggtttctttcttcattttctatggaccaagtcttaacatattttgttcacgacttaattaagtagaacttttattaagggcttaacccttaagtatgtaattaggtttagtttacta

SEQ ID NO: 10195 - DNA, 537 bp, Zea Mays
cactgaacattgttgaatgaaagagtccatacttctctagcaaaaacacaggttaccaggcaatgttgaatggtttcttcagcctggtcacatatgggacaagctgcaggatggggcagccttcttttagtaagattgtccgctgtctaacaccggtttttttttatggccagacaaatgaaaaacttgcattttaaaggggcctaggtcttccatatacgtttccagaggctgaacttcacagtcccagtgaaggtctcatacgccgatttgctatagtaggttccatgtctatttagacgccaattatgctgatgtggagtgttatgctgaagctcgaagctgtcgacaaggtttcaaagctgcagcctgcaggtacttcactagcacttgtacagtcagtacccctcagagcccatttccggttttgttgcccttgtgctacggtccatttagcgatgaagatttcatatggcaatcatggacattttgtagtaggccaaatgtctgcgtggtctgagttcgcttgttataaat

SEQ ID NO: 10196 - DNA, 327 bp, Zea Mays
tgtggttattaaaggtgatttgaaagctgaaaacttatatgtgcttcgaggtagttctggctctgctaatgctgttgttgcttctgattctgagactactaaaatttggcatatgcgccttggctatatgagtgcacctggtttggcagaattgagcaagagaggccttcttgatggttgccatgctgatacccttgatttctgtgagcactgtgtttttggtaagcataaaagggtaaagttcagttctgctgttcataataccgaaaatattcttgattatgttcatgctgatttgtgggggccgtcacgtataccttctcatgg

SEQ ID NO: 10197 - DNA, 841 bp, Zea Mays
gaagattaaggttttgacgcaccggcctagatacattgaaacggccacggtgtcgaagcttgttgaagggacaccttccaccgctgagccagggtaccctgctcctgctggctccaagggagaatcagctgaagtgccagaaataatagggcaggaaagaattgaattggccggagcgccgaagcattctgccgaaggcacagaaaaagcggtcgaagtgccggagctaggagaatcggcaggattacaaaaaatcctgagcccgccactagagccggagttgctgaaggtgcccagagctcctgcaataactcgcaagaggaggatggctagtgtgatggatgttgtcttagagtcgacaagggcgttaacccctgctcctgtaaaagaaactgtcgaagctgctgcagctcatactgaagtcgaagttggtccctcagtgcccattgaaacaaagcttgttggaactgggcatagtattgaacaaggtccttcagacgtcagtctggatctggagaaaaaaggcgtgcccgataaagttgaatctcctactcccaaagtgtctactgaagagcttgactttattattcgacacacttcgggtaaaaggttgttggaagacgaaattgcagaagccagacactatgtccgggaactgaagtacccgaaaggggccttggtgtataatggcaccaacgaagatgactttctatactgcctcccggacaacaaggaaatatctgtctgccgggagatggcaaaaaatataggatttccgaagcttgaagttggcctttctgttatgtcgaaggatgaccttgcagacagccttgcatacaat

SEQ ID NO: 10198 - DNA, 355 bp, Zea Mays
gtgagaacagctatcgcatgacgccgcagttgatcgccagcaaaggcccggcgatggttagcaccatggccgcgacagtgactcaccgcggctataaattcaccacatcctcgctcccttcactcaaatcaaccgagctccaaccttcttctctaaattgcgaagccatagccaccactcccatctccgattagcccccctagccggagaatcgccgtttcccccaaatcagtttaccgccaccgtaaaagcaccctcgccgtggccagccacttccaggtctgatcatgctctctgcggttctgtttcagtacctgtgtgcattcgtgatgctcatcaacccacccgatcgaac

SEQ ID NO: 10199 - DNA, 441 bp, Zea Mays
caaaaatgttgtgtcatcttcagtagatgtgcctggtctcgagcacagtgctattaactgtttgagcttcagactgctcctgaagatcacgttgttgttgaggcccaaggtgccattctggctgttgatcatggtttggggcagttgccattggtgggggtggtggtaattgaggccaggaggcttgggagtgacttgttgaagctacagaagccgtaggctgttgattgcctacatattctgcgatgtatggagaataacacgaagtagtatggaggacttgcttcggctgactatgtcgcgcctcggcttcagcaatatctttttgcttctggattgtgacctggcacgtccttgttgtgtggcctttgtctttgccacagaagaggcaatacaacttcctgggttgattaccaaacctccctccattgaagcttcttc

SEQ ID NO: 10200 - DNA, 485 bp, Zea Mays
ttgtctcttatagcactgcatcgcggctgcagctctggcggccccggccgcgcttgcatcgttgcattgcgtttgtttggatgatggagtagagcgtgtgcgtgagctcaagccgatggagaagatcgatcggtaggcggtagctgggctgcctctagctctaggtctcctgtgctttctgtgcatgctcacagaccatgcatggtccagcagactcgcagtacatggtatgtcccagctagctgatgctctgcctgatgacagatgacctgtgatcgatccacgcgaccacggcggccgatattcatggcgagggtcgaggaagagtacaagtggaaacagatgggatgggatgggcaatcggtcgatgatatgatacaccagtagttgttgctgccactgccagtgccgggcggccggtcccctaccaggctaccactgccatcgaccgagacgagatgaccgccggtggtcgtatgccaggc

SEQ ID NO: 10201 - DNA, 974 bp, Zea Mays
ttttccatagcaatacgataatttgtaggttcagtaggggacttaacaactgaccatgcaacagtgccgtctgttcgtttcttggggatcctgatgttgtgtttcaacctggtgccgtatggatgtgtatctggatgggattcaggcgaaggagcaacagtatcctgatgcagtacacgatcagcaggcaaggtggtcccagcaggcacctcggcggaaggcaactgaggtgaagcagatgacccaggcacatgttctgttggtgtaaatgtgccagtatcagcaggctgaccagatgtagccaaggaggaagattcgtcgagccttcttgtagcagaggtggtcgcatttagcgcaggcgctggcgctgcaacctgtagccattcttgagactcaggcagggatgaggtggctggattttctgcatgaacaatgttagcaggcaacgacatatgcacatgatcataattcacatcagtactactaatgtccgactgcaatttgcgcaatgtggaggaacaatcggaatgggattggacaagatgagaagctgctgagcgtgcaaaaggaaaaatattttcatcaaaaacaacatcccgagaaatatagatgcgaccagattctatgtcaaggcacttataccctttgtgaagcgaactgtatccaagaaaaacacattctttggagcgaaaagcaagtttgcgattattataagctcgaagatgcggccagcatgcacatccaaaaattttgagcatggagtaatttggaggagtattaagcagacgctctaacgggcacttgttgtctatgacacgagtaggaagacgattgataagatacgtagcagtaagaaaagcctcatcccaaaattttagaggaacatgtgcatgggcaagaagagctaggccagtttcaacaatgtgacgatgtttacgctcagcagaaccattttgttgatgtgtatgtggaca

SEQ ID NO: 10202 - DNA, 382 bp, Zea Mays
tatttgttgagggcctgcagggcgaagacgcggtctccgtcgatgaggtctttggatgttggttcgtctacgtcggggacggctgatgcacttgttcgaggtgatccgtgctttatttcctgcggggtcatggcctccgatccataaagtagacgaaaaggagtgaatctagtcgcctggcattcggtcgtgttcagcgcccagactgcttcaggtaggtggtcggcccatttgcccttcttgtcgtcgagtagccttttcttgatagtagtgaaaatcttgccgttggcgcgctcgacgacaccattagattgcgggtgatatactgaggcgaaggcaagcttggtgccgatggagaagcagaagtccctgaagtcctgac

SEQ ID NO: 10203 - DNA, 728 bp, Zea Mays
cttggttcagttggagtgagtccttatacagattcgtatcctgcatcacatacaagtacaccgttgcagggttcgaacactatacctccattgcctgtaaacttggagtcagatgctgaacaaagtgttcaggacatcaatagtccaggcaaaaatgcacctcctgttccaaaacaaaagaaatccaaggaacaaaactttacagcaccagaagacatactcctttgtactacatggttgcaaattagtagtgaccctattgtgcacactggacaaaggagggaggggctttgggctagaattgaaaaaaggtacaatgaacaaagggggagtttccttgtagacttaacagagcacttagcagcagatgggacaagattagagctgatgtcagtaaattctctggatactacgccagagtccttagagagaaacaaagtggcttgagtgacgaggataaggtaagacaatttgaactaatattatttatactacaactttgtgtccttgtactaattgtaattgaacatccaaatttgcagacatcgaaggcagctactttgtttgctcatgaggagaacaaatcattccattatatgcactgctggcatcaattgaagggggaaccgaaatgggagagcatctgtcaaggacattcgttcagaggattacatgcaagatctatagcatcttcggggtgtccatcagttgaagcaccagagactgat

SEQ ID NO: 10204 - DNA, 311 bp, Zea Mays
cgccgggtgtgctcggtccacatggatcgacggcgaagcgcccaccagctccagcacactacgcagatggccctattgggcgcggccttcctccgctgtcacgggagcatggtcatggggtagtctatacctccaaccatctcccggcagatggtatgttccattccccgtcctgcaactcagttgagcatttacctcgtcaattcgcacccgagggccaagaaccaccgtaccatcagtttcctcatctccactttgggggtcgtgcacacggcacacagttcagtccttacctaggcaaccttcccaag

SEQ ID NO: 10205 - DNA, 862 bp, Zea Mays
cccagactcagaactatatcagtacggacggcgggttaattagctaattcctggagggctcttatgcaaaagtcgctcggctgaatgggtaccattaccagccgtctgattaaaaatggacgcgccagatcttaagcccacacccgcctgaaatggtacgcaacctaagccctcggatctcaatccaatggctaccacgcaatcggctgaaatcattaactatgctttggtctccatcgcccgatcagaatctgatggccacaagtcctccaagtgaaggggtaaccccatcaaatcagggccgttcatcaacgatttggcagccagggtctttcttcttcccccatctggtgccgagccagcgacgcaccgcggccgacggcaaaatctccaccgacgagtggtacccagccaccatggtgatcctatcttaatgccaaaaggtgctatactatgcacatgatgttgtgaactcggttacagggtactcaccaggcacgaacataatcctcatgcgatagtcacagcgatgttctctctctctgcgctctttcttcgataatggccgagatgatcgatggccaaggggtgcaagccggtcacgaatttatacaccaatacagagccgggcggggaaaggagaatttgttgggatttatttaacagaaaaccaagatctccggctctgctacactggtttctcccgcggagtctgctcgatccggtagggtgaagcatctggagaccaggccccaagagcacagctcggtggagccaaccatggatggccgcgacagcttggggttggatcccagcgaggtgcggacaagagccgcgaccaacacagcgaagcggcgccccg

SEQ ID NO: 10206 - DNA, 379 bp, Zea Mays
cctcgttgcatcagccaaccgaataaaggtcctatgttctatttaattgtttcactgaccttagcactaagatccctgtcttttttcttattcacaaactcaagtcacgatagtgactccggcgaccctaagccgggcacgaggttgcgcgctcacgacaagcccacgccggccatctccggcaaggatttacattcttaaacatcacccgagcccggcccgacctaacccgtaagcgattcggatttaaatagtctaggctgcccagatcacggcgacggcggacataccaaactctggcgtgcacgaaccagggtctaggacctcgaagtgttccattcacggttatggtgagtctcagggattggtctagtgcact

SEQ ID NO: 10207 - DNA, 493 bp, Zea Mays
caagcgccaagagtaacaacaacgggggtcaactctgctgaagacgaagtggttgcgtctcttcagcaacacagagcgatgaaggtggggaacgcgtcgttgttgatggagctggggcagggatagattgtaagtttttatcttaattttgtgacagggcaaatctacggatgggctatgcatgtgtgccgtttcaatattgtttttgaaagcatgaataaaaatcgcgtgcggtgacgttcaatgacgcagatgagcagggaagagtggaagtcagtggaagctccacgcacgcgaccaaaggcgaaagcaaccatccggcggatgggcaccgtccgtcttcaaaatggtttctgattccgacgctgcaggtgcagggggcaaacggcgccgaggatgcggagcgagttggcatgcggtcagcatcagggatgcaggggcgacgatactcctaggttgatgtcgatccatgcgttccccctttcccattcta

SEQ ID NO: 10208 - DNA, 506 bp, Zea Mays
atcgtatccaggggcttcaccaagcctaggtgatcgggggtcagcgttaatccctcgtcgggacccaacgccgcggtggctccgccgaacacggtgggcagctaccttcacgttcttgattcacggtgagatccgtgtccacatgtccgccattgtctgtcgcgccggcgaggcctcaccgcagggtcatttgcgccgccgtcgccggtgtcaggatggagtgatgattggggggtcgtagatcctcaatcacgtgactctgattagaatcttgtgtatcccttcggtagattgatcaagagcatcgatttagattcaggcggttgggagtaggcttcagatatgttaaactcgaaccattgatcgcgcatcgggtggctggcattgcgtaccatttcgttttaaaagaaatctgatcctggccctcagtttctaatcggacggccgatctcatcccaaaccgcttcggcgtgcaagtcttgcaaaagagcccatgatgtttttaa

SEQ ID NO: 10209 - DNA, 863 bp, Zea Mays
agacacgtacccatggattctttctgatctgtgagattgaggatacgattttggatggtctccatgctcgccatcagctgcagtacgctcactacctctatcacatctttgcgcagttgatctgtcctcttcagttccaggccaccctcaaggctctcgacttcagttcgacttctatcgcccagctcttgaggacacagttcagtgctagctccagtattatatatcacggttgaggatgaggccatcatatagttcgaggctcagggtgccgctgcagatacttcttccgatgatgatgaggaccgagggattccgccactgcctcctgtgccacctcattcccatgatcacgagactggtagctctagtgttgctcatgttgcccctccatctattgaccatgctttggctgctattcttcagtcgcttactcagcagcaggctcatatggccgtagagcaggcccatcaggcagcagagcaggctaggcagtccgctatccagcagcagttgtccgagtggatgcttttggtgtttcaaatcattcaggatcgccaggacaccctacagtagcagctcctagcagatagggacgagcaccgggtgttcaaggcacatattctctatcataccggtgtttagcttcctccagtgtagtctgctcctcctccggctctttaggctgctgttgttccagctcttcagtcaggacccacgctccaatcttttggtccttctatctctccgctcagcccggtcaccctggatttctcgacctaggtcgtcggacccatcaacgctcagctaccagtgccaccagcgtctgttgttaccactattatcgtggctgtgtctgtgac

SEQ ID NO: 10210 - DNA, 281 bp, Zea Mays
ctcactcgctcactcccctcgctcagtagcgtcccacagccgaccccctcgcacctctctctcgcaccgagcgcacagccgtggagcactgccgtagtccaccgtccgttccgtggccgtcgtcgagttcctgtcgcgtccattgccctactgatcttcgcctcctcgccagcaacacgagacaccctctggttttccccagcccctctatttcccttggttcgctcaccggacctatcaccatgcagccgagtctccgccaccgtccaccagggccctcg

SEQ ID NO: 10211 - DNA, 698 bp, Zea Mays
tgcacatctttctattgtgattgctatctcccttagagttctcacttaatcacttgcgctattgttcctaagttcaatacacattctaaaggaacaatcaagtgaagagttctctccctctctattcatagcaccttggttctgacctcactaatattttataaactaagtttgtgttgtttagtttgatttttacaggatcacatattcatcccccctctaggtgctctcactaccacgcacctggtgatcatggtagcgtcgcaagtcctgttggtacttggcagagcgaaccacgaccatgttgcgtgcttcgtcgagcaggtcgacggcgagctgtgcgtccatagttgctcgttcaacatcgtaggccttagttctcggggagccgtattctaattcagagtgcaacacgcctccgcgccaaacgctaggaacaaagacgtgcaacctgtcgcccgggacgacgtggctcgcaggctccagagtactgcaggtagttcggtcgcccatcgtccgacgaactttttgagcttgtaaaaaatccgtggtttgaggcattgcaggattaggccattcgcgcgctcgacctgcctattggattttgggtgcaccaccactacccagtcaacacgaatgtggaagtcatcgcagaactggaggagcgactccctcgtaaattgggttccgttatcgat

SEQ ID NO: 10212 - DNA, 681 bp, Zea Mays
atttattttatcaatcttgtctctttaaaattcaactaaggtgacactttcttcttgtagattatgtgtactctctagaccactcgtgtgaacactacccatgtccctccacctcagcaggctcctttctacccagttgtggtggaagaagaccctgaagagttgcaccaccttgttggaggaaatggtgtgattttggatgacagttatgaggagattatggcgacacccacttcgtcaccagcacctcatgtcgttgctactggagcttcttcttcagtaacccaagcccctgctcctagaggtgatgaccctgatgattctggtaatgatgatgatgaagaggataaccaagacgacaacaatggtgatgccaacaacaacaacgaacctgaccaagaggatgattttgttggaatgtggcctatcgctgagcattacacctcgatgtttgagataggtcactttccaaacatactatagaatgtgcttcacacgctgggaacctacgtccgacctctttatgacacacgacgggtatctaagctccctagagattgttgttatatcacttgtctgcatatcagagtgttggatgaaggagatagagggttcaggactctctcatctcacgagtctttgacgccgctgtccacctacgctgcttcggtcagcaatgct

SEQ ID NO: 10213 - DNA, 416 bp, Zea Mays
atgatgtccactttggaaccctgtatatctcagttcttaaggaatttgccctgggtcaacacatcaaatttgcagagctataacaagattacaactttgcttgagtagctaagccttgagcacatataaaatttggagtaaaatgagctcaaagttgagctgtcagtcacactgataactgaattatggccacccgtgacattagcaggactttgaagtcaaattagagtaggatctagtgatcggttggggatggttactatagtcgaattgtagccggactataggactacaactttgttaaaggtggattagcaagttattacatggaattttgaggcttgggcgctacaagctgctctgtcaagtgttctgaataacattctgatggtacagtaactgacatagatcctagg

SEQ ID NO: 10214 - DNA, 677 bp, Zea Mays
ctccttgctgtcctccttcaccaaagacgacgacaactaggcatccttgtcttcgtggaggaggactctagcgatctttcgaaatatcttccggtcctccttactgatgtagtcctcctcctcctttggcgttggggctcctcctccttcttgggcgtcgagggttccatgtccttcttgggcgacgggcggcgcacgttgtcgccgttgtcctcggctgtcatatcctcctagctgctcgccaccgacatttggcgctggtgttggtggttggtccacgccgatggtcgtcatctgatcgggggatggctctacgcatgcgcgtaatctgtgtgctgcctcatcgtcatagactgcgtgtttacggttacctgctggaccttggctactagttcgggtctgggtgatgattggtttcatggatggttgagggtctaggtgatgatcaattttcgatgtattgaacccaacatcgattcagcataccctactctcttataggagtactagatgcatgggcgtgaaaatggagcaaaagaggtagctgttggggttgggaaagtcagacctgtttctttgacatatgctcagtgttggatatgctccgaacgcgggattgcttgaatttgaagtggaaggttcagaatcggtgaactgaacatgatgttacagaccca

SEQ ID NO: 10215 - DNA, 457 bp, Zea Mays
cgtggggaggaggtcacgggagtggagctcgtgcgtgcggcgccgtcgcggaggcggaggttgccaaagaggatgacaggcgtagtgcgtcgttctcatagggaagctgggctgcatgaggtaaaaaaatcgttgtgcgagggacgttgggccgcactcatcgctgggccacacgaaccgctgggcctcacaaatcgctagcactgttatggggttttttgattagtaccataccggctattgaaagagttggaacatgtcttataagcgtttttgtggatatcctgttgcttagtccgacttctcctgctttggtgcgacactgagatagctttttgcgcggcaaaggagcggcggggtggaggcagaacagccgttggcagaacacatcgaaggcagaacatgtcagaggcagactactattgcagtcttaataagtagtaaagatagctgagtg

SEQ ID NO: 10216 - DNA, 709 bp, Zea Mays
cccctccttccttctttggtttgcaatagctaggacgcgctgtagatcaccgccggcgagaactagagaccgggaggagagagattgcgttcttgaggacgatgccgtcaccgcactccccctcactcgggttcggcttgtcgccgatttgagtcttcggggcacgacaaaccatctacggcggtcagcgcagcgcaccatctccggtgagtcactcgccctccacgctatctttgtttgcagctggtactcgggagcgggcgacgataacagggtggggagtagacctggggtcggagaacgggccggggtacctctgtcgggtcaagggcaagcgtcggatggccggtatctggcgggagaagtagggtagcggtcggctggactggtgtcgtgaggttgaagatgatgggatagccatggatcataggatggacggctgggatcggatcgcagtccggatggggctgctggatcatcatggtcgttggtaggaagagcaacggtcgagatcataacgtgtcataccccttcgccatgtttagtcagggccgtcgatctagatctgacggataaaatttaacctagggcaataaaatccccaccgttgaatctcaatcttgcggttctggtcgcataccgattcattcgtggcacaaccaaatctcggccgcatgtcttggatctaacgactatcacacgcgcgtac

SEQ ID NO: 10217 - DNA, 492 bp, Zea Mays
gaaatatcctaggttcagagaacctcgccgccggtgagccgcgcgctcggatttgcgccaaacgctacgattcgtgctcaagtaagtactaattgttgctcggggtagtaaatatcgtcgtgtggatgaacttgagccactgttcactccggctgtcgtgtctgcctaactcacggccgattcggatgaactcaccggagttagccgctcaacgattgtgcgccacgttccttggtgtcttaccacatcgcagtagctcatattacacctatccggtgatcgtcggtgagccgccacagtgaaagccaccaatctcttgcgatagtgctcttttctttctccgaacgccaccgcaccatctcaaattcacgggccaccgctcagggatcctataaattgagtgtgtcgtcggctccgctagatagtcaagcacccaatccatcaactcatgccttcaattgttcaccagagcctccgaattgctcacttccc

SEQ ID NO: 10218 - DNA, 544 bp, Zea Mays
gcggaaggtatgttttgtttacttgtgtattgcctaactgaactactttggctgtgcttacgtgtttgtttgtttggtttccaaatttgagcaggaccttcatgtgtctttcgagatgtctcagatgctcacccgagctatcaacgagatgagtgccacgtatgacgcccagtccgacatagttgtcaccctctaccaaaccttctggatcaaggacaacccttcgggcagttccccacggagtcgtgtgcttgccttgagtggccacatgcggagcgaacttcgtgaggctctgcatacaggtatgaagcgggtgctagctatcgtcgtctctcactatatagtcgatctcgagcgagtgagcgagggctacatcctcccggaaggtgatgatctagctgaggtggaaactggaggcttgaggatgttgtcgagggaccgggtgcgacgttggcccaaccttttgaggaggagttccgcctgtgtccctgtttggcgctggatcttactatgcggctacaccccaatgacgtcgaggcttcct

SEQ ID NO: 10219 - DNA, 452 bp, Zea Mays
cctaaggtgagtaatcgcaaacgtgcttgtgttggatttaagtaggcgcgaacgtgctgcgccgatttaagtcattaccaacttaaaccgatcgctctgttagtagggtatagtggtcaccccaagttaagtaagcgtgagcatgtcgcgccgccttaagtcattgtcgtcttaagccggttgctcagttagtagggtatagtggtcaccccgagttaagtaagcgtgagcatgtcacaccgccttaagtcattgccgacttaagccgattgctccgttagtagggtatagtggtcacctcgagttaagtaagcgtgagcatgtcgcactgccttaagtcattgccgacttaagccgattgctccgttagtagggtatagtggtcaccccgagttaagtaagtgtgagcatgtcgcaccgccttaagtcattgccgacttaagctgattgct

SEQ ID NO: 10220 - DNA, 470 bp, Zea Mays
tgtggccgccggcgtttggcttgtcgttccctggttgcaacttgcaagtcgcagactgttctgcaggccttgcagctttgcagggggaggccgggagggagcaccgagcacggctggactgactggtattgcgacgtgcatgaaacgacagagacgtgtcgagggctgagcctgagcagtggatccgtccatcgatccatatcacctacaggctacagtgctcctacgatagcgtaactgggcaatgtacgtaggagtagagtcgtagtcgtagagagctgagcagaggtggcttctacataacaagtacgcagacacacctatgagagtacgagacagtagacgtgacccatgtgctttgctttttgtttgcttttctttttttaatttctttttcagataagagcaaccactgaaccacaacgtccaggaaaagataaaacctctgacaataaatgttgctacagaaa

SEQ ID NO: 10221 - DNA, 846 bp, Zea Mays
gactgaacatagggttggagcttcacgaataccaaatcccccacttggaacgtacgcttggatcgatgcttatcaaattgatgtttcatatactgtttagcgcggagaaggtgttggtgcagcagttgatgaatgcgttctttatcctggagaaatgtaaggaggtctggggaaggagtccaatgcttgtaccccgaagtgtttgggctggtatccatagagggcttcaaacggtgatcgaccaatagaagaatggtgactggtattataccagaattccgctgaagcaatccaactggcccacttagacggacatgcatggacgaagcatcacagataagtctccaggcactggtttaccctcttcgtttgtccgtctgtttgagggtggtatgagctgctcatgagaagactgacccctgctagtttgaaaagctccttccaagaagtgcttgtgaaaattttatcacgatccaacacaattgcagatggcaaaccatgtaatttgtatatgtgctggaagaatgactgagcaactgtaatggctgagaaggggtgggacaagggaagaacgtgttcgtacttagtaaacaagtccactaccaccaatatgcaatcgtagcgctgagaacgcggtaatccctcaataaagttcattgaaatggtatgccaagcagtcttcggtatgggcagtggttggagcaggccgggggacttagaacgatctggttttgcttgttggcaggcaaggcaagaagccacacagttgtgaataaaggtcttcatacccttccatgcgaaaacctgtttgattttcctataagtgacaggcacgccggaatggcc

SEQ ID NO: 10222 - DNA, 525 bp, Zea Mays
gcaaactggtttgaagcagaatcgctaccactagttgggggcactgtcgtggctgcatgagcatgaaatggggggtgaggaccatatgaaggaggatcaccatattcgggaggagcacaaaataggggaagaaatagaggaggagcaccataacatgaagaagtgccatatgggtatcgaggagggtatggataagtgagtggtggaagggagctttggtggtaggagcttcaataggaggatgaaaatcgtcggtggtaggatcatcattgggaggagaatgggcatctatgaaaggtgggtagagaaacataggaggatatggataaggaaacaagggtcgtcgagtgtggagatcgacgaagggcagaaacactctcctgacaattatgtacgagagaaagattgttggagaagacctccccgcattgaaatagaatgggagacctaaacaaaaaggaagatgagctaaatagagagtgagcacgtgaaggaacccaaacactctctgtcggggaccataat

SEQ ID NO: 10223 - DNA, 436 bp, Zea Mays
ggacaataaagctacgcgcaacaagctcttctagggttaaggactgggttactgcaataaatgctgctcgacaacctccagaaggctggtgctatcctcatcgttttggctcatttgcaccaccgaggggtttgttggaagatgggagtatggtacaatggtttgtagatgggcaagctgcattcaaagctattgcatcctccattgaggaagccaaatcggaggttagctttttatttccttcaacatttactacaggataattttctacctgtttgttaaggaagatgattaaagttcgatgcagatatttattactggctggtggctctgcccagagttgtatcttcgacgcccattccaacatcatggatcatctagacttgatgctctactggaagcaagagctaagcagggtgtacaggtaccatcgttg

SEQ ID NO: 10224 - DNA, 609 bp, Zea Mays
gggagtgggcgcagatcccctagctgggaccttctccgtcgctgcgacactgcctgacgctggcgccactgtcaccggatccccagctggggcatgggaggccggtggcgctgtcctagcagcagctgggagcggaccaccggcaccaccctcagcgaattcctgctgctgagagctagacccgtcggtgggcctggtatctagcggaggaggcatggccttgggagcagcggaggaagaagccctggcaaacaaatgatgggttaagacttgtcggcatgatgattaggctcgtggaaaaaggactacacttacttggggccctggactttccagtgaccctagaagcgaggcgatcgccgctcctgctgctgttgccgcactggctgtggttgctgctgttgtgactgctactgctgcccctcctgctgctgttgctgttgctgctgctggtgctcctaggggtgatcacccccggatggtggtggtggtggcgggatcgggggactgacgcgcctctgcgcatcgtgggcctgagagctggcctcctaggtcccatctgcagccttctggcgcttttgggcaggctccgaaatgagcgacccgtca

SEQ ID NO: 10225 - DNA, 803 bp, Zea Mays
gttctgcttgccgaagttggtttgttgaaggagagaggtctgactgccgaagctgtagttgcagactttgtttttaagaacattcagccactaaaggacagagcatacctggcttatttgtatagtggtgtcactaactcaactcgggttaccaacaggaggattcctgctatggatttggtaagccggctggagatgatccttagaggcaaagtgtcgaatattggtgctcctgttgcatattctgcctggaatctgccaccttccaagactttttttcagttttgtgtccaatcctcctactagcgacagtggcctgggtcttagagtgcgaccctctcccgaagaagtcgaggctctggttgcttcacttggtgatctccccaacgatgaaaggcaagttcgctttgaaatgcctataaacccgagtgatgcagagataagtgctatgctggacatattggctgaggattcatctgactccatcactgctgaaactatagctattgcaactgtccccgagcctgaaaagaccttgactgctcaaaaatctgatggtgctcgcccaaagcgccttcgcccggccagtcatccaactgcccttgtcgaggggaagaagaagaaaaagaggaggcttcggcgagtgtcatgtttgaatcaggatgtcggcccttctgctcctgctgctgaggaagtgccatggaactttttactggagctgatcccaatgggtgtgaccctgctgacgctgaccccaatgggtgtgatcttgacgctgctgatcccaatgggtgcaatccggc

SEQ ID NO: 10226 - DNA, 546 bp, Zea Mays
gcggtatgggcagagagcgttgggcggagaggagctcgacatgggtgcatggatttatatgccgaaaagagggatgagaaacgacatcgacgagggagcgcagaggagagattggcatttcctagcggttgtgcttcaagcgtccgtgcgtgagagttataggagagggagaagagaaacaggcttcattatagggtcgagaggaaggccgaggggattaggaccaaagtaactcagatttagtggttaattaagtgatgcattcatctatagaaaaacggtagctctaatctctattaatggcggacgtaactgcagcaagaagaagctgtcacctgtcacgagaaagctccggtaccgtctagagctggggaacagtcacggcgaggtgtttgtgctttccactgagcagagcaagtcagcgcgggccacgaacgtgtgcgacacaggaccccggcaagcaacaggcgaagaacaatagtgttcgtgcgtggtctgtagcaggagatttaagcatgtcttggcaaaatagagctgatatgcaaa

SEQ ID NO: 10227 - DNA, 362 bp, Zea Mays
ctccgagtcggtccggcgggctctgactcaggcatccgccactgccagtccgacctccacctccgccagcctgcctccagcgtccctgcgaccctatagcaatgacgcgcgctgcctggcgccgcgccaccacctaaatccgtccctgccattacatcttcttccaaactatataactttctcaacctgattcccttccttttcttattcatagtcgagggcggagcgcacctccctggccaatgggcaacgaccacctgagcggcgagcactgtgtgctgagttgactgtctgctgccatgtgcccgtgattctcctttattgtgagtaattgttcctgaatgtctgattctctttcccta

SEQ ID NO: 10228 - DNA, 390 bp, Zea Mays
tcaaaatcaagacgcaaggattggatccttgcctctggacgtgctcaacgcccacatgcatggagcgcagtgtatcccacacatcagcagcggtctcctccacaatgcgtagcagtgtgtcgtcgtcgacagcttggcagatgatcggcaaggctagttggttcatgccatcatctacggcctcagcagccccacgaacagcagcaccccatgcaccgctagtttgcaggatatacttcatcctcactgcccataccgcgtaattcgtccttgtcagcatcgggagcgggagcctcctcgttgtcattgtcgccgggttgccgaagcttccactcgccttggctttgctcgacggtgagtcgttgtcgctgttgcgcttgggtggtggtg

SEQ ID NO: 10229 - DNA, 452 bp, Zea Mays
gagaattcggcgtacggcaaactggactcccaatccctgtcgaacgttaacacacaggctcttagtaaatcttcgaggatcttgttgactctttccgtctgaccatctgactaggggtgataagcggtgctgaaatctaacttggtgcccattgcttgctggaggcctttccaaaattttgaggtgaactgcgttcctctatctgacactatcttccgcggtatgccatggagcctgactatctccttaaggtatattcgggcaagggcggctcctccaaaagtggtttttactggaacgaagtgggccaccttggtgagacgatcgattattacccagatagaatcattccccttctgcgttcggggcagtccggtcacgaaatccatgcctatttcttcccacttccattcaggcactgggaggggttgcagcaggcctgcaggtttctg

SEQ ID NO: 10230 - DNA, 633 bp, Zea Mays
cggagtagaggcagaaggaatgtgaaggatgcggctgttgtgaggagatgtcgccttgcaggtgcaggccaggcagtggacgaggtccttacatgctgcggtctggtgtcaacggcaaaggcagcgaaagcacttaccatggatggagacattgaagacggggcgaggagtgcgcctggtggttggcgaattaatccacgcccggagggtctcccgcttcctgcgcttgtaagatacggagatccagccggcatcgtcttccttcaagcgagtagtcttgtcgccgtcttgggaaggagctccgccataagtgctctagggggattgaagacctggatccgtccgcagagacgaaggacgacccccccccccctgtagcccatgccctatcgctgcgtcgggagggatggtcatcatttgagtggcccccaagcttcaatgctcggatctggtcgcagcaccgccggatctcgacgaacagagggaaggaggtggggagtaatggcggtcgcgtctgctcattatcgtcatcttcagttctgcatatcgaactgtagaggccaggtaaactgtttgtttagattttttttccagttaaacatgcatatttaatgatcatagcagtatgaacat

SEQ ID NO: 10231 - DNA, 577 bp, Zea Mays
caggaaccatggtcggttcaatgtaacgcggccggtgggcaagaaacttcaactttttgcccttcgacacaggcttatctgggctgtccgaagcagaagttttcctctttttcccttgttcccacagcgggtagcggtagttagggtatacgaagccgatgacatcgaaaactctgtttaatcttttctttctccggccaccgaaggctgcggacaaggcattgtcctcggtttaatttggagtatgccccaagtaactcgtcgctagtagtttcaatgcacttcagccaatcatcatttggttcatcaaacttatctccaaacctgaaggtgtatttcagctggactaaatcaccttcgctagaatccttggtggtttccttcggcatttcccagccttccacaagcggccacaccctgaaggctatgtgctcctgaactaaatctcttgtgcaaataaaagagcaaacattgccgaaggcctactgacacgcttccgcagcatcatcaatttcaaccttcggccttcagaggccgaagcgggaccaaatggggcgcataatgacttccttaatat

SEQ ID NO: 10232 - DNA, 418 bp, Zea Mays
gttggctacggagtggagccaattatgctaatgtgtgtaggaatcggttatgttgacgtgcgcaggagttatgatgatagacccaagttgtcgcctttggtcggtagtttgtcattactctttatgtggtcaaccatttatgatggggcaatcccgggcctggtgtgaaatccactcgagtggcttcctctcggtttgctcgacccccttctagctccacctcacccgaccacgggctcggtgcctcagggttactcgagggcgggtccttccggggcaaactcttcctccgtccttcctctgacttgtggtcccctaggggtccagggatcttatccccgacgcttgttgcttagcttgcaaacaaacttgatacttcgaacctttgactataggtaacacagaaattaagtttaag

SEQ ID NO: 10233 - DNA, 754 bp, Zea Mays
ctttttgcaaatgagtccaaaacttagggtttggcttgtaaatctttccaaatgtgaaccatgtgactttatatgctttatcatggtaatttttacactttggtccaaatgtgcacagtttttgcacataggcccctagggtttggacttaggtttttccagggttccaattagggtttttggtatctcagggatatgaatgtgattcaaattcattcttgggaacattttatgactattcccctaaagcttttgggttttctcaatttgggtcaagttttacccctttaatccctatttagggttaagttccctatccagggttctatttgcaaaatgctataacaatacaacttgtttgaaatttttacctagtgaatgcactctaggtgtgtcaaacatatgcaatgccaatgcttatgatgccatgtgcaagttttagttacagtaacaccaggggtgttacaccagtgcccgtaccacaaggacatgcgccacacccttcggaactgcagagacttcaagcactccgtcgggcacggccgacccttccaacctctacctcctcctccgccgcggggaggaccaggagaaccgtgacaaccccagcaacaggaggagggaggatgtggagccttcccgcgcgtcgacagagaggtcaacgtcatcttcggcggacacggatcgcaggagaacaaaagacaacaaaagctcaacgatcgctaaatactggtggcgaccaccggtcctcccg

SEQ ID NO: 10234 - DNA, 930 bp, Zea Mays
attcattgacataacaaaagcagacccacaccatctaacatggatctaaaacagccatcaatcaagccgcaacaactgctatggcctctgcatgcatggcgtccacctcctcttggatctcagctatagcatctccagcaattcccatcaaggccttatcgaagcgaactgtgtccggcttatcaagattaacaaagcatccagagccgtccccatctccacagtcagtggcttcttgaaccaatcctgaaattcctgcaaagcaatatcaaaatcagcagcgtcatcgtttgccaagagaccaagcttgcggcagaggacgcgctgggtccgttgcatggcagtcgttcgagggccgttggcaagtctggcgctacgacgtaccgtcgagaggttgaagtcgtgtcactgtttgattcttctagcaggtgctacaggaatagtagactgagtggtcactggtgttgttaccccctccgaaggatgtagcactggtcggtcgagtatggcaggcgagggcttggtgaagatggtgttgagtagatggctttgcgtggtggttgacactgttgcaacatctgctgaaggttcacgcacagcagctgtcgtccgagagaaagcgccgacgttggagtccgtcgcagcctcgtcgttgtagcccgcagcaaccgtgctgcagggagagcctaacatcacatggtcctccgtagactgcaccaaaggcagtagctgcatagcagggcatgttggaagagaatcgagaatacttttaaacgctcgctgcactgggatgagacttacgctatatgcgaagttcatcctgctgccatcccagacagcaaggttgatgtcgctaccagcagcccctgggaccagaccgacatggtccttaatcaccaagcgtggacgccttcggtacacgcagccaac

SEQ ID NO: 10235 - DNA, 1019 bp, Zea Mays
gtcgcatcgggtgtcacaccaaccaccggttccacgccagccaccgggaccacaacattagtttggcacgatccaaggcgcgtatgcactggcccgcgaaaggcgacgacagccgcattggaaccggacgccactggggtcgaagaagatggatgatccggcagcctacacctctgccgcctatggaggtcatgatcacgatcatcatcagcagggctgtccggcgggggcggtggaggggcttgctctgcaggggaaaatctgccatggacaccgaaatagcaatgagatagatcaaggtgcggattgtcaccgtatcatcaccattagctaacaacggttcaacgatgtggaggtccatggacatcggaatgagctcaggccgagcgcaccaggcagacagcttgaaggagtggaaatcaaggtgttcttccgtatcacggtgcagttcctgtaacatgcaaaattcaccgaggagctgttccgccgtcgcagcctcccaggtgtggcccgatattccatgcagctccacgtcgatcaggaatgggagggcgccaccgccgccgatgagagcttgacgagtccaccttctgatgtgtaagcgaatggaaggggcgatgaaaggccacccgtcgttatagacacgacatgccagttctttcgtaggaagaaggacaatgaagctattcaaagtcggcgcaacacgtcaaatgtcgagcgcctcccccttgagattaaatcgtagagagagcgcgtcggagacttccgcggcgcagccgacttcattctggccaacaacggagacgataagggcacgccgaagctcatctgccgaacgagtgatactagccgaccgtctgatgacccgcattggccttgcagcgtccctagggcggggggagtctcatctatccccagcaggggaggcacaccaacgtcgttagcgcggcgatccgaaggagacgcagagccaccacctcgacatggcccgcgcctccgccggccgtggtgaatgcgct

SEQ ID NO: 10236 - DNA, 534 bp, Zea Mays
ctttgtaaccacaaccctaaatctcttgacccccatacaaagaagatagcttatagcaaatggaaaatactttgtgcaacaaccttggcaagatcgagtttggatggagcacatcacgcaaaagaacacgacccaacacagtgctgccaggtgttcgaccctggtagacaggctagcttgccgagtggccaagctcgcatgtgcccctaagccccggtcggccaccactgcaccaacgcccacgcgcacctataaagaccgcccgatggcctccggccaatgctacccaaacccccgcaaccgtgcccgagtgatcgttgccggtgatcaccagaatcgctcacaccaccgcctgcagttcttccctggcgcacgacaaccgtgaccatcattgcccaagcattccctgccccaaccaaggccccctacacactccccagagcctcatgaaactttccaacaaactccctcacttgctatccaaccacaacggcgagccaccgctcccacatcttcgccggtgaacgtggccaa

SEQ ID NO: 10237 - DNA, 424 bp, Zea Mays
aattctgcccaggtagcgtccctgacggccgcgctgaaggtatcccaccatgctagggccatcccagagagttgatgagcagccaattgaacacgctgattttcgaggcatccgatggcttccaatttcctcttgatcgtgcgtagccagtcatcggcatcgaggggattgctggatccagtgaacgtgggaggcttgagtctcagaaattctcctatcctgtcttgtggtcttccaccacctgggcgctggttctccagacttctagtgaggacttcaatgagtcgggtctgattggctagaacttgggccaaatctagtggtagttccggaggtgcggggaggtgggtctcactcccttctccgccagcttctccttctgctcctaggggaaaccctgctccaatcccggaggcggtaggcg

SEQ ID NO: 10238 - DNA, 427 bp, Zea Mays
gcaggagaagctctctctccccctcctgtccggcggccagccctttggatcggaaatggctgccatttttgcgtagctcagaagctgtcagaactcgagcagagatgcgtgatgcatgcacgatggctcaaagacaaatgccattgcatgcgtgagaagaatgtgtaccgtgtgcgtacagtatagtgccatcgtgtctagaatccagatccatggacactgtactcccatccactaggatcacaacaagctatagctagtgctccgtactcttctgtctatgcacgtccgtccgtgtgcctccatatcttgtgttctcttgtcattgtttggactcgttgcgtgacgggctgtatgccggtgctgcttcggctgcagtcgttgacatgcatggcactcatgtcgtccgtggggtgtcactcggtag

SEQ ID NO: 10239 - DNA, 1569 bp, Zea Mays
ggaatagcgtaaacatgcgttgactaaggaagatatggttgaccacgtggaaagtgggcctaagccgctatttctggaacgagggctcacggctgttactctgtttacgctaaaatgggtttccgtttacgctaaatcagttcgcttgcataaaaagtgatcggacgtgggttgaggctctccacagttatatagagcctagggctcttaatagataaactatatatatatatgagcacattcgaaagattaattattcacgacgattgacacgtgcagtgatcataagtaaatcttcatcttaaatgaatacaccaggttcatttatttacttattatgaaaccagctccaaaaagtggcttctgagcctatccacgtcgtccattaatctttcgaccgtaggatcggattccaacggctacacgagtgttctcacgcaccaggcgccaggcggcctcctcatgctggataaatcgcgacgcttccagatgatacatctccctctcggctgccgggcggcactctccatggtgaagagggtgtcaaccgcgatggctacaacgacgacgatggagcacttgacgcccccaacagatgcgagccattctcctcctccctacgtcctttccccctccacgacaccataaccgtgcctgctccgccgaatctaaaggtgtcaggatccccaatccttcccctcctctccccctctccacgacgctgcaactatgctcgcatcgccatcccctcccctcccctgtctccaagccaggaatcccatccccaccccaatgtcgcagttctgctcgcgttggccggatctgtgaatgaagaacccacagttccatgacctcctcttcgtggaagcctaaaaggcatcacccccataagtgagagggaaaagacacattcatatatattctcttagtttgtccactgttgtctagaaacatcatgtaatgaggctgggaaacgatcccacggagtgctcccgtgtccgtcgcctcggttcggcagaggccagcaaccgcggcgcctggtccacagcagcagccaccacggctcgctagggctaggccgacctagatgatatgcagtgagctgatgggagggatgggcgagcaagaattggtacagtaaccgggagacgatcttgatttattccttatgtcatgaattcctttttatttacacccacactttctaactttcgtacaatgattcgtatatttaaaacaaggctaacttatgttctcatgctttacaaaccctggcatatgtcgcaaaaaatccttacctaaagaactaactctgcagcctcttcaagctctagatttcaattcttatggcctaagaagtgtttttttatttcataatataagctttcacaacaatctaattcttggagtcagattctataaatacccaacatttactaacctacattttttttcaattggtgccatgaccatcacataatgttgatgagctattccctccaagttgctgattgcatgtggattaccatgcatggctatttgctatttggttgtctcgacctttcttag

SEQ ID NO: 10240 - DNA, 363 bp, Zea Mays
cccaagttttgttcatagtccatacttcaagtgacaagtctccaatagacaagtgaacactaagaatttaagattacaattccaaaaagggtacataaataagatgacacatggcagtacaccaaatacacgcaacacgctcacaaagtctgaaataacttccttgcaccaatatcacattaccggatcctgcaaatgaagaaagtaaatttcaacatgtattcatcaagccacaaataactaaaaaatgacattgtctttagaacattacctgcatcccttctgatatgtcctgaagaaccgtccaaaagctcgaaggaagaccatttgcatcatctgtatttcacgaacataaaattttag

SEQ ID NO: 10241 - DNA, 638 bp, Zea Mays
ctcaattcaccttctagcatgcctcggtgtcgtatcctagggcttctccaggtcgggggaagtggtcgtgccctcgccgagcggaatcatcaacctagacttagggaatcgctcaccggagtgttgtggccgccgcggtcagcctcccccccgtggaccatgctccgatctgcacaaacatcgataataaccgcccccatcgttctgcttccacctccaatcggggaaacccccaccgggtgaacgtcggtcatggcgccaccgcttctctagccggggtattggtgtgcgatgggtgggttccccatagccgttgatcggccagtggacgtgtgtgattagatctcaggttacgcctccgtcgtttttaatcaggaccattgatcagtggtcttacagtctggggagggctaaggcatgggcaatcctcgaccgttgatcttgcgtggacggtatagattagaagcatcagtacctatttgggttttttaatttgagacatcgctggcaagatgtgaggtgcggagtagagtgtggggcgtggcgcagatctcggccacagatcatagatccgagggtcaccgtattctacaccaagggattctaatctgggccgcctatttgagatccaacggtcg

SEQ ID NO: 10242 - DNA, 341 bp, Zea Mays
caacatgctgcaacaacgggacatcttcttggcggaagtccgcgaccgcctcctgcaagcacaagcctacgccaagtgctactacgacgccaactatcgtgacttggagttcatcgtgggagactgggtctggctgcggctgctccatcgtcaagcagcgtcccttgtcgcccgccccaacgtcaagctcggaccacgctacgcagaccgttccaggttgctggacgcatgggcgtggtggcataccgctgcggcttccagaaggtgcaaagatccatgatgtcttccacgccggcttgctaaagtcgtaccgcgggacgtcgcctgttggcccaccacct

SEQ ID NO: 10243 - DNA, 847 bp, Zea Mays
agtatgattggttctttgatgtcaattgatgattactatgcaaagaactagtagtctgttatgcgttgaatctttggaacataagtgttgtgccttgctagttgcaattgcaactggcattgctaggttttaactcttttctatggtgcttataaatgtgaagtttctgcagcagtcagtgttcctttgtcttgctggtacatgcaatcaactatacttgcatcctcaccattcaaactttgaaggtgcatctgtagaccattcaatacattttcccaacaaaacttggttctgagacagcaaggaacttttcctcgtcgtaatgcttggtagaagactttctgatacttttcctcaattactccagtttttctttggcacttccgcctttctgtgttgttcttgttgatcagcagaataaagggaaaaaaacatactgcactactgcttctatccttgtgacagatatttgactatgatggtaggacatgaaggcaagtgaagttgaggtatccaccacataaactgccattcccagcggtcatacctaatttagatttctataaacactcccttttggtgctttgctgtgtggttcatgggacatgacgcccagtgaagctgaggtattccaccagcttgtttgtttgttggtttgtggggtgtctgctgcattggatctaggatagtttagacctctggcatgagaaattttcagctttgatagggttgttgacaggaacaaggttcctgatcttctgtcagatttcaagatgaggggattgtcctaaccaccgtctgaaattcactcctagaagtcaaactcaatacctgaggagtgctactg

SEQ ID NO: 10244 - DNA, 592 bp, Zea Mays
gagcatgcgatcagagacggactccccaagatcggagagggatgctacgatgcccttcatctggcggtagtactcaatgactgagaggtacccttggatgaaggtgggaaatgttgtgtcgacgtggagaacgtgagcctcacgattaccaaggaactctcttagatggcaacctaggcctgacgggaagtgcggccatgcccatggacgacatcgtggagctcaatggtgacgatctcgaggatccatgagaggaccacactatccacgcgccactaggagatagttacggacacggtgtcggtgaggacatggtcatcaaggacatagagctaggggtgaggaggaaaaggtcacaccagtgggcataggtggaggaagttgggtcaaggatgataggaactagagattggatgttctagacatctcacatctaccacctatgcatgtaggttggcaataacagttgattcgtactccaaaggaggggtgaccataagcgacacggggggagactcaatgtagggagagccaagcagatgacgctcagtgttggacagctactagggaagggtagctgccatgttgcgtt

SEQ ID NO: 10245 - DNA, 658 bp, Zea Mays
tgcttcgtcgtcgcctcccgacgtcgacgacgacctaacagccgacgtcttgccatcgttgtggtgtgccatgccgccgaccctccctctgtctcctagttcgtaaccctaaccctaatccccttcggttctagtggttctcactcctcggctcctggccagcgtctctggtgcttgggctgtgcaagcttcattcatttcaccgtctggtgctccggctagcgtcttgcttggtttgtttccagtctctgttgtctgctcgctagttgccggtgctccctacttcggctgccgcctatcggcctgcttcactatctggtgctcctttctagcatgcgattgccgacctacttggttgtttttcactctctgctgtctgctcggcgctcgatgttggctgtgctccctgcttcggctgccgcctgacggccttcttcactctctggtgttactctctggcctctggctgctggcctgcttggacatctatactcatactccctcgcacctcttcctatcctctccatgtcccacagtgcctaatcctaatcccgtccggcggtcctcgctccttaccggcacacatcacaaaatatgagtgatattctttcttggggtacgtaaatggcaccaaaacttcaccaaatagtgctttgaa

SEQ ID NO: 10246 - DNA, 507 bp, Zea Mays
gtttagttatgtagttgctcacatatatattgtccagagatgattttggctccagaacttcaactctcattttgattgcaatcgcaaagtttacaaacaacagttgatgttgcttgtaattgcttatacatattggaaatctaatgacctgagaagtgcttgttgttggaatatactaatattgtatgggacagatataaatacttttgtgtgcattagtagctgaagtttgaaagatcaactgcatggaccaggagcaaaagagaacagatatgacatagttttgatgatcatttttatatatttcaagttgttattgcaattggttctgttgcttctaatgggctgaagcagctagcaaatgctatctgagaaatctcttatattggtctaaagctcggaacggtatttgtggttcatgttgcttgatatatttaatatgaaattgccatgactcttagatgtgttttcctcttttgggtcatttcatgccttatttgcaagaag

SEQ ID NO: 10247 - DNA, 595 bp, Zea Mays
agccgactcctttaaattgagcactaccctctctctgcctctcttttacgcgctcatatcaccctcagttagtctctctcgtgcatcgtagcccccagtcatcagatttcccccaaatcgggtcactcacgccgctgtgagacaccctaccatgatcattcattcccaggtctgttcatacctctttgtgccatgttttagcattcttgaatgttaacgaggctcgtcggctcaatcgattgaacactaccgcaatagggcatcgaaaacatcacctcaccaccgtggaacacttctaagagcgcactcacatcgacctactctcccacgcccgctccgtccaaattcacgtgtgtacccgacttttggtgagtcggttaaactcgccctagcttcaatttaaacgctaccacattttgttgctctgaacacgcttaccggagctctagcgctgtcgtggccatgaacaagcatcaattaggatcagaccagtccaattgggtgagggcatatgttcgggtagacttgcgcacgatgtctaagtgcttgttacctcaagtaggggtcgccgttgccgggaaactgtgactccggc

SEQ ID NO: 10248 - DNA, 728 bp, Zea Mays
tatctcttctgcgggttggcgctgctgatttcgtcgttcttcctgctgttgctggaggagttcgggcttcaactccagcacctcacaccccactccattctccaggtggccatctttgtccacttttgtgagatgtttgtgggagtggtggcttgcacctcccttttccgccagtttttcgtgctggtgaggtctgggaagggcaaggatcacctcggggcctactatttccagtcaaggtcagacccgacagtgacctacattgcctcccttggcggtgcgaagggggagaactggtgaagtgactgggtgatcgccagcgctgaggctagcgaccgccttgctcttccgagtgacgggcccagcttcgagcggaaacaatggagggtgaaaccatgcctcatgccggagttcgggcccatcttggacaggattagggaactggcggttggaggcttgacctcaatgcacgtactcggggatttcctgaagcgccgagtcatgccgctgcaggggaggccgcgtctgagttgctggtttatcggccccagcgacattggtaggatccaccgtgggcctgggaccgatctgacttgggaggagttggaaattttggtgtggggggtcaccggcgaggcttttatccctgaatccttgatgcttccccaggggatttcgccgctctgcgacaatcctgggctgcggtcagcggtcctggcccgtctgcc

SEQ ID NO: 10249 - DNA, 552 bp, Zea Mays
attatacaagttttacaattatttctatactcaaaatcaatttctaaatctttttttctattttctttaattcctggactgggcacacaaaaccagaggagcacagggtttaatctataagatttcctagactcagaatccacccgcgtggacggcgggttggtttcaaaggaactgagggacttatttgcaatatggcgcaaccgaagaggtatgatgacatgtggaccattagatcaatgatcgacgcccccgattagatccgtctttaagtgaaccgttacgcgacatggaccgcccgatctaaatccaagggtcggaacccgggatctagtcccaccccacaccatgatctcatctgattcatccgtgggtcgattgacggcacagattaatctcaggaaaggagtacgtgcacatcaaccgcgaccgtggatttcaagatcaacggccacaatacttcttctccacgcgaataccaagtgtggcagcgccgtttctccccctacggcggacgccatagccagaccacccattcaccgctcccgggcc

SEQ ID NO: 10250 - DNA, 338 bp, Zea Mays
tggtgcggcatggagggctctgccctctgcacgcagcggaccaatggcggaggttcaactccggtgagtaattccggtgaccttagtggacttccccgcctgagtcggccatggctatatccagtgaacacctgtgaacctgcacggccaccgcacgagggaaatcattggtgtaaatgtgggtcgacgacggcttcattttccctcacggagccgcaactaggatagttcttgaggcgacgaaggaaggaggtggcggctcgagctggaggacaaaggggtcgagttttatagcccgagcaaggagccccgcgagtttcgcaaccacccccgacaga

SEQ ID NO: 10251 - DNA, 566 bp, Zea Mays
gcacaagtgcgcaaaatcgaggtctcctccaaaagactccgcgcaaaatacgcctacaggtgcagccggtctaactcaacaaacgcgcaaaatcgaagatttcctcaaaagcgcccggacacaagccgcctacgggcgcggccagatcaacaaaggcacacaacctcatcacacaaatcatagttacacacacatcgaggcatcacacattacaatggctcaaccttcgggatgatacccatctccctgtagttgtacaacattatcctcaattcctcaccctcaaaaagatttcgcagctcaccctcacctacacttgcctcagccgacgaagacaacaattcccgtctggcagtcccgtccactcgaagacgaccaccctccacctcaccatgacgcctatcacttcgtgacaactcactcactctccgcttcgccaccgcccttcgacgcctacacccagcactcgcacaaggaatatcctcaccggtcacacgcagagaagtttccgctacagccgcatccaatgctgcaaaatagtctaaatcctcatccgaagacccctc

SEQ ID NO: 10252 - DNA, 474 bp, Zea Mays
atgcgtgatgatgacgactatggggaggactacgatggagaggccgatggagaggccgatgacgaggttgttacaacacaggcaacgaacttcgggtatttttattttaacgatgagttctattttttgttggattgatattattaccagtgcacaatttacaattttgtagatttcggcgatcccttagagttccaccaacacaacccttggaccaacgtagggtataaaccctgcaggagagaggagctgggtggaggtggcatggagtggcaaaggtcaccggacaccagttaacacagtgttgggatctatagctcgttttcactatctaggggtggtacaattcaacggggcagagataggggcatatcactgggctcactgggccctcaaaccatatggacccgaccgtactcaccaagacgcagtgtggtcatcgttttgggtgagtttattatgtcttttaatttt

SEQ ID NO: 10253 - DNA, 764 bp, Zea Mays
ttaaagatggattgttgagctacaaatttgttacacagagattaacacattctcacgcaaaaatccaagatcttggcgtcacaagttgcttggtcaggcactctgaatcagatcttcaatggtacagtgccacacaaatatcaacagattcagggtacctcgccgccggtgatccacgtgtccggatttgcgctggtcgtcgggattcgtgctgggcacgttgttgatattcacggggaggtgaaagatctcgcggggaggcagatagggtcgaaggggaagcttatcaccgtgcctgtagccgttgcgacgtggccggaccgccggtgtcgtcgtggacactccggcgacctcaattataccacgtcgtgactcttcactacgtggtagtaaccgtggcacacttaggcttaccctctctgaaccactacaccggtgaacgccatgattgcgccaccagtgacctcttccttctccggccgccaccgcgccaactccaaattcacaggccaccgcccccagagcctataaattgagtgtgccgtcgagtccgtaaggtagtcaagcacccaacccaccaagtcgtgcctccaattgctcaccagcaagccccaatttgggatttcccccaaatcaaccaagaacaccgtgcggtgtgagctcaccgtggccaacctgctccaggttgattcataaccctctgttgaatgttctagcatctctaggatctcctgttgctcataggctcgattgattgaactaga

SEQ ID NO: 10254 - DNA, 771 bp, Zea Mays
aaaagcccactctgcagatcggtgccaataactatagtgtgaggtacagcagtctcagcagatagaatgaattcttaaccaaggtacactagtcgaagaggaaaaaatctacaatgtctaattcgtcattctaagttccataagatcatcgacctattccgttccataagctcatcgaccaataacattgcaaacacgtcctggaccacgaaagtgtagcagcagaggagctgaacttccgagaatggagggtcaacgctgagggtgatggggttcagagaatctatggctccaccagccctcacttcagtcttgtccctgagactgtacacgcacacgtcgaaccaaggttcctccacgacgtagtatacgcagttggcttccaccgacgcgaacttgtcagcatccacggacaggcacctgcagtccccgacgaagagggctcggctgcctaagttctttaccagttcgagctgaccggtcccggtgtcgatcttgaagacaacgacgccatgaatcagcttgacgacgatcagaatctcccctccagattccacgagaaaaaaccgttggttcccgccggcgaaatactcagcgagctgcatagctgctatatccaataccttgctggcatcaggaacgaagaacgacaccaacggtctaccctctcgtgcagcagcatagactctactttcgagggccaatctaaccagaggacgagcaaaacgtccctcataatgctccatgaaaattctgctacaaggatcagcc

SEQ ID NO: 10255 - DNA, 283 bp, Zea Mays
gtgtgcgcctttccccttccaagcactgtgccacaatggattttgtggcagaggtgtttggcggggaagggagttacaagcacgttgtggtcaagagagggagagaaacccccgagcttataggctcattgaggtggagtatgcacgggtgcatcgccgcggtcttcgtgagtacgtttgggtattacacaccctaagttggggacaaacatagggagttcatgagccaccacccacccaccttctctcactctactgatctcttagatgtgatgactggctt

SEQ ID NO: 10256 - DNA, 916 bp, Zea Mays
cgccggagcgtaataccctactccactgtgtgttgtattgctttgggagcttgagttgagtgtaagcctgaatgacttgagtctgagtgtgttcatgtcgtatgcctccccttttatagttcaaggggggcatgtacaagggttctgagccccgacacgtgggcccagggacaaatggaaggatggaactattgcttgccatgcccatgtaatcttcgtatgtcttgacacccgagatctgcgttgtcttcggcgtgctgggggaagcttctcatataagggatgagcacagtgcaccgcgcagcacgggcacactgtttcgacaatggactggacaggtgcaccgtctgtaggatagccctggcgccgcctgccagcggaatggataggacgtaataaatgccgttggggcacatcatctgtgagaagggtggacaggcggcgtgtccttttcgcaataaatgttgaggccacgcggctcagagcccttacttcatgctctgcccgctgccctacgtcacggacaataagccatgtggttgtatttgttcctcggccgagcggggggcggaggtcctacggatagagccaagacacgcgtcaactccggacccatgcctaggttatggcacttcctttcccgggaccttgttatgggtggttcggggctcactggatggggtctgaaccccatccaatggcttcaggctgctttacttcgggggtccaggttgtgcgcacagggatcctgagcttaccgggcccgatggcgtcgtctctgaggacgccaccttaacttcccacgcgatacccctggggttgttctccgtgtggctaagggtagccgcacaggcatcgtgccttcataccgcagtaaggggtacccctaatccagggtaccgacagtggcccccgg

SEQ ID NO: 10257 - DNA, 888 bp, Zea Mays
gtccggggcatgaatgcaactaaattgcactgacaatagacggagggttgatttctctgtttttgagggactctttagcaaaattgactggacgaaggggtatcgttgcgtaggagcagctagatcaactctcgacggccctgattaggtcgtggcttttacgaaaggggtatgttgaacccaccgtgggatccagatcggatggcccaacatttatgaaggctgatctaatttcgccccctccgatcaggatcggacgacaaccaagctcaggacgaatcgatatcctcctctaatcctagctccccgtttaaaatccgacggccatcgcatccccaccatcgcccgacgaccgccgatgactacagcacctgcccacggtggaggctccccgacgagcgcacagacagtcacgccagagccatcttcgctagattgaaaacacctactcgtagtacacaacgacacaaacgacatgggggtgttagtaccaagatccgtgccatgatgcacttcagccacgacgaagggcggatccgcagcggagatgccacaccggtgagcaattctgtttgctctggttaccctcgaagctcgattatgcgatgaagacgtgcgtctgtgtccaaggctccttcccacacttttcattggatctccacgccggtgaatgcccgattcgagggacgcgactactcttgtcctccctctcctatcttacggcgatgggcggagaactggtggggcgacgaggtggctgtggagagggaaatagagggggaagagttgcagggcctcagttttatccctaggccttcggttggggaggggaggtcgtaacaacccggcggcgacggcaatgaatcggcgtcgactgttacggtgggg

SEQ ID NO: 10258 - DNA, 364 bp, Zea Mays
catgaactccggacgcggaaggctacctgcggctgcttactcgagcagctaatcaccttctgcccatcgctcgtcctctgagcgacctacgccacgccatcaacaaccgacgagacgcacggagctccatcaacgcttcgcgggaccgacgacacaaaagtgagataaggcgccgggaggagtatgaccgggatcatggtgtcgcggcccgaagtcgcgccacctgagttgagtcggctgtggcctccactagtggcccgatctggggacggttgagacgacacactaccagctcccctcctcgggaccgacctcacgaacgccggcaggaagacacatgcggggtctctacgcttactccgcg

SEQ ID NO: 10259 - DNA, 1311 bp, Zea Mays
ctttcgataagagtcggctagtggtccggagacacaccccaaaagatacctacgggtgattcgcctggtcccaaacccatttgatggggttcgagggctcgatgcctccctacgtgggacaccatcacgaatcgctcccgggggtctcggatatgtcttaaggtaccttgtgtcgcaacccgagctagggccacgtacgggcgtacccacagtcatccctgactctggctctggggcggttatggagcccttccgagaggccaaccttcgaacccctgatcagtgatgggatgggagccctggcatcttgaggcggcttttccgaaccctgctgagggcctaaccttcgaacctctgaacaatattcctccttgcctttttccctcccgagtgaggcgcccgaggtagaagacgccttcttctggttaactgctgaggggataaaggggaagggaggcagagggtggagggtgtaccttttgagtcagaaagcgaaacggcgcttggcgtgttttttctcggagggggcacagtcatttaatgcgacaggacgtcctgtcggtcagccaaccatttgcggcggcatgcacgcgggattcaaaacgaccatcgtctagtctgttacgattcacaccttggtggctttgcccgcccctataaattagctcgagatagacgcttcagaccgttaccgtgtcgcttcagcatccctgctttacacgtcgtcctcgccttctgcaaaaaaagagctcatcgtcttcttcctccatcccgatggccgagaagattagtgttcttcccctcgcgacccatggcccatctcctccatcaccgatgaggatttggaggtgttggtcgatgcaggtctgcttcgccccgctcccacggcccacaacccgagtggttcccgtcgggcgatgagcagatgtcggatccgctcgcaagatatgtggtgagcttcacctcgtttcatgagcgggggtttggagttccggcgagccgcttcatcctggctcttccgcactactatggggtggtgctgcacaacttcaacccaaactccatcgctcaggcggccatcttcaccaccgtctgcgagtggtacttggggattgagccccattggggcgtgtggctccatctcttctgggcggagcccttatccctccccagcgaggtgaggagggcgtgccacaccgtctgggccggcggctgcatgctctagttgcgctcggaccagacacaattgtacatccctgccaccctcacctcatcgaacaaggggtggcagagccggtggttctacctctg

SEQ ID NO: 10260 - DNA, 857 bp, Zea Mays
ggaggatccacaattgttgaaacaagacagcagagagcatgaacagacctgggattcgctgaccacggtgagggttctaccacggcggcggaaatagaattgggggaagaaggaaattctccggctatggtggctaattgaaggcggtaatgggtgctctggcttcatgatagtatggtgcaacatgccaggccatcaatttataggagcgcaaggcggtggtattcaatttcgcgatgacgcgctggcggccggagagggagaaggctactggcgcagttgattcgtggagaataccgtggcggactcaccggcgatgatcggatggctaacgtgagtcacggcggtgcggttaaaggatggaggcgtggcgcaaccgcggtgagtatcgcggattctgatgacggccgtaaggccacgtcgccggcgcggggaaccgagggacagcatggccacagtaacttgaacccattcgcgacgagatctttttgctggcgaactcaatccacagcccagacgcatgaatcgcgacgagcagcactaatcccggcgaagggtcaccggcggccagctcactgaatctgcggattgtttttggttactgtacccatcacgatctccttcagtctttctgacaaacagatttgtgacgccaaaatcttgaattttcgcataagaacttactaatccgtttgtagcaaacctatagccctaagatctagctataaaccgactgtggtaaccatgctcaaacatccacgggatcatcttcaaaatggcccccaaagttcatcctatgccactgaataccataattcaggttttagaccgactgacaacccaactttgggcacatt

SEQ ID NO: 10261 - DNA, 400 bp, Zea Mays
gttgtttgttcatcgtcgcctcatcatattagacgtacgataacaagagcgataaaaaggcaatcagtgggtggtggtggtggtgccagcgcgcgccaccgattacgtacgtctacggctccacgctagcaatatatatagagcttggcttcgcttcgcttcgcttcgagttcgtaccagcagcagtactaacatggcgtacgtacgtgcatggtacccagttgcagttatacaaataccggtagcattatcgttacgcggcgcttttgcacagtacgtacacacgatggagacgacgcgcgcaggggaatttgtctctctcatctcgtcccccttgtgatacacaccacacgcaactcgatcggcgctgtccctgcgtgcagtccgaactcggctccca

SEQ ID NO: 10262 - DNA, 466 bp, Zea Mays
tgcgcaaggagatgctttgcaaacgaattagcgctgcataatttgcttggtgaataagctggtcacttctccagctcttgctctgaaaagcaacaggtgaatatacagcgaaaaggaaggtgtgtcttgtgcagacaggatcggtgggctggcgaggcgtcgagggggctgagggaaagcgaagcaagcaggtgccgtagaacgacggcgagaaatgttggcacggtggaggcgttgggcgttggcgtagcgtaaagctacccaaacgaagccgaaaggcgctccggaaaaggccgccacccacggcccatatttcgcctgttcggtggctggcaccgaccccccctcgtcactttcgtgtcatgtgctcattttttcttcttcttcttctcttctaatcctactgtcaagtgccaaccaaagcactgatgacacgcacaaggcgtaggacgaaaaggaaaccaag

SEQ ID NO: 10263 - DNA, 682 bp, Zea Mays
tcgctgttatgattcgttctcagcaaagtgcggataacgactcctggtgaaaagatcttcgctggggatgaacttgggccactgtttcgccttgttgccgtgaccacttgcgccggtgacgtggccgagcggccgtccccgagataggcaccattcaccgcgattgcgccacgccttaggccatttaccacatcgtcgcaagccgtagtgacttcccagtaaccgccgtagctggtcaaccgatgatcgccacggtagatcaccgcggtgactcatcccctatctccgggcgccagcgcgccattctaaattcaagagccaccaccctcgggccctataaattgagcatgccatcggctccgctaggtagtcacgcatccaatacaccagcccgtgcctcagatcatccactagagcgctacaatttgggatttcccccaaatcagtcaaaactctgccgtgagtgagctcaccgtggctagctcactacaggttcgttcatgacctcctcgttctcgtttccacatccctgtgtgctatatatgcttatcggcccggccaattgaactagactacgatagatcactgggaacaccatggattgtcctcggtttgcgccatcgccgtggacagagtgattgtgagccagaaccttgcaattgagtgaggggaaatggtcgtt

SEQ ID NO: 10264 - DNA, 308 bp, Zea Mays
ggaggaagcccttgttggatgaggggtggagaacaacaacaagaaggaagtaggatatcctctataagagaggaagaatctagagaaggaagcccttgttggatgagagggtggaggagaagcaataggaagccctcatggtggtgttgtggtgttgggtttattagatgagaagaaataggaagagaaagggtgttaagtttattaggtgagaaacaggaagaaaaagacaggacgatcgtgttgtcgccgatctaggcagagcaaatcactagaggtgtaccgcttggcggtgccctctgcggtgg

SEQ ID NO: 10265 - DNA, 299 bp, Zea Mays
gggggttgtcttgcccttttaagtccaagggtagactttacaatgataacttgtattctgtcggggtggagtttagcctcctgcttcctggcggtgtagcccctatggtgtcgtctgctaggtcgtgcgccgacgtacccctggtacggtgtcgcgtcttttctattcgccatatgggttcttgtagctattctgatataaataacatacgtagtggtgtttggtgggtctcgctgagtcggctcatggtgaggtttagggacatgtttagtacaacttcatcttccgtcatcccctct

SEQ ID NO: 10266 - DNA, 344 bp, Zea Mays
tcagattaaatcatagtttacatgaactggtatgtgatcacggccgtaggatgagatatctacgctccagattttaaagtatcacgatctgatctcggccgttcgcccacgatcaaacgacactggtttaatacacccaaggggtactctacttctaatctcaaccgatcatcgcatgacagacggctagatgcccatcacctacttggaaatctaaccacagcaccatcgttcccccggcggcggtggccttggtcagcgttgggcaacccggtgccctgatgccccgttcatctggatgctaggtgctctgcatagggatttgcatggcaaacaagataaat

SEQ ID NO: 10267 - DNA, 623 bp, Zea Mays
cttggtgagacgatcgattattacccatatggaatcatttcctttctgtgttcggggcagtcctgtcacgaaatccatgcctatttcttcccacttccattcgggtactgggaggggttgaagtaggcctgcgggcttctgatgctcggcctttgttcgctgacaggtgtcacaccgagccacatactgtgctatttccttcttcatccatttccaccagtatctggctttgaggtctaggtacatcttggtggttcctgggtggatggagtaagctaagttgtgggcttcattgagcagggtttctcgtgcttctcccactggcacacacaggcggttcttgaaccagaggactccttgctcatttgtcctaaggtccggaagttgctccttgcgagctctttccataagtctggctgtctctgcgtccaggtgttgagccttgcatatgagatcttctagatttggcttgacttccaggctaccgttgtcccccagacatgctgattctttcttccaatcttccagaaagttggttcctttaatcccgaaaggttttcggctgagggcgtctgctaccacgttggccttcccggggtggtagtggatttcgagatcataat

SEQ ID NO: 10268 - DNA, 409 bp, Zea Mays
atgaccttgtttcttaaccaatggtttccacagacatacttgtattgactccatcgaacatgaccgctcagacatccttgcttaaccaacagtgcatccctgtttggtcgacatttccactaagacctcgtacgtatcatgtacatatattgggattatgatgcatcacacgctcattcttatgctctcctccttgttgtgacctggtaaaacatagatcctagatcgttgttgcatttccctagagaggcttccacctccaatagacaccgtcgaattgaagcgaggaggcgggcacgagcttgtagaacacaggctccatgctcaactctacctgctcatgttgttcctctaaaggactcctacattgctcgcttgaaaggtgcccactaggcgctacagtctccac

SEQ ID NO: 10269 - DNA, 683 bp, Zea Mays
gcgaaggggtatcattggatataggccgcatagatcacgatcaacggccctgattagagttcttactcaatgaactggtatgcaatgttagtcatcggatctgcgatctacgacgccggtttaattattgcgctatcggttcttgaccgcacatccgatgatttacgatcgagatgaaccccgggtgaaacaatgcatcgatctaatctgagtcggtccacaccagatcaacgacccagatcaccccatcccgaactggtacctcacatctaatcgcgatcgcccaaactgaatcggacagcgcaaacaagccttcacccctgcatcgacccgacgatgaaacccagcggccagggacaccggcgtccagcgcccacggcggaggggccatggccaggccataccatcccacgaaccctagccctaagcatggatccgaggtatggtacacgtagaggagacattggtgaactagatgaggaatttcttaccgcaaattgccgcgacgattgacccggtcacaacacgactcgggccgcatggcggcggcgccctccggtgaggaattctgcatgccggctgccccacctgcccgaatgagcagcggacatccatcagtgatcccgtgcgaatccccggggtccctaagtgcatttcgaatggccacatcgatggggatccat

SEQ ID NO: 10270 - DNA, 668 bp, Zea Mays
gaacaatcaacagaggagtatgaattcacctggaataggctggccgcggtgaagtgttcttacggggtgttcaaaccgatttgggggaaattaggaattcgagctctcaggtgaacgattgaggacgatctttggtggctgggtgcgcgatgatgttgtgaagctctctgtggggtcaatttatagatccccggggcggtggcacttaatttaagcggacagtgggggcggccggagatgaggaagaaccttggcacggtgaatacgtgtccaatggcgtggcattaactccggtggtcgacggggagtttagagggagtcacggcgatgcggtggcgaggttgggacacgcggtggacaacggcgatgacacgacgatggcgagcagctgtatccccggcagtgagcaaaggggatgaattgcggctagccggagtgacttccaggtcactggcggcgaagatattttgaccccgcgacgttatcgacttaccccgagcgtgaatcacgacgccggcgacgcgaatcgcggcggggaggtcaccggcggtgggattcttttgctgcgtccgatctgatccgttgggggcactgtaccatcgtgaactcccatcagggcatctgacagagcattttgcagaggaatttcctcccaatttcatatggca

SEQ ID NO: 10271 - DNA, 730 bp, Zea Mays
cgactcatgggcactaagctgcacatgtcatctgccttccatccctagtcggacgaccagacggaggcggccaactgcatcatcattatgtacctctgctacttcaccggcgaccgtcctcgacaatggcttcgctggctcccatgggttgaatatgtgtacaacacgtcataccagtcttcgctccgggatacgctgttccaggtggtgtatggtcatgacccaccctccatcatctcgtatgagcctagggagacaagggttgatgcgatcgcacgcgatatggaggagcacgaggccttcctcaccgatgtgcgctatcacctcaagtaggcacaggcggtgcaaaagtgccactatgacaaggaacacaggacattgacctacgcagtcggtgactaggcgctccttcgtctacgacagtgtgccccgtcctcgctgccccaacagacgacatgcaagctgaagccctgcttcctagggccatatcacatcatcgagctcatcaacaacatcgatgtttgcctggagctaccctcacaggcccgcattcatgacgtattccatgtgggcacctagaagaagtatgtggggacaccaccatcaaccccaccacccttgcccgacatccatcgtggggcggttattccgtagctggctccggtcaaccacgctcacttggcgcgtgttgctcaacaggttttggtccattggcggggtgaaccggtga

SEQ ID NO: 10272 - DNA, 764 bp, Zea Mays
tcgggcggttcaatcggcgtgaacgcttctggcgggcaccttcgggtttctggatttccacatcctcgccaaactcttgtccagtcgcaatggccatcagctcagtacgggtagagtcagacgattccctggctagcaggctaattacggcatccatctcagcatcgtcagtgctagatggcatctcgaaatgagttttcctctcagcctcgggaagatttcgaaggggagcaatcaaggcttcaatatcctcgggggagggccacactctatggcccaggctaccatctcgagcaggaggattggagacaaatccagagaagggactattcggaggcaggttccacgcagagtaagctaagggagcaccagcattagagaccctgcccctcagtatcttatccagttggctcagcaagtcctcattgggaatctgtctgtttgggactcgggtagaatcattgatgccagtatacaaataagcagggtaaactctatccttcaaaggttgaatgttcttaaagataaagtcagcgaccacggcctcgacagtcagacccctatccttcaatgagcagatttcagcgagcagcactttggcttcggctacctctgaaaaagtgggagactccacccagctaggcgtgcgaacgtctggttgccttcctgaccgaggggagggatttgccgtgattctccatggtgaaccactcgagacgccatcccttaatattgtccttgagggggatatcgaggtattccac

SEQ ID NO: 10273 - DNA, 777 bp, Zea Mays
ggcttcactccaccggattgagattaacggcccaaaaccactcccacgcctgagctcccaaccccagcatacaagtcaaacaaaatttgtactgttttactgatgtttgcctcctaaaattccaaaccccaaaagtacaatacccaaaaaaaggtacaaaaaaagataaacttcaacttctctttttttgaaaatagggtagcacactctacccccctaaaaaagaattcgacctcgaattccgccgcttcaatcagaacgacaaaagaaagattagcgaaaacaaagaagctcacccataatgaacagttcggagcacttctgccgcatcagctcctcaagttcccaagtagcctcacgctcagactgattagtccacaagaccttaacatacttaattgatctccttctcatgacacgctccgaggactccaagatacgcaccgggcaacactccagcatcaaatcctgctgcacagcaatcggttccatctcgatttgatggtccggatcccgcaaaaacttcctcaacatagagacatgaaataccgggtgtacccctgccatggaatcccgcaattgcaagcgataagccaagttgcccacccgggccaagatagtgaacggtccaatgtatctcgggctaagctttccgaagacaccaaaccgaacaactcctttagtaggtgataccctgagaaggacttggtcacccactgcaaattccaagtctcgcctcctcacatcagcataactcttctaacggctctgagcggc

SEQ ID NO: 10274 - DNA, 1027 bp, Zea Mays
ttgcacagaggtccctgtctttttgagtaatctgaaggagtctaaagtactatttgaaacagttgctgacatttaccaataaactcatgcacttccttccttttacaactcgatgtccccgtcgtcgagcggcggtgcgcagagctccgacgagctcgtgtaccggccgatttgcgcaaggaccggcgcccttctttggcctaaacctaattcgggatctaatgaacgtttcccctcacttaattccacgaatagctacccggtttgctctggctacggcgaccgtggatgttgcgggtggatgaacgcgtccccggcgactagtgggctcctagttcaattgggcgggtcgacgagcatcacaggcacatgagcacaattaaacgagggagcaggcgatatgaactgacttgagtcccgctgatcgcgatgaggctaaaccgagcaagttcttaagcgttttggggagaatccgaaattagagctctctggtggggggggggggttggggtgcaggtgggtgtagtagctgcttgaatacatggcggagccgagggggtgctcaatttatagttaccatcgtcggtggtgtccaattttacgaggttgtgctggtggccggagggaaacagggatactggtgcatgggatgggtggctttcaccgtggcgcttccttcggcgatcaccggatcccataacacaactaattgcgacgtggtacagagtctggacacgcggcgcacgacagtgatcaaccaatggcagcgagctcttatccgatcgaccgatgatcaagggggtacgacgggcttagccgcaaccgagctcgagtcgatcctatgccaagatttttacttgcccgtgcctatctgctgaccacggtgcatgaatcgcgacgagcaatcaaccatcccagcgacggatcactggcgacgaggaggggggggggtgaaccgcgatctgtttcaatttggggtgcactgtaccatggaatgcttcgtcagtgcgcctgacagccaggtttt

SEQ ID NO: 10275 - DNA, 750 bp, Zea Mays
gaacgaaggggtatgacacgttttaatcctggccgctgaactctgaatccatgccgaggtgctatcgggaccggagtcaaatctgaccgcccgctacggatctaacggtctgagtctttcttcctcacctcctaacaccgacggtgaagatgacccaagaacccacagcggcgccatcgccgtgcacaacctaacctcgatactacgcgtccaaactccaatcgggtgggatctacacgacaaggaagtaatttcaagtgatcgggtgaggttcgtaccagcacaaaggcagcgggcagccctgtcctcgacgtacggcagattcgaagcttggtcgaagtccggcagtgaattaccaccggtccaagtcaccgtagtaccaaaattttccctggctacgccgaggtgcaccagcagatcacggcccaccccccaatttgccgacaacggcgtcgagtcaaagggctcacggcggcgggtccgctagatctctcagctcaccgaattcctggttcccttcgtcgaaattcgaggcaagaattggagcaggcgataggatgggtccctatataccccctcgtgggagacatgaagcattggaggtggtttgttacgtactcggagtttgcggaggggagagagacgttcggttgaacgcgcacgcgtcgtgtgggaggggaagaagcacagtaacaggtccacgcggtggagaggctgccagtgggtcccacggaccagcggttgcgggga

SEQ ID NO: 10276 - DNA, 448 bp, Zea Mays
cggatacttcttcttcaactagctcttcttcttgaatttcaagttcacccgactcagcttctacttctgcatgatgggcttgtccccagttgacagataggggctgactctttcctgtcgaagcctgaccttgtttcattggagctggtgtagtgtaggcagccctgtagttggcgtagtgtctcggttgtccacacttgaagcatgccctgttggtggttgtgttaggagcaacaggtcctgctggggtgcttgcttgtggaggagcagttggtgcccgttgagtttgttgcccggaactgccactagctggtgtacttagagtggtagtatagcgaggacgggaactacttccagcctgcccttggttggtcgcccttcttttctctccaaatatactcctcttgttttctacagcaatagctttgtcaagtagcctttggaagga

SEQ ID NO: 10277 - DNA, 1402 bp, Zea Mays
gtgggggtgccgtgtgggtgcactaaggtcgcgcgtggtggtgtgcctcgtttatgcatgcgtattttgacggcaatggctacataaattgtcatagtggtgtggtcggggtgtggttcagggttaatgcttgtataaattgacgataacaactgcatatccatctgacgcacggggtttacgatcctttacacaacaatttatgctccatatgaacacgacgtacacataacaatttatacaacgtgcggggtgtggctcggggttaatgcttgtataaacgcacagtgtttacgatcctttacacaacaatttatgctccatatgaacacgacgtacacacaacaatttatacaacgtgcggggtgtggttcagggttaatgcttgtataaaagcacagtgtttatgatcctttacacaacaatttatgctccatatgaacacgacgtacacacaacaatttatacaacgtgcagggtgtggttcggggttaatgcttgtataaacgtacaatgtttacgatcctttacacaacaatttatgctccatatgaacacgacgtacacacaacaatttatacaacgtgcggggtgtggttcggggttaatgcttgtataaacacacagtgtttacgatcctttacacaacaatttatgctccatatgaacacgacgtacacaaaacaatttatacaacgtgcggggtgtggttcggggttaatgcttgtataaaagcacaatgtttacgatcctttacacaacaatttatgctccatatggacacgacgtacacacaacaatttatacaacgtgcggggtgtggttcggggttaatgcttgtataaacgtacagtgtttatgatcctttacacaacaatatatgctccatatgaacacaccgtacacacactaaccaaccgatcgtgcacacactacgggtccccacagtcctgcgtcgcttcccgctagccgactgagccaatgtggtcaacgttcgagacccactcgtacgaacagaaccaacccacgcgtcgtggccccaccaaaaccctaataaaatatgtgccttgccgtcgccgccacccgctcctacgatcgccaacgccgagggccccaccgccccactcgccctaatcgccatccttgatcgtttgccctccaccgttctccgccctggttcgtctcccctctcattgttcgttccatttccctacattctctcgcataatccaacaattgtttacaatatgaatcagtgttttcactatcccggcaccccaactcctgcatagtaccgtcgccttcaggttcgccacaccccatcctcatccgtcccatttacgctttaatttagcataatccactagttgtctcgcattatctatcactgtctgtagtaccg

SEQ ID NO: 10278 - DNA, 1598 bp, Zea Mays
ctctctgccatccgcagcgggtagcacataagccccggaaataccagcagaagaggaagctcccggagtgaaattaacagaagaaccccactgagccgccgggtgaggcagacgcggagctccaaactgagacggcataggagtagtcagtgcaggagtaggtgcagccagatactgaggaaaaccctgcatcggcatgaactgagaagtcccaggcacataaaactgctgtggaggaagtggaactgaaaactgctgctcaacacttgacatcatgttgatagtgccctgagaagaggaggaagtcaccggctcccatctgagcttcccattaggattcctcctacacaccacatccttgtggtcctgactgcagatagaacacctgccactccactagcactctgcacggtgatgcgcatcaccacaacggaaacacaccagccctagcccgggcttaggaacagcccgaaacctctgagtacttcctcccgaagtacccaagtcagaagatttgccacggtaaggatggtggcgctgatgctgagacttgcccctcttgtgggctagacctccagtgttgcccctcctcgcatcctggccacgaagctgatcaacacccgaagacttctgcgactccatggtatactgatgctgcatctccacacccagtgcctgctccactgtagtacggaagtccaccaatggaaaggctcccaaggcatgcctgatagaatgtttcaggccctgatggaactggctcgccttctccatctcattaaaagccacatgagggacaaagcggaccatcttgttgaagcccacttcatactatgtgacagacttcttctcttgcttgaaagactgcaaaccaatcttcattttctctaggaaggtgaccgggtagaacctcctttcaaactgcctgatgaagacatcccaagtcatgactcctgctgaggaggagtgcgctgcctgcacgcctctccaccaaatttgagcctctcccttcagcagctgtgtgccaaagcgaacacgatcaccatacacaatctcaaagacattcatcttatcctccatgtaagttagccaatctgccgccttgaccggagtaccactgccatcaaaagcatccagcttcatgcccatccactgcatcagagaaagaccactgactggaagaggcacctcagcttcgccacctggagcagcacccgcagggacagtgcccgcgggcactcctcctccaccagcaccctgagcagcacccgcaggggtaactggaatagcttgcctcagaatggccaactcctgctgcatggcctgcatcgcggctaacattgccgtcggactcatcgagtccccactaggaacttgcggactaccctgagccctacgaggcgacatagctgctgccacaggggtgagaataataaataaataagattggcatagcatcacttcagataatgtcaaactagcacagacaataacataacatatcaatagtaaagcagaaaacccatcctacatgtgtagtgtgtcaatttattgttattccacttgctaggacctacagcctattcctttcatacgaa

SEQ ID NO: 10279 - DNA, 526 bp, Zea Mays
gaagtttgggttgattcgctgcacagagacacaaaagccattgtttgttgcccaacaactaggagggcctgccagtacttggtgggcaaattttgtagcggttcaaccagctggacatctgatcacttgggaggaattcaagttagctttccgtgagcactatgttctagagggagtgctccatatgaagcaagaagagttcatccggttaaatcaagggggagatactgtcatgcagtatctcaacaaattcaaccatctatcctagtatgttattgaccaagtaaatactgatctcacttacagtagggttgtcggtacaacacttacagtggaagccaaaaatgtcgggcatggaaaatcgaaggggtttggaggtgaaaggtcaaatcaagggcctgagaaaagaacgaggttggtgatccaaccttttaatcagaatcgttcattgcctcgcccaccttcctatcccttcgagcagcctgttttcattcgtcccaatactgcccctgctcctaccaatcag

SEQ ID NO: 10280 - DNA, 749 bp, Zea Mays
gtacaactttgatgcagactcatttgcaagtagtcacataaaatttgaagcaatagccagttgaattcggcctggcagtcgtactgttcaccggagttcagaaaaatctcgccggggataagattgccaccgcggctggggattacactgcggccgcggtaaaaatcttccgcgacgtggcgcataaactttgaggtggcgctgctcggttaatcggtgatcaccggacgctcgccgtggctctgcccacgcgggtgagctcgccagcgcacttgaagatccttgaatctcatccacctctggccatcttcctataaattgagcccgagcgctgcttcttcaccacatcacacacatgagtacttgcgcaatcgacccaattccaccgaagaactcagataggccataaatctcctcctcactgttcttagcgccaccatgaaggacctcttcgtgggtagccctcctcggggtcagtactcgcccaattgtctcttgttctagcatgtctttagcttcctatcgctctcggtgctgtccaattgaattttaccagagccccaccaccgggaacacccagtagttccatagaacgccccgtatacaccctctctgtcgacccgctttcctaccctcgttcggcctaaattcaatcgtgtgcctagtccctggtgaacccgtggagcttccccaagcttcaattttagcgtcaatcccgttagttgtccagaacgcgatctccagggccg

SEQ ID NO: 10281 - DNA, 661 bp, Zea Mays
gatagctgatactgttggtgttttagaggtaaccgccgagtaatgtctgacgctaccgacgtttttagaggtaaccgccgagtaatgcctaaaactttgctttccctagtagtgacctgacacttttagaaatagtgcccgacccgggaaaccccatttatactcgctccgacgtgcatttttgatttctaagccctaacttcactttttcacctcgaaccactcctctgcttcattgagatctcgatcctgctcgttccgccggaaagattgcgatggcgctgaagcggaagaggcagagcactgttgctgcgatcatcccgcctatcgaccccaacagccagctggcattcactggtaaccatatgtccatcatttctgaatccgacctccttcaacttgttgacattgaggttttgcttccaaaagagctctgcttttggcagatttgccgcggtgtcaccgttccgacagaggatacccatgaatctgtcatttacgttccttttcttattcgtggtcttgctcttcccgtctccccctttttctgtggtctccttgatttctacgaattgaacttgacacatctgaaccctaattccattctgcaaatttccattttcgtacatctgtgcgaggcctttctcgggattctccccca

SEQ ID NO: 10282 - DNA, 578 bp, Zea Mays
aacgaggtatggaacaaatctttataatgtattacatatgttgctctataacatttgtgtcttgactggactttgctttatttcacaggaaattttaatggggtctaatacaaatgaatgcaatactaaggatgatcaatgtaatatgccgatattaacattggaacataacactgacattcggctggttgatagtagttctacggatgtagaagctagaaaggtattaccattgctacaatatatgatagaattacgtgaatataaaaactgacttaatatctttgttttgtagaaactggaatttcatatggaaggtgtaaacttagcaagaccagataaggccaagcctaagggaagaacaatcaaaagtagtgagcaacaagtttttaaattgggtgcgaaaggagctaagaagatgagcaggaagtgctagaaatgtggcatagctgatggtcacaatagtcgtacgtgtttaactatcgaggataatagggtttgattggctaacctatctggacgtaagcgaggacggcctcctggttcaaggaacaaaatcatagctgcagccccacaat

SEQ ID NO: 10283 - DNA, 716 bp, Zea Mays
attccatatatttagctagtcacaaacctacaccaaaggaactggataatctacgtatgaaagggatgaacggaggtccatgtttcgttgaatggttccacgagcatgtaattatctctttataattttcctttgtgtacttagtttgcacatatgacttgctatttaactatatctttttttctgctctatgtagtgtaagaaacttgactctctagtctcggatgatttgcgacagatatcacatggtcagttgaaagcaagaaaatatagccgctatgatattaatggatatcgttttcgaacatcaaaattagaaaaaatccgcccgcaggcagccacgacaaacagtggagtagtagcaactgcctcaaatgcagacggaggcactcatgattattatggtgttcttcaagacataattgagtacactcttggtggggccaaagagttcatgtttgtgttatttgattgtgaatggtttgatcctcaacaaacgcgagaggatgaatttggaattgtggaggtaaagcatgaatcacgatttaaaggcagcgagtatagcaatgttgtgtttgcacatcaagcgcaacaggtgcactatctaacatatcctcatgagaacttgaagtcttgttgggttgtatacaaaattaatcctgaagtccatccgttacgatatgaatattacaacacaaataacgagttaatattta

SEQ ID NO: 10284 - DNA, 699 bp, Zea Mays
ctgtaggaatatataaatagatgagttggtaagaagttaccacatcattcattgctattgcatcattgtgctgctgaatttttttactgaagctgaagttttttgcgctctatgcacttgctgactagtcttcgaacaatcgtcaagtcatttgaaagttagcttcatcttaaggactgaaattgctagaatcagatctactgcaagactgacaagtgagggtggggagactgaggacgctgaaacaactccaatttcagaagtcatgagacgctctgtgttgattatacaagaggaaggagaagctttttacgagaaggataaccctaatgccgaaactgaaaatgttattgccgaagctggaagtgatgacaaagaagatgatggcatactgagtcgaagcaagcctagccatatcgagtttggcagatccaccgtgaaacctgaggacttagttttaatgaagaaacttggttatttcagaaagaatgatgataacttgataaggttcgcgggtgaagagataattctagagccaaaggatgatgaggtggtggtttttaagagcttcttctgtgttgggcttcaattcctattgtacgagatgattggcgaagtattaaaaagatttgagatatatcttcatcagctgacaccaaacgctatagttaggctcagtgtctacatatgggctctccg

SEQ ID NO: 10285 - DNA, 470 bp, Zea Mays
agccagtgtatacatgaccggaccgcgggttaattttacaaaaaccaagggcctctttgttaaatcatccggctgaaagggtatcgagggtgttcagccgtccgatcagatcctgatggtgaggattagatccacagccgctcgaaccgatatcctacgggaaccatcggatcccgatctaatggtctcgattcaatgtgcgctaatctcatctcgtccgcaagatcggatatcaacggtgcacaattagtgtggtaacgcagtagcccaaaactcatatcaaccgtgcgttgattgatcgatggcccgcacggctcccatcctcgtcaaccaaatttttctaccatggcgaccaggcacggcggagcgcccaccccgcggtggcgccattaccgacgaagtcgcgccccatgacccggccacccaaactcgacaatgatcacaccatagggagagaaaggaacaacgaa

SEQ ID NO: 10286 - DNA, 842 bp, Zea Mays
cacccaaaaacttgcaagagttatatcagctatttgaaaatatgcccgattcgaagagctccaccaccgaaaagtggagtcacactggaaatccaaggacactccgcagtcgagcaggacatgggttaggcctgcgcagtcagactccggccgaaaaaaccgtaaccagtcccaagtgaacaccatcgccaatcaacaatagactgggtacattgctcgtcgccacaagtatcccacgaaatagggtcgtggcagcaaccccagaggtagaggcaaaggccaagtcccgcaacaacaaaagttttactgtctttttcacggcaaaagactccacacatcccaccaggggttgccctgaaaccaaggccaccaaagataggatggccagaaatcaaccagctgacaaccaatgagttgtcgcccacacctaccaccaccaacaatatcaccagcgttgattccacaatgaacaataccatccccaccagcaaaaccatatgtaccagcaacaccaagagatccaaaccctcccaccaccaccaccacatcacccaaatccaccaccatgctcaccagcacccaaacaagaagactttgctgatcaacccttccgtggggtcattcacatgattactggttgatcgagcacagaatttgacacgaaacggcagaagaaagaccactaccgaagagtcaatcatgtagccctaactgggccggttgtttagacaaagtggtctcatatactactgtaacatcccaattttgatcccaaggttagaaaccctaaactcctaaaccccccttatttatctcctaagaccccatctcatagaacattc

SEQ ID NO: 10287 - DNA, 484 bp, Zea Mays
cgcggaagacttcgatttctcgcacttgttgtgctagtccggctgcacccttaggcgacttctgcgcggatagtcttcgcggaagacttcgatttttcgcacttgttgtgctagtccggctgcacccttaggcgacttctgcgcggatagtcgtcgcggaagacttcgatttttcgcacttgttgtgctagtccggctgcacccttaggcgacttctgcgcggagttgtcgcacgcgagggtggctgacgctgggcctcgcggtgactatgtattggtcgaatgtcgaagaccgtcggcgcggtcttttttcgacgtagattttgcgggggatttttcacttgtatattacatgactccgcctcgttaaaaacctcaccctccaggaggaaaagagtgtgggccagaataaaaattgtctttgcgaattacaagggcgagctggccctgatgagtcaaacaaaaaatttgcggagattatcgat

SEQ ID NO: 10288 - DNA, 681 bp, Zea Mays
ccctgagtccgacatctgcttctgcccctacacccgcgccgaccggacgacgacggagagcggccgcggcgccaaggacgagctagtgcatgacagtctcgtagtgccgccgcgcgcaccagcaccaccatgcgagcacccgttctgcatttttatcaggggagagccggtgtgcaggtgcctcgacggaacccggccggcccccagcagcagcgtcgaaatgaggatgatgatgcacgcagacatggagagagccagcagctagcgtgccactgagccactgatgtacgtggttttggtttgtttgttcttggtccagcagtaacagtgatagtgtcgtgaatgagctagcacactgtcgagtctgtcaggatgatgctcattctcagtgtcaggtcgtctgtccgtgtcgagaccgatcgtacttacgtctttgttttggtataataaagcgtcgtgcaaacgagttctgttactatgccagctcgtgatcaatcactagagaagccaacaccagatgattcactggagaaggtgcagccagaagctgatacacgaaccatcgcctgacttgccacagcgtcgggaggcgggtgcaagggttcgacgcaccaactgccgtgagtggtccggactccggagtcggcgtagctgtcgcgtgtgtgtctcggtctctgctgt

SEQ ID NO: 10289 - DNA, 655 bp, Zea Mays
tggtagccactccatcttccacccccacaatcacatggaattcacgaattcagagcaatccaatactcagcaccgcacaggacatagggtattacgcattcacgcagcctgaacctatataaatcctttgtgttccaacgtgcccctacacgtaccatcgaatagcgatcgacgtcaccatcctctcgtgcgctaccctacagtgcagtcagggctaaacactgataactagcgcgccaggtagggggtgcgacgtcgattcacgacagctccatggtgatcaccttcaacaatgtggtcatcttcaacgccagggaggtctttcacttcggatccttctcccgcatcactgaccaaaggggaatgggagccctgaggagccacaccatcaactcgactgagaaggagttctctcttaaaccaaggacggtccagaccgtggatgcggactagctccgtccgacggtgggatgggtcgatctaacgagcgccaaggcccgtgtcctgcgtcagtccgccactacgccacctagggctagaaccacaccgataccggcgtctgtacccccaccgagtgatgtaggcgctctgacgtggtgaactatgtagtctactttacccactcgggtgtgaactcgggtcactcggatgaatg

SEQ ID NO: 10290 - DNA, 510 bp, Zea Mays
cggggagtaggtagctgaggcagagctcgggcgaggtggagtttgtcttgaggccgaggtcgactttgggtgaggcagagtttgcgcccaaggttcagcctgcgttcttgtcgtatcgtacgtcccatcgtgggttggtagaaggcgtgcgggaacagtggtcacatgcgtcattgtagttgatgaagcttgttaggaccgcggtcttgttgctcatgttcaactgcaactttgtgtggggtaggtatgcgcattgaatgctcttgtcccctgcgaacttcggctgagccttgccttggggttgtcttccttacccgagatgggctcaggcgaggcggagactgtcgttctggggagaggggacctcggccgggacaaggattctcccgagtacacaccctgttcgagggcaggctcgtgcgaggcagagttatggtgacccctgagaggggcctcgggcgaagagtgagttatgatccttcgtcctcggggaatgtgtcttgatggcgg

SEQ ID NO: 10291 - DNA, 289 bp, Zea Mays
gtttcttggccgccattgaagtccattcttcacttccgtagtggccaaggttgacgtcgcgtcgcccatcgaggtcgcaatccgcgtctgtccgtccgcgcgcgtcctcggtcgtggtccacgcacgtccagctgtgcgctccatcagctacccacgtcacctcctctgctcccactcaaccacgtgtgttcatccgcgagcacacctccactcgttgtgcgtgcgcacgtacctcttctgcctccgctcctcgctggactccgcacccagtgtgtctcctccgtctct

SEQ ID NO: 10292 - DNA, 375 bp, Zea Mays
gtaaaaaatttgtatgaaatatagatacaaaacgacatcatcactacactgtgtccccttggacagtgccgttggccaagacaggagcatgggcggcttccatatccacagcgactctcaacacaatataaccaattaagcgcacatatgggtaccaaagaataagttaaaaatattctagcatgaaaacatctaatggtatgttacatatttaagaaatgtaatcttctatgaactctagtcaattttattattaattttctaaggaaagtatgaaaaacaaaatgcatagtaagttggtaattaagataagtactaaatatgtgttatatctgaaaaatctaagatcaccagccaggttcgagtgatggacgc

SEQ ID NO: 10293 - DNA, 590 bp, Zea Mays
ctgctgagactggaggagttgaagctgctgttgagggggaggccacttcctcaagggaggctccacaacatattcagcgccgtcacccacctcagcagatgatcggggagcttcacgagcgagtcactcgctctaggtcacatcacatttctcatttttctcactcagcttttgttgctacttttgagccccgagatgttggacatgctttatctgatcctaactgggttaatgctatgcatgaggagcttgaaaattttgaaagaaatcaggtttgggttttggtgccacctccttctaactgcgatcccatcggtacaaaatgagttttcaaaaacaaacagagtgaggatggtttggtagtgagaaacaaggcgaggttggttgcccaagtgtattgccaaaaatagggaattgattatgaggagacctttgcccctgttgcccgtttagaggccattaggatccttttagcttttgctgcatcaaagggttttaagctttttcaaatggatgtcaaaagtgcctttttgaatgggtatatagaggaagaggtatatgttaggcaaccccttggttttgaaagttcc

SEQ ID NO: 10294 - DNA, 938 bp, Zea Mays
gttatcctctagcagagtgaccaacatttcagagtatttcaaggaagtgtctttactggacaggacacctaggatccgtctcattgaagatattaacgatgacctcccgttcttaacacatgatagggttcgcaagctactgagatctgaattactccctttgtatttcagcaagacctatggcttatcgattcctgacaccgatttcattaaaaaaaacctggatgtgctgcctgagtttgatttactggtattcagatcactgaacatgagtcgctctgagtctgaaataggtaattgctacaagccattcgcgaagttctttaaggctcttgtgggtaagtatgctgtaagggatgcaatcttcaagctacccaagtcttgatctgcatttgaagtaccttgagttgcttattgtcaaggactatcgtgtgatatatggtccagccctcttccctaagcttttgatctctataatgtactgcgaaatgcatcgacttttgagtgagttgtgcccgacacatggatagggtgctgcaggcaatgcaatcatggtgacgattgaagagaaaatctttgacttcatgaagtcttgcagtacaaatgctctgctaattagctattctggtgctcatggtgagagggcaaaaaagcacattgggtcagtgaagatggagatgaggcactgacatttgaagttagtgatgacgctaaagatctcaaagcgtcgaatgtccccctgaaagttagaaattttatgggcaacaagaagctcagtgttgagggcaaaagaactaccgcaaaaggaaacgttgagattgttccaggagatgagatgacaactactcttttggacgctgtgaatactattcagcgcactactactggatatgatcagattcgtttaacaaagaaaaaagtaatgtcacacgtcaaac

SEQ ID NO: 10295 - DNA, 700 bp, Zea Mays
gttgggaacttgggtagaaccctgtggacttggaatgggaggtgcaaactggggttgactgaatgatggttgcagtggaggacccccaggattgatcataccaaaaaatgggttccatggactacgaaaggtatatgtagatgggtcattagctccctgggaccaggtaggattactcatatggtttgtaggagtactaaatgtagaaggatgggttgggtcgaaaccttggccctgccacatctgaggatcccacatgggtggggggaaagactggttacctgaattggggctggcaccagtaggtcgaaaaaggtgtgtttgagttgttgtcagccattctggaatgaaatacaggaatacattaatttggacaacacagaacagacttgaactgtaaagtatgaactgtaatgcattgcacataaaggttcatagcaaaggaacacaatgacaacgcattggacaaaaaggttcatacgaaaccaacgtaacgattaagcattgcacataagactcatagacaaggaacacataaggatgaaccattgcacataaggttcatacaaagtaaacataaggtaggagcattcgtacatcggtcacccatgcatcacatacataagacacaagtccttatttcatttcgatgccttattaccagtaacaccgtagtctacgtaccacaattacaggttcc

SEQ ID NO: 10296 - DNA, 544 bp, Zea Mays
ggatatccacgcagcaggtacggtgctttcccgttatttcagattctgactacctttggtacgtatattatcagcagtgccccgtcctccatttcatatatggttcccaccttcacatacttttgctggtgaacttgtaactaacatcgtcagtcagtaccaatggcgaaatataagtgcatagatcggggctaaacgaaagaggaggggggtgttaataatctggagattgcgaaagaagtgcataactccattgccaaatcaggtaatggccaaaatttggtcagattgtggctaagccaaaaaaaaaaattaaaaaaagacagactggtggtgccggggtgagacaggtctgctgcacataagtcgaggcaaaaattctacatctgaacaaatctgcaccttagcaaagactctgaataggtgaatgacctgctggaaggctagcggtgaactggcgatgaaggtaaaagcctggtttgcaactcatattgcgtgcggattggctcatgcatgagctgtttttttcttcttttccctactg

SEQ ID NO: 10297 - DNA, 369 bp, Zea Mays
aattcagtctaggcatacggtgtaaactattggacgactggccatgatgttcttcttctccccacccataactattacgaactgggaaggagaatgaggtggggtgttgggatccgtacgtacccttgaccgggaactgggaatcggcaagggtttgccgaaatccactgtcccggtgttgtgaggcgaagcggtgcccgaagggagggccatcggcatcttcaacggggatagattgacgccccggtgccgatcctggtgttggcagaattccgcgctcaccgaggcctccaggatgaccagcgaggctgcgcggtcccagatgtggccagggagactccagtgaaacgtggatctgctcaacggagt

SEQ ID NO: 10298 - DNA, 424 bp, Zea Mays
cacgactggtcggaatcatcctcgccggcgttagccgctcaacaatcatgcaccacgtgccttggtgtcttaccacgtcgcggtagcttgtattacacacgtccagtgatcgccagtgagctcgccatggtgaaagccaccaattgcttgcgccagtgcacccccttctctccgaccgccaccgcgctatctcaaattcacgggccaccgctcaggggtcctataaattgagtgtgtcattggctctgctaggtagtcaagcacctaatccatcaactcgtgccccaaattctccaccagagctcgccaatttgagattttccccaaatcggtccaaaacaccgcgcaaagtgatctcgccgtggccagtcttctgcaggtcagttcaagcttccttaagtggtgttctagccttccccatttt

SEQ ID NO: 10299 - DNA, 674 bp, Zea Mays
accgcatcatattgcctaaatagcatataagcatgcaaaaaggaatctttttctaggcacaatcggattaaaaaaggtgaaaacagaaaagagatgacgactggatgaaattggaactaacaaagttagagaatccatgcgcacaagtaaataggacaaacaagaaagagacgatcatatgttgattgtgatgtgcacttgtagttcagaccaatagcaatagggatatgcatgttcatgtaccatgctgtgcctatgtctgtgtgcggtgcacagcaggatcaagaaagaccatcctgcaaaagcatttacaatagtcagtggccgcccatccatcatgataccatgaccggaatatttgacttgcaattttcttccctcctttacttgtctagtataaactgcaaacattttagttttccgacatacataacttttgatgcgatatacacgagggccaaagcaaacattacatcatcttgcatattgtggtgattcatcatattccatagtgcagaaactcaccactaaaaaggtaaacagttctcccaacagatgcactcagctgacattgtagactataaaatatatacaatctctggtcagctactcacctggattctgtttgttgactgttggttgcacaagtgctcttgcaagaatgaacccaaaaa

SEQ ID NO: 10300 - DNA, 447 bp, Zea Mays
ggcgaggtcgctgagaggagagacacagacgcaggtcctcccgacaaacgccagcacaccccatccaagcgggttgcgcaccaagttgagtgccacctcgagctagaagcgctcgcgaaggtctagcaaggccatggctgctactcgagggaggaacccctttttaaaggcagatttctccgctcgcgccccgaagcatcacaggcaaagcctcccccgatgcgcaccaggtttcccatcctatgacacgggggccaggcctcacatgtcatacagctggcccgaggcgcgaagaaggtgaatcgtggcacaaggagcatgccaccgccacgcggtagtgcgcccctttatcttcgctacgaccaacagtcaagaaggcgaaccgccgtacaaggagcatgctaccgccccacggtagtgcgccccctcgtcttcgctgcaaccagc

SEQ ID NO: 10301 - DNA, 605 bp, Zea Mays
ggccgagcatgagctggagcgtgaggacttcaaggaggacatccggaaggtgtctaaccgagaggaggatgtgacccggaagcagagaagcttggtcaagaagaaagaacatctagaccaaacggaggaggccgtcacagcgctccatgataagcgaaagcttataatgaagtgctagagaaacagtgggacaagcaagctgcggccgaggcaaaactgcagaagctgcagcaggagcttgccgacaaggccagtgacattgctcgcgctgagggaaacctcaaggcgagggaagcttccctggtgaaacgaacaactgacctcacttggtaggaggaggacctcgccttcagggaggagatgtgggcaaggcggaacaagctgctggatgagcttgagctcgaggcagaggagaaagggaagcgtctggaggggaaagtgcggacactggagaagcaggtccgccagttccaggcagcgcaggcgacgttgatggccccgggctcccaggcggtggaggtgatgagcaagacacttgacgacctccgggcagagcaacgcgtcggagctcagcgcatcgccgcctaggctggcgaggcaagcac

SEQ ID NO: 10302 - DNA, 330 bp, Zea Mays
aattccaaaaacctaacgtgttcacctagctcctctactcaaatccaaatggtcaaatggacaaaatgacgcctaattacctcaggcacgccctggtaaagtttgacaccaaaccaagactgtttgacatgtcgtggcatgagttttgtcgtgacttgggtacaatgacatacccgacttgacactggcgtagctcctcgccctaagcatatcacagctcaggactcacatgaaaaagcaaggatttggaacaaggaagagatcctacatgggacccttgccaagataggcaagctagggcagctaaacaggcgcttggacatgggcaga

SEQ ID NO: 10303 - DNA, 513 bp, Zea Mays
catggtcactaacacctattgtagatagccattaagcttatctataaggtccaatgatgataaccctagcgcaaccacagaattttggtgctccctagctctgagcaaaagattttgcacatatattataaactttgatggccccacaagatcactaccaaagctactgatgcccttaagaacctcatgtagaaggttttaaacatcaattatacactctaattacaccaccagagatctctagagcctgcgtttgaaaactctcacatgttgcctactcgcatagaacttcaccatgtgtaacgtctaaagtatggtgctcttctctccattgaccatcagacagataggtccccactattaaacttgttgtgtagactacacaacctaagcttttgatggttttctctctagtgatcaccaaacacatttggtgcctctaaaaactatagcatgatgaccggactcacctatacaactccacctacgctttaatggcacttattcggtgac

SEQ ID NO: 10304 - DNA, 531 bp, Zea Mays
tcacccttatgggaaggacccttcgtagtagcagaaatcactcggccaggatcatatcatctcactcagatggacggcacagaagtcgggaactcctggaatatagaacacctcaggaaattttatccctagctgtatttcaaaagctatcggggcgacgatgtactctgtataatggaaatatgtcatcaataaaaaaagggcttcaaagatactcagtttgttcatgattgacttgcattcttacttaactcggggtgaccactatgccctgctaacggagcaatcggcttaagtcggcaacaacttaaggtggtgcgacatgctcgcgcttacttaactcgaggtgaccactatgccctgctaacggagcaatcggcttaagtcggcaacgacttaaggcggtgcaacatgctcgcgcttacttaactcggggcgaccactatgccctgctaacggagcaatcggcttaagtcggcaacaacttaaggtggtgcaacatgctcgcgcttacttaactcggggtgacca

SEQ ID NO: 10305 - DNA, 583 bp, Zea Mays
gacgcccaccgtccgccgcatgatgctggccatccaaggaccataggtcttctagctgtttatttggggcatactgtttatttgtacaaatctggttgcaatcttgggacacatgcaaaaatataggagtgtttatttgtgttacaatcacaatctcatagttaccaccagtcatcaaattactgctattttgttcacttggtactgttgttttggtactgcgatgaagccggtgtttaattgttgtgtatgtataccttcggtttgggatttatagaagtattatttagaaaatgattgcagtgttacagtaatggttacacaatctggtttacctgaccctggctaatcattagtggggcaagcaattgatatagatgtgaaaatcccagtcactaaccacgcatactcataagattgcatcgccctgcacccacatagcacagatcgccatatatgttggatgaatacatttctctggttactgactgcgattttcacaactatatcaaactggttagcttctcatgatggaatgcaaaaaatatctctgtctcattctttggttattgctgctttggtc

SEQ ID NO: 10306 - DNA, 377 bp, Zea Mays
ctgatactatggcaggtatgcatgtgcagatgtggtaggaatgccaaaagatgtgccaggaaaggcaagacatgcgagaggagatgtgtctagagaggatcgggcgacagcagcaagccccattgccaccaccgccaccaccacttccaccccgggtcaagcaccgggaatttatgagccacaagctacccaccttcgccagttcttcagatcctctacacgccgacgactagttgaagtcagtagagaagatgataaacattgcccaatgctccgatcgggagaaggttctctatgcttctggtcgtctgactggtcctgctgctgattggtgggattcttatgttgctgccaatgccgctgctgacactattact

SEQ ID NO: 10307 - DNA, 646 bp, Zea Mays
gcttagtgcctttgtagtctctagtacagcatctagcacgttagccattctgctcctcttgggagttgcggcagaagttttttgcacctttggcaaacctgccattctcaatggactcaggatttctggtatttttgtcactttttccacctgtggctctttggccttattatcttcagccttggctggctcaactgtagtcatctttggtactacactcggctctacagcgctctgcataattgaaacactctcttttgctttggcagctgaagaagtaccttcgccaaattcaggaatcactgctgcttcaatgtaacgcggccggtgagtcagaaccttcatcttcttgcccttcggctcagctgtgatggccgaagcagcaatctttcccgaagcagtaatctttctctttaaccctcgccctcacagtgggtaacaatagtctgggtatacgaagccaatagcatcaaataccctattcaatcttttcttattccgacccccgaaaggtgcggacaaggcattgtcctcggccttggagtatgccccaagtagctcgtcgctagtagcttcaatgcacttcagccaatcatcatttggctcatcaaatttatccccaaacctgaaggtatacttcagccgg

SEQ ID NO: 10308 - DNA, 669 bp, Zea Mays
aaaagatcggtaggggaaagaacttggctctaggtcagcttgtccgctatgcccacttgcgctgcgacgtggctgagcggccgttgccgcagtggtcgccgtcattctctgtcgcaacacgccgtgactcggttctccatgtcgccgtgatcgtggcacgcagtaaatcactgcctctgagccatttcaccgctgcgcgccacggagagcagctctagccagttatctgatcgcgccgatgagctagagcttagccaaaatccgcggcgtgtgtgatcggaccctttgaattcagtaccctccctgctccctcttgttacgcacctagcgcaccacccctcaccccagttcatccaccatagcccaagaaatctacatttccccaaaatcggctagaacgctgccgtgaaacacctcgtcgtggccagcccttctcaggttagttcatgtccctctgatccatgttttagcatcgagaacatcgtgtcgccattgcagagcaccaccgagaacggtctcacctcgactagccctcccgtgctccctccatccaaattcgcgtgcgtaccgcacctctggtgagctagtgatactcgccctagcttcaatttaaatgctatcgcgttctgttgctcggaacgggctcgccggagctctggtgccgccgtg

SEQ ID NO: 10309 - DNA, 612 bp, Zea Mays
tcaataaaagtacctcaagcatataaattcaggtggcaagaaagcacgaggcctgacttctagctatgtgatgaacatgtagatggaaagtggctcctcctgttgtttggatggctagggttcttgcaggtgtaagatgtcaagccatttaaagatgaaggctagcaaaggtgatcactaagtcaagctgcattttctcaaatttaaaaacaacacctatctgaaacattaatgaatcatcgtatacatggcacaccatcattcataatatttagccctggttatacatatcaacatatcacacacataatatcttaaggatagcacatgaaggcatgaggctttatactagtttagatacatgacaccctacatatagtttgaggtagatctctttatctcatatgcttagattataggggtgttaacgtaacatgcaatgatgtactaattaaagggttccttccacctcttatatatcccaaggggatagggttacaagatctaattgatttatagatatgtttcctagtttgtcacataaaaagtacaaccaatatatggcacatgagaaatacaacatcatcctaaactacatatatgatggagtag

SEQ ID NO: 10310 - DNA, 708 bp, Zea Mays
tggggacgcttcaggcaggtgccgcggcaatcatcacatcactcaccggagtcaaatacagagacgtcgcatgcctcagttttgccttagagtccgacagatgcacaaataacatagccaagtacaaagcagtcatcctcggacttcacaagttgcaagtcctcgacgtcactacatgaatcattaaaacggattccaaggtcgtcgctggccaaatcgaaaaataatactcaatcaaagagcccgtactgatgcagtacctcaccgctgttcgcggcctcgaaaaataattcaagggtttcactctacaacacgttgagagaaacaagaacaaagaggccgatgcactagctaaagcagcagctaaaggcgaagccttaccctccgatgtgttctatcacgtcattggcacaccagccattcgaaatcccgaaggcttgcaaataacacaagacgccgacggacactggattgtcaaccttataatggccgaagactggcgggctccaataacactatacctccaaggccattaccatccatccgatcgcaatgaggccaaaaggcttcaacacaggagcaaagacttcacaatcattgacgaccagctttacaaaaagggaatcagacagcctatgttgaaatgcataactgaaaccgaaggcttagagcttctccgcgaagtccacaacggaacttgcagatcac

SEQ ID NO: 10311 - DNA, 405 bp, Zea Mays
tgcgaatctggcggcgggcggttcagctcctcctccggagtgggggtagtggagtgagtgccaggtaattataccgaggtcgaggagaaactgcgccggagcaggaggaaggaaagaaactgatggattggaattggaacagagagagaggcaggcggggaaacgagacgacgcctcccgttgcttgatggagacgaggctatagtgtactagtgcctctatcctctagctgagtgggggttgtgccatagcccatagcataggattgctacgttacgtaccagctagcggtagtgcagtgcggtactttggtggcaatggcaacgcacaacctcgaggtgggctccacaggaagtggtcgcccgggcccagcgcccccgcttgtgcgtgcttgtctcttcctcc

SEQ ID NO: 10312 - DNA, 711 bp, Zea Mays
actggaccctccagtaatcatgtggatgaccccctgaatggtgggttggcgaagtgctctttgtgatttggtcgtggggggtacttgatagggttgttggtttggttgttgtagaggtggtgggggtcggtggaagggctaatctctcattgcttgggagttggggtgttgatgggggtagttggagggatgttggttgtagtttttgtggtaatgcgggaagggttggtgattgtcttcgtatcgttggaggtattgtggatggtacctgtgggctatagccctctcattgtttgcaggggccattccagccatatggtcattagcttcctttgttactaggcaatctctggtcgaatgccctacgtcttcgccatggaaaatgtagtagagctttctttgctgcagagggcctctcccacagcctctccccccttgctgcactaccaccgtgggcttggtgtgaggggtagtcttgacgttgatgggggccttcgcctggttgctgttgattggctacgttgtgaacttgaagttgttgttggccttgctcttggagagggtgctcttgttgtgaacctctagtccatgacttgctagactgcatgatatcctttgacttgtgttgtgactccacttttctgtagtggagctctttggatcggacatactttttgaagagctggtacaacccttggagggtggatggtg

SEQ ID NO: 10313 - DNA, 547 bp, Zea Mays
gtgttgcccgcagcttgtcaaagaccagggttaagtcttctactagggtcgaccctctcttagtcttgaccacgatgtcatcaacgtatacctctaccctgtccctaatcaggtcaccaaaagtcttactcatcgctcgtacaaatgttggcaagatgtttttaagaccgtaaggcattacaacataacagtaaagcccatccacagttacaaaagcggtatgcttcctatcttgcctagacatctggatctgatggaatccagagtatgcatctaggaaggacaggaggtcgcacccagagatagaatccacgatttgatctatttgtggaagtggatatgggtccttgggacaggccttattgaggttggtgtagtcgatgcacatccaaagcttcccattagccttgggaacgatgactggattggccagccaaactgggtgatggacctcttcgatgaagccagcgcgcagcagcttccggacgtcctcacggatgaaatcctggcgctcaatggactatctctgaggcttctgactcaccat

SEQ ID NO: 10314 - DNA, 454 bp, Zea Mays
ctgaggatgaatacaagactgcttttaaaacacatcatggccattatcagtttcgagtgatgccttttggtctcactaatgctccagctagtttccaatgtgccatgaactcagtgttggagagttttctcagaaaatttgttatggtcttcttggatgatattctcatctacagccctagtttggaagtgcattatcagcatatcaggatggtgttggccaagctgagagagcaccaatttttcttaaagatgaagaaatgctcttttgtgaagcatgaactaaaatatttgggccatgtgatttcaaggaatggggtggccacagactctagtaaaactgaagccatgttgtcctggccacaacctaagaatgtgacagagttgaggggatttttgggcttaacaggctactacagtaaatttgtgaagggttatggtattatggctagacc

SEQ ID NO: 10315 - DNA, 554 bp, Zea Mays
cttgaagcgaagaactctagtggcaatggatatgtgaagatcgaacaatcttggatccgcagcaagtggctaaacctcaatctcatcacactcttggaagcgggctggaggcaacggtggagtgacagagggagcgagagcattggaagcaggtgtggtgcaggttgtggatgtagcgagagtggtggtaggcactagagtagcggaagctggcgtggtagtggtggctagggtagagggttcaaatctggctggagtggagagtgcccgagatgagaggtgattgatacaaaattctatctggttagagccaatcctcatttgatctccttgctctgctctcttagctactgttgttgctcgagtagctctatccaatttgcgcttcttctttcctccctactgctctaggtagacttcatttcccttgtcctacctgaatgggcgaggatgatcctaatcatcacctcctcctgctggtgtggcattcttcatcctcaccataatgacttctgaaactgcccacagactactggcacgctacacaagaatta

SEQ ID NO: 10316 - DNA, 475 bp, Zea Mays
gcaccatatactacatcggctcaaccttcaggatgatacccatctccctataattgaacaacattatcctcaattcctcaccctcaaaaagatttcgcagatccccctcacctatgctcgccccaatcgacgaggacaacaattctcgcttaccaatctggtctactcgaagacggccacgctccatccccatacgacggcgcctaccacttcgcgaaacctcactcacactgtgtttcgacaccacccttcgccgcctgaaagtactcgcactaggaagatcagccgcctcgccaacctccacacggggcgaagactccacggcggccacatctaacgtagcaaaatcatccaagccttcatccgaggactcctccgtccaagaaaatgaactcccagactcaccaccagactcaaaacactcaaatccagagccagataaattatcatcggcaggcacaacggttgaggccgc

SEQ ID NO: 10317 - DNA, 610 bp, Zea Mays
cacaataattctcaagactcagactattctgagttggatggcgggttgtttattaaataccacgagggctcttatgcaaagtgctatggccaaaggggtatgaataactactggccgttagatccggaatccgcgcaccaaaaccacccacatcgcgaattaatctcagcctttcgatccccgatcgacgacccagaagtaacgagcccgaatagcttttctacttctaatctgggccgcccaataccggatccacgactcccagcacacatcgccatcctctcatcaccatcgcaggtcctggatctgacggttcccagcgtttcttcctccctgcgccctcctacttccttctctctctttctggcggcccgacgccggtagttcttcccccaacgcgacaagaaccagagcactggcgcgtcggccatgctccaccagagataacccgcccgacacctagcgtctaaatatctagcgtgaatcacggagacaggaagacatttcttacccaagatcacggtgttgccaggcgttgttccgcttcggcgtgcagcaggaggactctccggctagcctcatccgtggcggcggcaacacccttctctcc

SEQ ID NO: 10318 - DNA, 540 bp, Zea Mays
tgcgagcttaaccaagccatctaacaagtcggctaaccagagcaacgacacaacctgctatacaacatacacgtcggcttgcctattatcatcgcaatccgaaacacaacatatatataacaatcacttaacgtaattgactcttacttaacaagagttagctaacacagtataaacttagcaaaccattttagacattgcaactcaaaaacatgggttggagcatattaatcagtttttcttaaccattgctcaacttaaattggataacacaaaagtcacataaaacatcatatttttaggagatctaacatgaagagcattaactctacaacataagcgattcaacctctaccatgcttgaccgaacctattggctaacccttccgaaacaccctatccattcttcacatttctaatcatattgcacgtcataaacaaatttcactacacattgaccacataaacaacattatcacacataaccccaacttaaccgtagaggaagcgatgactacttcggcatgtcacctcctctct

SEQ ID NO: 10319 - DNA, 307 bp, Zea Mays
taatttcagcagtggtagtagcaagtgcccgaagttcggcttcaacactagaacgtgatatggccgcttgcttcttggatttccatgcaatgggagatgatccaaggagaatacagtaacctgtagtagaacaacgatcaacaggatcacttgcccaagtggcatctgaatacacatgaagctgaagtgggctatctaaagcatagagtaaacatctggatcttgtcccacgtaaatatcgaagcacacgaagcaaatgaccataacgaactgaagtaggtgttgatacaaattggctcaacatatg

SEQ ID NO: 10320 - DNA, 473 bp, Zea Mays
tggcgtccctgctactactgagccctccgaagctatagcagggatcatcaacagcaacgttgcagccattgatgctcttaccaacaccatgcgcggcttgccattcttcctagctggcagaagcgccatccatgcacctcctgtgtctaggatggcgcaccggccatctcaagggatgggggctatggttggcaatcctgtgactggtcatttcccaccatctatggctgccaatggctggccattccctgcaactaccagcagcagcatccttcctgcgattccaccgcagaatcaagaacatcgtccaccacaagggagactggtggtgcctgcgaatggtgagcatccctccacccttctctttggctccaacacctttcctactctcccctcgcagaatcaagcggagaatccaccagcagaggagacagtgcctggcaataacggaggtcgcgccattcttctctttg

SEQ ID NO: 10321 - DNA, 655 bp, Zea Mays
tccatccgcccctctcgagcggtcatacgagtggcccgccatgcccacacgatccccagacaccagtggttctccgtgatcacccatcgaagcccaagcggcagaggtcgaggcgaattgcacggcagaggcaaggtcgtggctgctctctctcctgttcctcacggtaatggcgctcccaaactcggctggttagttggcctctattctagggattagggatgcgaggcggcgcggtcgctttatagctagtgagtccgcgacgagggggatccgagcagggggcacgcccggcgaattcggcggattcagttgcaacaaccccgatctgagctcggtcacggtagaagatggagctgacgaagatggcccgcgtgcaagtggctggcgcgaggtaatcagcggctggccaaaggggcccgtatgtcagcgctaaggtgacccaaattagcccagtgtaccgttttaagggaaagatgggccagcgcgggagagatggggaagtgggccgactggcaggccagttctgcggaagatgggccagcacgaggggaaaatggcccaaggcgccaaatggggtcttctccttttttatttatttctgtttgcattttctccactaaatttcaaactctagtatttgaattcaaacttg

SEQ ID NO: 10322 - DNA, 349 bp, Zea Mays
gtagtttttgcgagacattcagcgctggggttaatgaggtcaatttgattgtgtgtgtgtctgtgaacctcctgcggtttgtttgcgtgtcggtttttcatcatcgcactggaattggaaatgaacgaaaagcttcactgaagaaggcggcgtttatcctgcttctcgtggagtttttaacatgtgttgtccctggccaactgtaaggcaaaacgttgaaggtgtgatactgaatatgacgatcaatccgatatgcatgagcaatttggatgtgtgtttttgtgaattctcatgcgtatgcttgaaacatgtgtctggtagtatttgagcatgtgtgcccactcttttg

SEQ ID NO: 10323 - DNA, 959 bp, Zea Mays
gaaaaatcagagacccagggttgtttttgttaatttcaaggcctcagcgtaatattcttttaacaccagaggaccgcggccgcgggtttatttttaataaagtcaagggcttttttgcgaaatggccgggccgaagggggtatcggccaatcagaaccgtaggatcgcgggtcaaaggttaataaaagaaactgaatcggtatgcaacggtgacccacggatcaatggccaaggatacgccatgccattcatctaatctgatccgcacaatgagatccaatgatcgagatacaatctggtcaaaggggtgggttgcttctaatcctggccgatgatctactattcaacgacctagattttattatggctataccttatcacacctccacggcttagatcaaatcacccagatgatacgcctagcgccaaatcacggtcgttgcacgctggatcaacggcgcaagcttgcccccacctcacgtcatccaagcacggcggcgccaccagcctagacggcggagagatggccggagttcggccaccccgtccaggagggccttatactctaatctaaagtgtgaatcatatagtgcaaggcatggcgaacgcaggggaagagttctcaccggcagggacgaagcatagaggcccgaccgcggagagtgggtggtccgcggcggattcagtcaccgacgagaaattcaccgagccctggccgcccacggccccggaattccacacggcgacgtccgcaaaccttgacaaagctttcccgagcgcacgttttgccctaaatggacggtaatcaccgagggccgattacggcggtggtgctcggctttccctcccccttctcattgtttctcttgcggtggcttagaaatctgcagacgagcaggaaagagggtcacagcgtggtcacttttatggtcccgggagcacgcgaccagcaggtattt

SEQ ID NO: 10324 - DNA, 604 bp, Zea Mays
ctggtgtaaaagtctctaagactcagcgcactgttaactggactgcgggttagtttccaaattccaggagggctctttaacaaaatagccagggcgaaagggtatcctgaaatctaggccgatggatcaactatcaacggatctgattacatctggacacgggtgaatcggtactcagcgtggtccctcggatctagatctgacggccccggtttaatgaaccccagagcgatgaccatcatccgatcccgatcggacggttccagttacccctatccgaaacgctacgcagtcaccacatccgggccatcaaatggagatccaacggcttcgatcacactctagagaaacattacgtgggttccaatctcgaccctcaatcttcgcatcaaaggccagggacattcttatttctcgcgtcaaactcggtcacggcgtccatctaccccgccggctgataaccgcggcagcgccctccatttactgcgacgcgacgacccgccctagagtattggttgtgttagcacacagatcacaggcggattgaagaagagaaagaggtaggcgagagagatagcttgggttgggaatgagacaacagaga

SEQ ID NO: 10325 - DNA, 1092 bp, Zea Mays
ccggcggggcccgctggccggccacctaatcgttgtgccccctggatcgcgggaccacgctgtcaggtcgtcttccccaacggcctccgtggattgcgctcgcgctagaaccgggcgggagcctatcccagctgccctctcgccaggtattccgcgcctaatccccccctcccgtgggcatataaattggacgacaacctacctccaccccatctacccttggctccttggaagcaccattaccgacgggggaaaagtggcggctttccccaagatcacgccatcagcaagccgggaggtgtgatgaccatcgggcggactggaggttggcgccgtaggccaatcggcctctggagaacgtcggggtggtgtgcatgccctaatcccacgggattatatcctggacttcaagggatttccttgccgtggggaaatcatcgtcgcggtccgctttgcgccgtgggcgggaccttcagagcatcctccctccggtacgatcccactcccagtttcgcaataaccacggtaaccttcgttgtaagtttactccgagtttctggctcgggatcgtagagttgggcggctctgcaatggcgccaccgcgccaggcagcgcaccgccgttcggacaccggaggaaggagatgatggtcatccgttggatcggaagagaacggtcgaaaatagaagggaggtagcgtctggccctgccccttggattgatccgcaatgatcatgattgagtttaagggcgatgggcgcgtggccgttggatcgggatcgcacgcgttaaactgatcgcggcacattaaaatctgggccaacggattttgatccaacggttgatagagcagaccggttcataaccaggtataatctaatcctaaccgttgaaactagatctggcggctctagttgcatcttaccccttcgggcgtcatctttacagaagagcccctgcgtttcctcagtatcaacccgcagtcctactgctggctctctgagtcttaggaacatttgtgtagtagcccctgcgttcctctgtttttgaggcccagtccagaactaatgtgaaaatcttaggaacatttgt

SEQ ID NO: 10326 - DNA, 737 bp, Zea Mays
gtttatagtatgtaagtttactcaagaaagaagaaatttgataattccataatgtctcggttaactgtttgcctgagaaaacaactgaccaagattgattactgctttatttttagttgttactggaatggatgatcttcgtggctccttccccgtgagccttgtgatcattgagtagttggctaaattgctatttaatgtagccagatgcaattcagtgctatgctaatttctactttggtatggcgatcaggtttagattttggcgaaacaaaaacagtggagtggagtggagtacaagcggccagaaaagtgagagagctataagtctggagctaggaacggtgtgagcacggatcgaccaaaaaaactatgcaataatacaattcaactttgtagtggaatgtggagaaatttcaccgtttctggaaatgcataaaagaatagaaaaggtcaccttgaactggatctaggtctgctaaagcaatgctgaaaccctccacatcagagtccacgactcccctttcttcctgttcggtgacctccatatcctcctccatgacacgcctttccctctctctcgcctaccactcccgcgtacgcccataccaggttgggcggcggctggtgcgaagccattgcacggggcgagagcgaaggttggtcggcggctggtgcgaagccatcgcacggggcgagagcgaaggatgcggacgcccgcgtccgggtgaggcggg

SEQ ID NO: 10327 - DNA, 927 bp, Zea Mays
tgcctacagtgaaattccatagaaacattccaatatggagccgttgaatatttcttttaccacacaatcataatgcaaaagcaaaaggatggcagaaaaaataggcataaaacagaaccataatgtcctaattgttctctacaagaatgtcccacagctgtaataagaatcccactttgataagtaactggctaactgcaattaaaaagtaatagaatattattgttcatggttcattaactaagcttggcaactcaaaccatataaaagcactatacttgacccctaatagcatgcagttacaaaacgacaatgtgccttggcatctcactaataattactgtccaaatcagacagtggttcaaattcccagccattagaaatactttctactgaccaacctttttgccacgaatgacattataagagaaatcagtagtcaaagattaatctcgaagaccacaccaaatcaaactgtgccttatatttgggcatgtttgcttctgatttaagcgggtgtttggggctttgggctgcggctgattgaatagcccagccggtcagctgcatgcctgcagcctatcctgcttagtacaacctcttctctctggatgtatctgctgctgacttggtgcagctgctacggtgttggtgggatggctactgcacctggaaccagctcgaccgaacaggatacacagtttctagcaatgctaatagtcataaccagcagtccagcacaatgtgtcaccaggtagcaatgataatagtcataaccagcagtccagcacaatgtgtcaccaggtcgatgtctagtttgctctactaagaattattaagtagtacattctgcccaggcccaagattaactttttttcatcataacttagtattaagtagcattggagcaaaacagctgaattcaac

SEQ ID NO: 10328 - DNA, 492 bp, Zea Mays
tcgggataatattccgcagactcaggacatagcgccagaggatggcgggttctatttcaaataaacctaggctctcttaagcaaaacgtctcagcgaaggggtatcgcgagatgctagccgtcagattaggaacggacgccccagattaaatcggaccaacccgaaccggtatgcatcccgagtgctcggatccataaccaacggctcggattttaaacactcgccaggtaatcgcgaccgtctaacccgagaccaacgccccagattggccccggccgaaggggtatccttcaactaatcgtgatcgcccattttgaatcggacgatgcagcactgttcttccctcacgcaacctggcgacggcggcgaccgcgcccgcacgaaggtgtcctcgccggcgtaagccaatacgactctccggtgccctaacaagtccctaattcgccccaaaacgaagcggagactactacgaacacgtgagtcggtacttt

SEQ ID NO: 10329 - DNA, 429 bp, Zea Mays
tttatttagatataattattgtttatttctaaatgttaaggtatgcgtggtccgatgattagtttcaattttttagagcaggggtatagattttttttatataattattgtttatttataaataccaagttacgttacgtgtgatatgtagctggtctagagagtcagcatgtaagctgaagccatggcccacgttagcttattagtatactatgtttgactcgccgctcgtacgtggcacgctgcgtgctgcgatgtgtacacactcagctgctcgtggctggcaggtggctcacctaccacgtgtcacaacaaggacatgcatgcacacccatctctttctcgatctctgccctgaaggaagatgaaaatgaccaaacagtccttgctagcaggtagcatcgcagctctacacgtcgtagacgtcgg

SEQ ID NO: 10330 - DNA, 324 bp, Zea Mays
gtagtagatcatatttgatgcatgtatatgcgataagcaagaaagatacttacataccaggtagcgatcatcggatcgatcccgcccttcatggatcagatcgaagtgaatgcatcaagaaaccacatggtatggctagtgagggccgggaggaaacaaaaaagagagagcttcgaaagattctgagtattgctagggttaattggaagggtgtatatatcatggaactcctttgcaaatggtgatcgaacagatcacctgatattgctgctacctgttgagagattagccatatgctggagagcttagacacagggcatccag

SEQ ID NO: 10331 - DNA, 480 bp, Zea Mays
gaagggggttgattcagataaacattgaagatctagtgcactgaaatatctgaaacaaagatctaggcactgttgaatcggatgagttcggatgaatcggtgggcgaaccgatcgagaggggaggataacctcagacgtggcaccatcccgcgtacttagccaagcgtggccggagatattcaccgccggtcgccgtgactcagtgattttccgccgcggtgtagcccatgccttgctcctccctcactgtgtctcttccctacttggtaaacatgcgctaacgatgttatccgtggtcgtggatagtaagtcggaccgccatgcctataaatagtgccatgaaccccgacgagacacccacaacttcaccagtgagtttgattgaagcccaaaattcgcactgcccctaccacctctttccaaattgagtgtgcatgatgaatcaatagcactttgcgaccgtgtagctccaatctcac

SEQ ID NO: 10332 - DNA, 698 bp, Zea Mays
gttggtatgttgttttcctccccattggtttgggttttgcggcgcgttaatacatgccctatgaggctcataggactggccattcctttctggccttctggaggccggaaagtactcactctcacaggtttggtaggttataatatggtgctggtgtgtcgcatggtgagatggggagtttagctgggacggatgcggagttggatatccatcctcctcaaaaaactctgtgccggatcgtccggttaaatacgcggaccgtccggttacatgcgcggactgtccggccatgtggccggaccgtctggcattatattcggactttctggtgccatacgtggatggtccgaatgggttatctagggtttgcacggtatgtggcggcttggatgcaggcctcggtaattcgcttctaaaaatgggatcgaccgccactggctcggacggtccacccttacgtgcgaacggtcgggacatgcgcagatcggcaaatttatcgccgatttgcgtgggaggctgttgttgcccaaggtacatgtctatcggcatcccataaaggggttgcgactggtcgtgacaacctgtagccgataaattacatgtgtattcccttagttcaacctcgtgcgaaggaagatttgcaatagtagacttatcaagcgcacgcactagccttttatgatcattttgtatatccc

SEQ ID NO: 10333 - DNA, 504 bp, Zea Mays
aacggggtgtccaaaaaaagcccaagaagtcttggctgagcaaccttgtgaggcagagcggacgaccaagtccctgccaagcaacctaacgaggtggagcgggcgagttcctgccaagcgatctcatcaaagactggtgtaagaaaaggccgacccaatgatacgagcccacgcccgcaggagaagacaagtcgtcacaaaactatgtttaggtctcgagtacggtgttgaaagatctaacggacgtcagacgacacctcaccacataccgtctcaagcgaaccaccactagaggataggaacagtcaatcccagttgaagggatctcaacatcgaaatgtctacattgactaggatatctggaaagatgtaacggatacaccataccgggtgtatgcctatgcacgacggcaagtaatgcatgcccaggacgacaggtgaagctacgatacgtgctaccatgccgtggggctgactcacgggacccaccgcacaccactacga

SEQ ID NO: 10334 - DNA, 487 bp, Zea Mays
ccgagttatatagagctgacgtagaaggagcgttgatgcctcgtgtgtatagttgcatgtacccgaagagctagatactcgggagataacttggagaaaggtgactgaactccgaattagcaggagcacttgtcgcgtcgaagatagacttggataggatcaaatggacttcatggcttgtaaagggatatccctctagtcccttatatatggccaagggggtatccctacaaaacgatctcatcccatcttatatcttgtcgtccctctcacagcagccaagccatcactagattgataggagaattcatccatcactacacacaactcatctgtaacctgtgcacaccagcaatattcaacattaacaggacgtagggtattacacattctagcggcccgaaccaatataaactctcttgtgttccgatgtgcattagcacgtaccatcgagtcgtggtcaacaacgttgtcctacccaaaagca

SEQ ID NO: 10335 - DNA, 1272 bp, Zea Mays
agagcccacaaaagcctacgaacttgtgctaacccctctaaagcgcaaggtgaccaaaagcatgacagtgactatagcttacaaaacttaaagaatcacaaatacctggaatgcacatattaagggccttggctgtaaagaaggactccatatcaaataagtagaaataattcctatcgatcagatctgacagcagctggccagcaaggcgatatagtgttgccattatgggaagagatagatgccatttcctgtaactgggaccatttataagttttgtcttcattagaggtttgtgatcatagaaccattcatagacagctgcatcttcctcctcatccaactccaactgtatagcttcaagtggttcaacatccaacaaattatcagcatagtccagtgggggctcctcatcatcaaatggaggaaagcgcattcgtttaaaatgccgcctatcccttttctctcgccgcatcataatccacattgtaccccactatgaaagcacattaaacagagagctttatgagcacaaaagaaaacagatgtatatgaaacaacaggttgttacagaattacagatgcacaaataatagcagttgctaccatgtaaacacagctgggtatgtagttatataaggatacgagtctgtagattgttacctgtgcgaggtatattggttcaacaacccatgggatttcatttataaaagtgatagccccagtgatgtgatacaagattttcacatggcgaacctgaaacaagtgtgtattaatcaaatagaatgccacacgtaatcgcaaaggataagctatttaaccatacatcaaaggacatcaacaaatatgtacctgctcccaaggcatcggcatgttctctagaagtttgtacacagcgtggggcacaaatttgagtgcaccaagataaacacgcttgtcatgcctgtacttcttggaagacatgtctccgtggtctctgttaaataaaatatggaacacattataaatagtatacactctagtactctacaaataaaagagtgtttgaaacttttaattctgctggatggatggatggaaaatgcatctatgtagatagaaggtacaagcagcttgcaaatgaaagataaataaatctattttggagtttctgctccagggacaccagctttacaggcaggaaccagaaactcagatcccacaacagtaaatagaagcaacactgaacacgtagccttagtgtaccaacaagaagaaatggaaccctaagaa

SEQ ID NO: 10336 - DNA, 533 bp, Zea Mays
ttgatatgatttggcttccagttccaatagcttttaatccatcaggacgcctagaagactgacagggagagaccggcaacgttgcctcgactacaaggcatggttcgtcttctggtggttccgtaagttgtgcttttaattgtcatccttatttgcttgggctcctaccaatttgcacgttgctcgataagagtgcaaagtgcactgttgtcaaacaccaagtccatatgaagagatacctcagtgagcctgtggagtcatagggtagagtgtacctaaagttgcccaaaatgagccccatatcataattgagctaatctgatggccttgacaagacaccctattgccagcgtcgtttgtcgtcaaaaggaaccaggtcgagtgccctagagactcccatgatgacctcggtctagccacctacgcccgactcatgccacacttcttgcctagcatgtgcaccacgatgccgcgttggtcatggtcatcctcgtgctcgccgccttttctcttcaatgtcatgtggtcatacc

SEQ ID NO: 10337 - DNA, 1332 bp, Zea Mays
ggggcggcaggcttcgcgctaggtcgtgccatcttcgcctcgtgcctcgggtctgccaacttggcgcacgctcggcgcttccacggtgcatcttggcgatccttctccatcactgtcgatacaacagcaccaacactccttccgtaagggaaaatcttcatcttacgagctaaacgagacataaacatgtccttgccggccgcccggggtatcggaacattcctaggccagcgacccccggtaatcttcagcattcgcgtagaagattcccagagctcgggtgcatgtctccagcaaatccacaacaaaatgattggaagccctcaacccctcaactattgtacctaatttccttttcttagaggccgcgcccggagcctagtcccgtgagggggcctcgtcggtcgttgacatcgcctatttcccccgacggacagcaacgtcggcatagttatcccccgggtaaccaacatacggcaaacggttcaactcaaaaacacggttcaacctaacatttgaaccgcagatgtcccaacacctcagagtctctatcttcggcacatattttcctacaatttcatagcctcggcctccacttcaggcacaaacgcggccgcgtcgcgaccgcataaatccagtacaaaggctggacttcgcaccagctattcgtccagggtaggcatccggcggggggtcactttgcctaatacccaaccatgtgccaagggccacaccccataggcaataaactcctccaccaggtcatgcccgctactcaggcgggcagcatgtcgaagggccccttcatcttcgtcttcctccaccacctcgaatcgagggaacgccacataacaatgtgagcacacgatggccagaggaagactcggcaagccttcgacatcatcaggagcccatagaaccaaaaatcccaccagttaccccacttgtttctagcgtaggggactatctccacaacctcagtcaattcttcctagtcctcggcgtgaaggtgcacgttacaaattaggctatcttattccctattttccttttctgccaatgcaggcaataatttttggtgaagacctccacagacggctgcccgacgtatgaagtaactgcccatacgtacttcgcaagcgccaccactgcgttcggcgtcaactagtgaacttgcacctcaaacctttgcaacacctctaccgcgaatcgatgcgtcgggaggcgaatactggcagcaaaaaaggcctcaaaaactatcaactcgctctcaggctcggggacctcctctgcacccggggcccgcccgacaccgttaccaaagtaaccaag

SEQ ID NO: 10338 - DNA, 497 bp, Zea Mays
ttatcattaataaagaatatggatgaacaacttttgaggattggtagctatagataagggtatcaagtgcagaaagggcaaacttttctgtgggatagaagggatccacttggaaggtgtataatattggactgaatagctaaatgtaaataatgataaactatatatgtctttgtgatgggcttagattggtaggggatgagaagcgtagattgtagtggaaggaggttggagggcaaaggacgacggggacatggcggtggccatggtgcccgtgccgtaggaggctggcagcctgggcagcaggggcagggacagtgtgcggcacaggagggagggggaatctagtatctcagtctgaaccactttgttattccgctatgataaatgacagggcaaacctcgtttaccaatgcaatttaatattttaatctgaacacctttgaggtggaatacacatgttggtagatgcacttttatgcaggcttatgaattag

SEQ ID NO: 10339 - DNA, 397 bp, Zea Mays
gttttcggtggccaaggggaggaccgccaaaaataactttaatttcagaaataagctttaatttttgtcgatcgtcaaagctatcgaatctaaacgtcagttttcgatggccatagtgaggccaccaaaattaaagttggctgccataaatggtttgaaatgttgttgtccctgatatgtctaactctgtagatttaatagcagccctgcgtttgaggttagttgcggtggcattctaactagcaaaaagatgtaggatcggagcgtgatgtcgatgcatggctgcatggaggtaggttgttgcattgtgttgttctactcggacaagaagatagcgattgggctaacaaaactaccagtggaaatcgattttcacttgtggtcgaggtaataaaac

SEQ ID NO: 10340 - DNA, 1142 bp, Zea Mays
ttgaggacaaattctgcacaaagtttgaatttaaaattcgaattcaaattgaatttgggaaagaaaagaaaaagaaaagaacaaaatgctacatgggctgaccaacccagcttttggcccatgaactactttcctacgctgcgcagcccagacctcactccgcggcgccgacatgcgggccccctttgtcagccgaacctcacgctggcaccgtctatgacgcgtggggccccacagcaggcgtcttctccaactaaccgcggatctcgcgcgcgaaagctccgggcttgaccggatccttcctccccgcttgcttcggccgcagctgttacgccctcgcctccaggatataaaatcatatcccgcgcacccccgcgctcactttcgccattgccaaccgtcttgaccactgacctaacaccattgtcgcgggagaacggtgggcgccgctggtggcgctcggtggattggtggcgacaccgcgttaatcaaggtattggcgcttccactactttcgtattgtttgtcttcgcgtctggttccgatgaatcgatgggtgggtcgctgggagctccggcgtgcacacgggacactcagggcaatggagccgccgcggcgcaccgtgtgccgagtcttgcactcgacgtcggccaaaattagttgtagaatgaggctcggggagtcttcaattgcacgtgggacgagtgaatcgggttatggcgttcgtatgggccgggtttgtgagctccggcgtgtgcgccgccgtgcggtgtcctgcacctcgtgtgccagcgtcgaaggaaggtgaaggtcctctaaccgtcgattgaggagaggacggcgccgattagaatgggataccctttcggggtgtggaatcccgaccgttgggatgtaatccaagggccagtagcggatcgtggatcttaaaaccgtagtcgtagatcctcaatccgagggcggtcattgtgtactggttgatgatacctagatctaatcgtggcccttgattcgcgatcgggcggccagaaaccgtgcataccccttcgcgggtacattttataaaagagaccctggggtttcacctattcaacccgccgtcctgatacgcgtaaaggaattataaaacaggcccagaagtt

SEQ ID NO: 10341 - DNA, 297 bp, Zea Mays
cagagacgcacacattccaccttcctttcggagagatgacaattaccctggaggatgtacagaaaatactgggattgcgtgtctccggccgcccagtcactggctcttgcgagtcggttggttggagggacagagttcagccattcttggtagggacttgcctgctgatgaaggtgcagaccgtacagccggggtacagattagttggttgagacagtcattcggagtgtgtccacaatatgctgacgaggacaccgttcagcactactgtcgagcatggatcctccacttgtttgg

SEQ ID NO: 10342 - DNA, 411 bp, Zea Mays
caggaagttgctcgggttcattgtcagccaccgaggaatcgaagctaacccggaaaaaatcgaagctatcatgaggatggaagcaccacgatcacaaaagaaagtgcagaggcttacgggatgcatggcagctttaagcaggttcatatcaaggttaggagaaaaaaggcctaccattctataaattgctcaagaaggtggacaagttccagtggacctcagaggctcaggaagctcttgatgcactgaagaagttcttgactacaccgccagtgctaaagccgccacgccgagccatgccagaccagccggcagaagatctgctgttatacatctcctgcacgactcacgtggtgagcaccacgttagtagtcgagcgggcagaggaaggacacacatatctagtacaac

SEQ ID NO: 10343 - DNA, 521 bp, Zea Mays
ggccgaagcaggagccgccgatgacccccgccgcctgtgctcgtggccagggtagctccgaccacctccgacgccgacccgcacgccgatgtgaccgtcgtgacctcccggacgtcactgaccaccccgccggagctctaccgccgccggtaagcctcgccgccgtaatctatgccgcgggtactgtttaagtcagccagggagcgcgggttagatttcggttaggtccagggggttttgtgcgatgtcagtgacccacgccaatagtagactgaggactattttgtgagagaagagggagataaaacccaggggcctcagcgcaaacctgttttcttttccattttcgaatttattttcttttaatatggcagataacttaataaatgcataacttgaagaataatcatccaaaaattgtcaaaccaattttgctaaactctgggaaatatggactatcagataaaaatagtaaaacccatagttcatgtattcttttctgaagttttgaattaaataag

SEQ ID NO: 10344 - DNA, 478 bp, Zea Mays
catgacatgtgggcccgggcctccatgctggaccgctggatgcgacgaagccgaaagggtgcacaaccgtggtgcggttgcgtgcttcctgcatggcggttcgccctttcgaccgctggtttcggcgaggatgggggaatgcttataaccgcggggcagttacatgcttcgcgtgcggcggtttgccttctttttgtttcgggtcagctcgcatgacgtgtgggacctagcccccgtgtcgtagggtgggaaccctggagcacgtcggtggagactttgcccgtgacgcttggaggtgcgagtgaggagatctccctttaaaaagggatcgatcccccggccagtagccatgccttcacacttctcgcattcatcgcgcttttccacttgccgagtccccagatggggtgcacctgcgttgccttctttttgctgttgtttgaggagcgtgaccccgtgggggttggcgctcttcaat

SEQ ID NO: 10345 - DNA, 572 bp, Zea Mays
ttttcgtcaggacagcaaaggcattttatggtttgaagaccaactggttgttcccaagaatccagaactcagaaagaaaattttggacgagtctcatctctccaaattttccatgcatcccgaaagcaacaaaatgtatcatgacctaagatccttgtactggtggaccaggatgaaaagagaaattgctaagtacatatctgagtgcgacacttgccaaagaatcaaagccagtcatttgaaggtagcaggtaccttgcaacctctccccataccatcttggaaatgggaggacatttgcatggactttattatgggattgcccaacacctcccggcaccaccattccatatgggtgattgtggataggctaaccaagatagctcatttcttgcccgtgcatatcacccatagggcagaaaaatacgcaaagatctatattgaccaaatagtgcgcttgcatggaatcccaaggaccatcgcatcagatagaggaagaccattcctagcacgtttctggggacaactacagaagtcgcttggaacaaccgtgattagaagctcagcatatc

SEQ ID NO: 10346 - DNA, 527 bp, Zea Mays
ctttgataagtattgccaagcttcacacctctagactagctcggttgcatcactctttgctgttggccagtagaaaccagacctgaagaccttcccaactagagtcctggatgcttcgtgtatcccgcattgcccagcgtggatctgatctagtagttgtttcccggtagctgaaagaatacacttcatgaggactcctgtcacgccccttctgtacagtgcttccccaatgagagtgtagtgagctgactgccttgcgatgcgttccgccgcagttttgtcatccggctcttcttcattctttatatatctgatgattggctccctctagtcgtctgaatctgactctagctggctcagaacattgcattcttctgtttgatctaaggaaatactcgggcgtgacacttcttggacgaaaaccctaggtgggacctatgtccaactggatcctagtttcgacaacgcgtctgctgccacgttgcgatctctctctaaatgatggaactccagcccttcgaatttgt

SEQ ID NO: 10347 - DNA, 308 bp, Zea Mays
gttgtgggccagcagcatgcagccgtgtacggtgcgcccgtgcttgctagcttccacgacgcttcctacttgcatactaatctacgggaatcggccgtccacgacgcttcccacggtgcggctgtgttgtttcctgcttgcctgtttggccttccacggagcagccaaccattgatccacaggagttggccatccacagcggcgcgacagtgactcgatccacgacgcccacggccctacacttaaatcctagctccgccactagcagttgctacgaggagaccaaggcaacaggaggcagcatctgg

SEQ ID NO: 10348 - DNA, 819 bp, Zea Mays
gaagaaaattcggtaagtgtttgagtctgaccaccatagcaagattgtagatgatatgaaggactgcaagtttgttactgagagattagcaagttctcatgcaaaaattggagttatgggtcctgcaagttggtcggacagaggctctgaattggagttctcatggtacagtgaactgaagaagatcttcagatacatcgcccctcgccgccggtgaccgtcgcgtcatgattcgcgtcgtcactacgattcgtgccctctggtatggagataatcacggccgcgtaaagatcttggcgccagataactcagacccgatcgacaggaagttcgccgcacccacttggattgcggtcgcccgaattggtcctcgccggcgttggccgcttaccgaccatgcgccacgtgcccgggcgtcttaccacgtcgcagtaggtcgcgttaagcatatccggtgatcgtcggtgagtccaccacggtgaaagccactaatcgtttgcgccaatgcccctcctcctctccgaccgccgcgcgtctccatcaaattcaccggccatcgctcaagcacactataaattgcgcacacccttggctccgctaagtagtcaagcacctaatccagcaactcgtgcctcaaatcatccactagagcgcgccaatttcaaagatcccccaaatcggtttccgccaccctgaaagcgtcctcgccgtggctagcttcttctaggtttgttcatactctctgctctctcgtctcagcatccttaggttctcctaatgctgctcgacccattcaattgagctagactgccctagatc

SEQ ID NO: 10349 - DNA, 1649 bp, Zea Mays
gacttcggacatgtcagtacgagacattactatatgtccactttccatgtccatcacctcatctgtattatcctcagaaagaacccccaagataaagttatccagttccgcctcatctgctctctctcgctcctccttatctaaggccctagacctcgcctgttgtttaaaatccaactttttactttgttccaacttaactaggaaatttgcaaacttatgcacagactcctcagatttattaccaaaaaaacccaaaggacgtaatttatcaacaacttgctgaaccgacatactgcataaaacaagcgactcattaccttccatgaagtcggagtcgaggttgcgagacgccttcaacttggaagccctctccaaactgtctcccgctgaagttgcagccctcctcttgctacgatatgacacggatgaacccgtatacactgccggaacagcagcacaaaccgccacctctggagtaacctgaccgttcttttttaccatttcataagctgagagcagactacctggcacaccttctggctgcgacctagttctgccaacttcctcctctcccaaaccctcctgcaactcgtcacccaaacccagcccctggaatatacccgaccctgaacttccatcctccaaaatcgagtccagatccactaccttcttccccgcaaattttcctgcattgtcctgcattccgtgtgtgctactttgctttgattttgtggcatccacatttggatcagccaatgcattaccaatgcctttgtttccattgttctgttgatcttcatcaccaacctccagatccaagtcttccatatccatcggttccggattatcattgtccatattctcttccactctgaactgaagctcatacaagttatcacctatcactacatccacaaactgaggtaacaaactcgcatccaaaactaacacctgtaaacgacaaatttcatacttatttgtgaacttcatgtccaccgcctttgtcaccccgaggatggaacccaccgcccaaataagcagaaaatccatcatctccttggggatgccagtgaactgaacccaaactttgcccaaagttgatttcacttccactggcaacaccttctcctctattgacattgacgcattgaattttgtttggaccacaccccattctatcatatgctctagatcggcacgagatggaaattgagtcttgaacacattggtaccaacagactccacctcccatttccacctaaccggcaccagacgctcaagttctgatgacacctgtgctgtggacagagcaccccctgaaaccttaattatagcattttttgaatcccctctatgcttctgcgaaggagtgtaagggatgtgaaaaaaaccgagcccatcgactgcatacccacaagtcacagcatttggttttacccctctaaactgatggcatctctcagtgttatgggcatcacaattgcatatatcacaccacagctctatagtacaaccctgcattacatgaccctttgtcagacatctccagcaatacggaggctttccatccttggtcttaccctgtgctgcaccccggaccaccacatcctcctgttcactattcttccctggcagcacagtttcct

SEQ ID NO: 10350 - DNA, 1372 bp, Zea Mays
ctctagtcctcacaggcacaacctgcggccatactcgtgcaaatctaggctctctgcacgccctgttgttgtcgatacccttgagaggcaccaccagcacctcggtgcactcagcctcctagtgcatgcgacaggtgcagctcaccaatcgcgtaggagagacaggctacgtacgaagtactagcaggttagcaaaaatatgcatgaaaccattgttttcagatcgcccgactaatcgcgattagtagggctgatcgtttctctgtgctcgattagggtgttcgactcgattagtgttactgatcgtccatatcatctgattaggcgacgatatggaacgattaatcgcctaggatccgatcagttgcaattaatagaggtagtccaacagtccagtttgtgctcgggtagtccaacagtccagtttgtgctcgggtagtccaacagtctgtttgactggactggcccgtgataaaaagaggtagcccccctagctctacttgtcttttcagcttccttgacggctgggagaaaatcaaaaaacacccttctctcttcccagctcccttccctctcccttcttcacccttctctctccctccaaggctccaacacggcaacacctttctctctacatcggctgggagaaaagagaacagagggactggagatgagctcctcatctgaagccttcttggtcatggtctactggtcgtaagttgtaaacttgcagtttcatataaacttgttgctgttgtgctgttatgaactattcaagtattgaataaacttgttgtgctgctgtgctggtctagtaagctggatgtactgctgttttggactattcaagtattgaatattggactatatgtatgttatatgactgtgtgcgtgtgtgcgtgcacgcgtgtgtgtgtgggtgtggggaatacacaggacgaccaaggggacggttagggtcaatcaggggcgactaatcgccttgatcggcgcctgatcgcctggtgggatcgatcagggcatcaggcgatctgaaaaatattcatgaaactgcatgttagttccttggttacaacttgcatgcatgagcacattgagaaaaagagacggcaaggcagggaaagggaactatgaagaaggcagcagtggcgatagtggttcttgaagaatgcagggccagcaaggcctcatcagcagccactgcatggttgtgcatggataaggcaccacgcactcacatgctcttggagcggcggtagttgtcgagcatgcatgcagataccaaaggggcagacccaccgagagatgatggtgataaagttaactgggctgacaggcgagactaggtgccacagtgtcaagctagctaaat

SEQ ID NO: 10351 - DNA, 381 bp, Zea Mays
gggcgattcgcggggcgaccgttgcgcgtgcacgagttgttcgaggaacgggcgtttcaccttcaagtttgaatttcgcggcgagttcgggcgatgttttgaatggatctcgcccgggcctttatatacccgaaagaggggccgcggtggttctttactctcatccccttcgccttcacctccttcgttcagtgatggatgacaaggtgacagtcgttccgccgcgcgacccgtggcctttctccaccgttgctatggaggatctggaggcccttgttgccgatggtttgctccgtcccctctccggtgggccgcagccggagtggatggcccccgcgagcgaggccgacccgactctgccgccggggtatgtggttagtt

SEQ ID NO: 10352 - DNA, 698 bp, Zea Mays
gcccgaagccacccattcagcccgactcttcttttgacccgcgtggcccaactccgatggtgcgcagcgtgccgacagctaggccccagtggccagtcagtctcccccgcactcattccttcttccgccctatgacgtgtaggcccgtgttgtcagcgctcaccttcaactgtcgtgtcgcgcatggcggagcttcaccgggagtttcggagctgttcgctgagtgcgactggtgcggtctagggggatttaagtgcagagggaccgaagcctggaccctctcttttcaccacgccgctgtcgacctcgtcgtggaacggtttgagagagaaaggggggagatttagatcgccgtcgtgcctgtccgtccatacatcgtcgctagaagtcgtaggtgaggtcgggaaccatcaccggtgtacgccgaacacgtgcgccgggatctagggtaacagcccgtgccctcgattcgagctgtgcactgctaggactcgaggaatttctcagcaatcgacgaggaggacgccgcaccgcgcatcatcacggactgcgccacatccatcagcgttgcaagtaaatctctcatctctgagtttgctgtcacccccgcatcgagtaggctcaatcggcgttgtaattagggctcgaagtcacctagtcgtagatcgccgacggaagcccctccgtggaacgcagca

SEQ ID NO: 10353 - DNA, 443 bp, Zea Mays
tccaataggtaagtcggattttttgggatcttgcacatggccttttgaatctgttcaatttcttggagtgctcctaatttttagtcctattgctttttacatttcgatgcctcctgaacttaatcttatgatataactgaagttgattcctaatcattgccctcttctactaaacgggcacacatatgaactagcactttgctacaggaattcccaggtaagttgtcctgaatccaaatctgatcacatttcccctgaatgtctcattatataagttgcatcatgcaatactggaacacgatttgctagcgttacgtggtgatatctgaccaaatctgctaatgtctcatgttttcttgacggaatttgaaaaagttatgaccttagcgtcattttgtgacatctgcccagatttgctcatgtctcgtgtttttttgttggaa

SEQ ID NO: 10354 - DNA, 723 bp, Zea Mays
ccgaaggggtatcacccagtatcagccgtaggatatgatatatgcggttcggattagattagagcttcatcaaaacgacatgcgctatagaccgtcgatcccgagacccacggttaggattttcatgacgccacatctcacaccaactgctcgattacatcagacggtacagatattcccggccgaagccttatcctccatccaatcgcagccgcacgccaacaatccaatggcaccagacccatccccttgctcaccgatcaaccatcggtgaacaggaatctccacggcggcacctcgccggcgcaccaaacaacgacgaaacagtggcctaatcgatcccccaaaagctgccaagcaaagatcggaaggtaacaaatgcgatcaatagcatattaccgagagtacaccagtgagtatgcccgcccacgacatgctacggattggtggacagggtgagcatcggcgtgaaattgttggtctcccgcccggggttcacgcacgacaaggccacatatgtgcgcggcgggatccttcgatgccccagtaccacccgtcgaggccgaaggatcgcccatgggcaggatcgatggcggcagcggcaatcacatctccccgcaccccccatccatgcgcctacggcaccaagctatacacggcttcggctggttggggagtcacaatcctcgtgctttatagcgtcgcggcggaatccggccagag

SEQ ID NO: 10355 - DNA, 538 bp, Zea Mays
taaggatcgaccgcggggaggtagctttcgacgtgtcgcgtgctcgcggacctagcccgagcctagccagagataattcaccgacggccaccgcggctcggtcatttccaccgccgtgtcgctcatgccttgctcctccctcactgtgtcccttctttacgtggtaaccatgcacgaacgatgtaatccgtggccatggatcgctagccagaccaccgggcctttaaatagccccgccacccacggcgaagtattcacatcatcactagtgagctcagctgaagcacaaattcacggaatcctctccacctctcccaaaattggtagtgcacggtgaaaccatagtcctttgtgaccgtgtagccccaacctcacctcctaattccgcgaggacccgtcgcggcaccgttttccccttttcagtcaccagcgagcgaaaatcctccgctctccatggccagccactcccaggtctgctcctgctcttcttaatcgtgtttcagcacccatatacgctcgtgatactcatcggctccgc

SEQ ID NO: 10356 - DNA, 533 bp, Zea Mays
ctttctctagtctgatcccaatacagtggagtcctgcattttctgccatatagagcctcaaacgttgacatcttcaaactggcctggtagctattattgtaagagaactccgcatatggtaagctcttatcccaactcccaccatgcttaagagcacaagctcttaacatatcctccagcacttggttagtcctctctgtctgtccatcagtttgaggatggtaggccgaactaaaattcaactgtgtatccaagctctcatgcaacttcttccaaaaccgagaagtaaacagtgatcctcggtcagacacgatcttcttaggcactctatgtagacaaactatccgagtcatatacaattctactaacttggctcccatgtaattagtcctcaccggtatgaagtgagccacttttgtcaacctgtccacaatcacccaagtcatacccagcaggggtgcggggtagtccaaaaatgaaatccatgccaatttcttcccatttccactcggatatcttaagcggatgcaata

SEQ ID NO: 10357 - DNA, 515 bp, Zea Mays
aatagggggagtattgatgaagatagtgaatcaatgtttcatgtgagtaaattcagtttcatatggataaaactagtccacacaagaataggtcacacattggaagaaggctagtcctcaagcattgtaattgagtttgagacatggggaggagtgcctgaagctaagggcatggtgaggagggcttggcagctaggggcaccatgacagagagggaagagaagagagcatgcagagtgagtgttgggttcaactaccacgtggatggatggacctagacacttggggaaactagtactcaggtgcacgacaagacaatgagtagggaactgtagagtgttgttatgtgtctctcgtctgggtacaatgcgtgggtatttatggtaaccgtgtgggtagatgggtccccaaatacggttatacccccggttacctgctacattctcgaaatattcccctcaatggggtcattacagtgaggtgaagtacaatagcatgaacatactatagaatct

SEQ ID NO: 10358 - DNA, 444 bp, Zea Mays
gtccagagccgacacgcgtccagacttggtccggtgggatttggacctatccgcatacactcctgctccccgctcaggcggagacccgatgctgccacatggcatactgcgcgcggcataagccaacgggcagaacctggcatgacgcctctgggctacgcgcgccttcgcattcattacggttaagacgtgcgcctgtccattccactgacaagcggcgtgctcagtccatgatacatggccgtgcagttactcacacgttaccgagagcaatgactcactattactcccgcgttaccggaaaaagaattactacctatcaatgctgcatggactgcaaccatcatggctcccgctgattactcatgtgttactctgtcagcattagttattcacataatgtatttattccattatgctcctgagcccgcatgtcggggctca

SEQ ID NO: 10359 - DNA, 422 bp, Zea Mays
acggtgtttgagctgcgtcgccgaccgcctggtgtcgtggccgggaggaaccactccaagaattccggtgagaaccatctacactgctaaaccatgatcccaatttcatgtagcgccgtttaatttgagtatgggggtgtggagcgctggattgggattgccccggcgagacttccgccgtgcgatatgcacgccggcgctctgctcgacctgatgtcgaagaagcctcgccgaccgtccgatttgtagtgtgcggtcgtgattagatgaagcgctatcctttggcctggatcgaccagggcggttggatcttgatttgatgtccctgattagatcttggggaaatcgtcgtgagccgtcggatcgggatcaggtggtcctgggtgcgtaccgattcattaagtgagtagatctaatcccgt

SEQ ID NO: 10360 - DNA, 528 bp, Zea Mays
ccaaatgacaagaaaagatgatacatccaggatgtatcagtcgggccggacctccgcgagggggcaccgaacccctgtacgcacaacctggacccccgattgtggctcaggactcccgagtaagcgtgtcgggtcccttggatgaggtccagatccctccgagtaaggtccgggccacaacaaggtcccgggacaggggaaaccttgacatgagctagggtccggtactgacacgtgtccgggccttataccgcgcgctagcgctccccgcttagacggagactcgatgctaccatgtggcttgttgaccgtgacataagccaacaggcggacgtaaggcccctaggccgcgcggtctctgcatttattgcggagaggacacgccgcctgtccaccctactgacaggcgatgtgccccctcaacatttaatgcgtcctgtccattccgctggcaggcggcgccagagcaatcctgcagacgatgcacctatccagtctattatcaaacagtacgcccgtgccgcgtgg

SEQ ID NO: 10361 - DNA, 357 bp, Zea Mays
agaccttttgtttaggagggattgttcaagatattaatgctgccttcactgatcttggtcaagaaatctgaagattagaggagttcctactaaattacagcaaaagcagtcaacttgttgcctgtcgaactgttctgttccccagtgacaaaactcatctgtttctgccctgctcatttttttatggaattgccaagtaggtgggcctaagatgtgacctgatgaataaatataaacagctggactgaaccaaccgaggaacgattgcgtggacgctggatcgtagatcagatcaattgcagtgaacacttctctaatcacgtttaatttacttctgaattgaccaatcaaatcaca

SEQ ID NO: 10362 - DNA, 522 bp, Zea Mays
agctaacctgtagaaggcttgccacgacgcggtggttcacggtgtgcggaaaaccgatttggggagagaaagaaattggagctctctggtagctaattggaggcaggagcgggtgctttggcttcgtgatgacccaacggagctgatggcacgcttaatttatagggcccgagggtggtggctcttgaatttggaatggcgcgctaggggccggagagagaggagagcactggtgcaagagatgcgtggctttcactgtggccagaccaccaacgatgaccggatatgctaaggcaagtcactgtgatgtggtattgcgcttaggcacgtggcacccgatcagcaggcggccaactccggtgaggttatctggaccggccgtaaggcaagggggtacgacggctagggcgaaacagtgtcccgagcacatccgcaacacgatatttcttaccctgagcagttatctgcacttcaccgagcacgaatcgcaacggcggcgacaatcacggcttgggatcaccg

SEQ ID NO: 10363 - DNA, 872 bp, Zea Mays
gccaatgacgtggggacctggttgtcatcactcacctcccgtgttcttcacgaatcttaacaaacctaagccaaccttgcgatttcgccggcagtgtgggggcaagctgtttgagatacttgtgggcacactgcatcagctggtcttatctaccccctggtcctataaagtgctgggtccgtgaccccctccttggatccccgcaagactgggaagtcatcgcttgagagagggagagcagtgcatgaggaggagggtcgccgcaccactacgcctccgttgctgctctgtggctgccgtgtggttgggtagactcgccttgacacaagaacgtgcccgtgcaggattgaggccgtgggtgcaaccggctgccggtaaatttctcaccggaattgcatgacaccaccataccaccacccgtcgcggtcagctcggttgctttcatcattttggggaaagcaacatgacacaacattctccatcattgctggtatgtatagcactatttgaagcgaagctataggcacgtgggcgggggtctggtgaactcctgcaatggcgcgccgtcgtgggccacggaggcggagagctacaccgccgtggccagctacggggtagaagatgaacacgaaccgtctgtttgttgatgagcgccttagattagatgaggggagagcgggttcggccgtcgatcgacgaatgcacggtctggattagatctgcaccgtactggttcaatggttgatcccagctcttggatcgagatcgtgcacaccagaacagatcacgacgttctaaaatcgggggccatcggatcatgatccagcggcccataatgcaacgtaccccttcggccagcgctaatgcaaaag

SEQ ID NO: 10364 - DNA, 726 bp, Zea Mays
gagagattgccgtcgtttgtgcctcctaactgacagaccaagcggtagtcggtgagccatagctccggctttgattctcccgagtacttggtgattgtagtcggtgcctagaaccgagccaggaacggtgccctgcatctagcttggatgaagacttggggtcctggaggttcgggtgaagggcttcaatcttccccactatcgtagcgaccaccccgctgagagtgatagccaggcatggcgtggcattggtcgtcgtggtgcggccgctcaccaaagcgatcttggacatcacggttctgacagttgtctaggaggcagtctcagaccacaggggctttgtctcttatgagctcaggatggaccaaggcttctctctcctagcgggagggccccgatatatgttttaaggcgagctctcaaagtcgagaggcagaactctcggcctattggactgtagcgcattctaggacacttctaatcttgccgtggattcaatgccctcggtggttgattgctctggcatcgtttggagcaagattgcttccgcaacgagattctgattagctctattaaaggccgggggctcggctcccgcatcctcaacgatgcggcggtagacgtcgcacgatttggcacatgcccctggtcgggggctcggcctgtcgccttctgctcgaggatgtgctgaagctatcgtagttgttcctgctcttctccaagctt

SEQ ID NO: 10365 - DNA, 479 bp, Zea Mays
aaataccctttcatcattttaattgggtagttaatctgtgtgttagtcgtgcacatgcaaacagagcagtttgggtggatcaagaagaacaagggccttggttcacaacagtcgatcttggcgatgtaagtgcagcgaagaatgtttgttttatgagaaaaacaagaacgcaacaaaacccaaatcctaacgaaagcagcggcagtggctatttatagagacttgagcatcatcccctctgaacgtgcccctatagtctctaaggtgatacacgacacaacggagcaaaagacgataccgtagcaccttgctagattctggaccctgacttagttttggctatttgtgttgacttgggacgaattttgacatcaaactaaagacattgcttatcttatcgaattgtctttccatgaatatgtggattgtcgaaaacggagtctatatgcgtcctatgcgtagctttgtgtgtgctgcta

SEQ ID NO: 10366 - DNA, 676 bp, Zea Mays
cggccggtgacttatccctaatagcctcagtgtgctgtgttcgaaggtgctcaatcctaccctcgagtcgtttcctctcggaaacaaactacgaggtcagcgcccctgaagcaaccttgtcagcgaaggccgtcacctgacatcaaatatccaaactaagtacaacagaacaaaactatcatatatatgaataaataaatacacaaactcacaaatcgcagctgttgtatggcagacgcagctacgccagcggtggcggcggcggtcgaggcaagttcgcctccgcctccagcgagggcgtaaaatttcgaccatgggtcctgcgaggtacccatgtcgcccttcgttgtacccaccaggctggcatgcatagtcgacagaacaaccgccagctgcccagcctccacccctacatcacaactaagttagaaaagtggaatcacctagctaagaagaatcaagtaatccaactcaccagcaggcggcagcctagcctaggcgtcaaacatggtaacacctcccaccaggtagtcatctactaacaactcctggcctgccccaccggtcctcgacaccattgtttccgtcacgagtggtggcgagggcaatcttgcagcgacagcgggcgctgcgggaggaggcatcgctgcatacggtgtggcacccttcacgccgg

SEQ ID NO: 10367 - DNA, 300 bp, Zea Mays
gccggcacgagatgacccaacgacgctagtgttgacgttctggatgtgcagttgggtatgatgtagctagtagttggtgtagccttctgtacttgataatactttatggtacactaacatgtgtttgtatgactacttggttgatgcatggacctaatagtggccttgagtaccttgctcccaaagacatggtgacaatgtgcttgtcaatctacaaaaacgcacatcacatatttaatgtgttgtatgagagacttatccaatatgtcggggctatgtacctcctagtaggcactagac

SEQ ID NO: 10368 - DNA, 1165 bp, Zea Mays
tagagttcggtccacgatggcgaacagcggggaaacgagctccgatgagcttgtaccagccggattacttgatgacgggtgctctactacagctaaaaccaaattcaagccctaacaactgcttccccccaactaatttcactattggacctctaactcactctgtccatggtgatcgtatgatcaacagacattctaatgcattcccggcgatctaaggcagcttaactcaatcgagttggtcgaggagtatcaggggcaggtatgggtgctgaaacaagagggcagggagcacgaacagacctggagtatgctgaccacggtgagccaacacacggcagcgcggagaaccaaattgggggaagagagaaattgggaggctctggtggataatccggggcaaggactggtgcaatggatgcgtaattacctaacggagccgcgggtgcactcaatttatagcatgcttgagcagtggctagtgaatttgggttgggcacggtggcggtcgaagaagaaatgagtcactagcgcggtgattcgtggccttcaccgtggcagacccaccggcgacgagccaggaccatggggcggtttatggtgactcaccgcgatgtagtaaagcgttgaggcacgtagcctggccggataacagcgaacaccggtgatgccagcgcgattgaccacggcgggacacgacggccggtgagaactgtggccggagtttatctctagcgatgatatttcttaccgaggagcgctatcagtgcttggtcgggcatgaatcgtgacgccagtgcggatctgggcgcaagatcaccggcggtgaggggggtgaatctggtgatcttgttcagtcactgtaccatggtggttaccatcagagtgtatgacagaccattttgtagggcttggatctcaaattttcatgtgatgacttgctaatctatctttaagaaagttgttgttctactatccagcttcaatcttgctatagaaatcactcccaaattcttactagatcatgctcgaatcccagctcaaagattgctcaatcacactgtcagtctgaactcagacttaaggcagtctgacagcccttctttgggccaaattatctcaaaacatttcatggcaccaaggcataatccctatagcaaagttg

SEQ ID NO: 10369 - DNA, 539 bp, Zea Mays
ctcaattgccttgatcttctctgggtttgcttcgatgccccggtgtgaaaccaggaatcccagcaatttccctgcggagacaccaaagacgcacttgtccgtgttcagctttgtgcgggttgcgcgcagtttgtcaaagaccagggttaagtcttccactagggtcaaccctctcttagtcttgaccacgatgtcatcgacgtatacctctaccctgtccctaatcaggtcaccaaaagtcttactcatcgcccgtacaaatgttggtaaggcgtttttcagaccgtatggcattacaacataacagtatagcccatccatggttacaaaaagcggtatgcttcctatcttgtctagacatctgaatctgatgaaaaccagagtaagcatctaggaaggataaaaggtcgcacccgaagatagaatccacgatttgatctattcgtggaagtggatatgagtccttgggacagaccttattgaggttggtgtagtcgatgcacatccgaagcttcccgtttgccttgggaacgatgact

SEQ ID NO: 10370 - DNA, 463 bp, Zea Mays
gcaagaacaaggtttaggaagattaggagtttttttcaatagaactacttgttttgtggtgctttgaggtgaggtgtttgatcttcttatacattcatctggtgtggatgtttcaccattgaattaaaatgaattgttgaagttggtaagggttgtgcttagtgcatattaccccttcataaaagagtgttgttttaagacattgatgttgatgtatagctgcatccaaattcgatggtgtgaaatcgtagtgttgattgcatctatgacttgctttgagcttcattgcatgttgtttcatgcttgatatcaggtcgtgtagtttccttagacaattagtccgaggtagaagttcttgtgttaactaagaccaataatgaacccatgttttgaatggtggtgctatatggggtaccttggatgctttgcttggagtggtcgaattcgaggacgaattcttttt

SEQ ID NO: 10371 - DNA, 310 bp, Zea Mays
gttgaagcgagggctttgctagctgaagttggtctgctgaaagaaaggggtctgactgctgaagctgtggttgctgattttgttttcaagaatgttcagccgttgaaggacagagcatatccggcttatctgtatagaggcctagctgacctgactcaggttaccaacaggagaattccctctgtagacttggtgaaccgacttgagatgatccttagaggcaaggtatcaaatattggcgccccaatggcatattcagcatggaacctgccttctcccaagaccttcactctttttgtgtcgaatccac

SEQ ID NO: 10372 - DNA, 346 bp, Zea Mays
gcatacaactgcacagatatcccagactccatcgaggacagctatgggaacattatcagcagccagggagttgctgcgtcaccctccaagctccatggcctcaccgggggccatgaagcagtggcgggacgacgtcgaccggctgctcggtatggcacattctacctcgaccaggtcgaggtcacggtcatcccggcgccaacatgaggcgtcggcgtctgtgcgctcaccctcagtgaggggcgcacagaccaacgacctccgggcagagctcaatcgcaggcatgcgagagaggatgtccgaatctctttagagagggcgcacgagtgcaggcaaaacatcgag

SEQ ID NO: 10373 - DNA, 557 bp, Zea Mays
ggcgagggtccaccgagaagttagccatgagcaagaaaggcgaagacaacaagtagaaactgcaacattgttggtggcgagaggtgagaaacgagagggttttcccactacaaagagagtggagcaaccagtgtccgaatctaaaaggcgtttggaatcgggtataacaggcagaccagtaactatagccagtgaaaaggttcgacagagagggcgaggagatggcaatacacttagggaggaactaaatagttgcctcgtcagaatgcagaaagtcgcctttactagaagaatgtgtgggcccagtaaccgaaggcaaaggagccttaacaaagttaccgggagcaacttccgacgcaacttgagtaccttcgttgcttgccaccgatccattaatgcaatgtgccttagacctccagaggagttgtcataggttgagcacgcagcgcttattgttacaatatttttcaaagtgtccaagcaagaggcagcggtgacacatgaccgggctagtacaggtcctgatgaggtgggagcctgaaaagcaccggaagtag

SEQ ID NO: 10374 - DNA, 491 bp, Zea Mays
aagtcctagtttgctagttttggattaatatttgaaaagttatgattaaaacaagtaacggctgtattgctgtccaaaaattctgctagtgcgctttggaatgtttagttcacccttctcgctaaaaatgtttggtttgctcttaagtaatgtaggcttgccatggttaggctagagatgacatgtgtgccttgttttatatgtttccttctctagttggttgtgatataggggtttccatagcccctgatgcataggtcctatgttaaatcggtgtttgggatgcttttgtgtgataaatagaagaactaatgaaaagtcgtattcaaataaataaagtgcgcgtacttgtgatgtcatagttgtgtcgcgtaaataaatgaaatgttgttgtgttttcaatggtgttaatgttgaaagcctgatgaagtatagatagctaatactagcatgtggttgattacggtgtcgtataatttagtgcttagttc

SEQ ID NO: 10375 - DNA, 386 bp, Zea Mays
gtcaatctaccatgcatgctccatccagagaaaataccatacgccataaaatcatgaaccgagaacagatatgcaacacgaagattgaatttctgcttcttgaagcagtcataggcttccacaccttgccatagcttcagtggttgaagcatcacattgaggcgtacgccaggatgctcaggcccaggtataacaagacataggaacataaactcatatttcatgcaaagagcaggtggaaggttgtatgatatggcaatgataggccaacatgaatacgacacagcggtcatattgaacggcgtgaaaccatcagttgtcaagccgatacaaacgtttcttgcatcgctggcaacatctggatcaaagttgtcaagagccttcca

SEQ ID NO: 10376 - DNA, 612 bp, Zea Mays
cgtgccatggatcacccgagcaccacccttgactcccgacaaacaccatagaccaaatgtttggcgtagatcgatggtttggccgagatacgtcgatggcggcatctcctgcttctctctacgctccctcatctccctctcggttcggcgatggtacacacggtcaatcggttctatgcgatgcaagagagctgagagggggcaagttttatagggtcagaggcgagcccgaggtagccccactgcatgcgccagctctgatggaatggggatcttccgccgtctgcgcgccgttcggccgagtccgcgcggattccgcgccgttggcgaccgcgaggatgaaggcacggttgaacggtctccgcccgcgcgttctgttgacatccggtcaaaggtgggagaggaaaaaggaggagggcgcggatagagctgacagccctggcccacatgtccgagaaaggggatatccgctgagtcgatggcctggcgcgcgcgtggaaaggagtcgtgggctgcgcggaggggggggggttcctggtgggctgaaatgtggtaagccggtccaggtaagcttcctttactttttcttttatgttttattttctgttttct

SEQ ID NO: 10377 - DNA, 500 bp, Zea Mays
cgacgcatgcatggtgttggacgacgacgattcgatccatggccaccatccgtatccagtgttatgttatgtgtggtcttttggcttactggcacttgccctgaacttttgcctttaacctcacatgcatatgcatggtttgttggcatgaagcttccgtcaggactcaggagtcaggaccatggctgctgtagtggtggtgtgtgtgttttactggggcagagatggatggcccaggcccagcggataggccacacatcagccatgcaggtacgtagtagctaggtgaaaacaggacgacgtgtgtcggtgtgtacgtacgcggtacgccatgcatggcctccacgtacgtataccaggggcagacggtgccgcgtgcacggaaggaccggcacgtacgtacgccatggccgcctccgtacgtgtcgtcacgtactgaaggtagcgagcgattcatggctagggtttaatgtttttggaagggtggttggttgcctgcc

SEQ ID NO: 10378 - DNA, 353 bp, Zea Mays
cgactttccgccccgccccactctctctgcacacgcgtggtggttggccggagctccaatgactcgatatggggaagggggagcgcttgggaggtcgccagatagactcggtataagtaggcgggggagattggagtagttccgaaggatgcgcgcggtctgttgagctcgacgcgaatttgggggagcagatgaacagagaccgagtccgcgcttctgttgcggtcagacgcggaacggccgcatcgcgaggggaagggagcgcaatccacggaatcccatagttccgagtccgtcactgcacagggaggaggaagctccagctgagccacggcgggcatatacgcgccagg

SEQ ID NO: 10379 - DNA, 769 bp, Zea Mays
cttggagtgggggaaagcttcatttggtggcgctgctcgggtttgctcgcctggggccccgacaattcctcgccgcgcacctccttccgccgcggactgcctggttccgtggcccgggagttcttctgcgccgctgcgtgtaggtaatctcccatcatcttcgtctaccgattctcgtcatgtagagcttcgcaggggaggtatttacccatccggggaccatgaatttgtcactggcgcctcatcggcgccgcgacaccgcgccatgccgtgggtagggcattccgccgcacgttttccagagaacacaggttcagtaggttcgccgttctttgaatttcgattagcaccagttgatttggggatttggggccctgtctccgtcgagcgaggtgcgccggcgtgttgctccgccgcggggtgctgttcgccccgtttagccgcgttgggttagagaagacgactccggggcgctggattcgcatctgacggcttagattagattggagataacgcttgggcacatgcgatctcggccgcccatctagatcgaacgactgacattagatcgtggtgtggtgagctccctgccctggattttagatccaacggccgaaatctagagttaaccccttcagccgaacagttttgcaaaagagtcctcggggttctgtgaaatagaacccgcagtcctggcggcagagatctgagtcttagagacttttacacaagaccccctgtgttcctgtttaaatgaggcccagtccag

SEQ ID NO: 10380 - DNA, 485 bp, Zea Mays
gcagaagctgaaggatatgctagtcaccagctttcagggcttttagacgaagtcaatgactgctcaagcccttttccagtgcacgcaggaccacgaggagtacttgcaaacgtatgtccgaatgtttctacttcttagagcttaggcgccaatggtgccaaatgagattgttttgaaaccatgatcaagggactttgtctaggaccaacaacgtaatattttgccaggaagcccccacaaaccctggagaagcttctacagaagataaacaagtacatgagggccaacaatgattttcggcaaagaagggaagaagcctacaaatattctaagatgaccaggggcttcagaggaaggcttcacccaaggcatgttagaatgatacacaatcctagctcaagtaaagacagaggcaatcacacccaagggcatcagcacagctcacaatcatctaggacgcacaaaggtccttcaaaccaccagcc

SEQ ID NO: 10381 - DNA, 1675 bp, Zea Mays
ctaaaggcattgggaacctattcttgattgtcatttcattgagctttctgtaatcaatacagaacctccaggttccatccttcttctgtaccagcaacacaagtgatgcaaaaggactcacacttggcactatacgtccatctttcaatagttctaccacctgcctttctatctctgttttatgcaagggtgagtacctatagggtcgagcattcactggcactgatcctggcataagaggaatatgatggtcatatggcctgacaggtggcaaagccttaggtgactcaaagatgtccttgaactcatctaacaattcacccaatgggcctgtctctggaaacccctccttccctgccaccggttccaacaagacaaacacccacacctcattgcccttcaaccatttttgaaccttcagggcggaaacctggggcacttctgtcaccgcaactgaatctcccttcaaccaaatcctttccccttgatgatggaatgacaacactttctaatcccagtcacattccattggactatgagctcttaaccaatcaaacccaagtatagcatcatacaccccaatctccaacaccctcatggtagatacaaaagtgtgtccccctatccaccatctaatatccttcacccttctgtcacttctcaacacctctccattggccaccttgacagagacaggagaacagggttcagtggctagtttcaacttgtccaccatagcttggctgatgaaactggtagaactaccagaatctaccagcatcaacatcaactgattctgaatcaaggctctaaacctgatacactgtgaactatcagctccactgagggcatgaatagacaatctgtgattctcctcttcttgtacctcctccttttctatctgccccagctgctcctcagacaataccatctccaaatcttcagtagtcaatacattgagttgagggattgctcttcttggacatttagcctggtgccctagctcaaacttctcaccacaggtatagcagagtccatttatcctcctgtattctttcacttgtctctccttactccatactccttgatcccctaccttcccttcagtcctaactcctgtcactcccctacctccttggcctatcttactattccgaccactattcttgaccaaaatctcctactgcaccagcgccaacctaatagccctatcaacagtggaaggaatctgagactttacaggaccttgtatctcattctttaagccttccataaactgagcaacaaagaacacctcccccagttctggattatgtactgctgttgcatatctggtctcctcaaattcttctacatactcttcgacaccccctttctgttgcaggtgcaacattctttccatggcctttggatattcatccacaccgaatttctgcaacactattctagagaaatttggccaatctctcaagtctcccctcaacttcagaatctgcagccatctagctgcatttccctccatgttcatcgacgccgcaggtaccttcattgcacctgggacctgatacatgttgaagtagtcctcacatcgattcaaccaaatcgtcggttcattgcctccaaacttggggaaaagcatcttaggtacatgttgttgcaactcccttcctccctg

SEQ ID NO: 10382 - DNA, 377 bp, Zea Mays
gatctgtcctttgtcctttcatccatctatcagtccagaaattgatattcctcccattaccaatctctgatttcaaagcaatagagaaagggaattaactactttatgtgcttgggtggggatgaaaggctaaggtttatttggtactgttttctgtaaccataatcagcacattctcaaggcccaccccattttttgcaaatgagatgaaccaagtcctcccaattgtagtggccgagtcacattgggctaagctatcatgcaatgtcctcctttgacatcattcctgctcttccagagaaaccctcttctatagtcagcgcaatctcagttggtagtaactggtaaacctctggtgctcacagtcacagttctgg

SEQ ID NO: 10383 - DNA, 425 bp, Zea Mays
ggtagtgcctccatatatttagggcatgcactatggctgccaattccaaatcatgggtgggataattctgctcatgtggcttgagtaggcgcgatgcataagcaatgactttctcgttttgcatcagaacacaccctaagccttgccttgaggcatcacagaagacgacgaattcctggtgtatatccggtagtgttaaaacgggtgcggtcgtgagcttcttctttatgatctggaaactttcttcacacttcggggtccacacaaacttattgtctttcttgaggagctcggtcataggtcttgctatgctggaggatcccttgataaagcgacgataatatcctgccattcccagaaagcttcgaacttcactgacgttggatggctgcttccattttgatactgcttctaccttggacggg

SEQ ID NO: 10384 - DNA, 293 bp, Zea Mays
ctcacctgcctgcatgcggatggcgctcaaaagtgggaaagcaccgtctatgctccacatgcttgcatgcacttaccaaaactccactacctccttaaaaatcgttggccccaccttgcatgcaggattcgcttgctgtgcacgacgtccccttgcatgcattatcctaggatcctctatgaccatgatctctttgccccatgtagccagccctatgtgtggtccatcgtattgttagcttcgaccaatagaatcgtgccacgtaatttaaatccgagaaacgctaattattc

SEQ ID NO: 10385 - DNA, 897 bp, Zea Mays
gcgtgcatgccattgggcacgactcgggagggagcgactggtgagggcttgcttcaactgcgcaacatccgaaggagtgaggtgatagagaccccctttacatcggccgcccaacagtgttttccttgtgagaagatccttaacaagaaaatgctacgggtgaaattcaaagtaaactttgttatcaagggtaaacttatggacaaagagtaaatgtttggtaatctcaggaacatgcagaatgttacgcaatgcaagaggccgatcacaagtattaattaaggaatgactagtatggagaattttcaaacctgtgccgttcccaatttggacttgatcatcaccatgatagcgttcccaaatggccaggcgatctaaatcactggtgatgtgatcagtggcgcctgtatccggaaaccaatctgtatccaccttgtacgaggatttggcggcaacattagcggatggttcttcgtcatcaagggaggcatccattcggtaccagcatcgacgagcagtgtggccggcaacttcacaaatttgacagatcggaggtccagagccacgaccccgtccacgaaaaggcgagccacggctccggcccctagactaaggagtaccacgaccacggtcagatcgaccgcgaccacggaacgagccacgacgcccaacaaaatttgccgaggcaccaagattcagctgctgttcagtgtgatgacgaagttgacgtgcttcaaacgccagtagatgagcaaaaacatcatccaaggttggagtagacggtagggtggtcatggtagtaacaaatggatcatattcgactggaagacctgcaaacagataggcaagaaactcctcgtcacgaagaggagagtcagcagccgcgagttcatgggc

SEQ ID NO: 10386 - DNA, 720 bp, Zea Mays
ttgcctcagaaattattatcaattaaaatcacttgatcaactcatgagagtaatacaataaattgcctcagttttgtatgaataaacacctcatttgaccatatatgggagaacataggacaagtggagaaatctgattaaaggatagagtatgtttggttgcctgacccaaattaaaacacagacaggaagaaaaccaagagcaaggaaaacaaagcagtaagtcaacctcccatgaatggtcatcagtcaaatatatttcatcacaagcaaaattcacaaaatgagcaaggaaaacaaagcaacaagtcatactcccttgtttgatcatcattataaaacatatcatcataggcaagtaaaagcaacagttcaatataaaatcatcacagaccggtagaaaagtctcagaattattaattatcatccacaattccagattcagtgtcataggcatagagcaaagtattaggcgtatatcaaagtactacgcatcgagcaaggtattaggcatcatagacataggactggtctgctcaaatctttgcaaggtgctgccttagccaaagcacacggtgtttaggctccatcttcacaaagccatcatcttgccttttgttgtccaataggtaggtaaggcaagtcatcaactcctcatcagtgaaacctagaatactcatgcaaatttgatatagatcagggtggacatctgtggtctag

SEQ ID NO: 10387 - DNA, 937 bp, Zea Mays
aagagtttcttgataaatacgcaacattcctcaagttgatttcgaaaatatatcctgacgagaaggtgatatctgtgaacgaaatgagagatactctagcttcactgtagctatttcgttagaaggtaactttctgctctctgatttgtactgctttgccctgctacttgttttaatgcattgttcgttgcttgtgccaggttcgcatgtccgttggtttgcttgcgcatataagttgacctgattcagcatcatcttaggttcttgatcctcactgaaccaactatctgatatgtgatcccttaccaattatctgattcatggtctgttgtggaacctttaagggcttgttcaatccatgtggattgggtgggattgagtgacaatctcacccaatccacgtgggataggaataaccaaacaatgcctaaataaattctggatgacatggatgttaaacaatttgtttatttctgtttttactagcaataatgtgcattagtcaagcttaaatatggtccattaccttcatggattggtggtgatggcacgagagggccttaattccattaccttcctcggtgtctggactatgtggaaacgtaggaattgttgtgtttttgataggatgtggctggacatgaactagagctttggaggttggctggtgcttggagtctctctctcctcatcggttctataccgggttgcggaatctttagttggtagttgccctgttgttttagttatgaatccttttgttattgtgtatgcttgcttcttgtaacggtcataatagaccgaaacttccttctacttaatttaatgatacatagtttttctacacgtccgagagaaaaaatataaaacatggtgacataggcaaagacgacacatactgttcctcatgccactcctctctaagttgacatgtgcg

SEQ ID NO: 10388 - DNA, 1227 bp, Zea Mays
ctagattagagacacaatatccaccacaccacgtcttattttgttgttatagtagaagatatgagagttattaaaagtaaggtatggctgatgccacactaagccataatggctcctccgccgctgctgttcggcaaaccatcacattctgtgacgcaggacgtcgagcaactcctgacttggggcactccggtcccatgtgacaaaatcccccattcccattcctatcgtgcaagccatcacacactccggacgttgggcctacattgcagactacgggcgcccacgtgacagccacccttagttttgcacacaccggacccatgtctgctcgcgcaaaaagttgcctcaatttgacactggcaggagcatttgaccacgattgctttctctgaagaaggaaggcttataagccggtaaaagctatgttggctggccggtatggtcataaaaatgtgtaagccgtgacgacgacataggtcgcttggctttagggtcagtctcccttgctttctctgcccagcgagccctcgccctctagctcttcctgctagcgtcgtctccgtctcgtgctctcctgatcatcgtcgatctcagccatctcaggagcacccgctcactcccagacgcccgcgcaaaggaatccccacgatctccatccaaactgcccactccctccacgatctccccctctagctcatgatccctccgcccgcccccaccccccgcctgccacgcccacgggcgcaacaagccaacaacccacactcggccccgctacctcgatgcgtcgccataaatccgctacctcctcctcgagtcctgcttgatcgccccatgctcgaccgatcgaccggacggaagggcagccctgaccgtgaccacagcgcgatgtgcgacgagtgagggcggtggcgggggttgcgaccaacgacggagagccacacaaagaagcccatcgacgatgttttcctcaaggttcgctcgctcattccttccttccttgtgctattggcgtgtgatcctagctagcgctctcttgatttcatccttatccacgtgaatcctggatcacattgcatgcagatcggattactggaaggccagaccagctgctcgcattcactggtgcacggtgtgggagctgagagcttcgttcctatggccgggccccacctctcttgggcccttgtgcagatacgcagaggtagtgtcccctaatttgtt

SEQ ID NO: 10389 - DNA, 946 bp, Zea Mays
atctcgtattctttattgcgggcgatgcgagcagcgtagggactgatctccatcatttgggctatgccaacccctggccttcatagccttcgacatggcgtggttcatcgtgttgcgccctaccctctgcctacacactcaggcctagtcccgataggtcatgagtgtgccactggccagaagatgcatgggccataaatgcaccatggttcgaggggctcattggtcatgagtgctctatggcccgaggggttcgtaggtcatgagtgggaggcataccggtgccttcactatggctcggtgccaagcgcagttaatgcggtcagtcatttatgacgggttggtcttgggctagatgcaggatccacacgagtagtttccctctggcatgtctggccctcctatcaggttctaccaagcctgacccttggcttggtgttgcggggttcgtccggggcgggttctttcagggtagacgttatctatctcctccagccgaccaatgggccccgggtgccagggccctttccccagtgtgctcactgaccgatgggccctagggactaaggatagtatccctaacagtagcccctcgagctcctgggggagagtatttcccctcgggggctgttcttgggttgagcgatgtttgtccttccacctttcaagcccctgtgatggttgtctcttcatgaggcgtgccatctttaggcatggtctattcctccgtaaggtggggatgggtgcttttccttcctttcaaaagcttaagcgagcgttcgttgtcatcacctccaaaccctccatcctcaggctctcgcttcgaatggggtccaccgaggggttgtctgtcgtctcgtcgtggctggagccactgtcccctcttcgtctccattgggattcccaagagagttatggagtttttcgtatggcacaggaggctgcc

SEQ ID NO: 10390 - DNA, 345 bp, Zea Mays
agtgagtcatgctccatctccgtgctctgcctttctcatcctctctctctatttgtgttgccaagcagacctagcaactatcgcaatcccttacacaccttcattctccatcccctccttaaagtcaacgatgtccctggtagtgattagtgaaggccataagagcgaagctggtgttccacgaagtgtagtgctagaggttgaaatgcgggccccaccatcacgtggcactcactgatcaagaattgagccaagggtatatactgtgggttgtggcatgcaacgtcaaggcatggagcaggtcaggtcctgtttggaccaggacctatatgacactgaggatgg

SEQ ID NO: 10391 - DNA, 881 bp, Zea Mays
ccacccgcagccatccaatcaggctcttaagtactgcatctatgttgatggacgtgctgaactgaattggtagttgatggatgtgctgaactgtatgtgcttcatctatgtgctgaactgaattggtatttccgtatttgatggatgtgctgcatctatgtgctgatttgctgaattccagcagccagttcctatgtactgatcattttgctgatctatgtgctcaaactgaatctgcacagccccagtaaatcagtatttctgttgtctcttcacatatggatctgcacagccccaatgtgttcaaactgaatctgcacaaactgaaactgaatctgcacagcaccagtaatctcttgtctcttcaaagttcaaactgaatctgcacagccccagcaacaagttccatatggttcctccacattcggccagaatgtgcacagctccagtaatgaaactgctagaaatctatctgaacctgcacacatatcggcacgtctagaaacataatatggatatcaccaagtaaactgaatatggttcatgcatcataataggggtttcacacacccagtaagctaccaacacacatagctagaaatataacatggttcatacatggcatcaaccacagtatcataataggggtttcatacatagtactccgtcctaaaccccatacatcgcctcaaacagcaattacatggttccacccaatatgtcatcattaggaggttgagctctcttcttggatgtaatctttttaacccccaccctttgtggtgcttgtgaggaccgaggaggatgcttcaacatcgccaagtggtgtgcttggtccttcttcagacgggaaccatctttgaatgttctttcactgcttt

SEQ ID NO: 10392 - DNA, 525 bp, Zea Mays
ccgctacatggtgccagccaatactctagggcgggtcgtcgtgtcgcagtgaatggagggcgccaccgcggttatcagccggtggggtagatggatgccgtgaccgagtttgacacgaggaagaagaacatccctggccattgatgcgaagattgagggtcgagattagaacccgcgtaccgtttcgctagagtgtgatcggagccgttggatctccttttgatggcctagatgtggtgactgcgtagcgtttcggataggggtaacgggaaccgtccgattaggatcggatgatggtcatcactctggggttcattaaactggggtcgtgagatctagatccgagggaccacgctgagtaccgattcgcccgtgtctagatctaatcagatccgttgatagttgatccatcggcccagacttcaggataccctttcgcattggctattttgttaaagagccctcctggaatttgggaactaactcgcaatctagttaacagtgcgctgagtcttagagactttt

SEQ ID NO: 10393 - DNA, 669 bp, Zea Mays
ctacgtctgggacggccgacgcggctgtccgaggcgacccatgctttatttcttgcggggtcatggcctccgacccgtataataggcgaaagggggtaaacccagtcgccctgcactcggttgtattcagtgcccagaccacttcaggtaacaggtcgggccacttgccttttttgtcgtcaaggagcattttcttgacggctgtgaaaatttttccgttggcgcgctccacgactccgttggactgggggtggtacacggaggcgaaggcaagcttggtgccgatggagaaacagaagtctttgaaatcttgattgtcgaactgcttgtcgttgtcgaccgtgagttcggatggtactccgaagcggcaaacaatattttgccagaagaatttctgggccgtcttcgatgtgatggtggatactgccctcgcttcaatccatttagtgaagtattcaacagctacgaaggtgaacttaaggttcccctgagccgtgggcaggggcccgacgatgtctaggccccagcgctgaaggggccacgtgtgggcgatcagcttcgtgaactgcgaggggcgccccgagagtggggaaaatttctgataggcttcaaaggatctgacaacccgattcgcggcgcagataatggagggccagtagaagccttgtc

SEQ ID NO: 10394 - DNA, 960 bp, Zea Mays
tggccgaaaaagacctcatcagcaagaatgaaggaacacccctgacaaactgaacagctactaatgggccattagcagaactaaccaaaattgggtgacccaacctctatactgaaagaccagcccgtgacacaaaattctccaaaacaaacgaatagctagcgccagagtcaaaaagagcatgggccacaaacgaatcaactgaaactgtacctgtcaccacgtctccttgctctctgccatccgcagcgggtagcacataagctccagaaatacccgcagaagaggaagctctcggagtgaaactaacagaagaaccccactgagtcgccgggtgaggcagacgcggagctccaaactgagacggcataggagtagacggtgcaggagtaggcgcggccagatactgagaaaaaccctgcatcggcacgaactgagaagtcccaggcacatagagctgctgcggaggaagaggaactgaaaattgctgctcagcacttgacatcatgttgatagtgccctgagaagaggaggaagtcaccgggtcccatctaagcttcccattaggattcctcctacacaccacatccttgtggtcctgactacagatagatcacctgccactccactggcactctgcacggcgatgcgcatctccacaacggaaacacaccagccccagcccgggcttaggaacagcccaaaacctctgagtacttcctcccgaagtacccgagtcagaagatttgccacggtaaggatggtggcgctgatgctgagacttgcccctcttgtgggctggacctccagtgttccccctcctcgcgtcctggccacgaggcagatcaacccccgaagacttctacgactccatggtatactggtgctgcatctccacacccagtgcctgctccactgtagtatggaagtccaccaacggaaaggctcccaaggcatgcc

SEQ ID NO: 10395 - DNA, 590 bp, Zea Mays
gttaatgtcaaatatctgttaagtattgttcagtacttctagtttttagtggatattattcttcaggatcagatcagccggggagtcgcaacaagtgttttggtgctattattcttcaggatcagatcagccggggttgggaggatgcaataaatctgcttggtaagctggttgaggaactgctgctgttcaggtgacagggcaattcctgcatactgcggagctggccttccaacatcaacgcagtttgccagtttaaccaggatttgtcctgcactcattacagtcctctccactgcatcccctacctcttctactaatgtctcaataacctgatgggtcgattcctactctctttccttgtcttccaccaaccttgccttctgtaattgtcttcttgagtaaaccatcagctgcagggtagcctgggatgaactaaaatgaggcggctttagtgaatcaaggtctggaaggcctttttcaattaagccatcaggtccacatagaacaactccacagccttggttatgttactgttgtggagaaactaagaatccacaacaaaggaagaccactgtgtgtggctgatg

SEQ ID NO: 10396 - DNA, 487 bp, Zea Mays
ccagcttggacgacaaataggaaggcgcgctcatctagtttctgcaagataaccaagacgtattcgcatggcagcctgcagatatgccgggagtcccgagagagctggctgagcacaatctgaaggactatccccaggcaaggccgatccgacaaaaaatgcgttgtttcacacctgactagagagaggctatttgcgccgagttagctcgctttgtcacagcagggttcattagagaaatactgcatcttgagtggctagcaaatcctgttcttgtactcaaaaagaataaagtggattagcgcatgtgcatcgactatacagatctcaagaaacattgtccgaaggatcccttcggacttcctagaatagatcgggtggtagattcgaccgtcggatgttctatgttgtccttcctggactgctactctggataccatcagatcagcctggcaaaagaggatgaggaaaaacaacaatcattaac

SEQ ID NO: 10397 - DNA, 1105 bp, Zea Mays
gtgggttcaattctatgaaagcagagggcttttttataaaattgcaggggccgaagaggtaaggaaggctctcggccgttggatcaccgccagatggcacatattagatcactactcgtgctgaagcggtacgaaatcgtggtcaccggatcgcaaatcaacggttcaggctagttcatgacgcgaagtttgtttctacccttggattgacatcgtacgaccaagcgtcgactgcgcgaaagggtacacgcgatcgatcaaggccgaccacaattcatccaatggcccacgacccacacaagctagcaggcactcccgcgtggcggagcagagcccccatggcggcacgctcgtcggagttcgtcaaaccacaaccaggcgccctaattcccagcgaatcccgagattaacagagaggaggaataggtgagcatgatggcagcatccttaccgacgattatagtcccagtagtgcgggccacacgatggagcggcacggcggcgatgaaagagctccggtgagcaattaccgatagcgtagccaattctacgccgagccttgccccaggtaagcttccaccgcgtccacagatgcccctgaacccctacccgaagctcgggcgatgcccacgaaacacggtgccgacggcggaccttttctttcctcccctcgccaaaatctcgctgcttggtgtcggtggggcaaaggaggagagggaggggggttggtcgtgttacataggaagcgggggtgcgaagggttagtgcggagcagacccccgcgagttggttaggctggccgagatttcgagcgcgcggcaatggcggcatggctatggctgaccggtccacaactcgggttcccggagagtacggagaggtagtcgtggtcaaaacggtggggcgtatccgcagacgaagtgggccccccagcaccagctagatttcacgcggtcgctccacggtgcgcgcacgacgaggagcgaaatccacgtagggtcgttgcgatggaggagaaagctctgacaaggccggcccaatgttagtgaaaggcagtcagcgcgcgagaaagaggtttgaggctgaccaacgggcccgggttgac

SEQ ID NO: 10398 - DNA, 432 bp, Zea Mays
gggagaacaaaactataaatccatcgcaggttgcacaattcacacaatatgattggttggtgggcgcaacagctgcttatgtggcacgacatggggcacctgcgtagctatcgccctcgtcagctcgatgcacctcgcacttcaattcacaagaagttatacaggctggaccagtgtctgaaactacacttacaaggctaatgaggatacaacgtcaaaagtaagcacttacaccgaagaagagttcgtgatgggtggaaggcgtagccaaagtgggctgaaccagtgctcctcacgcacagaacctacaacacatgagccaaggcgcatgagtggggccacctacaatgtgctaggaatcacacgtcgctacatcaggggtgagaacaccacaattaattaaacagaaaattaggggaaactcattattca

SEQ ID NO: 10399 - DNA, 768 bp, Zea Mays
attggttcttttactgcgctgtccggtgctgttccaacatttcatgaactacacaaaattgtaagcacaatgcttggacctcttgcttttgtagttttttagatctcagttgtcaaaccaatttggattcctgagtgtggtaatggacctaacatagaccaagcatgatagatgatcagttgtccttgtattgtgttggtggttatctagacgctacctaattctcggcctcagactgaggttgtcatatttcgtttcctgcttgactgtccagtcagcagtcagcagtcacagtgcatgtttgtagcagttttgagagcaagtctgttatgtgatataattaaagatagaagattagttggatttgagtagctgatgtgtgggacagatgcgaatttggaaatttggtttcactgctagcctggtggtctcttggtttatatgttaaactggtactagcaagttaccgtcaatctgtcgatgccttcccatatactggcttgtggcatgattatttccttattcaaactagcatgtaaatcggcatggctagttcctggaggattaggtaggtcgttactggcaatgaagtgaatttgtttttgtatattcagattttacgggacagagatgtcatttaccttgtaatttgaaggactattacatgtgcttatgacataatatgtagccgtttcatttgcatgtgtcaaaatccatccatcatgactggatcgaggtcaaagttgtcatgttttggccccgtttggg

SEQ ID NO: 10400 - DNA, 396 bp, Zea Mays
tgagaggagaccaggaagcacgaaggatctcttcctagatcatgtcaaacacatttatgcgggcaagactattaggagcaaggagaagaaggagaatccgactctccctaaggacattcatctgatttttgccctttgggagaatggtcatcctagataaggagttaaggtacctatagtacctatgcatgttggcagttatccaaaactcccgctccttagaaatatgaataaattatgtttcttcccgcgttggcagcctaatgtcatggactttaaggttgccgccctgaatatcttcatcagagaagcccaagatatgggcaaaacaatggtagctaactttatgccaatcaccttggataaagaagtacataactgggtagtcatacccat

SEQ ID NO: 10401 - DNA, 739 bp, Zea Mays
cattctccagccgccgccgctctctcatttctctctcacaccttcacacttctctccaaactctctcgagagctcactcttttggaagagtggttggagatccgttcttcccggcgtgtttccaccatcttcctccatctcgttgggagttcttgacccaatcttcggatcgaggtattgtcctatgttatttccttgtactcgatcctacgcatttttgattatctattgtatcgttcgttgggtacactttagtttaagtgattgctacacttagactatcttcatttgtcacaaacattgttagagattagcgattcgatattgttcgttgcagttgaaccactcatattaacggttgaagtgcatggtcaatatcttatgcgttccttctcaaacatgtttgatccttgctcataataggttctatttcttatttcttagaatggtgcgtcgaaggaacccgtcggtggtcgaatccgactcatcggatgaccaggaaatccacggagatactccacctcgctctcgatccaagcgagggcgcggaagcggcaatgtcatgccgggtgctgaggcctccgggtctcaaagtgctcgcggtcggacttcccggaatccttccggtcggtctcgacctgcgacaaatccgcaggcgtgggagcctgcaagtgatgatgatggtgggaaggacgatgaagttgatcttcccccggcccacgctcctgtgattcgcggc

SEQ ID NO: 10402 - DNA, 464 bp, Zea Mays
gacaggtgcaggcagaagtgcccacagtgaaagggccccggtgtcaaatgcaggtgggaacccagggtcgagacctagcctcacggcaagtatcataccaagaagggctccgcaactctcccccggctgggaaggacccttcgaggtaacgggaatgcaccgacccaagggcaaccatctagctacgactggaggagtaccttaccccgatgccgaaacatctctgtaagttctatccatagagcaagactaaggggtcaaatctatttccattttttgtaactagataacgcatacgtgtacgacaattcggtggggtctgtccccataaacccggtccattggtctgcacacatgcatgacaagttataaagaaaaactaccccctcagttgtgcccctatgatagttccatcttgctgctccatggtcctaccttgcagtttttcagataataccttttat

SEQ ID NO: 10403 - DNA, 329 bp, Zea Mays
aatcgagctccctgctgattgccgtggagaccagggaggaagaaaaggggtgtcggctgctgctgcgcgagggagaaggagcagtgggcgccgagcagctggaggggagagctcgcggccatgggggagaagagctcgagcgccgttgacggccatggagggatctgcgcgctggggaagaagactccacggaagagacggctgggagaagagagaaagggagtagcggctgaaaaagaataggggtgggagtgaaaaatgaccaagtgcaagggaaggggtccatatttatagacatgtgctagggttagggtttcaaatgggccaaa

SEQ ID NO: 10404 - DNA, 1122 bp, Zea Mays
gccccacagggcggtctctcgttcactcgtcgctcatatcgtgctactgtcacgcgggccctccctggcagccgctgcatcgcgccccactccgtatcctggcacaccgacgcgtgggacccacagcaccagcgacgtttcgcccgcacgtaacaaattagccgcaccggccgccgcgggtgcgcggatggcgtagcagccgccgggatcctcgcaggcgtgggctgcttccggctcctgtggcgactactcaaccaggagccgcctagggataagaagggaggggaacaccgcatcttcatctcccctcgtttccttggttgcctagcgacgagtgcagttgagaagagagagaattagcgcgtgagtttgagcaccgcggctgccttctcgacgttcgtgccttgacatcactggtgtggggctcaaccgaagccgggggtcctgtttgatagtgcatcggtgcggcggtggggtgaatcgaccagcttcacgccggtgtccagctgaggccgtaggttgccgtgcaccgtgacccgtgctccctgtggtgtattgcgaggtgagttaccgaccaccgtgattcccttgtagagagcaccatgtaggatttcgtagatcaaagctccgtgcacgatgtcgggatctggggctctccggacatggcgccaccgcgtctgtactcgcgcgccgccggctgtgcggctgggtgggggagataggcgatggccgttgaatcgtgaatgtgcggcccagattagcctaggcataacccttcgcgtgttttagatcgggccctagatttctgatcgggcggacgcagatcgatctgatcattttaaatccaaaccggccatcagggatccgagggctagggattcttggtggatccatctaatctataccattgattggtcatccaacggctcagatcctagcgtaccccttcgcgggtacctttttctaaagagtccctggggttttgtgttatgaacccgccgtccacagggcatggcgatgagtcttgggaattctttcacgttagtccctgcgctttctgggaattggggcctagtccagacagtgagaaaacttataaaataatttagaaaatagattttt

SEQ ID NO: 10405 - DNA, 581 bp, Zea Mays
gctctctttaacacctgacaacgttcagtccatatgatcatcgctatgtgacaacgttcagtccacgtaacaggaagaagcaacctggattggagttggatgccaattcactggcagcaaaacaaaagcaacgcgagaaatcacgtcaggaaaagggacggtttcttggaggcattgtctcggttgacgcatgagcagctgcgctcgtcacggtggcgagaccgcgaggaggtgatgtgtatgtgcatatcttgcatccattatcttcttcggctattttagtcgttttggttgagtgagcaaacgtacgacggggacgcatccgacatctcctctgatttctcttagtataacactaatataatcccgcaggttgctcggttaaagtcacgaaagcgcagtggagatcgatggcgaatctgacatctaacgtttgtgctcttcttcaaaacacgcatactgcgagtacatttatatatatcacacacggcggcactaaagtgcattctctatattgaatgcacccaggtacaataacacaccgagcacgcccttggccctcctgtacgcgtgcttccgtg

SEQ ID NO: 10406 - DNA, 495 bp, Zea Mays
cgtaactgcctcctccctgacggtgacgaactggagaacggagaatacaaccatccagcgctgaccaagattgtcgcaccctgtccaatgtccatcctgccagatctgacgccgctccacagcagtcaagagggtagtgcgcctccgctccttttactgctttctttcatttcgatttctcacgttttggttcctagctacgcaccatccccatagtcacggtaatgtgatcgatgcgttatgcggaaatcgagcgtcaagtgcttacaaaaaatgtgcgccataatttgatttgttcaatgtttactgagcacccctccttgttttgagctaggtggagttagtttatcctgatcatgtatgtaagccctggccagtggctacataggaatttttcagcaacaaaaaaattgacacagttctgaagtaggcatttcattatggcatttatgccatgttttgtgccccctccctctcctgacaggaaaccgtaaa

SEQ ID NO: 10407 - DNA, 809 bp, Zea Mays
gtgatgcaagatgacatgtcttttatcctggttcgagcaaagagaggccttactttcagcagagggggatgagccttatattactcgcacctaggtgcttgcagtaggggttttcaagcggagcgggagaggaaaggatcccaagtctctgaggatgatttaggcaagtgccaataccgagtggaggagaaaacttatgaagtgttcccctgtcctccagaagtcgtaggctacccttatttataggcccaggggctacctggaagacgggagttggctgtgtactgtgagaagtcttcgtatcatgtacatggtcgtgtacttctgcttggttcctgttgagagccgaggtcgaggccgagaccgagggcttggtcacgtacccaagccccctggcgaggtgttgcccataccatagtggttgacacagtgataagcatgggaaaaagcttcttaaggggtgtgtcagctccactgtatctgatgacgttgggggaatcctctgtcacggatatcgagggcagaaccgggctcggacgaggcgaaagtccgcatgaggtcgtgaccaagccctttctgagtttcagcccttatttctttatctcatccttctccattttgtaggtgttgtgggctactgaactgcccggcctccggtcccagaggacgcagccagccgaacggcatgccggttggccaccgaggagaaagaagaaagacgcggaaaagaagcgagcccacgagaaaagggcggtccacgacgcgttggagaagcgccacagggcgcaggtgagggaggggtgctgttg

SEQ ID NO: 10408 - DNA, 362 bp, Zea Mays
cggccaacaaccttgcaataatctcgtggtcaaatcttgccccactggtgaacgcaaccgccgccgggagcttcggatctctggtgaaatctgcagcctcgccaatctctataaaaccgcccgcaaaccccttcctccatcggaccagagccaccgcaactgtgccctgcgcgcgccgccgttcaaccaatcctggtgggtcgagctgattcaccaaggggtgcggatcgttttcgggatcagcgcgatgaggaatggaggaaagctatgtgagaattgctcaccggagcagcagggactcgtcgccagttaacctcgtcgttgccctcacccacgatcggcatactgttggtaagaatgcc

SEQ ID NO: 10409 - DNA, 648 bp, Zea Mays
aataatcaggaatgtccaatattggaaaattggatagaatattagttcctaaaaagtgggaggatgtcttccaatatgctattgttagaaggcttcctaaagagatatctgaccataaacctctcaaaaattctgctgcacctgttaaatttcactcttcatcattaggaggccactcaggggtgcatactacatatcaaaggctgaagaagctgttttactgaacatgcctcaaaagggatgtgcattcttatatcaggcagtgcaaagtgtgtcagcagtccaaacataagcacttaaataccctagtcttctacaacctctccctatacctgagaacctgtcgcaagacatatctatggatttcatagaaggtcttccaaattcaaatggctatacagtgatcgtggtggtagttgatagacagtccaaatatgcccattttattcctttgaggcatccatattctgcacagcaagtggcccaaattttctttgatcaggtggttaaattgcgtggggttcccaaatcaattgtcttagattgagacagggtgttcaccagtaacttttggcagggactcttcaaaaaaatgggtactacattgaaccttagcttagcataccatccacaatcggacggataaac

SEQ ID NO: 10410 - DNA, 749 bp, Zea Mays
ccctctaaactccccgtcgaccaccggagttactgccacgacgatgaacacgtgttcactgcaccagcgttcttcctcacttccgaccgccgcacatcaacgccaaaattcacggtcaccgccgaagagccctataaattgagcccggactccgctgcttcatcacatcccgcacctcaacaactgagcactcgaatcgattacgccgcagaactaacgcagtccccaaatctccctctcctctgttcttgctccgccgtgaagaactccttcgtggccagcgttcctctggtcagtaattatcaaattactccctgttttagttagtctttgatctcctattgctcctagttgcggcaatttggagtttggccgaagcccaacaccggaacgcacccgtgcgctgtcaaacaccgccgtgacccccctcaccgtcgacccgctcttcgggtcttgttctgcccaaaccaaagtatgtccatggaccctggtgaacccgtgaacctttacccagcctcaatttggccatccccgtcgctgtttgattggaacatattcatcctcctgtccatccgctcagtcaccgtgaactgatagattcagtgtcccctgggtgaaattgatggaggggaaatggtcggggtggatctaattgtgtccctgtcgcttgggagctccagccgtggcgtcatctggccggaataggctcgccggagtgcggcgaggactgttcctcgtcgtggactttg

SEQ ID NO: 10411 - DNA, 366 bp, Zea Mays
cgtcgggtcacacaatacatacacatttcttagttgcgagtataaccatattacggcatatacccgcacacctcaatcaaatatcttacgccaccaccactataatacaccacggcacacccgcacatatgtgtccccatattacgcacaagacatcaaccgcaccagtgactctaacaggattaatcatactcctcattcgcatcgactatcacaatcgccgatcatatgcataaaacaaatacacttttcacgtagacacctatcgatgcactccccaacacataatccgcattttaaaaatttatcctcatagcaaaccacacatcaaacacattattaccgaaacttaaaaacatccaagtt

SEQ ID NO: 10412 - DNA, 632 bp, Zea Mays
agaccacttcaggtagttggtcggcccatttacccttcttgtcgtcgagaagtcttttcttgatggcagtgaaaatcttgccgttggcgcgctcgacgacaccgttggattgcgggtggtataccaaggcgaagacaggcttggtgccgatggagaggcagaaatccctgaagtcctggctgtcaaactgtttgtcgttgtcgactgtgagcttagacgggactccgaatcggcaaacaatgttttgacagaagaacttttgggcggtcttcgacgttattgtggatactgccctggcctcgatccacttggtgaagtactcgacgacgacgaaggtgaatttgaggttcccttgagccgtaggtagtggtctgacaatatccagcccccagcgttgaagtggccatgtgtgggcgatcagcttagtgaactgcgaagggttgctcgagcggggagaaaacttctggcatgctttgcaagacctcgtgactcgattcgcggtacagattatcgtggaccagtaaaatccttaatggattaccttggcagtgagggccctgggccctgagtgggacccacaagttccgctgtggacttcgcgaaggatttggatgccttcggttttggtcacg

SEQ ID NO: 10413 - DNA, 280 bp, Zea Mays
cgcaaaaacacacttcttatgcttcaagaaaaacttatgttctctgagcttggacaataccatcctgagatgtttgtagtgctcctccagactcgagctgtagattaatatatcatccaagaataccataacaaacttccgtagaaatggttctagcactgtgttcatggcacactggaatgtcgctggtgcatttgtcaaaccaaaaggcataactcggaattggtaatggccatgatgagttttgaacgcagttttaccctcatcctcctctgccatc

SEQ ID NO: 10414 - DNA, 329 bp, Zea Mays
ggagcttgcttctgccatggttcaacggtggatttgagcaccatagcttgcgtatcttggcaaaaccactgtgtacggtctcttccctgctccatatcctaccttttttatgtgagttccaagccaagatatggtcggtatagggagatagaggggtgagaagttgcctatgtcatagctgtccaaaccgggataaaagctatgctaagtcatgtcaaacgacatagggtaggggtcaactttctccagggcattttagaggtaatttggcgccactttgtcaattgggttgaattgttttgaagtttgaatgagggtgaacatgtgtg

SEQ ID NO: 10415 - DNA, 666 bp, Zea Mays
ggctgtgtgagcagagcaggatgttggtgtcgcggtggcgaactctagcgaggtcgatgcgcagaacagagaccagcaaggccgcgtgggcgacgagcggcagcggcgcagcaatacactgttgcgaggcgagcaacggcgcggctctgtgtggcgatatggaggacgacggagatggctggcggtttgtctccctgcgagcagcatagggtcgagggaaaggagaggaggcagagaatcgtctcacgggggagcgctggtggattttatagggcagaggatggcgatcaggcgccagaatagcgagtggaaggggtgtcagcctccattgatggtggtcacggacagtggggaggagaactggcgcgcgattggagggagttgaaggcgaggaggctgctgcgtggcggatggtagtggagggctgaggtgaggtggggcgccagagtggggagtagtgacgagaaatttccaccatcaatggccaaaagtaacgtccgcgctaatgggatgtaaagagggaagagagggcgacacgattagtgtggactagtcgaggcatggaggtgacttggtgatcttagcgtgggtaggagctcgggcggcgtggcgtccaaccgacgtccgacggcgaagcggtctgcgcatgacgtacagccatttgtc

SEQ ID NO: 10416 - DNA, 355 bp, Zea Mays
gcacaacaaaggatgaggttacaaactcatgagccaaataataggatacaaccaagataaagaaagtataagacggaagaggggcgattttaaagggcaggtatgagacaaacatcaatgtaggatatataggtgtcaagggtgcatatgataataattaaaagcataccgaaggatatagttaaggcaagactcgcgaaacgacaaagtggagaaaacaatcaagggtaagataggtaaggttccaacagaagggttgaagtaaagattcattaccgagtggagttacaaggagacaacgagatcactaaggatatgcaaaataaaatgaccgctcatggatcattaagaaaca

SEQ ID NO: 10417 - DNA, 302 bp, Zea Mays
ctttccacttgcattgcatcttaccttgaggtgtgggtgataataaagaagggctatgtcttttctagctttgatgttatgtttggtttgaccggtgaagtcaaagcatatccttatgatgctttcagcaacattacgctcctgatacatcaaatctatattatgcgataatattaaatggcttcgtgtatggtagctcctagagaaaggatatgtgcgtccagttgtgttctttattgtaccctttgaacccgtctccttcagctagttttaggtcacaatgttgtctagtgatatcttca

SEQ ID NO: 10418 - DNA, 671 bp, Zea Mays
aatttgatgacgggctcctttcggtcaccacgcccgctgccatcacgcgcgacacccttgtgcttggccgggttgaacccgttcctcttctcgcctccgcctgtcgaagatggctctggcaggagacggtggcgattcttggacacccattcttcctccgtcaacatgagttttccagtcttctcggtgacgaactccttctccatgcggtcctcggccatccttagacggccgacgagctcctccaatgtcagcgatttcagatcgagtaacgtctcgattgaaatcgcaatctgagcatatctcttggggagaactcgcagcatcttcttcactaccttggcgtcctcgactgtttcccccatcgagcgcagatctgacgccatgccgttgatgcgcatcgcgaagtcgtcgacggtctcgccatcgttgaagatgatgttctcgaagtccatcaacaggcgctgggcattggcatccttcacgcgatctgcgccgacccgcatgcttttcaccgcctcccaagcctccttgactgtactcttttcaccgagtagtctccacatctcctttggcaccgatctcaggagagcacccatcgtctgcctgtcatgcgctcgctttacgccggcgccgccgggctcgatgacctcccaaatctccaaggcttc

SEQ ID NO: 10419 - DNA, 1029 bp, Zea Mays
cgatttcctggcgcgcgtaggcatcggtgtgttccgcccgtgaaatccgccgcgattatggcgttccggtcatcctctcgggatatatattggtggggctgtatacctccttccctcttccagtaggagctagcaccgcctcgcatcaacaaatcgccgagctccgtcaccatgcacagagagaaaagaaagcggggccgccatcgtggttgtcgcgggtcaccagcgtctagccatggagaaggctccaaacgcgtccgtcgagaacttgggaaggtgcgcgtgccctaatcccacgggattatacactgtactccaaggaatttctcgccaaacttctctaccaacgagcttccgccctgtgttgcggcccacgtcgccgacggattctacgctggtaattttcccttcccttgtgctcgccctactccgccgtatgtgtagcacgggtccgtgtgtggatttgtacgcgggcaccacgctccggtgagcttggtcgtcggtgggcagggcgcctccaccgcggaccggcagggagaaagaagtgacgctgcattcggattgaggaagacaaccagtgaccgtcgatgcgtaatgggcggcctggattaattggattgtaccgcttcggttggagcaatccaagccgttggattggctaaggaggggtgggattagatccgggttccggacccttggattcagatcgtgtggtccatgtcgcgtaatggttcacttaaagatggatctaatctaggccgttcgtctatgatccgatagatgtgattcatggataccccttcggccgtgcgaaggttgcaaaaaggcccttgacctttgtctaaactaacccgccatcctcacatgcataaagataattacacttagaccctgtttttcacgatttagcccctgaactctcgggattttgtttcctcggtccgagcactattaaaataaatcccagaaattgtttctaggtataaaaataatatttatatgtctagaaacttgcaaaagtcatatctt

SEQ ID NO: 10420 - DNA, 420 bp, Zea Mays
cgggcccacctgttggtggcttaggagggtatcaattgcggtgtaatcaagaaatatgtactcggtcctataattaccctgttgtactgtgcatggcgggaatatagttgatagctagagatgttacagtacttagtttaccaacccatggctacccctataaatatcccggtcctgtaacattctggacacacttggtaatacaatcacacaagtagtttgtcgcttgattgtgctactcactcctccttgttcccgagtgttgggttacagattcccgtgccaacaagtcattgtgaagtttgacacctcctccagtatgtatgcctctacaatggaagcctctattttgcatttatttctacatttctttcaaatagtctttagatatctctcaattggataacaccaatgtcctta

SEQ ID NO: 10421 - DNA, 397 bp, Zea Mays
cgctgaagacccgataaggccgccaggtaaaagccatgccctggggataactccggtgactcaccgccgtacttcccccctgctttgcggcttgagcagataagctcgccggtgaaccgccgtcttccggccttgtgccacgtacccgagtgtttctaccgtgtcgccgtgaacctttgcgactctccgtggctcgccggagtaattgccacggcgctagccacccagccactgcgctagtaaccttttcctcctccgactgccgcgcgtccccattgaaattcccggccaccgccgttgagccctataaattgaagcccccgccagccccgcaaggtcatcgcccacccagccaccgaaaatcgctagcaatcgttcgccagagctcacaaatttt

SEQ ID NO: 10422 - DNA, 277 bp, Zea Mays
acttaatcttagcaaatagatcatggtctggttcaggattatgatgacaacgtctaccattacctcccataccttgtcgattacgtgtgaggcgttgttgcaacggtgcataaacatcatcgtcatcgtcgtcgtcgtccacaggagagtgagctggggctggagttggtggtgggggacgagcctccagtacgtccatgcgtgtaacaagttcagcaactcgtcgatcaagctgctcataggatgtcgccgcagagtcctggtatttttaaaagct

SEQ ID NO: 10423 - DNA, 749 bp, Zea Mays
caaaaagcatcttgcgctcgggtccatgggtatttcgtttctctttcctcatagaccggtccttggtgcactattcaactgagtctctatcattaaggaaaacaccctaggtttatcgcatatacaacccacactacacttcctcaccagaacaatgccagacgtgtagaaaaggacggtggggctcaccgatggtagttgagctccggcgaggggtcgggtgaggtcggggaggctcggacgatcacgtcgatggccaggtcgtggctggtgatggtcgaagctactcgatccacgtgcgcatgcggtggtgtcagcggcggctccaaatccgatcaacggcgttggtcgagctcgattaaactggctggggagcttcattggtggtcggggatgctgctggtacaaggaaataggcggcggtgtactgggtggcgctagccacgttcacaagtgggcgggtgaagtccagcgagcggtggcacgccgttagaggcgattagagagtgagggggttcgtgacgccactcgcggtggcacactactagaggggagtagagagtgagggggctggtcggggagcttcaccattactctaggaagctatggtggagcttgaccaggcgaagggtggctgtgatggccggaccatggtggccggggctcgggtgacaatggcgggtgttggcatgcttggttcaagagaaataccagtgaaggtgcacttgccaactggtcatgggtttgca

SEQ ID NO: 10424 - DNA, 791 bp, Zea Mays
aaaagaactatattttgggacggaggaagtacatctaagtgggtattcaaaagtaaaactaacttggatggttcttagagagatgtgcttggtttgagctttttgtatcaatggggctgctggtttcaaacttagtgatcatgaccctgctttatttattcatctcacacccatgggccatggttatactttgcttcttttatatgttggtgatatgttgattacgggtttctcatgtgaagcaacaacttggtgagcaatttcagatgtctactttaggttctctcagctatttcttaggcattgtggttaaacagtctactagggtataatctgtctcaatccaaatacatacaagagcttcttgattgttcggctaccacacccatgaatcttcactttcaactttgtcctactaatggtacatctcatgtggatcctccctctagatattgattatgggcaagtcttgtttatctcgctgttagagacccaatattgctcatgtagttcatattttgaactaatttgtgagtgcttttccattcattatggaatttacttcgcctagtgctgttagagacccaatattgctcatttttttatgctcgtaatagtctgttttatcttgacgctagctcggactccacttgtgtcttcgatatctgagggtgaaattggatgggatctgtccgtttctggattggggatgtattttatttatgcttcctgtttgattggatggatgagacgagtcattgtttatctagttggatggaagagagtgaatg

SEQ ID NO: 10425 - DNA, 396 bp, Zea Mays
acttagcggagcaggctagggcaccaatttatagtgtccaagggcggtggctcccaattttggaatggcgcgctggcagccggagagaaggaaggtcactggcggctcagtcgtggcgtcctctggtgcaatggttctgaaatggcaagcctaggcgtgccatggttactactacgcagtaaagagctacggtgtggcataaatgaggtcaccgaagtaccacggcgacaccggcggtccagccacgtcgcacggctacaggcgcaagtgataagcttcaccccgcgaccaaatccactccaataccgatcttttcaccccctcggtactatcatgcccgagtcctgcacgaatcaccgcgatcagcgcaaatccttgcacggaggtcaccggcag

SEQ ID NO: 10426 - DNA, 279 bp, Zea Mays
ctttgggacccctggggtcaccgaaggaacctctcggcgttgggacttcacgttcctacgggaggtgagctcccagcttccgccatacataacgtacagcttcttgcggcggtcgttgtcatcaccggagtcggagtctccagtgaggatgtccttgaggacttgctcgggggcctgatacccgaggtcccgttctcccgcggctacgtcaccttcgtcgaccttctccttgccaggttggcgccaaggcggcgagccatccctggaggcctgctcgcg

SEQ ID NO: 10427 - DNA, 852 bp, Zea Mays
atttggactaagtataaattttctaggaattaaacaagttctaacaattatttccacattaaaaaccatttttctatttatttttcctgggttttctaatccctagactacgctcaggaatacatagaaagccaggggttactatgtaaataaacctaagactcagggcgactggcgccaggactgcgggttgatttcccataaatagaggggttcatatgtgaaactgtccaccgaaggggtacacgataatcctggccaccagatcatgagtgaacgaccacgattaggttgggggttttatgaatcggtaagaaatcaggcccatacgatcccgatcttgcggtcaagattcagcgccatcgtaagccgcccgataccgtatctacgctctggattttaaaaaggccgtgatgaatccttgcccacacaatcgccgatcgatggtcaaggcgagatctcctgaagcaatacgcccgatctaaccaacaccgtccgttcctagatcaacgcctcagcgcggttctgccatcccgagcacagacgcggcggcgccacccaatccgtgacgtgccatcaccgacgagcgcacgattctcgcccccgacgcatgattcctcaccgtgaaggctactacgcaacgaaaagtaggtagcgaacttggtccgaggctacataccgattatttggcgcccgaatcggccggccacgacggaccgcagatccaccgcgcggagtactccggcgacggattgaccagaccacgatgatcctcacgcccagaggcttgcttgcagatgacccacacactcccgcgaacaccaattgcctcatctctaaaaccaggattgt

SEQ ID NO: 10428 - DNA, 401 bp, Zea Mays
agaggcagggttcggaggtgagcacaaggaacatgtaccacctttctcatggtgtgcgtgatcctcctgcttagagacacattgctaggcctagaggtgcttttcctcaggctattaggcctcaagcagcgagaccacatggtggtcgttcccggcagggtaatggtcatgtgctatatgaccaaagaccctgtgccagaggttttgtttcccacatctctagcggaccacaatttcttgtggtgatcgctaccccctatgggaccgatgatgtttgtgtttttcctaatacttttctagggcaaatgccacaaaactagtattcctcacagtttactaaccccactattgtgccatttgctcaccctgtgtctttctattgatgccggacggaggcctag

SEQ ID NO: 10429 - DNA, 671 bp, Zea Mays
gttgcctctgccgcggcccatccgcccctggaagggagcgatcgctttgccgtgattggtccgcagccgccgccggcttcccctcatcgcatttctggtgagatttctttgttttttgtcccatcgtattaggggagtgctccgcattcgtttaagtagatgggggggtcattagtgttgctaatgcgccgagcggaattactggtcatggcgccgccgtggaagaacttaactccggcgactggcgaggtcggggagcgcgacggaagattgtgtgccgtcggatccagagcgacggttaggatcagttcgtagcataccctttcgtggtacgtaatctgggccatcgatctgatgttgtgcagcctagatcaaccttatagttattgaatcactggaacggatcgtgtccgtagatccgtggatgtgcgcttgggatcttgtgtagacgtggcttgatctcggacgatgatcccggacccaagggcctgggttgcgtacaggtataggcgctggcagatctaatcgtggacgtaggtctaaatccaacggctgatcgcggccgataccccttcagcctggcatatttacgcatgaaaccctctggtcctaagaaaataacccgccatcctagtaccctgcgctctgtgtctacagatttttaccccatg

SEQ ID NO: 10430 - DNA, 396 bp, Zea Mays
taaagtgctcagacttagtcaagcgatccactaccacccatatagcatccctgccccgaggagaacgaggtaagcccaccacaaaatccatggtgatatgctcccacttccactctagaatttccaatggcttcaataaacctataggccttcacacgctgacatacctcacaggcggccacatacttagaaatgtcaaccttcatcctcttccaccagaagttttgcttcaaatctctgtacattttggtttcgccagggtgaacggtgtaaggcgttttatgagcttctctcaagatatccatcttcacctctgatttctgaggcacacaaagacgacccctaaaacgaaccaaatcattctcatcaacggtgaactcatagggtttaccatcg

SEQ ID NO: 10431 - DNA, 960 bp, Zea Mays
ctggagtgttctggggaaggtgacgttgatgctgctgctaccatccactagaaccttcttgacctagttttcttggatcacagggtcgacaagcagagggtacttaatagggtgatcaaagttaagccactgatcagcttggctaaacatgatgaaattctctgaccaccgatatggtgtgggggcactgtgggttgccagcaggacatgccggtcggtgagcttctgctgccttttgctctcttgggacccatggcccccgaagatgacattgacctccctatcaatgtgtgagaaggtgccaccactgccccctcctgttgcggcggttgttcttgtatgacttgttctcttcttggtgggggcggtggtagcggttggaatggtcgaccgttatcagttgagttcttgaagtccctagaattacgtagggtgtggcacatatccttgtgatacgggcactgggcgtcgaggatctcgtccaacatccgtgcgttgcctcgtggcataccgcggggccgagtcactaggggccagcaacatgcacttcatctctcatcctcttttctggttgttgtttcccttccctctttggcacctgggatgcaggcttcgtgtgggcaatgaggttcggggcccactcgttggcggtgatgtagatgtttgcctctcagaaaagctgttccaaggtggctagagccttttagaggatggctcggatgaaagccgagtcattaaacccacgatagaagtcctcggtcacgacgacctccgtgacatcggggatgtgattcctcattgtttgcaaaactttaggaacgagcggagggactcgtcactttggtgtttgatggatttgaggtcccagggttgcgttagtttgccagaaagggattggaaattcgcaacaaactggtggtagaagtcggtccagtcgttgatgcaatggcgaggaagatg

SEQ ID NO: 10432 - DNA, 337 bp, Zea Mays
ctttgtttaagggtgtgagcatagttgttaagaaaaatccagagatagctaagcctaaagttgggctgtcagggtacctatgtctgaacttcaggctcacagtggactgacatcaacttcaagcccaattttatgcatgatctgttggctttttgtggcaacaccatatagcaatattgtagatggcatgttgctctacaactttgctgcagggattggtttgagttgttattggaaatcaagagagaatttagctgcaaaattggctgtcaggcaccctgatgagcatatcccatggtacagtagatcctgaactgaagaagatcccgacttaacc

SEQ ID NO: 10433 - DNA, 462 bp, Zea Mays
gccctcgtagcgggtagcgataatcagggtatacgaagccaatcgcatcaaataccctgttcaatcttttcttcccccgacccccaaaggctgtggatagggcatcatcttcggcccgggaatatgtcccaagcagctcgtcactggtagcttcaatacatttcaaccagtcatcatttggctcatcaaacttctccctaaatctgaaggtatactttaatcgaaccagaccaccttcactggattcagcaacagtatcctttggcatttcccaattctccacaagtggccataccctgaaggctatatgctcttgaattaaatcccttgtgccaatgaaggcacacacagtactaaaggccttctgacatgcttcaacattgtcatcaatatccaccttcagccttcgaaggccgaagcgagaccagatggggcgttggataatctccttgatgtcttctc

SEQ ID NO: 10434 - DNA, 502 bp, Zea Mays
attacaccattccacatttgaataggataatatatcgacaatgagtaggcaggtggaaaatatcctggtaccactggatgaataggcgatgcttgctacgtcacctttcggaccgttttattcgaccgttttgttttagctagtgaccgaggtttctttgttggtcgatcgcgtagaatgaccttcttgctaacatatttggatagcaattgatcaaaagttgggtcagatttgaccagccaaccatgtgcactatatgtgctttgcccctgtgtcccctttttcgctttgggtgaaggtcgatgcctctggccatgggtggactgtccgactgagtcagtcgaatcgtgtacatgagcactagtctgtccgctcgcatgtgtcggaccgtccgcgatgctcgagtcagtgactttgtttggctactcgactaagcctacccccagcacctctcgcttgttagtcttcctgtccggagtcttccaagcaatccctccttgcg

SEQ ID NO: 10435 - DNA, 387 bp, Zea Mays
aaggctctggatcgttttgacccagaatttgcaagagacgctaggagtgttctctaggctagtccactgatggtttcactccttacgacaacagttcaacttcatactcttgttggccggttttcatcatgccctacaaccccctcccaacaaatgcatgaaagaagggttcatatttcttgcccttattattctagggcataaaaatcctggaaagaagatcaatgtattcatgcaaccgttgattaaagagttcaaagagctatgggtaggggtaaaggcttatgatggtcatctaaaatgtgaatttaccttatgtgttgtatatttgtggtcaattcatgattttcctgcatatggtatttggtctggctggtgtgtccacaa

SEQ ID NO: 10436 - DNA, 812 bp, Zea Mays
agtcgaggctgcctcctgggggccaggacaccaactctttcttaggtatgatggtatctagcctcgacacgtcgagcctacatcccaggggggccaggtatcaggaaaagagttgatagaaccacacacagcaagaacaagcgtcatgtagataagagctatttaattgatagttcccaaaagtatcttacaaaaatacatccgccttcaagcggggaactagccttatgtctacaggtatgacctactcgacatcagtagggtcacgctagaagcacgcggtcgccatctccacgacatcttgtacgacctcccgggcggcgtcttcagcagccgggccagcggtcaccgttggaggcggcaccgaagccatcaaagccaaagagatggaggcgcgaaagatggagccacaactcagctcgcgtcccacctcatggagttggagctagaccagttcatggtggtgtaccatgggatgctggtaaagctcacacggaagatggagccacagcttagctcgctttccgccttcggaaggtcgctgcgcagcgccctcctgtccgtatgctggaggaagaagcgtcacccccacggacatctcgcagaggtaggcgaagaggtctgcctgagggatgaagcggggcgtgaagtgctgtggttggaggctgagctcctccagcagcagcacggagaaagacgagatcggcagcgccaacccgctggggaggttggagacgaagagcacgaactctccggcggcgagattgccatgtggagaggcgccgacacggatccttccgatgaacgccggc

SEQ ID NO: 10437 - DNA, 429 bp, Zea Mays
acgagtacaaggctcttgttgacaatggtacctggcgtctcgttcctcgcccgcctcataccaacgtcatctccggcaagtgggtcttcaagcacaagtatcgtgctgacggctccctagctcgccataaagctaggtgggtcgttcgtgggttctcacagcggcatggcatcgactacgacgagacgttcagtccaactgtcaagccgcccaccatccgggtcgtcctcagcatcgccgcttctcgctcctggctgatccatcagctggacgtgaagaacgcctttctccatggccacctgaacgagaccgtctactgtgagcagccgcccggcttcgtcgacccggttgcccccgaccacgtgtgcctcgtgcagaagtccttgtacggactcaagcaggcgcctcgggcttggcaccaacgcttct

SEQ ID NO: 10438 - DNA, 1072 bp, Zea Mays
ccactactttcaccgctagcaatgaattgccgactgtttttctgagtcaaaggaacttcattttctccctcctcatcatccacattagcaacacaggcagcacccccattgggatcaacaactgattcgggacacccattgggatcagcgtcagtaaattcagtcgcaggcacttcttcagcatcaggaaccgaagtactaacgtcccgacccaaactgggtacctgccgaaggcgtctccttttctttttctgttcatcagcaggaggatcggatggattggctcggcaagggcgcctcgggcgagtactagcaggtttctgagtatctaaggtcataccagcctctgggaggggcgccaccactaatgccccaacaggagcagcgttagaagagtcctcagccagcaaatcaagcatggcacctatctccgcatcactagggttcaggggcacctcaaaataaacctgccgttcatcatcaggaattcccccgagtgtggcaaccaaggcactaacttcttcagcagagggccgcactctaaggcccaaactgccgtcagtatcaggaggattcgacacaaaaagagttaaagctttgggaggaggcaagttccaagctgagaatgccacgggagcaccaacatttgacactttgcctctaaggatcatctcaagtcggctcaccaggtccgtagagggaattcttctgttagtgacccgagttgagtcggctaggcctcgatacagataagctgggtatgccctgtcttttaacggctgaatattcttgaagacaaaatcagcaaccacggcttcagcggtcagacccctttctttcagcaatccaacttcagcaagcaaagcacctgcctcagttacctcctgatctgtgggagactcggtccagctgggggtgcgaacgtccggctgtcttcccgaccgggggggagagagtttccataattctcaactatgaaccactccaagcgccaccctttgatactgtctttaagagggatttcgagatactccgtcttcctcccacggcgcatctccaagctggcaccccc

SEQ ID NO: 10439 - DNA, 384 bp, Zea Mays
aggtgatggtgcatgggctggcactggccacgttcgccggcgctcgggtgaagtctagcgaagggtggcgcgatgctagaggggactaggggtgaagtggctagccgagtagcttcactagggcacagggaagctgcctgagttgtgaaatgggatagaacacgtcctagttggtttggttgcggtggctggtgctcgggtggcaatgcgggtggtggcgtgctcggcttgggggaaactctagtgaaggggcacttgccaatggttctggggcttgtggggatgaatggccgacgacacaggtggtcttataggcgcaggcgtgggtggaaaccagtagtggctgaccatgggcacgggggcgcgtgggctccgttggacgcg

SEQ ID NO: 10440 - DNA, 642 bp, Zea Mays
cacatagcctacagagtgtggccacttgttgatagttgagaaatgtcgaaggagactgttgctgggtccagcgaaggtggattagttctattgaaataaacattgagattcagagaaaggttcgacaaaccgaatgacgactggttgaaatgcattgaggctactagcgacgagttgcttggggcatataccagagccaaagatgatgctttatcctcagcctttgggggtcggggcaagaaaaggttgaacagggtttttgatgcaattgggttcatatatcctgattactgctaccccttgcgaaggcaaagaaaaagagaaaaactgccacttcagccaccactgctatgccgaagggcaagaaaataaaggttttgacccaccggccatgatatattgaaacgaccgtagtgcctgaatttggtgaagggaccttctccgctgccgaagcgaaacaagctgctcccgtcgctcggagcgctgagggatcgattgtagtgccgaaggtgcatatagtcgggtcagccaaagccaagagatgatgcggccagagagccagagctagaaaaaacagtgatgctgccaaaaattctgagtcctccggcagaggtggaactgccgaaggttacaagggctccc

SEQ ID NO: 10441 - DNA, 703 bp, Zea Mays
ggagatagctgaggccagggttctgtttgccgaggttggcttgttgaaggagaagggtctgactgccgaggctgtggtcgctgattttgtttttaagaacattcagccactgaaggacagagcgtacccagcttatctgtaatgtggcatcactgattcgacccgggttaccaacagaaggattcctgctgtggacctggtaagccggcttgagatgattcttagaggcaaggtgtcgaatatcggtgctcctgttgcgtattcagcctagaatctgcctccttccaaggctttcatcagttttgtgtcaaatcctcctgctggtgacaatggtttgggccttagagtgtgaccctctcctgaagaggttgaggctttggttgtttcgcttggtgaaatccccaatgacgagaggcaggttcattttgagatgcctataggcccgagcgacgcagaaataagtgccatgctggacatgttggctgaggattcctctgattcggctcctgctgaaacactagctgtagcacttatcccagagtctggaaaaactttggacattcaaagatctgatagtattctcccgaagcgtcctcgccaagccagtcatccaacttctcctgctgaggggaagaaaaagaaaaagagacggcttcagcgagtgtcatgcttgaatcaggatgccggcccttctgctcctgct

SEQ ID NO: 10442 - DNA, 697 bp, Zea Mays
aacgatgttccatcaccacgcaccgagcagcattccatttcaccaaaaaattgtttggtgtcaccatctgctgcaccttcacctcctgaagttgtggcaccttccactagacatttggcgccactaatgtcctctcccgagtcaacttctgtatccataccacctggtattgatattgcagctccacaaatggtaactcgatccaagcataatattcacaaacctcagattcatgctaatggaactatcctttataatccaagtcgacagactttcttttctacaccctcgtcatacaaagcagccctggcagatgacaaatggtgccaagctatgcaggaagaatttctggccctttagtagaatgacacttggactttgattcctaaacctcctgatcacaatattatccgttgtaagtgggtttttcgtgtcaaacaacatcatgatggctccattgaaaaattaaaagctcagctcgttgctcggggattcacacagcagtatgacatcgaataccatgagacttttagtctgattgttaaaccggctactatttgtctcgttctttccctcacaatctctcgtggatggcacactaggaaaattgacatcaacaatgcttttcttcatggttttcttgatgacacagcatacgtgcaacaacctttggggtttcaagatgcctctcgacctg

SEQ ID NO: 10443 - DNA, 758 bp, Zea Mays
atcggggaaagggctcaccttctgatggtggcttggcttggggacgatttgttggaagtcgacggtcggcagcagatccggtggtccgagcgtcaagggagttgcggcggttgtggtggaggtcctagggcagcactggcgaagctggagcaggggtggacgaagaggaggacgagctgtcctcggggcaggcgagcacgacgggcggggcaggacgacggtgtctccggggtgggggacgctcgacggctgtctcggggcttgggggcggacggcctcgcccggttgtggtggaggtcctagggcagcactggcgaggctggagcaggggtggacgaagaggaggacgagctgtcctcggggcaggcgagcacgacgggcggggcaggacgacggtgtctccggggtgggggacgctcgacggctgtctcgaggcttgggggcggacggcctcacccctacggatcagctcctcccccgttcaactacaggcgatagctccggtgacttcgctggtggccgccgcttcagggatcgccgcgaccgcgatgggcatgcgatcggatccatgaggggattgcatcgcggggcgtgatttgacggtgggatcacagtcagggggttacgacaggggcgggctttggccgggggtggggcgtcggggcggtttgttgctccgatgtgtagagaagcaaaggagtgcgcacacagagagggagcagggcggcagtcgcggcaacggggggttggtgttcacg

SEQ ID NO: 10444 - DNA, 388 bp, Zea Mays
gcagcgccgccgtaggccttggcggagccatgccggcgatgcgctcatcgtgaccacccggggatcctaccctgcccacgacacgcctacgcgcagagatgacttaggtgaactcaacggcggtctccttaccttcaatcggtatggccagatttgatcatggtcgttcaccagaatctgacggcccgcgcacatcttcctccccacagcagacaacgcggcagccaggactcctccatggcggcgccatcacccatccgcccagtgcaaaacgaagcagggacaagcgcgaactgatttgggcaccacatacctgagttggcgacggagatggtgatctccctgcactgtcttcatggcccgacggtggtcatagcgcatctccatg

SEQ ID NO: 10445 - DNA, 923 bp, Zea Mays
tggctgtcagataatgcagagcctgaatattgactaacagtgaagacagatggactttgtggtcgaattagagtaagatccagtgatggattgggaatagtcactataacaaaattgaagttggattataggataagaactttgttacagatgaattagcaagttcttatacaaaaatccgagatctaggcattacaattctgtctgtcagacgctctgaatccgaattctgatggtacagtgttcagatcagatcgccaaaatcagctcatctcaccgccgacgaccacacgctcggattcgtgctcaacggagtactgctagttgctcgaggtagtaaatatcgccttgtggatgaacttgagccgctgtttcactccggccgccgtgcccgcctgattcacgaccgattcagatgagctcaccagagttagccacctatcgaccatgcgccacgtgccttggtgtcttaccacgtcgtagtagctcgtattacacacatccggtgatcgccgatgagctcgccacagtgaaagccaccaatctcttgcgacagtgctctcctctctctccgaccaccaccgcgccatctcaaattcatgggccaccgctcggggatcctataaattgagcatgctgtcggttccacaaggtagtcaagcaaccaatacaccaactcgtgcctcaaatcgtccaccagagctcgccaattcgagattttccccaaatcggtccgtagcaccacgtgaagtgacctcgccgtggccagcgtgctacaggtccgatcatgtcctctgctctcttgtttcagtacccttatgtgcccctgatgcttctcgacccgaccgattaagctagaacccattggatcaccgggaacacttcgtgttatccgttgatcgtgcggtcaccgtgagcagaga

SEQ ID NO: 10446 - DNA, 649 bp, Zea Mays
gctgcttcaattcaacctgctcctttggagccatccgatatggcatcttatgaataggctgcgtacctggaatcagtttgatttcaaaagctgcatcgcgctccggaggaatgcctggatgctctgctggaaacacgtcggcaaagtgacacaccacacggatgtcctgcacccgcaaggcagcctcaccctccaccaccatggagaaaaaaattcccgacttcctggaccaatgatctgaaagcaattgcaacaacaaggataacgtaaacattggagaacttcccaagaataccacctccctacccaacggcgcctgcaacaacattgtcttccaaaaacaggatataactgcgcgatactgagataaccaatccatacccaagataacatcaaatgcccctaaggaaatcaccacaagattagctgaaaagaccttgtcagcaagaatgatggaacaaccctgacaaactgaacaactactaatggagccattagcagaactaaccataattgggtgacccaacctctgcaccgaaagactagcctgcgacacaaaattcttcgcaacaaacgaatagctagcgctagagtcaaaaagagcatgggccacaaacagatcaactaagatcgtacctgtcaccacgtc

SEQ ID NO: 10447 - DNA, 614 bp, Zea Mays
tttgtaattttcagctccttccctgggccggctcgaattgtcatgtcattatggtcgagcttttccatcagccaagctaaatgtgatctgctgccgagtgcgtcaagtctcatatcaagaatactggaaaatcccctccgtgtaattgcttggcgctgtctgtcatttaatatctggatgcttactaaaacatcttgggggttgcatctcacgttaagcctctgctaaaaaaaagtatacaatgaatatcgtaaacatttacgtctgcataatcgcaactcaatgtttaactcaaacctcaacacaacatgatttcacgcataaaatgatatattgccatagaccataaatctctaacctgtcagggggtccactactttcctccgctttgtgactaccttcttcaagactttccaaggactgtcgtcgaagttacgcttcttggatattggcataaattcatcgtcctcatcatcagcctgccttgtttcgtgtctaacagtctccgccggaacacggggtatgtcaacactaaagcactcttgagtagactggattgtaatccgttttggattagaaggaggtcggtctacgttcttcatgtctaatgttcc

SEQ ID NO: 10448 - DNA, 626 bp, Zea Mays
ctcagtttgtgtaccttgtttggactagcaagataatgattatgttcaagaacaaccttttgtactgtccagacctcctctcggctaacactgaactggacacgagcatgacaacatgttcttgtggtagcattttctttcaaagtatcatgttttgaatgtttacctttttctccttccttgctgcaaactatatgtttctgatagatagttccatcaactcttcgtcttgcattgctttttgtaatactaaaactgatcttcctagcataggagttgtacatctcatatgcatctgcctctgatttgaatgccattccaacttcaggtacaattgcatcttcactgttatctcgctgcataaagagatataaattaaaatggtgaaaactacataatagataacatcatgtcatatattatattacctggatagtaggttgatcgtcagacgtcataggattcagcaaccttgaagtgaagttggtggaatttggcggcatcacttccgccatcgagatgttggaagcaccagcaatatgctccatagcaggggttgaggatgaccttgatcgtgaaacaccacaatattcaatctcctacagtgaaaccttggctgttgtgcg

SEQ ID NO: 10449 - DNA, 451 bp, Zea Mays
cttggaagtattgtgcgcttggttgttcatctgtgcgcaccggcgacgtggccgagcggtcgtcaccggcgtgttctccattcgccgtgagggcgccatgccttaggacgtttatcgcgtcgtcatgagccgtagtgaccatccagtaaccgccgtagttcagttgccctgcgattgccacggtagatcatcgcagtgactcacccccttctcggtcgccagcgcaatcccttcgaattagacaacaccgctcacggactctataaattgagcactccatgagctccgtagggtaattacccatccaaagcaccagcacttgcctccaattgttcaccagagcccccgaattgcccacatcccccaaatcagttttccgccgccgtgaaaaggatctcaccgtggccagtgcactccaggtccgatcttgttctctgctctcttgtttcag

SEQ ID NO: 10450 - DNA, 529 bp, Zea Mays
gtttcttaataactgaggggctcttacgcaagatggcacgacgaagaggtatcgcgggatccgacgggggcgccctgcacttgggcttgagggagctcacaggggaaggtcggaggcctgtccatggagggagctccgcagttgaggccgtgcatgcattgtggcgcttgcggtggtctattatggccatggcgacccgcacagagggatgaagcctcggtgttcgcacaagatgggagatgggaaagtcacgggagatacttggctataaagccgcaaggaggtggggtcgaccacgcaacgacaggcgacgttttcgggcggttctaacggtgggcgagagagagtccggcagcctagacagagaaaagatagggagggggagaagacagacccggagcacgaggccccacaagacaacgatagcacgttagtgctcgcgacggctgggacacttgcaacccgaggagctggtcccacaggtaagtgacccacgcaaaaaggaatggagaggggactgatgggccgc

SEQ ID NO: 10451 - DNA, 493 bp, Zea Mays
gatccaacaacaaattgtatttcaagttttttgggccctatcagattgtggagcgtattggtgcagtggcttatcgtcttcagcttcctccagccagtgccattcatcctgtaattcatgtttcgcagctgaagcgttctaatggccgtaatgtgtctctttcttcacagttgcctcaggaggaggtgcctgtgcagattccattacagattttgcagcggcgtatgattgagcgaggaggagatttcatcgcccaagttcaagtgttgtggtcaggcatgtccaaggagctagcgacatgggaggacgaagcagccttgaagatgcgttttccagatgcaccagcatgggggcatgctggttctcaagtccgggggaatgttggcgacaaggaggtgtccggggcaacaggcgggaagactatagcacatcgccgacatatttttacaaattattatctccaaatttaaatcatgtcagatatataccgttg

SEQ ID NO: 10452 - DNA, 688 bp, Zea Mays
tcgtggagtccgttgcgggcgccttgggccgttcctccatgactataaagtagtataccatggactcgttcgctccataccctcgcatactccctgttcctcgcgccatcgtcggtgagagagagaactccttcgccgtgtggagaaattgctgccgtgatccatcgccgccgtggaacctagcctgcgaagcttttcggaccaaaagggctggccttgtgggttcacggggttccttgggttgtgttcagggcaccgccgtgtggacttgaagcccgggaagctcagaatttctcaccatcggcgtgcgtcgcgccgcaccgtgaaacacttcttcgccggtcaccaagctaggtacgttacccacccgcgtactcgtttcgtgcctcgcagcgtatagaagcaactcaatcgggatttagggcgtcggggttgggaaaccaggtagctccggccaagctccgccgcggtcctggacattgccgctggcaatggctggaggagggggatgagggcgcttggcccttggatggtaaaggtgcggttaagattagatctgggggctggtagatttggaccgttgatataagatcgaacggtcgggtgttttgggcgggattcgaagttagtaaccgttagatcaacatcctggggctctgatgggatccgcgtgcgatcatactgtggg

SEQ ID NO: 10453 - DNA, 1512 bp, Zea Mays
gtcgtctacgaagtcaaaactgcaaaacacagcggagtgtggagttgcccatgtgttttgagattgttgctgttgatggtgcgttgattgatcttgttgggtgcgagcgaaggaaccctatgattggtgttgaccagaattgtggttcatgttaccatgggatgaaggctgacttgggaactattattaactaaccacctcctgttgtagtgcccatagcttgtcctttttcaactgatttaatttcaaaatttaacatgatcttggtctttgttcctcctagctgctagggatcctttctgtttgagggtatttcccctttgtatgtgaagacttttgtgtaagagatattgcttagagttgatgcagtgacctctccgtcctcaaaggcgtcgaatgcgaagaggttgaggacctctgcctgaagcgaggcgaacgacaggattctggtgagatctgaccatgtagtgggctcataaaagtgacttttgttgtacaagtggttgtggcttgaggtttcggaactaacagtgtaaacattgcctttgtaggtgggagcgatgggttccttttatcggggtggtgtgtcgttttgggttggcttagcctttgtgcccttcggttgggtgtcgatatctctggtggctaaagtaactctagtttgtttggtgttatcagcggagactgccttcgtcatctcaatgggggtagagttggatcgagtggttttctaggaggcatcatggggtctggttttcgtcgcgagcacgatggctgccaaatgttgggccagacaggtggaccctaacactcgggggcacatgataaacatggtgctccaaaaaacattaggttgggaacagtagtgtctcgtcaagcatgtcccatcagttacaggtcgtgtatttatagggcgactagggcatgtaaatctaaatacaattttgcatccgactactggctacatccccggtatatgttgtgctatggggtaattacagtacaatattaacgcttcggaactaagtacaccagggcactcacccaccctgtaggatgaagagtgggcctagcagggcaactgtaacccttctgtggcccgctagcttagctctccttcgaggccttcgagttcctaggcgtcttcgcccgagcatgcgatacaccaccagcgaaggcttcaacctcacttcagtcgccacggtttggctctcgcttgaagggtatggtaagtgccttcgccttcgatgagccccgcgagtgcttgccttctcatggtcttcgtcgagcatgtccaattaagaccctttgggcgatgcgagcctggcgaggttccccgttgcgctaagtgcactcagtcattgttagttttatcttgaggtcgtttctgcgcttggtagatcgaggtctggtttggcctccgccccaacactaacaccagcatttgaatgaaagctatgcaaccaccccttcatggaacccaaagtcttctcaaactgcgactgatgcttt

SEQ ID NO: 10454 - DNA, 597 bp, Zea Mays
attatgagcaactacggaaactaataatcgaaactcgtccgccaaagtcacaccaagggcgtaaggaggagaagattgcagcactcagagatagacaaagtcactggaacccgtccgccatcaaagggactggttcaggaccgggggccaggccggctgctacaaatcgaccgtgtttcatacgtctaacaccagaagaattagcagcgaaacgggcaagtggagaatgttaccactgcaatgagaagtactcggctgatcacaagtgcaccgcaaggggggtattcttgctggaaatggacaacgacatggaggaagatgcagcagcggaagacctgggcatttctcttcatgccctcacgggcattgacatcagcagcaccatgaagctctaggtcagggtcaaggatcagacattggtggtgctggtggacacaggctctacccacacattcatccgggaagctgtggccacccagctgggcctccaagtcacaccaagaccgggtctctccgtcaatgtagcaaacggggacaacgtcgccagcagcgggatatattccaagctccgaattactattgccaaggagaccttcc

SEQ ID NO: 10455 - DNA, 278 bp, Zea Mays
gtcggagagggatgcgatgctcgggagtgacggtttagcgggctcttcggcactgctttgccacggggtgatggcgtcgccgcgcgaactgtgggcgctgtcgtgttctgtggccctagggaagaagacgatggatggcccttggttccgtgatgagcggtcaggattataacacaagtgaacgtttcgtggaggaaatcgaagccgtgggatgataatctggtggttcggattgaaagtgccttaagtagttttagatcgttgatcttggatctagc

SEQ ID NO: 10456 - DNA, 680 bp, Zea Mays
gtggagtacaacagagagataaagatattttcctttcccccaaactgacagctcgacttgatattttcaggggagagtgagacctctagaccttaactatgcactgcatattcactccaatttatataatcagatgaagcaccgtagggcatccatagatcaaacaacagaagctcttgacagggaaacaggcaggcagcctagtcacaattaggggacaagttgtatacttcactaggcttagatatttgaagcccaaagcctatccataccactataggcgccaacacctcatggctacacacgtggcttagctcccttgacccacgccggcacacaaacacagccaaaactttgaacctggactgatttatttaggcaagggcaagcagataagtctgcccttgcagatagtcacacaacagtccaaaccttggatacttccagcagagctgagatcactggacccttcactttgtaccccagccatacctctgtctctgtagtcatgtgaaacagcatagggcattgatcttgatcccatatggtggtcagcagtcaaacagacaacactgcagctatgaacagccatatttcagtccaaactgagtatttttagtggagagtgaggcctctaaatatcagtcatgcacttcatccacatgacagcttaaaaatac

SEQ ID NO: 10457 - DNA, 599 bp, Zea Mays
ctcggtgccggctcgaccccgcttgctagccctccccttctcgtggctattgaccgggcccgacccatcagttcctcctcccattcacgtgtgcttagcaacgatggcttctctgcccaccaccgtccccccttccccctcgctggtgttcactccagtggagttaggcaccgtttcgtccctgccgtgttgtgcgtgtgcaccagcacgacactatccctctcccttcgtcgtgtcgtctcatcaccgtcgttgtatcgcccctgctcactgccgctatgctccacccgccaaaggccagctggccaccgctcccctccccggacgcctataaaaggagcgcctgaagctcctctccaacccgcaccgaccaccggccactctccccttccctcaaacttaattgaagccgacgccacaaccttcctcttctccggtgagctctccctctctcctcccgtcacctagagagtaattcagtgagcgcaaaggcttcactattcactcacaggcatagagcactcttccccacccccaatcacccactgtgacctcgccgacgacctcactaccgcgggagcccgccacccgtggccaac

SEQ ID NO: 10458 - DNA, 428 bp, Zea Mays
cttccccgagctcaatcgagccagcgcaccgccctctccctccactccggtgagccctccctcccttctctggtggcctagagttcaattggtttggctcacgagtttcaccatctcaccacgaacacggcgctccctcctccctcacctatcacgcccgtaggcctcaccagcgacctcaccgctgcgggcgcccaccacctcactacggaccggctgttccaatcccccaccagacaaattgaccccacctccgtgaccccctacctccaaccatgctataccaccatcccaactacccagaaccgggccaccagcgaggaaccgccgtcagaatcaccggtggccggttctcaccgccgcgggcgaaccacagttccccccctgacgctgttacccctcccctcgctggcgtgtgggcccacgcc

SEQ ID NO: 10459 - DNA, 304 bp, Zea Mays
atcaatgtcgatagactcctatatcacaatcaactagagaagaaacatacaaaacatgacacacatgcattattaagcttagtcatggcaagtctatattaattaagtgctaaccaagcatttttagccaaaagggtgaactcaatcatcaaatgggcacttgcagaatttttggacagcaatacagcagttgcttgttttaatcataactcttcaattgttagtccaaaaatatcaagctaggactttctggaaaacttaaaaagtgctctacaactttggtattgtcatcacaacctgattc

SEQ ID NO: 10460 - DNA, 348 bp, Zea Mays
gtttgactggaagatatggttgaacaacttggttagtcataccatatctatgtctccaaggcatctccaataagggtcaaaatgatgggttctaaagacataagcagagacttcccaaaacaaataaaagaaactcttagagaaatgacacattgtatagctatccttcattacaatgctaaaatcaactaaatcacaaataaaataagctcaaggaaactagggagagtggcatgtcctgcattaccggcatactcacacacaaactgcctgcctatgcaatctccattttttctgcgggtggagcattggacgcagccacaccacatcggctggttctgacacaag

SEQ ID NO: 10461 - DNA, 1211 bp, Zea Mays
cccagctatgggctcttggtgtaaaggcaaagttgtcggtgttggtccttgcggcttcgaggttgtcattacaggtgaaaaacagtatgatgcttccaaacataacctaactagttaaactgaattcatggtcaactcacttaaagctgcctccattaattgccactggaatttcggaagtacaagaacataagatctagctcactagattactcaacctcctactgcaaaatggcattattgagtacacggttgcaagggtaacaatcaacatattctagtaatttataacttttcctatccagtgggcagtggttaatgatcaattcaattgaagagccaggaattgccaccagaacgatgaatcgaatggaatagaggaagtgcgtccaggcattactcaaacctactactgcagaatgctacaattgagtatatcattgcaagcaagcacagcactgaagttagcaaaccccagcgcccacagtcatctgcactagcagcgtaaataagaaaaaagagatatttgaagaaatggaggcaggggcggggcagtggacctgatccttctcgtcctctgcctgggaggagatggatgcggcgacggaggcgccggccgagcgcacgctggacgcgacggagccggcgttggaggtcaccgtcttgaggcaggacgatatgatccgcagcgaactcggcagcaacccattccttgcccccttcccccgcctcatccctccccgccgctccctcacctcctctccctgccccagcccggagaccagcacaagcacccgctccgagtccaacttccccgccgccaccgctcctacaacccccgccccgcaatcccgccgctgcccatccacgatcgccgcctccggggctggcgaaagccagtaccatccgagtgccgccgcccctcactgcctccgatccccgctgccgccgcaatccgcagactcagctggccaccatatccctcctcccctcgcacacctcttcctcgccgctcgtcgtcccttcccctccgacgccgaccagaaccgaaattcaacaactccctgggccctggcttccttcacccttttcccttctctctcctcgctgttgctttcgtgtgcctatctccctccctcgcccttaaataatcccaagaaatcccacccggtttgcctctccccacccggcttcgcgtccccggagcaaac

SEQ ID NO: 10462 - DNA, 546 bp, Zea Mays
cccatgttcattaggatttaaaccttaaaactaatgactccaattgacaaaatggtgcctaacgacttaccctaacacataccagaagatggcattggaactcgaagtgtgacatgactaaaccctagattttgctttggaaacggtctcctagacagatcacaattgagtgcaccatatctttgtggccagtgagcaaaccccaatgatccccatacaacatcactagcttagggtataagcaacaaatattagatcaggtttttgacgagatcaggctcagacaagcgactacacgcaagggaagttggccaaatgcgatgatgctaggtgttcgatgtcggctggcaggagccgaacgggctctgcccgcacatgtgcacccccgcacggctggtcgaccaccacagcgcctcgctcgtgcccacttctataaaggctgcccaagacctctgtcacttcctccgttgctccctcaacctagtgcctaggtctacccgagacattgccaactctggcgagctctatgtgcgtcgccattatcgc

SEQ ID NO: 10463 - DNA, 446 bp, Zea Mays
atctgggggtcttcaactctgatgggttgaactgggttggatgaagcgggctcttggatccacagggctctacattggttatgggttaccaagtaggcctccatcaacttctggacgtgctcatccttggcttgcttcagggcttcaacaacaatggcttcacgactttccaaggcagctacacgggcttgagctgaggtgagatccacatggagcttacggttgagcttctctgcatcttctgctcgggcaatcatctgatggtggtgccgagccaagaaatcatactgtgcatccagggtgagcaagtatgcagtgaggtacgcgactctggggtcgtcctcaagcagctgcttcccttccaatgcatgcatcctggccatccaaactggacggtctctctgaaagggcggaaagaatctgagcggtgtgtcgaccacttcttc

SEQ ID NO: 10464 - DNA, 462 bp, Zea Mays
cgcaaactcaatatccagtccaattcaccagaaccgattgctccatttggttgtgtttaacacacccaactgccccagttcgtcataaaaaattgctcaggggaggctcagcacacacagccatatgcttccatggaatctacaccctggagcattgacaaagcccaacaaagaagtgacagggtaactactactaactgaaaggcctcgattttctaataagcctccgcaaagcttgaatccagagcttcacaattctgctgagccacactgtgagaacagagaagcacacaggccaatagcagttcagctgcctagaacaacaaccacttccaccacaagtcaacatcaattcaccaatctctccgtcacaatcagctcaattgatcggattcaacaccattaccaccaacccgcgcgagcaccggactgaatggagcagcacccagttggaggagtaga

SEQ ID NO: 10465 - DNA, 390 bp, Zea Mays
gatgagggtacgtctccaggttcgccacatgtgggaagcagttcggtacagcgacgtcgactactacgaggattgacgggcgctagatgccctcattgctgcagtcccgcccgagatgcagttttctctttcccaaaagcggactgccaaggaagcctgggacgccatcgctgcgacccgcatcggcagcgaccgtgcccgcaagaccacactgcaggcacttcgcaaggagtgggagaacctggccttcaagccaggtgaggacgttgatgactttgttctccgcctcaacattctgttgcagaagatgttgcagttcgacgacgacacctacgatgaggagagagctgtcgagaagctctttcgttgcatccccgagaagtacaagca

SEQ ID NO: 10466 - DNA, 580 bp, Zea Mays
atctctatataaggcacaacatacaccacaatatttttataaacatacatattcacatgtatattcacatatcgaccaaatcatacgaatcgtaaaccactaatctccaaatcgaaatcaccatgcatttacttcccaaatcatgaacgcatacatgtttatcatacgaaccgagtatttcaataattatcctaaaacaactaactccattacacaacttgtatcacaaacctacttgacttacttaaagcgtctactcgaaatcgtgagcacagtcatacactacatgcgaagcataatttaacgagcgcataatacgcatcatcacgactcggcttataaatatagagaaagcgacgactactttggcatgtcaccacctctctatataagccaaaataatttctacctacaacgaccaaacattcatgtcgagcacactttattttaccatgtctcgcatacaaccatatggtggcgtgcactcgagacacttcaatcaatgtggcgcgaccactaatatatgaactccgatactcatgtcttaataacacatcctctacgcaaactagcattttct

SEQ ID NO: 10467 - DNA, 430 bp, Zea Mays
gcggaataagcaacaggagcaccaacatttgataccttgcccctcaggatcatatctagtcggttcactagatcttcagtaggaattttcctgttggtgacctgagttgagtcagtaataccgctgtacaagtaggctggatacgccctgtctttcaaaggctgaatattcttgaaaacaaagtcagtaaccacagcttcggcagtcagacctctctccttcggtagacagatttcagccagtagaaccctagcttccgtcacctccaaggcactgggagactcaacccaactcggagtgcgcacatctagttgtctccctgaccgaggggggagggacttgccgtggttttccacaataaaccattcaaggtgccaccctttaatgttgtccttgagaggaatgtcaaggtattatgtcttcctcccgc

SEQ ID NO: 10468 - DNA, 432 bp, Zea Mays
agaaaatccactaggaacaaaggcgtgaacacaagcatatggagaagtgtatgcagaaacaatctatatgataccaaaaaaatgttgatgcctctcttctattgagggaaattgggatatcattcactgctatggatttaattttgttcagcaaacgttatataattttgtaccattgtgatgcacggacatcatactagttagcccacaaggagcgaaacgggctaaacccaaacctttccaccatatgccctcacgttgtgccctttccacatgaacctctccctccccattcccctctgtcgccgctgtcgtagtccccgttcgtgccctcccctcctcctctaccccatcatcgcttctgagtccaccttcttttcttgacaccggatccgccttggatgaacaagatggtggcttacatgatttctt

SEQ ID NO: 10469 - DNA, 1038 bp, Zea Mays
ctggcagccacccactcgttgtgcttcctctggttcatggggccaaatagtcatctcctccgttgcgccgtcgcaacaactcgcgtgtccgtcggggtcggctgcgtgcgtgcgcggattccgggcgtctggttcttgcgccaaactaacccttggcaggctataaaaccccgcatccagtcccccttctctcctcgacaaccccaatctccgctactggcgccgttcaagaacgtctagctgcagtggtgaagaaagagaaaccccgtcgcgccgcgtgaacaaagaaattgaagctgcctcggccatcccttgatgtcctggcgtacggtgtgctataggctctgttgattgggcgcgtgatcaactggaatcaccggaattcgtcgccagtgacggaggttcaccgtgccgcgtggacagcttcgccttgcctcctaaaccataggtaatgccccttggatcgattcgacaccttctctgcattgcttagcacctagttacgctttgaatcaagccctggcatgataattggatgctccgcggtcatggcgccgccgtgggtagggccggcgtgctgccgtattccggctgggagaagaagacatacttctagccgtggatccatgaaacagcaatctagattagatcagggttcaaactaaatgtgcaccgtccgaccgtacacgagtggctaagattagttggaggataccgcttcgcccgatcgcgatctggggcgttgatcttccatcaggcggtcggcgggcatcacacgactcattaaatgtggaccgttggatctagatctagggtccagcgtagtttaccgactcacctacgccgcgatctgatctcgtgcgtccgatttggatcgggcgggcacaggtcagcccataccccttcgcgggcaaagtttcaaatagaccccttggttttcttcaaaagaacccgccgtcccccgcggggtagatctgtgtcttggggaaatatacgaattagcccctggtctttcgcggaatagtgtccccagtccaa

SEQ ID NO: 10470 - DNA, 430 bp, Zea Mays
taccccaagcacgtggggtcctgcaaaaatcacatggttctctttgtccaaggtgacctttggcctaaaggggatccctcgcgctgtttttgtgggggttcacgctatctaggtgtccggcctttctcctgcacttccgtataagtaactaggatggtgctcagggttatttttgcttaccgtattctcgtgtttgtgagtctgccctcttggactactttcgctctctctctcctttgtgcatccctgtttgctcgcatggcgtcgttccccccagtgcgatccatgagtgtcgtcttcatggcttggagaagaaggggttcctccccttgaaagatatcttggggtggaggctagaagccgaggcccgagggtgaggtgcctcgccccagggatgatgaagtaatcgtgcttgcgtccttctacgagc

SEQ ID NO: 10471 - DNA, 503 bp, Zea Mays
ttggccgcggtggccttcggtgtccagtgaatcgctcgccggagtaccagcatcgccacggtgccgccgtatgccgcgagcaaggctaatctccatgccaaagacctgtaagtaatcctccctcgcgctcttcgtgtcctctgcgtgattaagtagcaatcgatattgggattggaaacctgtagctcggtaagaccccaccggcaatggcgccgccgctctgcgcacttccaccgccactattccgtcgtgggggtacatgaactctagggttggacggttaggattaaatcggccgcttaccgtttcatccattgaactcggatcgtggatcatccatccgatggccaggaggggtcatagttgcgggccgtttgatcgggatcgggcgctcggaaatcaatctgggcgttataaaatccgcggcgttgatttctaatcggacaattgaggtggctttttagaaaagagaccctctgttttcgtaaaataaacccgcggtc

SEQ ID NO: 10472 - DNA, 613 bp, Zea Mays
gcgcgagtttggagatgcgtcgtgggaggaaggccgactacctcgacatcccacttaaggacatcatcaaaggatggcgcctggaatggtttgtcgtggagaattacaggaattccctccccccacggtcagggagacagccagatgttcgcactccgagctagaccgaatcccccacagacctggaggtggctgagacaggggctctgcttgctaaggttggattgttgaaagagaggggtctgactgcagaagatgtggtcgccgatttcattttcaagaacattcagccactaaaggacagagcgtacccggcttatctgtatcgaggcctcgctgattcgacccgggttaccaacagaagaattccttctgtggatttggtcagctggctcaagatgatactcagaggcaaggtgtcgaacatcggtgctcctgttgcatactcagcctggaatctgcctccttccaaggcttttaccagttttgtgtcaaatcctcctactggtgatagcggtttgggccttagagtgcgaccctctcccgaagaggttagtgctttggttgcctcacttggtgaaatccctgacgacgagaggcaggttcatttcga

SEQ ID NO: 10473 - DNA, 506 bp, Zea Mays
ctgctcttgatcaagagctgggactttctctttcttctactaaaatatatgagacactattctagttaaataaattgttattattgccttattggagcaacggagctgcccttggaggaaagaggaaacgtaccccctctttccagaattgtgcatttgtacttggagggggtgcaggatgcatgcagaattgcagacgccctaggatcgttgtatactcctgcagcgtcaaccaactttggtcctctggtgtcgtatggtcagtgtcccccacttgaattcatacagtagtacagctctgcagcggcatcactgaatcactgccacctttttttgcatcctagacgacctagtacgtatctctctttacccacagaccacagctagctaaagctagccatcgtcttctggctctactcctacgtgtaatctttcagacacatggctccagaggtattaaaactgcagcaggtgaaacaaatagacagagagggacagaccaggct

SEQ ID NO: 10474 - DNA, 941 bp, Zea Mays
catgtcgtcctagcccttggcatttgtcccgtgaagcaagtcgttcctgtttgtgggccctcaaaatatctcccccgtgaccgtgagaaaggagaaagggaaccagaagcttccagcaacccccgtgagtttctttccagccatcgttccatctccactcatcgatttccactcctagattttgattcctctggtcgattctctcactccatgctcagatctagcagtgcccccctcctccaactctgattgaagccaaatttggagctggcgctcgtcctcgccatggacagcaatcgtcgccatccagatctcgtcgccagggatgacaagatcaaagcggagtgctgttggcgcagcacccgaatcaatcgcaggaagtctccagtcacaaatgcatgaccatttcctgtaaacaaaagccatgataccttacctagcttccactaacatggtcactggacaaggagtgaagagtagtctcatataattgtcggtcacaatcaagtctgtttggaagaatgcctaaagcctccagcctctctttgttcatatgggggatcttatacctattacctccacctcccttcattacttcaatcaagcagccttgcaatgtcaggtacactctatttagaagtgtagggtcataatcttcgaattccttgctaacattgtaaattaactcatctagattccttgagaccgtgtttagtgtaagggactgcaaggaagcgaagaagcctaaatcaagacaattcatgtcaggtgagtttggaggttgattcatgagtcttatattcagtcctgtttgagctgcagcgattacaaactcgggatcatcatgacgaacatgagtcctcgcattgtcctgctgaatccatatagttctatgtgcttctgatctaggccaacttgctttgatagctggtagaactttg

SEQ ID NO: 10475 - DNA, 528 bp, Zea Mays
cccgaagcatcttcttttcttcacataaattccgatgccaatccgcttgcacttccatagtattccaactgcagcattccgcaagatctcaagaaataaagggaaccatgaccagcagagacagatgcaacaagatgaacagaggtggcgcgccggccatcctagtatgcatgcatgggttttaagggttcttgttcttggcaaatggcaacagcatcgagcttggtgccgtctctgataatgcatgcttaaaagttaaaaagtgtgcctgccgaagcaacagcagcgcagtcttgtttttttcgagattcattcgctatcagacatcctgattgcaatcagagactccaacaggttacggatgctggccggggcttcagaatataatgccattccgccgttccagtcataccaatagcctgcctagcaatctcatgggcaatactattacataatctatactagtaacatgcaagagtcagctcctctatctccctgagaatcggtgtaatgactggccggcgtgtc

SEQ ID NO: 10476 - DNA, 750 bp, Zea Mays
gaaaaatagagcgccttcggatacaacacatcaaagttgtcagggacaattccgtggccgagaacaaaagccaaaaccttctcgataaggtggctgcgcttgaaaaagagaatgaagatctcgatcatcggctcaatgacgagaaggatgccgccgctgaggcgaagacggaggccgaaaatgcaagcgcgaaggcccaagctacccataagcgtgctgctgagcttgagctcgaggtgaagagtatgcgcgcctaccgcgagagaatggaggccgccacgcatgtgggtgtggactaggcacacacactttttgtggatgcgtaccgtggcctgggtgcgcagactgcccccttggacaagttggaaggggaggtggggactcgttttctcgggtggttgcaagaggagctagtctctcccgcccatcatgatgggcctgatgtcctacgcgtcgctcgtatcctgtgaaggggctgcgaatgccttggcccgcgagggctgcatgcacttcaaagctattggtgggatcctgccttagcaccatggtgccaccaccatctaccctcactatgtcaccagggtcccaccacgtcgtcgcaatgcaacaattgttgtcgcttgccattgcctacaaccacttgccctctctgcccctcgcatgttgctgcctcatcatcgtcatctcaaggcagactcgccacagcgacacgctgatgtggccgctttaccctggtgctctcccctcgtc

SEQ ID NO: 10477 - DNA, 1019 bp, Zea Mays
ggtcactcttttcctcctggggggtgacgtttttaacgaggcggcgccatgtaatataccaacaaaaagcccccgcaaaaaactccatatgtcattacaataagtgtcgaaaaagaccgctacgacggtcttcgacattggacatatacaaagtcaccgcgataggtagcatagactaccctcgcgtgcgacaaatccacgcaaaagtcgcctaagggtacagccggacaagcacaacaagtgcgcaatacgaagtctttactaaaagacaaatccgcgcaaaagtcgcctaagggtccagccggacaagcacaacaagtgcgcaatgcgaagtctttactaaaagacaaatccgcgccaaagccgcctaagggtgcagccggacatacattacgagtgcgtcgtacgaagtctttacgacaagtcatccaagcaaaagcccacacattgttgcggcaagcgaagtccccatctcatttcacaacaaacaatgtcatagtttacatacacacagcagagggccaccggccacattgtacaaataaatacctaccgcattttgccaccatccctcttaatcgtgagccgggggagggcagcatcttcgctcactatcgtgatacaagagcgagggcagcatacacgctacattgtctcagccttcgggataacgcccgcctcacgaaaattaaacaacatcatcttcaactcctcaccctcaaaaagattttgtagattccctccccaatacacgtcccagacgatgaggacaacaaatctcgttggccactccgatctacccgtagacgggttcgttacatccccatccgacgacgtctaccacttcgtgacatctcgccaccactatgcttcgacaccactcttcgacggtggtgctccacggacctcgccctagccgggggattagatgcttcgcgcacttccagccgcggcacagcctccaccgcggccacatccaacgcagcaaaataatccaaatccttgtccgaagactcccc

SEQ ID NO: 10478 - DNA, 766 bp, Zea Mays
gcatactgcgggggtccattaagtccttcaataaaatgctcatgcttcctctcatcctcagcaacttcatctggtgcatatctggatagctggataaacttgtcgtggtactcgctgactgacatactttcttgcttcagcgatagaaactccttcttcttaattttcatcaatccagcgggtatatgataattcctgaactgcgtactgaactctgcccatgtgatagtgtcagcagcatcgtgggcagcagtgtatgaatcccaccaatcagcagcaggacctgtcagacgtccagaagcatataaaaccttctcccggtccgtgcactgagcaatgttcaacatcttctctacggacttcaaccaatcatccacgtccagtggatcaggagaactagcaaatgttggtggcttatgactcatgaactcctggtgcttatctcggggtggaactggtggtggtggtggaggcagtggtacttgttgttgttgttgttgttgctgttgcgccctcctttcctggtgtatctcttctcgttcttggcgcagctctcgacgtatatcctcccgctcttggcgcatctcctggcgttcctgctgcatctgagcacgcatatctgccatagtgtccgccatttgttgcatcatcctcatctgagctacaactagtgggttaacttctgctggtggaggcggtggtggaggatccatctctgctagttgcggctggggttgtctagatatcctccgagtgtggcgattgg

SEQ ID NO: 10479 - DNA, 1287 bp, Zea Mays
tgcgcgcgctcactggtcgaccgggccctcgactcagtccctctcacgtacggcgtctagtcactggatggtgggacctacctgtcatctctatctcttcccccttcttcgttgtttctgttcctatccgcgtcaacaactcagactccgcgcggagctcacgcagtcggcgaacggagtccgcgacccgacctccaaccccgccgagatcttcgatgggcgacctataaggtccggccacctccgctcgtccagagacatcatgctgtgccagatatcctaacagacaaagaagttcgtcgtcttctccgcaattccgccctcaaattccactgcgtcgacgacaagcttgccccgtgctccttgtgtagatccccgccaacttcccccatgcacccgttgttgtgccactccctgtccatggggtcgcgacaacctcatcgccgccgccctgtgattcgccgtgaatcgcactgctcgtgtggacagccctgtcggcctcttcattctcggtaagaaatccactacctgcttcgtcctcatccaggaatcgcgtggcacatgcccctttcaaattagaacaccgtagcgccgggcgtggtgctcgccgaagtacagaggtggagccgtcgtcgtcgatacctgcatatccagaccacatagggcaggcatggggccggggtgattcactgtgccctcggaattgcactcgtatgcttctcagatggggagctgggcggcgttccgtgcgtggtgggcggtcaacagaccggttgccggactagcgccgctgggggatggccctgtgccgctgtgtcggtcgcctggggaggaagatgggctccttgtcgttcgatcgtgatcggacggtggtgatcaagctagaacgtactccttcaggcggtgaatcccaaccgttggcgcgtgatcggacgggagatagtgcatcatcggcatggatgattgttaaccgtggatctcggatccagtggtccgtattcaatatcggttcacaagtgaagtaaatctaatccgaacgctcgaattatgatccaacggcctgaattcacagataccccttcgcgggtatgttttataaaagaaaccctgggttttctcggattcaacccgccgtccttaccgggggcgctctgagtcttgagaatacttacccgttggcccctgaacttaccagaaaatgaggcgcggtccacagattaggaaaagcaggaaaaatatttagaaaatagtttttagtacaaacttaattgcagaaacttgtttaaa

SEQ ID NO: 10480 - DNA, 379 bp, Zea Mays
tcggatcggactggttaactgctaattattatcgtacgcgaagcaacaaagctctcagctgcagtccaactgaatgcttgtcagatcttcatcgagcgtcattgccattccatgacccggccggcacaagcactcgattgcatcacacactgcctgcaagcattcattcattcccccagtcgctaatccaatgcaagatctctccagccctgcactgcagccagccagctttcgtgtcccgtcgtcgcgcgcgctgcctgccgttctggagcaacaggacacgggcatgaatgcgacgacgcgctttcccgccaattattacggcctcgatatgatgtgtaccgtaccccccgcctgtttccgttcccagaaaccttct

SEQ ID NO: 10481 - DNA, 805 bp, Zea Mays
ggcgggttgatttcaactaagtgcaggggctctttagcacttttcacacgaccgaacgggtacgctgagatcccaaccgttcgatcagcatcagaccatccagattagatctgccttgattagaaccggtacacattcccacccgtccgatccacaaccaatgactcggattcaaaacggcagaaggggcatgttaggtttaatctcggccgccggccctagatccaacggccgagacctcatcttcttcaccagccgcacaccagggcacgacggtgccccacccgaccagactgcgacgcgccggagcacccccgcaccaacgcgtaagttcatgaaacctggcctcgaccagaactacgcaggaaggagaagaaagcgaacctttggggagggtctcacctagcatgggcggtgcagagggctccgcccacgtcgcagggcggtattgcggtggcggcttgatcctggtcaagcgcgattggaaggagggtccgcagagcttcaacggcgcatgccaagtcgcgctaggaggaggactccccggctgtaagataaggccacggtgcgagcaggtccaactccaagaccacgacggtggtgaatttgcaaggccacgctggcgacaatcctctctctctcaccgtcgtttctttgttcatttgggtgctcggttcttcggtgctgagttaggatggggacggtagacgcatggggaaggacgacagcgtagtccggtgctggttcccagtcggccgtgtgaatggcaggtgggaggactccattgcaggagagaacgtggcgg

SEQ ID NO: 10482 - DNA, 986 bp, Zea Mays
gctaactcgaaatatttcccagactcaggcttcccacatatagacggcgggttcatatgctaaaatatcaggggctttttcagaaaagggcgcgacaaagggaaaccgatcagatctggtcgtccgatccttggctgatggcgcggattagatcagacacccaccgaaccggtatgggctcgggatccttagatcatgactgaacggcccagattttatgaagctcaatctgttccgagctgtgcgatcataaatcaacgatcccgatcggagggcatatattacacgtgagggtgctacactcagggtttaatctggccgtccaatagccgatcaacggtgatccgatgacccagagacgtcttccccgcggccaacaccaagcggtggagcacgcgcacaccacacgacggcggccatggcaggcacgcccatctcccgcgctcgcacccaagcattgatccgaaaagcgctacacatagcaggggccaaggcgaacatgataggaccaacttaccgatggtttggaccgagaggagacccgaccacggcatggggcggtcccgcggcggagatagaattttggggacaaattccgcgccatcccgtcatgagcgccacccattgaggtaacgggcaagcatcagacgacccaaggaggagttcaggtcggtcgtcgaggctagggagacgatgaattgcacggccggcgacggcaggtgccttccgcaaccatggttacaccctcactctcacttccggattcaacggagtttctcggctcatcctccaacgcgccaagggtcaagggcaatggggagcaggaccatgattcgattcgcaccccacactgcctgtagttccttctttccctctctgttttcctctctcagtgtggcacgtcgtcaccgatggatgcgcaggtgctcggtgatgcggcgtctaattttataggggcaagcaaaacagactcggcggaatccgcg

SEQ ID NO: 10483 - DNA, 687 bp, Zea Mays
cgaccagcggactccacacgacgctctaaggacaccacaagcgcattagcatgatgggccaacctgacccctaggcaaggacattggagctagcatgagcatcatgacagtgagatgggctacccacgacagccacgacctccatcccccctgaggcagtggaggccacgtcctctgaatcagaggaaagaggcacgctccctcttgtcttcgcattagcagggcaggaggcctcttatttttcttcgcttgacgacactttgaatgcgccaccaaggtttccttccccgcgttccgacaaaacgtcatgaagaaggaactcaccacggtgctcacgacatccttaaaaagggggagggcgagtccccatctataaaggatccagacgatagcgtcgtgacaaccttgaccctagcctcgatctcgatcgacgcaagcagtgcaggggaatggcaattagggttgtcgatgctggaatactgatgtatcgacctctaacaggccatcagaggcttaacccggcgatgcataaaggtgtgcaccagccgtgcgatggtgagaccttgttgcttcaatgtggaccaccataagaagattccccacctcgctcatagggttcgcttccgccccgtggtgacactcctctatcgacactagttcccgatcgaaaaacgacggggctctttc

SEQ ID NO: 10484 - DNA, 382 bp, Zea Mays
ccccctgtgggttctgctcagggtgctggtggtggaggagtgcctggggcgctgtccctgcgggtgctgctccaggtggcggggctgaggtgcctcttccagtcagtggtctttctctgatgcagtggatgggcatgaagttggacacttttgatggcagtggtactccggtcgaggtggcagattggctaacttacgtggaggatatgatgaatgtctttgagattgtgtatggtgatcgtgttcgctttggcacacagctactgaagggagaggctcaaatttggtggagaggcgtgcaggcagcgcactcctcctcaccaggagtcctgtcttgggatgtcttcatcaggtagtttgaaaggaggttctacccggtcac

SEQ ID NO: 10485 - DNA, 792 bp, Zea Mays
cctcttgagaacgtaatccttcctcagctagtgcgatgagctcactcaaccttgatgtgtcgtcctcctcttctccatgtaatcctgcctctgcgagagcgataagctcactcaacctagatgtgtcgtcctcctcctcctccatttgctcaaccgtcgccattttatcctgaacatatcttgcatgcgcctcatcggccaaatagtttacgccacatccaatctctgcaaatataatgagaaaaataagttagcaaagtcaagataaataaattgtactaacaaaattatagtatcatttttctcactcacttcccttgaggcgatcagcaagattatccaacatctgtttctcggctcaagcgcttcccattcccttgcatcctatgctctcgtctcatctgccgccttcaacctcctatactctgcacgtttcgggctgtcataaaaggcagatttcgcgtacctacgcatgtcgcgtatgcgatcattaatgtacgaatcgacgagctgagatccacaacacatcttctgtcccattagtctcttggactctattgtgcgcatcacctctcctttgtcgtcgtaactctcccaactgcatttcctcatctcctacaaaaaatagtaagtaccgctataacattacaactggtgcaaaaaaataaataaataccaacctcatcgtaatcgaccatatgtccacaaaaatatccaacaccaagctcggaaggaactaatccatatttatcttcaataccacatttgcagagtactggatcaaacttcaac

SEQ ID NO: 10486 - DNA, 1406 bp, Zea Mays
ttccatgaacttagagagttgccgttaggcaatcatcaagaactcctcatactggacatgtccaattgtcataaaatccaaattttacccatgtcattttgcaatctcctacatttagaggatctcaatttgtcatgctgttatgaacttcaagaactgccagaagattttggaaaaaatcgtgggcttcgtattctggatctaagtaactgccacagacttcagacattgcctgattcctttactgaccttgtaaacatagagaaactgatcttatccgattgctgggagctagtacagcttccagaactgcttgggttcctacagaaaattcaggttttggacctatcatgttgttcacagctttttgcattgcctgagagtgttactaagctcacaaatttagagcacctaaatctgtcatgctgcattagccttgaaaagatgcctggagactacggcagcttaaagaaacttaagcttctgaacatatcatattgttttaaggtccgtatccctaatggcatagccaatatgtctaacctgaaatgtttgatggcggttgggttggacggttactcttgtgggaataaggatgatttcaatattgtaagtagcttactgtgtatgcctaggatagatttgagtaaaaaggacagccccattggtgacttccatgggatcttgaagcacaaaagactacatctttttggtctcggcaacgtgcaaagcattgatgagtttgagaacttgggattatgcaggcatcagcagctcaactcactaagacttagtagctcctacatgaatggtaatgaagtggctaaatttatcccagatgacattgtacttgaaaagatcatacctccaaggaccctggaacactttgaacttttgggctatcatggttcagaatttcctgagtggatgctgaatctgacaaccattttgccaaaccttgtacaccttaagctttctggccttgctacatgtgaccatctgccgcctcttggccagctaccaaatttgcagtccctggtcatagaatgtataccaaatgtcaaggctgttggagaagtttttgctggtggcagcagagcgtttctgaaattaagggacctcactatcagtggtatgccaaacctagaaaggtggctgacaactctatcaactaccaatgaagaggcccatgtgtatgtgttccctaaccttcaccatctgaaggtgtcatggtgcccaaagttgatatttgaaccatctcttccacagtgccttttattggaaattgatgcatgtggtgagatcttgcaaggatggacagcctcacattcacaaataaaccttaggccaacaagaaggttaagcttccagttctgtgacttatcattttcaaggggggaccaact

SEQ ID NO: 10487 - DNA, 492 bp, Zea Mays
caacgaacttgcccctcgacgcccggcgaagctcacaactctgactttgcaccctgaacagccatacgcgccaaactccccgacgacattcctttctctcctcccccatggtggtcgcggcgggtcctttccctaactctacacggtgacttggtgtcgcgcggcaaagggaaggaggggacgggattcagcaccgcttcttatgctcgccacaaggtcggttgggacgcccgccccggattccacgtcaacggtgtgcatccgccatgcacggcgaagttgttagggaagggggcaaactgacagcatggccccacaacctggtgtaacgcgagcgctacgggaaaggaaaggggactggccaccagggcccattcgtcagtgaacgggtgcgcggggcacgacgactgcacggtggggaaagctaatgggccgccggtaggagattgggcccaagtgtacagttatgtttgtttgttttttcttttaatt

SEQ ID NO: 10488 - DNA, 377 bp, Zea Mays
tcgttccaagcgataggacatacgcgccactccttgtgcatgcaatcgatgttgtcgagcatcctaggaaatctaccagtctcaaccactatgtagtaagtgtgtctaatcctcaatgattggagtgcacaagtaaaactatctaaatgcagttatggtggccttacaaaagtgtttgagcatcttgtgtgtagtagactcatcgattcgtgtgtacttgtctattgaaaatccccaagaacatcgtacacaagaatgtgaatggtgtccaccaccttctgcagtgtggtaagccctagttgaatagtgcagttaggtctctacatgggttgacctgctagatggtgtcaacaatgcgtagaaagacatggcaccac

SEQ ID NO: 10489 - DNA, 782 bp, Zea Mays
gtgttggcagcgtagggcccgagcaccatcattcaagctacgtcgacccttggtattcgtagcctgggcctcggtgcggcttgtccagttgtgcccatcaagcggtctacccacaggcctagtcccaatagaacatgagtgcgtcgcagaccaggggcataagggccataaatgcgctgcaatccaaggggttcataggttatgagtgcgctgcagcgcaaggggttcggaggccatgagtgggaagtggacagatgcaactgccgtggctcgactccaggtgtagttaatgcgtctggtcacttatggcgggtcggtcttgggccgagcgagggatccacttgattggtttcccttcggctcacatgaccccctgtctagctctgccatgcccgaccccaggctctatgtcacgggattcatctgggggccgatacttctagggaagacgtttcctttctccaccagctgaccgatggccctagtcgccagaggcttttccccagcgcgctcgctgactgatgggccctagtcaccataggcttttccctagcatgctcgctggccgatgggccccagtcaccggggatcttttccccaacacaagtatgaaatacttgtaagagacatccacttagacttttaaatcttaaatttcactttaaaagataatgacacatgaaggtaatcatcacttatgagttatatttagcgtgatgtatctataattttgaatttagacatataagataaacctacttaagaaacaagctacttatgcc

SEQ ID NO: 10490 - DNA, 901 bp, Zea Mays
ggggtggctcttggccttatatacacgaccaagtgtagctatccccacattggtgacaaatgtaatccattcgcctatttctcggtttgtagcgaaatgtcctcctacatcttgggaactccctgcgctcatccgcccgagttaccaccggaggcttagcttgtcgggtgggcgcaatcgtcatgctagacatacttgtgctctcatggtgcctaaattagatgttggcctttgctggttcagaatgggcttgcttcgcctggttactttcggccggcccaccacaggacgccctagggggatgcctgctaggtggccccagatgtgttttcatgcgcatgtggacccgagggatatctatcccccacaagccccccgagctttgaattgattttgagtaatcaactcaaaggtcattattgttcgcttttgagtttagcgtttttcccttggctttcctgtgtctgttgggtgcaccgaagatgcacccaatgggtgtagccccttagatttgaattgattttgagtaaccaactcaaatgtcattaatgttcgcttttgagtttagtgttcttccctgggctttcctgtgtccattgggtgcaccgaaggtgcaccaaatgggtgtagcccacaagctttgaattgatttcgagtaatcaactcaaaggtcttttaaacctgcactcagaagattttgatgtaatccagcggtgacgtctgtccacccctagcttggtttgaattcgttccgactggatgccttgatgaataggagtctagtcggccgagcctaaaccaggagaagtctggctagacgacacttgaccaaggacttcaatgcttctgctgattggacttttgcccgatagagtcctaattgccttcagttttaccgatc

SEQ ID NO: 10491 - DNA, 427 bp, Zea Mays
caagtgcgcaacatcgaagtcttcctcaaaagactatccgtgcaaaagtcgcctaagggtgcagccggactagcacaacaagtgcgcaacatcgaagtcttcctcaaaagactatccgtgcaaaagtcgcctaagggtgcagccggactagcacaacaaatgcgcaaaatcaaagtcttcctaaaaagatcaagtgcacaagtcctctacgggcacgaccggatcagcgaaggcacacagcctcatcatacaaatcatagttacatacatgcagcgagggcatcacaccttacattggttcaaccttcgggatgatacccatctccctgtagttaaacaacattatcctcagctcctcaccctcaaaaagattccacagctccccctctcctacactcgccccagccggcgaggacaacaattcccg

SEQ ID NO: 10492 - DNA, 412 bp, Zea Mays
gtccgacgctgtcacatcgggcgagtggggtcctggtggctagatccttcacagaaaaaccagaggggtcaaactcaatggaacaagaattgtcggtggtgaaccgacggacggaaaggagattgtgtgtgatgtgtggggctacgagaacgtcgttgagatagaacggtctagggagcaccaaggcacctactgaggtgactggaagagtggaactgtttccaacgacgatcgaggtagggtgtgtggaaggaggtgggtgtgagcgagatagcatgcctgcgatgggggtggtgtggtaggatgcaccggagtcgatgacccagttagaagatggtggagccaacgccatggtgttgtatgcggcggcgagagaggctgggtcccagcctccagcgaatggggaccaggg

SEQ ID NO: 10493 - DNA, 330 bp, Zea Mays
gggttttgcatgcctgctctttctgcgtctgtttgcccttgtgccgggcgcctgttccggcgttgtccctcttctttctctcctgcctagccgcttggcaactcactcactccactcgggcggcaaagcgggcgggcgggcaagccaaaacaaggcgaataggcggtgcgtatgcttggtcgatggcgcagcaggcggaggatatatatactccgtggagcagatacttctgacactgatcactggaactgcaggaaggtgccttcagattaacgcataagccatcgtgtgaagctgactgccggttaaacgtccattcgtccacactgc

SEQ ID NO: 10494 - DNA, 639 bp, Zea Mays
gcaggttctgaccatcgatacgaggtcggggcactgttggttgccaccaggacctgccaatcagtgagcttctgttgccttttgttctcctaggacccatggcccccaaacatgccattgacctccctatcaatgcgcaggaaagctctgccaccacccccacctgctattatggttgatcttgctcgacaggttctcctcgtggtggggacggcagcggatggaacggtcgaccgtggccgatagagtttttggattccttgcaattccgtagggtgtggcacatttccttatggtacgggcactgggagtcgatgatctcgtccagtgttcgtatgttgcctcgtggcacgctgcggggctgagtcgtcgagggcccagcggcgtgcacttcttctctgagcctcttgtcctagtgcttgtcctactgctagttcctacccttctttggtgccgagggtgcaggcttcatgtggccgatgaggtcatgagctcgttcgtctatggtgatgtagatgtctgcctcccagaacaactgttctgaggtgatgggagccttctggaggatggcccggacaaaggatgagtcgttagacttatggtagaagtccttgatcacgacagcctcatggtttggaa

SEQ ID NO: 10495 - DNA, 387 bp, Zea Mays
ccttgtttttaagtttgagtgcatcttaggtccaataagggaattacctaaacatctatttgtatttgcacgagtttggccatgtagtaggaatcgataattcaaactcatgcatcttttgaagatttagagggactttgaagaaatgacaaaattatgaattagatctcatacaatttcacatgttgagatgatgaggacatgacttggtctaattgctagaactccaataatcttgtgaagaaaatgatcttcacacaagacgacacctaggataggttgtcaagaaattaatacacgattagatcaaggttcactaaacagggacatgacctagctttgggtttatgcaaacaaactacctgcattctactagcacacaagcac

SEQ ID NO: 10496 - DNA, 443 bp, Zea Mays
cacgaacacatttactgtttggtcgatggccaatgatcccatgacacgtcgttttattcaacgcacttggtcgatatacacgcttggtcggcgtctgggtggtcgaggacgacgacaagttgacaccgcacccggtcgggcttgtgtccattgttatctcgctttcttttatttgctttatgtttattagttattaaagcagtattagtatatagagtgtgaaagtacagagggcacagttaagatggtaggttcgttttcttttaatatcttggttaaaagtggaggaagtatctattctctataaatcgctttcgttctctctccttatcgcttaatttctctctctctccgaggtgttagtggcccttttcggaccaaagtgaagctgggctgaatattggggcgcttgacacatacggtcaggaaatattttgttcccg

SEQ ID NO: 10497 - DNA, 479 bp, Zea Mays
cggaaaacgtatttgggggaaacacgaaatttggagactctggtggatgatccgaggcaatggctggtgcgttggatgcgtaattacctagcggaactcactggggcagcaatttatagagtcctacgatggtggcgtctaattttgagaaggcgcgctcgcgaccggagagaggggaagtcactagcgcaagcgctattgtggcttttaccggggcagtgtctcaggcaatgagcaagctacctaaggcggtctactgcgacgtggtaaggctttgagacacgtagcctggccggataacggtgaactctggtgatgccagagcgattgaccgcggagggacacgacgaccggtacggcaagcagccggattcaccccgcactggatattttcaccccgccccgacgttatctactcttcccatggcatgaatctcccaggcgagcgttaattgtggcggcagatcatcggcgtcgag

SEQ ID NO: 10498 - DNA, 375 bp, Zea Mays
ggccaatcgtttgggcagacggcctcatattccgtgacaaattaattaattagtttgccaagatcccgccggagagcaccggtgcagcaagcaagctaccgcgcgacgactcacggaatctacctatctttgcagccaatggcgtcaggtcaaacttgtgtagtgaggggcccaagagataacctagcggcctaccgtggactggactggaatcatggctcctgaagaaacgtggagagaagaaatgtggaggaggggcatggtggtggctcgtaactcccaattattggtgcgtcctgcaccgcactgattgctgggctcgtcagcgatgtcgtcactcgtcagctcgcggcgtctcggagcccaccacctgaa

SEQ ID NO: 10499 - DNA, 820 bp, Zea Mays
tcccccccgaaccggtacgagatcccggccacaggatcctaatcttacggtcatgattttatgagatgagatccaacaggatctgtctgttaacagatcagtggcccagatcgttcacgcgaaagggtatgccaagctctaatccctaccatccatcgggaatcgacggtcacaaggttctctccctccacgacagtcgaccatggcggcgccgccgacccacggcagaggggtagtcggatccacgccaatcgatggtgcaagacactagtccctattctgaaggtggctacatgatttagagaatacggcgaatgcgtggtatgaaatcttaccagagattacattggtgggacaactcggcgacgacaacggcggacccggccgcaccgagccaacactggtgagaaattgcgggtcccccgatcgacaattccaccgagcgaagcccagtgtgacatccacgcatctagtcgaagcccctagacccaccggttgaatcccgagcagaagcgtgggcgagttccacggcggcggaaccttgacccgcagcaatggcgcccttgcttttgcccatgaccgcggtatgagtgggacgacaaggggatgaatagatcaagggggagcgagttcactttatccgggagttggcgcaatggctccgcacgtgagccacaacagaaatccgaccttactggcgtactgacttcgcgcgggcggttgagtcgtggagctcgaaaatcccgggacaccgagcgggttgttgaggaggggataagcctgacgagtgggccccaccgcgacagaggtagaggcatcg

SEQ ID NO: 10500 - DNA, 311 bp, Zea Mays
atggggaagtctataaattatattccatgccctccaatatccacatccaaacggagcattatacttcaacactccaactcacttgtagccacagataaggcgcaaacgtggaaataaaggagtggactaaatgatgcctctactaggactcaaacacgagacctctaactttgataccatgttaggtttcatgcaacaactagatgaactcaaaagcttaagttgttgggaagaggtgggcaatccacttatatttcaacacggggaacttatccttgctttgaattttgcccaaatttatgttttgatgt

SEQ ID NO: 10501 - DNA, 390 bp, Zea Mays
aatgatggcgcttgggccccacgctacccgcgccgtccgctataaagaatacgagacaaccagatgaccctgggacccacggacgcacgtggcttcaccccatggtagaacgctcagatttaccatcgtccagtgactccttcttgaggaagccaccgccggacgatcccttccttggcttgtaagaggagaaggttggtccccatacacaaaggaggacaacctagggggtgaacaactcgggagacaagcaaatgagaagacgtccaaacggacacctaaacacaaagacgatagattgacgggaggaaggaggacgcactaacgaggacctaaaggccgaagccccccgccaagtcaagacttagttaggactctactctgtagccc

SEQ ID NO: 10502 - DNA, 302 bp, Zea Mays
tgggcatcctcacagtcctcctccggacggccataaggttggtacctagcatccatttttgttattcttacctccttcctcgtcttccccgtctctgcctcgcatttttcggatctccttcctccgtcttccttgtcttccagatctgatttcttgccgacgccgctgggattgcctgttgcactgatgccgttcgtgacctagctcgggtggaggcggtcgtggtcgtaggtttgtttggctaactacgcttgcttccgcatcttagtcctctgcttagtgtgcgttcttctttgcttcct

SEQ ID NO: 10503 - DNA, 500 bp, Zea Mays
ggttctactatgttctatagttagaagactgatggtggagtccggacctcagaggggagcaccggcgggcggacggacggagcgtgcagtgcaggactacgtccacaccacagccgaacgaactactgtaaccggccgggcgacgatggtgatacttgcttgcggtgaagctagcggtaccagtcagtactcgcgtaaccctaaactggagaaggatcacgacgtgactgccaagttttcctactacacctcctctgttccattccacgcacgctacaccacacacacacacacacacacccccacgccgtctgtcctctgacggtctctatcacgtcgctgtctagctaacgtacgctccacggacggtccagtccagtaataacaataacaacaaggcagtctggtctggcagtcgtcgcttcaaagaccgacggctcgctaccacgctgtgtcgtggcgtcgccgtcgtctggctaggcagcggatccgatcgcgca

SEQ ID NO: 10504 - DNA, 273 bp, Zea Mays
tagcttttcttcgtgccgccggtgctgactctgaggtgcacctcacatatctgcctggccttctgactcttttgactaccagcggcaggtatgttgaggaatgggtccgagtattctacgcgactgtatggatcgaccctgaccatcactggatgaggtttcgttttgaacgagaggatgtcactattactgccagtcagattcgccagctctttggatttcccgagtcgacgactcgacttcacagcctctgctacggcacctctgaccctc

SEQ ID NO: 10505 - DNA, 599 bp, Zea Mays
tcacacaaagatcatctgattcctttgtgggggacatgatagaggaattcagagatctcgataaactaggacaggggtttacatcgaccgatcctttggaggagatcgacataggagatggtaaaactccaaggccgacttttgtaaacaagaccctggagaccgatcctagaaatgaaatgattggtctattgaaggaatattcggattgctttgcttggaattacactgagatgccgggattaagctgagagatcgtagagcatcggcttcccattaagtccggtttcagacctttcaagcagaaagctagaacatttcgtccagaccttctcccatgaatcaaggacaaaatccaccggctgctagaagctgattttattagaccttgcagatatgcagagtgggtctccaatattgtgccggtggagaagaaggagtcaggtaagcttagagtatgcattgattttcgcaatttaaatagagtaactcctaaagatgagtatcccatgcccatagccaacacattaatcaataatgcatcagggaatagaattattagctttcttgatggtaatgccggatataatcagattttc

SEQ ID NO: 10506 - DNA, 763 bp, Zea Mays
gcactgcactggtatgtaactgtaacgttgtactctccctgactgacacgacttgcatgctctagcccaggttattcgtcccggaggataggacgcttgggcttacatcagcctccgagtcgatcggccggtggtcaactaatgaaacccgtttcatttttgaactaatgaaagagagtatatattagtgaaaaaggtacataaacggaatattatttatttcttcacgtaacaaaaaagtgcataacatgctacgaaaagacaaagtaaaaatatatgtatgtatgaaaccccatgcatgtgctaattattgcaagttttataaaattagtgggtgtgcacagcattgtgctagctagctagctagcttgtcttcattaattaatatacaccgccatccaattaacaagaatattaaagcgtgcactgcatatatagagaggtaatccaacaattaataattgtgtaatggtttgttaggcgacgcgcgcgcgcgcatgcaatgcaatgcaagagggtttgttaggcgatcctccatctcgcaattatttgcgacagctcgaatgtgtactagctactcccacttttttcttgttcttgctccgcatcctgtctccgaactggcgtcctccacgtccctttgctgtgtgatagatggtccgatggatcagctaactccaatcatcccctgcatggctgcatgcaaaagtcgtgtcgttgcacgcctgaaaagtactacatgaaagtctacttctcaaatccc

SEQ ID NO: 10507 - DNA, 797 bp, Zea Mays
tgacaactgatccggagggatctgcttccaataatccttgatttctctgctgctgcagctctccacgatcgtcctcaaggttgaccttgaatgcgagacatgctacaaaaagatcagaaaagtcctccgcacaatccaaggtgaggtgcaggctgcagtgctgtactaccgctctcgtcacagttcattcatagatgcagacgtctctctgcggccgtggcctactggcctgcctggtgtcctcgctgacatgtgggcctgctgccgtcacacgaatgcatgagtgtttatctggccagttggtgcggtcagatgttttacaactgtttcgtgttttattattaaatgtaataataataataatcatcatcatcgttatgatcgtacatgagcatggctgattctgactgatttggattgcgcagacaagatgaacatcgagacgatctcgtttgatgagaagagcaatgccgtgacgatctccgggccgttcgactccgacatggtctgcaacaggctctgctgcaaggccggcagggtcatcaaggagatggacgtcaaaggcaacgagaaggacgccaaggccaaaggaggaggcggcggcgataagcccaaagacgccgccaaaccggcggccgaggaggagggcggcaattcggagatgaaggcggagaaggccgagaagaaggagggcaagggcgacaaggaggataccaagtcagacagggcagagaaaggaaacaaagacgggaaggcggaggccgagacggtggagttcgacctcgacgtggacggcg

SEQ ID NO: 10508 - DNA, 411 bp, Zea Mays
cgatcaacttcctaaaccggtatgcactgagcaccgctgatccccagatctggggccagattttatgaaacccaattaacccacaaccgccagattcaaaatctatggcccccgctgcccggtatccaacccccaatccacaccgttgattaaccccatcaacggccatgacgttcccttcttccctgagccagaccgagcggcggcgcacatgactacaccactaccgaaagtcaccggcgagcgaccgatccgaccctgggcgcaccataccccaatccggccacgcaacacaatggggaaacggacacgagtcgtttggtggggttcttaccattgagggttgcgtagagatccccgcccacggagatgtgccgtcctccgcggtcatcgttgctccggtgagcaatt

SEQ ID NO: 10509 - DNA, 407 bp, Zea Mays
atccggatccggtcggtcatgcatgcctcttggtctcgggtgccgagcgcatgcacacacgcgacggcaatgcagcatgatcggagagcaccagctcgtccccatgctacaggagtgctgctacctgttaagaaccccttgctaccgagtgtagtccaagagctgcttaactgaataatagtagaacacaaggagacaagagtgtagagaggaactgattctttgttactatatggtgctgctctccaaaggttacatgatatggggatctcctctctatttatagacaaaactagggtttcaggcatatgggccacataggccttcctggcccaagaaaggtttcttaacactcccccttggcccaatgccgcgagatgcatatgtcccaaaactccataaaaacc

SEQ ID NO: 10510 - DNA, 604 bp, Zea Mays
atcgaagtcttttatttaaaaggcactccacgcaaaagtcgcctaagggtgcagccggaatagcacaacaagtgtgttaatcgaagtcttttatttaaaagacacttcgtgcaaaagtcgcctaggggtgcagccggaatagcacaacaagtgcgttaatcgaagtctctcattaaaaagacactccgcgcaaagtcaaccacgggcgcagccgaatcaacacaggcgtacgaatacggcgaacaggccacattaccatacaaattacagttacatacacacgacgagggcatcacatattacatcagctcaaccttcgggatgatacccatctccctgtaattgaacagcattatcctcaattcctcaccctcaaaaagattccgaagatccccctcgcctttgctcgccccaatcggcgaggacaacaattctcgtttaccaacccggtctactcggagatgaccacgatccatccccatacaacggtgcctaccacttcgcaaaattcacccacactacgttttcccaccacccttcaccgcctatacctagtactcgcactagcaagatccccggcaccctccatactcggcgaagtctc

SEQ ID NO: 10511 - DNA, 1360 bp, Zea Mays
agtatggaggctctaaccaccttcttttcttcttaatataatgatacataactctcctacatgttcaagaaaaaacttccctagttctgcttttataatatttgatttgttgactgactgacattctttcttttttcttgacagggtatagatataaaatcaccctttctatggccttacaatagagggatatctttttcttgctggttaagggttgaaaacttcccagacagtggtatgatgggccttttctccttttttaaagaagacgggaaggggtgctcagctgttcttaacagaagtgctttagtatatgaggtattgtgattttcttccctatttttcgaatcaaatcaagttatttagtttagaaatatttattggatgtgtatttactttgcaacaaataggtgtgccattaattaactagtgtatgctagtatataaacattatttacctttaatggagccactctttaattaaactagtttgaatcagatgggttttgacagaaattgatgatttggtcttcacaactcagcttcttgtgtaatatattttgggtgtagatgctgatacttttttgctaaacttggttgaagttagatgagtttgacttaagataaaactaaaatgacttaacaatttgaaacggagggagtagatgagaccttggctgcatctgatcattgatcttggttacatcagttgaccatattccaccatttattggtttccagcttgcttgacaaataaatggaagttgagataacaaaagctcagtaggaacatacttgttttgtaagtaaatttaagaaatgggttgaatccaatggaaccattttgtgggaaaaaggtgcatctaggccatatggatccatttgtaatgttacatgattttgatgtctttgcaatatgcatttgactcatgatgtagtaatgttgattcccgtttgaagaaatttcagttattttttgtagtttcatatgatatttatgggttaagactgattgtttataggttttcaaacaaatctctagctgagcttagagacattttttcctttaatatggacttttgagtctctagagtataaagtacttcatgtttgtttttcccataggagttgtcagtaccttactctacacaacttgaatttgtaactttcgcagggataacaaacccatgctaaactctggtctttccctgttggcagtctatctatcaaaaacatcagtgtgttctgttaccactcaagctcccaccaaagcaatggagattcctttctattactcatacaattgggagggctttctccggaggaagccagttgaggtgttatgtagatggggagctag

SEQ ID NO: 10512 - DNA, 386 bp, Zea Mays
cgctttctcgccccacctccatcatcttgtgttgccccacccttgcctgtgctgcctctgcctccacttggcatcgatgtcttggccaccttggttccgacgtactttttagactcttgtccacctcgaccattccctgtccccgctgcaacactacctcgccttgccatctttgtcagcttggtcgccacactcgcttactgggctgagggcctccacacttccacctattctcatgaaccgcctcccctccaaggcggatagtcatcccactcctttcttcggcctctttggcgctgttagactcctgttaggattaggcttgggtccatttgtatttacctgattacccctatgtcatgggcttggcccacctaacaagtcta

SEQ ID NO: 10513 - DNA, 326 bp, Zea Mays
taaaattcaacttcgtatccatattctcatgaaaacttttccaaaatctggaggtaaactgtgatcctctatccaaaatgatcttctttggtactctatgtaaacacacaatccgagccatatataactctgccagttgagagcctttataagtagtcttgacaggaatgaagtgagccactttagtcaatctatccataataacccatatagaatcatatcctttcgaggtgcgaggcaatccagtaatgaaatccataccaatatcttcccacttccactcgggtatctttattggatgcagtagtccagctggcctctggtgt

SEQ ID NO: 10514 - DNA, 618 bp, Zea Mays
cagcgcccgccgggcagcccagcccgccagaaaatggcaggcacggggtcgggccggtgtcggggtgcggggcataaggcccagcctcccccatcccgtcttagactcctagtgtcccactcccacacgattcgctcatccgtcatccgcccgccatgccatcactgcctcgccgtcaccatcaccactgccggatcttcgtcactgtgacatcggtgggtctcctactctccttccatgcggctttcccctctccgtctctccttcggtccctccccaatccagaaatccctaaccctaatcacgtcattgtcggttgtcggctcgtcgcgcgtcgtcgtgcacttgacccttgtctctggctccaggctccgacttggcaggtacatccctctctggctctccctccctagtcggtaatccctaaccctaaccctaatctcctctttgctgcttgcttgtgggatttggtaggtcgtgggtcgactacgtcgtggtcgtgctaatgccggcagggccgttgaggtactgtgtcgagaagggggacatggatgacgacgatgacaacagccggtaccctagaaccatcaacgatgagctcgttgagttagggcagct

SEQ ID NO: 10515 - DNA, 385 bp, Zea Mays
agctgatttgatgaccagagcaggcaggagaatactagtgcaacatgtgctcacaggtatgactgtgtatctggcaatggcaattgatataccccactgggcagttgatgctatagataaaataagaaagggctttctttggagaggaagaaaagaagctaaagggggccattgtttggtggcttggggcaaggtgtgtcgcccacttcagcttggtggactgggtatctctagtctaccggaacttggatgggccctccggatgcgatggctgtggctacataaaaccgactctagaagaccttggacagggcttcctattcaggtaggtaatggacataataccctcttctggtctgataactggttgcagggcaaaagcatc

SEQ ID NO: 10516 - DNA, 740 bp, Zea Mays
atatttacctctaaaaaaactctactacccatttaaacatttcagtttatatgaccatgaccttcctgtcttctgagaccctctcatgttccgttgataagtcgctatctttttggcaatttgtactctcttggtcttaattattctcgtaccattggaatcttgcatactcttatttttatatatgcttacctttatatcccaatatctgtttgagacatttcagttaacatgcccttgaccacccttgtttcttaatgatccatgagcggtcattctactttgcatatccttggtgatctcgttgtctccttgtaactccactcggtaatgaatctttacttcaacccttctgttggaaccttacctatcttacccttgattgttttctccactttgtcgtttcgcgagtctcgccttaactatatcctttgttatgcttttaattattatcatatgcacccttgacacctctatatcctacatcgatgtttgtctcatacctgtcctttaaaatcgcccctcttccgtctcataccttctttctcttgatcatatcctcttctttggctcgcgagtttgtaacctcatcctttgttgtgcttttgtctcttattgcatttacccttctcatctctcaatcttaccttggtaattatgctatgttcgttatctaaaacctccaatctcccaccttagttcaagtgtggtctcttacttatctcacccgtggttatatc

SEQ ID NO: 10517 - DNA, 529 bp, Zea Mays
agttaggtgggtggggtttttggtaatatccattgtgtgtgaccagtggggtgttacagttggtatcaaaggataggctgtaggtcctagcaagtggagtaataataaattgacacactgcacatgtaggatgggatttctggcttgctattgatatgttatgttattgcatgtgctagtttggcattatctgaagagatgttatgccaatcttatttactaattattctcatccctgtggctgcagctatgccgcctcgtagggctcggagtagtccgcaagctcctagtggggactcgatgagtccggcggcaatgttagccgcgatgcaggccatgcagcaggagttggcccttctgaggcaagccattcctgtcacccctacgggtgctggaggtggagaagtgcccgggggcgctgtccctgtgggtgttgttccaggtggcggggccgaggtgcctctttcagtcagtggtctttctctgatgcagtggatgggcatgaagttggattcttttgatggcagtg

SEQ ID NO: 10518 - DNA, 483 bp, Zea Mays
cgacagttacgagcatcctcagggtatataaggtgttacatgtagccctgtctcgtctattggttgtggtggccatcaagtccctgtacacccaagggatacaccgagcgtgggcaacaagagataacggagggagagaaggagaagtcgtcgttgttgaagaacaagttgtggcgcgccaccccttggtccttggagggtggccgtgaggaatcactggggcaagccacacgttcctagaggctagccgagcgtagggagcgatcagagtattgggcctcgctcgccggagttgaaaaagatcgagtgctaccctgtgccatggaccagatcggttgacaccttattcactggtaagacgcctcaacctagcttgccatggtctctgtattgtgtatttgtgttttgcggtgagggttgggtgtcgggttatcagatgattgtgcgtgccgacgatggcctccgtcttgtgctgcgcggtgt

SEQ ID NO: 10519 - DNA, 555 bp, Zea Mays
tggcatggggtcctcaggggctggacggtaggaaccaaagtgtaggcgtgaggcctcaagagtgccctgaaactgcggtggccggatcagttatgcgaagatgtggcaaagatagtgagcatacggcagctgacgccgggcacgaagtccatccaacacggtgtcctcgatctaacaaatgaggaaatccacaacgtcaaacttggagtgagagaccagggcacctaggagccaaagctgaatatgagtggcagcctccctgtaacccatccgtggcagaagcgtccgcctcatgagctgatatagaaacttggccgctgtggtgaagtctgccggagaacatcgcgacccatctgagaagggcagccagaacaaagccgcgatgtgagctataccaggagtaactccgccgtgagggcgtcgaggaggatcagaggtatcgtagcacaagctgtgaagacgagtcgatgactcgggaaatccaaacagctggcgaatctggctagcatgaatagtgacatcctctctctcaaatcggaatctcatccagtggtg

SEQ ID NO: 10520 - DNA, 564 bp, Zea Mays
ttttcgcctattcatcctctttaagcgactttcaggttgtcaccgtgggtgagtgcaacaatgaggaccgagagctagtacatcacctacaaagcatcaatacggcaccacatcaacacatattatccgagagatggagagaggatagggaacgtgggatgtgacacactcactgatagtttgaacgttggggacgaagacaggtagacagagaaggccatgacgcaactgagggtggcgctctggtgatggaagtggaggttgaagcgtcgaacaaccctcgcccgtcgtcgtggccgtccattcctcgctgtcatcactccctggccccgacgcctccctccctctccccaacatcccacctaagacagatgaggacaaaggagaggtgtaatgtccataaaattgcattaaatccatgatgcgaatccccctattttcaatggtaggctacaaacaactttataatgacatttgggcgaattgtactcgatcgactgaggctatctctagtagtttacccatctatactcatattcaaactttattaaacaaacattgcag

SEQ ID NO: 10521 - DNA, 916 bp, Zea Mays
atccctcaccgatctagcgaccataacatctctcccctcctccgagaacagctcgtcctcgagctgaaaatgggggtaggaagacgtgaactgttgcaatggctcccaagtagcttctgtcggctgtgttccactccattgtacctgaacatgccagacacctcgttgtattcttgctttgagcaccttctctggtgagggcagcagtcgaccattttccattgctagaagagcaggaggtagcactggtgggacgcctctgtatggtttgaggagaccaacgtgaaagacgtcatggatgtatgctcccgttgggagttccaggcggtaggcgacctcgccgattcgttccgtgatacggaagggtccagcatagcgaggtcccaacttgcctttgggtcgacgcaccagggactgagcttgacggttgagcagacggagccaaacccagtcgtccactgagaactctaagtctcaatgatgtgctcaaagatcaatctaaaaagagtattgctccttgccacattctgtctcagccatgcaccagcacgactccctctcgccctcaatcgtcaaggcctcgccctactacccactcatacaacctcagaagtcgagatcattacaatatggtatcagatatgtcaggtcacgatgaggaagatagcacgacagccactgccctccagccgtccctggcgtccatcgccgcgacactaggtgaagtccaacgtcagctcatcgactttgcccagcagatgtcctccatctcctcccatgttgcggctgtcgaggcatgtccatctgcatccacgccagccaccccacaggacattccctatggcctgtcgggatacggcggcatccccaaagtactgttgaacatcgatcctttgccagtcacgacacatcctac

SEQ ID NO: 10522 - DNA, 379 bp, Zea Mays
ctttgcctcagatgccatcaaggactagtgcgcatgatggtgcagggaattcccgtggtcgggaagatactcctaatccgccacctgtaccaccaatgctgtccgaggctatcactaccttggttaatgctactgtagataatacccgcttcttacgtgagatggtgggtaatcaattccagcagcatggcggaagagctcctccacagggaccgcgtgaaacctcatatatggaattctcagggacatgtcctccactctttgttaaagctgaagaccctcttgaagctgatgagtggataagggtaatggagcagaagttcagattaatccgttgcactgaaacacaaaagtcgttgttcgctgcccaacaactgag

SEQ ID NO: 10523 - DNA, 371 bp, Zea Mays
aacgtcttcaatcgacgaacgacactgcccaacatcttatagatcagtagatcaccgaggaggtcgagtccgtcgtcgatggacctctgaaaatttgtgcctccactactccattgcaagttgtcctcgccccaagccgttgattttgctgcccccttctagccacaacacgttgttgaaacctcgcgcaagcaactctttcttgcccctaccagacaggagtacttgaccatggtggttgcattgctgctcttcatgccgctacaaagaagggagaattgggctttgaaatgttttttaattcacgtttcctaaaagccaatagagaagggagggcaatttctaggagaacaagttctttactacatgaa

SEQ ID NO: 10524 - DNA, 352 bp, Zea Mays
gcaaggggtacttgttcttgatcatgacctcattcagagctcgataatcgatgcacatccttctggtgccatctttcttctccacgaacaggacaggggcggcccaacgcgaggtgcttggccggatgtaacctttctctgacagctcatcgatctgcttcttgagttcaactaactctggtccagatactctgtaggctcttttagaaatgggggcggtgccaggaagaagctctatagcaaactcaactttctgctctggtggcatgcctggtaaatcttccgaaaacacatctagaaattctgacacaaccttgataatctcgagtggatctgcttcactgctatcaat

SEQ ID NO: 10525 - DNA, 364 bp, Zea Mays
tgttgataaatggaacgaagataccttggtccagattaataatgagaagacttagcattgcgttacatgaagctcgacctgattcaactttaccaaagtttggcaactacaagattgggcttcttcccaattgtccaaccatgttaccagggtcaaacgattgtggtttttttgtcgcaaacttcctctgatactacgattttgatgatggcgacttatcagaattttatactccggtatgttactaaattattgttttgatcatgcatatattactccttcatacttaatcttagcattaattcgatattattgactatttcaggatgaaccattggaccaacgtgcctttgttctgcattac

SEQ ID NO: 10526 - DNA, 467 bp, Zea Mays
tcgtgccgtccgttttcctcctccattcagccgggtaacgatggatgccgccaggataccatcttgccgagtagatagagatagaagacgataaaagttgatcctttttattattatctgttttccattccaccgttttggtatgaattgcacagagcgttgccgattcctacgcctggttgttggccaaggtgggtggtcgttgcttgaggctccgaaactccaggacctccaacgtcactgacggcacgagtcgtgcgcaacgcacggcgcgttgaagccggcgcccgaatcggataggctcgacggcgatgtgatgataagtagcagatgaccagagtctactctccccagtcgagcgagagtgaagagtcgtagcggagcggagcggaactgagtgtcgatcgccgactcgaatcgcggaggccggtacccggggatgagggttcaggacggggacgtggacg

SEQ ID NO: 10527 - DNA, 714 bp, Zea Mays
aaaggagggaatggagtgatggtgagtgcgggaaggcgatttggtggatgagaagcaaaaggtgggagatagtggagggcgacgtgacgacagaggtgggcgtcgacaacatctgtggaagggcgacaatagtagatggtaactgggtggcgagtgatggagcggcagcgagtggaagggcaacagagagcaggagagtgggggtaggcgatgttggggtggatgtgggggaaatcctttgaagccaaggaggcgatagggaaatccagccggggtgacggaggaggacgcgatggtaggttggtcctccacgacagtgaggcatgcaaagagggaggagaaatgttgtgtcatctgttgttggaggtcaatgatgagctacttcatgtcccctgagtcggtggtggcgttggtggcagccacagcggcggccgtaacctgaggatcgatgtcacctcctggcatctttgataccagattgttggagcttgtgttcctgagaccgtagatgtgttgcacagaaggacgggtacaaagatcccagcgcttgggcgctgtcgtcttagggttgaaggaggaaggcaggatttgggaggggcgaacagtacccacggtccacggatgaacaatacacgttttaggggaagcttagcaagcctgcttgaatctttattcattgtctaagggcctttatataggtcgtatataacccac

SEQ ID NO: 10528 - DNA, 664 bp, Zea Mays
ttcagaaaactgaaactgaacctaaggttaaaacaaggttccagtgaggtgaggtcaagtttgatgcgccatatcttcgaatcccctcggttttgacccaaacgtcctatgtaaggattgaagactgttgaatcaagaacaaaccttattaaggaattttgcctggttattcacaagaatcatgagagctagtcgatggaagggggtcggttcaggcgactgacgaagatgtgccatggtacagtgttcggatggatcagaacgccagctcagttcgccgtcgttgatcgccgtccggattcgtgcacggtataggatggataacgtcggggaaagggtgactcatacgtggcgccatctcccgagctcggccggagtgattcaccggcggccatcgcgtcagccctttccgccgcggtgtcctctgcaccatgattctttctcactgtatcacttctctacgtgcttggcatgtgtttgtgatggtattcgggccgcgaggtgatcgccggacctccgcggctataaatagccccctggatcacggcaaggctcggtcatcacgcacaccagtgaaccaaatcgaagtcaaattcgcactgccctctccaccttcgccaaaattgattgcacacggtgaaagcacagcctcttacggtcctat

SEQ ID NO: 10529 - DNA, 698 bp, Zea Mays
attgattgtaggctgtgttggttggttctttgagagtgtggttaggtgaatcctcgattcaggttgccggttaaagatggtggttggcttcgagttttatttgtcaggttgcactagttatcgctgcttgcagcaagttatcttgccttcttcgaagctagttatctgaaaattgatcctacgtcgtgaagatcgggtatcgtgatgcatcatttctccttcccattttccggtgagcatgccctatcccctttgtactatcgtctgctacatatatcataacccagattgaagattagccgtagaaatcatcgggtggggcgtactctggccatggcgacgccgtggcaggtggttcagcggccggagttggtaggcagagtcataaccgtcggatcccgtgtcgacggtgaggattagatggcgcctatcgattcggctcgtgcatatcctgaccgtctgatcttgatcgggcagatgtggtgtgatcgggcgtattttagaattgtaacccttgatcgttgatccaatggcccacattccataccgcttcagtataaaatgtgatctaatcctagcctctggatctgatcggaacgacccacatcagcagatacccctttgcgactgcagttttacataagcacccctcaacttttagtgaaccaacctgcagtccaccctgtatgtcgcctgag

SEQ ID NO: 10530 - DNA, 685 bp, Zea Mays
agccattgagtgtagggtttgctgaatcttttttggaacataaaccaataaggaagtcaaacaagttcatacttttttccttcctcctttttctttggcattccccacccaccagaggttggaaacgtcctgtttgctaagtattgttgcaccaagtccctagtgctgatgtgctctgccacaactctaaattccacctcggccagttggtagggtgtcacacctagtttattcagggtgttacacaaggggaccccaactgcatgttacacagggttcgagtcatgtcgaagttcagtcttaaggtactcattaccatgctcacgagcttctccctcttcttttcatcagccttcacataaaaccactcatttgtccaccctgtcggccacttattacggtaaccaatcacgagggccttggtatcctttcggtatgcaaaattgtagcacccgaagttcttgtgcagaccatcggctctagccttcgtctgataatgaagttcgtgcattcgacagaacccttcggcattggcactttttccttggcttcgaagagcccaaatatacacgctaagtctaacaatggcgttggggtcaattgatgtaggtaaattttgaacttctttaaaacttcactgatcgtctcataaagggggaaccgaagtgctgccctgaataagctt

SEQ ID NO: 10531 - DNA, 408 bp, Zea Mays
ctttgagccgtggtcgccgacgggcctcggctggcattcctgggtaaaaggcaaaaccatgcgggtggcgtgcgggcaatcgttgggcgaggggatgcactaggctcgaggaattgctcaccgatgcagaacttcgccatggttctacagctcgttgtggtcagcactgcagtcgtcaccgtttgaggcaagaactcccacaattgattcgcgatgttctctgttctgtttttagcttcttcacgtgttactccattcaccggggcacttgtgcatggttgccggccatgggcgtcgccgttgggggcatgttcaccgtcgtagggcgccgtcgggtggagaagatggcctccggggctatggatttagatggacggtccggattagatgcgaccataccccttctcc

SEQ ID NO: 10532 - DNA, 492 bp, Zea Mays
ataggagaattccgccaaagaaagacacttgtcccaatttttaccatagtgtagcacacaggctcgcaacatgtcttcaaggatttgatttactctctctgtctggccatctgtttgaggatggtatgctgagcttcgtattacctgggtcccaagtgattcttgtagctgctcccaaaagcgtgccacaaacagtgctcctctgtcagatacaatggtctttggaataccatgcaaacgcactatttgatcaacatagatttctgcatatttttatgtcttatgggtggtatgcactggtaagaaatgagcggtcttggtcaatctttccataatgacccaaatggaatcatggtgccgggaggtattgggcaatcccacgataaagtccatgcagatatcctcccatttccaagagggtatgggaaggggttgcaaagggcctgctgccttcaaatgtctggctttgattctctggcaggtatcgcactc

SEQ ID NO: 10533 - DNA, 340 bp, Zea Mays
atcaaagtgaccacaggacggtgaacggtaagggtgctgaatcccgacaggggtgggagaaccaccattcagatagtggcacgttgcgcgctcagcacgcaattccgcaacctccgcccgaaccttgcccaactcgtcaagggcgtggtccagctcggtgttgagcacgacgaccaagttgaccatgttgttctgcttaggattgccctcaccaacgggtgagacaatcacacctccagcactgtcgatcgaacgacgagtgtagtacttcaggtcaaggccatcagctaccccgctgaacaacgagcaatactgtgaaagtgcatgtcgtgcagcatct

SEQ ID NO: 10534 - DNA, 506 bp, Zea Mays
ctcgcgctagcgccgcagcggtcgagggggtaaggcgatggtctcttggtgaaggccgaggagtggttcgggtgaggcgagaaaggaacgagccgaggatgggacacggcgtggcagcgccgatctcgggagggggcagggcgaatgcgataatctcagacggaggcaggttgggggcgaggtcacgggatgggggcatggcttgggcgcggagttttgttaccatgcggtggatggggattgtaggagacgtgagaaggactacagatggaggaacgtcgggggaggctgggcggcggagggaggaccgcggtgaggagccagtgggggtgcgggaggcggcgcggtggagggagaatcgagagggcgcgacggagggagaaccgagagggcgcgacggagggcgcacatccagcgcgtcgggtcctcgcagcggtcctgtcgccctcatcggggaagccgcgatggttgaaggtggtggggcggaggaccaacaacggcggtgg

SEQ ID NO: 10535 - DNA, 465 bp, Zea Mays
ccgagaatggtgctgaggtgaagtcagttcacagtgtgtggcggaaccgcgatggggacttggctccggtgaggatttcccccaacatcgaccgccaccccgtacagaaaggtcacacacacactatccttttgatctcacgcaggtcctatgcctcttgttggggcccgaacgacagtgaaacgaagccattccacccacgcgactctctgcgacgtttctcagttttgtgattgctcgacgatggaagtttctcgacgtgagcacagggcgttcacggtggttgagccagggggtcgcgagcctcggtatttatagtccctcgcccaaagaatccttgccgaggccgttacaaccggtgggattcgatggaaaatcctagagatcacgatgatgcagaggagtttggttgaagacgttgctgccccggtggtcccactactaagtgagacagcccaatagttc

SEQ ID NO: 10536 - DNA, 455 bp, Zea Mays
accggtaagagttaaggtggcaaatggtgagttcatgttgagttcaaaaagggtggcagcgctggagtggtgggcagaagggcacacttatgccagtaacatgagagtactggatttagaagcctatgatgctatattggggtatgattggctaaagagccatagtcctatggagtgtgattgggacaacaaggtgctgacattctgggataaaggggtcagagtgcagctgaagggggatggtgtaggaagtacagaggtattgcaagtgtcagcggttcagctgagcaggtggatgaagggaaatgaagtgtgggcttttgtgatgctcgaagcaatacaggaggaaggtgctgaaaaggaacaggagccgctgaggcagatacttaaggagtttgaagatgtgtttgctgtgcccactggactgcctccggttagaatgtatgaccatcata

SEQ ID NO: 10537 - DNA, 851 bp, Zea Mays
attttgacaaagtctagggtgctctgcacaagatttccgggccaaactgtaatagttttcaacaagcgagggatggcgggttattttcaagcttcctcgaggactctttagcaaaaagacccggccgaaggggtatccaacgatcctggccgttggatcagagatccatgacccagatcaaaagttatcgtggctgattcttaacggtctagatctagatcgagggtctggattcaatctcgaaggggtatgcccacgatccgatccgagctgtacactctacatcctacggctcgcgcgaatttcccccaaccctctcttcttccccaatcagcagggcggcgacgaagcagagctccgccctgggagctcgctggatttcctccgcccagcgcactggcgtcaaaatccaaacgcgaacggtgctaaacattgggggaagaaaggcgaagtgatggatagtatccttaccggcgatcggagcgatggtagcatctctgcatctacccacggcgacacaccagcgcccgcggaggcgccgcacggtggaggccatggcggaccttggatctggcaccgagtcggccatcaagcagccggatccaatcccgacagagtcaacgacaagcagtaaacgaaggggaggcgagtggagattcccccaccatggtgtagactagagctaagcacagaggcggcacaggttctagcttcctagcgcactggacaagggatgaagagaaggggcgccaagcacagagcgatgaacggggaaggcgtcgcggcccccgcatttataccctggagcgcagctaggatcccggcagaaatcccgtgattcacggatgctg

SEQ ID NO: 10538 - DNA, 663 bp, Zea Mays
ccctaaactttggctgtcaggagcactgaagaacattgccatggtacagtgcccgggaggataagcttcagaccctcaccgccgccgaccaatccacgtcgtgattggcgccagggtcgggatgggcgcgcgatgtgcatctcctcgcaaagatctttttgatctgggtaagatcgccgcggtggagcgtgatgattctagccgccacgcggccactaatcactccggccatatccagtcatcggcgccgctcctctttgttcatccacgccctcactgatttgaccgcgttactgccgcgacggaatgtggcaagctcgtaggaaaggataacgctcgacgccgccgttgatcgccagctaaggcccggcgatggttatcaccatggccatggcaatggctcactgcacctataaattcaccgcatcctcaccccctccgttcaaatcaaccgagcacagctcttcgtctctaaattgcgaagccgaagcacccgctcccaccctcgattagccaccatagccggagaatctcccttttcccccaaattgggtcgccgcgccactgtgaacagctcgaccgtggccagcccgctctggtaagacactgtccaattcacgtattgttttcatgactctgcacgcttgtgaagctcactatggc

SEQ ID NO: 10539 - DNA, 375 bp, Zea Mays
ggataatcaattcaaaggtattgttccgcatttgattccggggggtttatccatccttcagtatgccgatgatacgatggttttcttagatcataatctgaagcatgctcggaacatcaaacttcttttaactctttttgagcaaatgtctggtttaaaaataaatttccataaaagtgagttattccgttatgggtcggctaaggaatatgatttgcattactcacttatatttggatgtggaattgggtcaatgactttcaaataccttggaattcctatgactcatagaagattgagaaatagtgactggcagggtgttatagaccgatttgaaaagaggcttagtacatggaaggccaaattcctatcttc

SEQ ID NO: 10540 - DNA, 464 bp, Zea Mays
gtcgcgaatgggtttgagttactgtggcctcgctattcctcgaccacttgcaccggtgatgtggctttacgattgtcaccggagttggcgtctttcaccgtgattgtgccacgccccaggcctttaaccacgttgctactagccgcactagctcgccgattaccgccgtagcccctcagctggtgagtgccacggtaaaacgcgccggtgactcatcccttgtttccggccgccgcacgtctccatcaaattcactggccaccgctcaaacacactataaattgatgtcacggtctgttgcgttgggtcatcaccaagcctgagcacccgctcctaccgccgattagccaccacaactctccaattccccatttcccccaattcgatttccgccgccgtggtagagccctcaccgtggtcagcgtattccaggtctgttcatgctccctgctctcttgtttcag

SEQ ID NO: 10541 - DNA, 351 bp, Zea Mays
atgctactggataggtctagaacctaggttgcataactccttttacgatagagacagcatgtcacatctgattttgaggacaaaattgaatgcataggattgagaggaaggcactcgagtggattccatgcctgacctaggactgactcgtcgtaattgattggtagtattaactatgtctagcaccgagccacggcgggagagtcagtccaccttccactcatgacctatcgagcctagacctgagtgcactggctgcttataggactcacagcacaacgagtcgcgctaagacccaggttatgccgactcaaagacggcaatgatggtgccagagctcttcacctccca

SEQ ID NO: 10542 - DNA, 704 bp, Zea Mays
aagatttatactggttcgggcagaacatccctgcatctagtcattggtggctttctctaccggcaccatagatgatcaaactcatagtaggggttacaagcagtcgagagagggaggagagcatcctagatctcttatcgggtggaagtagagcttagaagattagaggtggagtcctagctaactcttggcttggtggggctccgacctcctggtcctcgttggtgctcttcctctttttgtccttgtgggctcgtctccatctgaaggcgtccggtcgtccctcagttcgtccttctattcctcgatcggtcgatccccttgccctaaggcggccctctccctttcataggccaggagaggggtcgaccagcggtggctcctctaggaaggaaccataaagcaagggtaaaatcaagtgttttacccccaggtgaggccatgcatacttgtggggcctagggttgcctaactcgcgtatttatcatggtggatgacgtgggagcggcgatggttctaggcgccatcatttgggatacgccgaccccaggcttctgtagcctggggctcggcgcgactcgtcgtgtagtgccctgtggaaggtttgcacactcaggcccaatccaataggccataagtgcgacgtaggctgaggggcgcgtgggctgttaatgtgtcgcagttcgggggctcgtaggtcatga

SEQ ID NO: 10543 - DNA, 672 bp, Zea Mays
cgatggattgcagacatcaaaggggctgttacagttggagtcattgtagattacctacacctttggaatatcctcgcagattttagcttatcatcgaatgacagatactatgcaaagtcagcttatactgggtttttcttagggtctaccacctttgggcactataaaagggtttggagatcttagactcctccaaagtgctgtttttttcatttggcttgtggtccataatagatgttggacagctgatcgcttggcaaaaaggggtttgaatcaccctaccagatgtcctttatgtgaccagcaaggtgaaaccctgaaccacttgctcgtgagttgtgtcttctcaagggttttctggtacaacctgctaagaaagtttgggctgcatagtttagtcccacagccagatacagtttcctttaaggattagtgggagatggtttcagcaacagcaaatggtctggtcagggaaggtcttgactccctcgtcattttaggatcttggataatttggaagaatcgcaatagagccattttttatggagggtctcccagccttcctctgattatggagcaagcacgtgaggaaagaagaagctgggaaattgctggagccaaagggctctcctttttggctgccccctgcataggttgttgtagggagtgtgt

SEQ ID NO: 10544 - DNA, 338 bp, Zea Mays
ggagcctgtcaccatttatcagtagatgacaaagagtccaatccgattgaggcaattaggattgtgtcagaattccccgatgtattccctgaagagtaaccaggtatgccacctgaaaggaaagttgaatttgccatagagcttatcctaggcaccgcccctatttccaagagagcctatcgagtgtccggaccagagttggtggaactcaagaagcaaattgatgcgttgttggagaaaggttacatcagaccaagtacctcaccttgggcagtcccagtgctatttgtggagaagaaggatggcacgaagaggatgtgcatcgattacagagcttt

SEQ ID NO: 10545 - DNA, 336 bp, Zea Mays
ttcatggaaggagggcagtagttaatccagaaccggaaatgaatcctcctccgaatcccctgcttgttgggactgatgtcgtggttgcctcaaatgcaactgctacaacaaatggccaacactatggtagaaatgcaagctaagctccgccaagacaggcagcagccaccaccaccagcaacacccatggataagcatcgcgaattcatgagccacaaaccccccactttttctagctctcccaacccactataagctgacgactggctaaagtttatataaaagatgctcaacatttcccaatgcaccgatagggagaaagtactatatgcatcg

SEQ ID NO: 10546 - DNA, 705 bp, Zea Mays
gctggcggagctgcggcgggtgctgtacagagcggacgaccgcatcctgcaggcgtacgacgcgcaagagcagcagcggacgacggcgtccgtattatctctaccggtgagtgatcgagcggccgtttcccttccctttttggcttcggtttttttaaggtcgtgccgagtgccgacaatatctgtctctcctcattcacagatcatgcgccgttttaccatggacatgtacatcaagcgagagataagcagcttgctcaaggacatagatttactatccgagaaccgtcctcccgcgctcacgagcagcgatacggcaacctaccagcacgacggcagatcgtcgtcatgcgacggtctggacgacgacctcgtgcgccatggcagcagtctagtggaggcagagaagatcgagatgaggatcctgccactggtcgacaagctgacagagcaccacgagccacctcgcgagttcctcatcttcgcgatctacgggccgggaggggtggggaagacgaccgtggccaggaagatcttcgacgaccagaggacgcagagcgccttcagcgcgcgcgcgtgggtgtccatctccagggcgtccaccgttgcccagatcctacaggcaacctgcgccgccataggcgtccttcaagggcccaaaacgaaggcggacgcgctccagacgcagctggccgacaggatcga

SEQ ID NO: 10547 - DNA, 693 bp, Zea Mays
tgacaatgtagcccatgggtggattcggcacctgctcgtcgtgcggcgtgatccactcgggttgcgggcctatggtttggggccagagtaggccgatgtcaaccagtgcctccagatccccattggtgaaggaggacatgggccatgggtcatggggaggaaggatagtgatcttttctgccatcaaaacgaacgaaggggcaagaggaagaagaagggctctttgggcagaaggcgaaaacaatgtttgaaggcaaaagactaagtcgacaaaggtaacggtccaaagccccctcttttgatcagctttatagggacggacggagccacctaggtgtgattcgaaaatggttggatgacggtcatttcgaatcccgcgtgcacgcttgccgcgaatggtcggctaacacgcaggatgtcccatcgcattaaatgactgtgtcccctatgaggaaagacgcgtcgagcgccattccgcatcccgtctcaaaaggtatgcccactccccttgacttcactgccttttatcctctcggcaatcgaactggaaagaagcgtcttctgcctcaggcaaccccccttggaaaaggagtggcgaatcagaaaaagtcgtcttctacctcggcctgtcgcttcggaggaaaaaaggcacggaaagatactgttcagaggtttgaaggctcgaccctcagc

SEQ ID NO: 10548 - DNA, 365 bp, Zea Mays
ccctttgtgcattaaaccgtagtcgtcgggtttggatcggagggataggataacgttttggctagatcagatcttggtcataagatggagcgttagtggattagattagatctctccctaataaaatctagattgtatattcaagatcggacgaccctgattagaaattgagataatgttttgatccgatgaaaactgggcatcaatcggggatctagcagctggaaatccataccagttcaacgaggggatctaattcgcgcctttagttgaagatctagcggccgagacacgctcatacccctttggctattgttgttttgcgtaagagaccatgcgttcctcaaaaagcaacccgcagtcca

SEQ ID NO: 10549 - DNA, 364 bp, Zea Mays
gactgtcaggcgcactgaatagaatttctgatggtacagtgacaaaagatctgagatgccgtgcatctcaccgccggtgactcgccgccgtgattagcgccaatcttcacgattcgtgcgctgggactcatggataatcatgggcagagaaagatctcaactaggggataagagagcaagctatctctggactgttcaccgcgacacctgccgtgcagtggacgacagtgtcctcatcggagttcgccggtgactataaccgcgccacgtgcttagaagatgtaccacgtcgctgtagctcgcggtaggtagatagttcatagccggagtaaatacccccggggcgcgccacgattgttctcac

SEQ ID NO: 10550 - DNA, 415 bp, Zea Mays
gcttaagcaaaacccgagccctaatgtggtggtggctactgattatatgagggttaggagcatgactccctccctggacgcgccctaatggtctcaacaaagatacacggcccaaaggccaagttacggtgtcacagcactgagacagattatggacgtcatcttgtttcgatgattctgaacgacttggatggaattttgaggtgggaccaatgccattggaagctctatgaaattctggtccacccatataaagaacgtccaaaaccgactctgtatgcgacttgattgtctgttttacgacgggctgttcctagagtccgaaactgaaatgaagtcaaatcggtttggacctccaccttgatccgaacgtccttgctggccttccacgcctccaagtccttcaccatgtccg

SEQ ID NO: 10551 - DNA, 992 bp, Zea Mays
agtcggttacaatccaactcaaataaattgggttaggagggaaatgcagttgggttgggtttaacacgcaagttacaccatagtaacaagaatattgaaggcatttttaggagaactacagcaggtaagaagacgttaagatgaaaaactacattgccaagttctatcatccagcttaaaaaaccaagtaagatcataaaatgtctctattggacctgtatatagtatggagacaagcaacaaatatgcacatccgttgcatgtaagccaatcctgatacctcctctgtcattaatcgttggaagtcaagaatgttcgcgagtctcagtactgaatgctaattgtaatgtactgtacatcagggattagcaacaacaagctatgtgatcttttttattagatgaacacaaacaaatgaaagattgtagagggtttgaataagaataggaggatcgacataatctaccttcatatattcaacagaaggagtagcaaccactgaagattgaagcaaacaagttatgaaaaaatcagaagagacaactattggaactctatcagaaatcagttcatcatgagaatgaaaagctagctattaagctatacatgcagtgggcacatatacaccttcaatttcccatctgccaaacttaaccagccagtcatcgtcaactgcgtcaaacaaggaatgaaatagaacggaacaaacaaatctctgtacaattaaaagaaaagaaaaagaaaaaacaccaatgggaacccactgtcttctcaagtgctgactggtgtgattgcgcatgcgacaccaccttggaggagcgcttcttccagaaggcactcccacggctcgcattgcggagttgtacatgacgcttacgcgtcgttgcagcccatcggctgcagttactgacaccttgaagttccttcgtcgtaactcttgttcgctaggatgtagcaacatctccgatggagagcgcactccgatgttctcc

SEQ ID NO: 10552 - DNA, 411 bp, Zea Mays
ttaggctcttctcgaggcggggaaggtggcagcggctggaatggtcggccatgcctgacgaagtttttgaaatccctgcagttccacagagtgtgctgcatgtccttgtggtataggcactgggagtcgaggatctcgtccagtgtccgtacccctccacggggtgcgccgcgagctcgagtggcaggtggcccgacgatgtgcacctcctcgcggggtctcttctccccacgtttgcctggttgctggttcgtgtcccttcgccgtgtgggctgtatgggctttgcgcctccaatgaggccttgagcccgctcatccgcggtgatgtagatgtacgcctccccgaacagttgttcagaggtgacaggtgctttttgatgtatggctcagacaaagaccgtgtcgttggat

SEQ ID NO: 10553 - DNA, 844 bp, Zea Mays
gataggattgcgagttcgttttcccagaaacgaagggtttcttagaaaaatggcaaggccgacagtggccgccagatgtgagatctatggctcgttttactctacacgggtgatgcattacggtccttggatcaaggatccgcgacctaggtttaaataagagaaggggtatatctcttattatctcgacagtagatgtgccgatgaacggtcatcatccaccctgcccataacgcaaatgacgacgacacaacgtaattacgtggcggagcactgccagagtattgcgcgacaacgcgctcccgggccccatactcgaatcccccggtgctatgcctaaggaatcgcaaggtgaacgagacgaataggtccttgccacgggtcagacgaccgacgtcacggtctacgatggtcagcggatgcgcggcggagtgtgacgatgacgagcaattgctcagccctggcctggtctcttggcttcgttggtatgcggacgcactccctgggcccctttgagtcacccatacggtcggtcgggcaacggcaaagccaatgtcgaattggccccgcagtgtcctaccctagattccgcttcctctcaccctcccgcgagctctctctctctctcgctttgttgttggtgggtcatggcgatggaacgaagaggtggaagccccggcacccggtattatagccccagggtaggtcggttggagggtccgtcgtagcgcccccagcttcgcgtggccattgctttgaggtggggaagagcagcagtgcatacggccccatgtgtcaatggaaacgtgacgccattggtcactggtccaaagggacccatgcg

SEQ ID NO: 10554 - DNA, 712 bp, Zea Mays
ccatctggtcagtatcatagtcgtcatctccatccgcggtcagctcgcgcgaactactaacaactccgccgagatcctcgcgtggatggaccggggaggaaactgcttcggggccacgtttgtgggtatttgagccgcacctccttgcccctctcgtccactcgcaaactccccaccatacctgccacactcgcgacctgaaggaagggcccgccattgccgccgaccgagaagaagagtgaggttgtgtgcttgtgggcgacgccgtcatccgcacctccagtgtggggctcggggttttcctttggctgtgaggtaggcgctcgtggccacgccccctagaattggacgccagtgacgagggaatcgctagccggacttgcagcaccgccattgtgccacctccttccgtggtctgacaccgtcatgcgtgtaatcgaggtgatgatctctcctttgtgttcgcctggcttcccgggtcgcgtagcactcgtcacgttgggatttgtgtagagatggggggttaggtgttgcgggcggggcaagtccaccgtcacggtgctcggccggctttggctgagtgtcgcgaggaggaagatagggtagcggccgtagatctgggtatgggcgatggagatctagcgctgtgttgatgggaagcgtggtccattgatttttctgttgacggctaagattagatcgcaggaatact

SEQ ID NO: 10555 - DNA, 748 bp, Zea Mays
aaatcatcggcgctgatccacgcggtcaccgctacctgggactccatgctgggatccggctgctctcgagtgtcctccgcatgcgaccatggcctcatatggccgaatcttcgggcggcgaggaaggaatttctcgtcggcacatcactggtcaccacagagccaccgtgcgccatgggcagagttctatgctgcgcgattcacggtgagtcctccccatttcgattcgccttgttcccagcatcgcattgaaccacttgggtatgcgtttagggtgctgatgcaccgggtcgcgtgactccggtaatggctccgtcgcggttcagggtcgtgccaccgtgagtgtggtcttgggaggaagacagagtctagagtttggtttcgagatgagcggcgaagattaactcgcgcataccgtttcagaggtgcggtccggttcgtccgatccggatcgcgcggatgggaatagatccagggttaatccaatgtgaactgtcgatccattcacggacgatcgtgtttaggcgctagcttaccccttcgcccgataggataccagccgttcgattctgatcctttgcgggtgaaccaatggcgctgtgataaaatcatatccatccgatctagatccaatggcctctattcagtactggttaggagttatgaaaaatctaatctaaaccatcgggcgctgatccaacggctcagatggcctcatacctcttcgtcgtacacttttataaaagag

SEQ ID NO: 10556 - DNA, 287 bp, Zea Mays
tcatgcacttaaacctaaattagtgcattagaccaactcaaccgtgagcataagagctaacccaaccaatagtgtcatgatagattgcataatctgtctaccctcacctaacatcaaacaagattttgacctacatcatgtagactatctcatccatatctatcttaaccatattccccaatcccgataatatacactaaccccgaaatcaatgagaccaagaccagagaaggacaagaacaacctcgtcaagtaaagagagaagttaaacttgatctttagatgca

SEQ ID NO: 10557 - DNA, 658 bp, Zea Mays
tggtaatctatccgagcttgagcaacctttctcttgcttggagattgatcaaatcattgcacgtctgccatcaaataaatcgccaggtccggatggcttcaacacagactttgttaaaaaatgctggccgataattgcccctgatttctatgacctattcaacaaattttttgaaggatctctctacatgcatagcatcaacggatcatatgtgacactcattcccaaaaatggctctcctgattctgttggtgactacagacccatctccctccttaacacgagcatcaaagttttaactaaaatcttagccaatcgcctgcagctggtgatcacaaagctcgttcatcggaatcaatatggttttatcaaggatagatcgatccaggattgcttagcttgggcttttgaatatatttcactgtgtcacaaatccagaaaagaaatggtcattctaaagcttgactttgagaaggcatttgataaactggagcatgctgctatcctagagatcttgagacacaaggggttcggtaataaatggatccactggatctctatgattcttggctccggatcttctgaggttcttttgaatggagtccctgggaaaagatttcactatcgactcggcgtcaggcagggcgaccccctgtcc

SEQ ID NO: 10558 - DNA, 548 bp, Zea Mays
cgcggggctgcggccggcgcttcgccgttagccaggtgagtgcgccgcctccgcttctccagcagcgccactggggtacgggccggtgcgccgctgtagatctagggtgtccaaattcgccgtcgccgttagccaggttagtcggtactgtagatcccctgtggagctcgacgcgcgtcactgtcctccgctgcctatgcccatgacgttaggtgagggctgttcaccggatttacaaatcccacacatccgcgcattgccttgcctccatcgcctgtgcttttccaacagcgtcggctcgctgttcttctgtacttgaccatagcgcccatcacgctgctaggtaatatatagagccccttcgctgctgtcttcctctttccgtcgtcctggtacccggcggaagcgcttttctcatcctcgacttcgtcgccgtcgtccgttcctttcttcggatgctactttctgttgtttcggttccttcattgcatcatgtgtgttagctcatagtgtatgttgctcttgtagatctgctacgtaccaaaagg

SEQ ID NO: 10559 - DNA, 2031 bp, Zea Mays
ctttttattcctttccaacattactttgttttgaatcatttttttcattgtcatggcacctgtgtcaaggttgggcaggaacttaaaagaagctttggaggtcaggctgctaatctagtgaagtctgctggaaactctgctgcgactcttattgaactgattactcgacattttcctggtaaatccacttggtattatgtttatcgtctttggtcaaaagtaggcaaagtccagtttgtcattgtattgcacaaataagttcatcagctgatagtctccttttgtcccctttctgcccatatgctatagcttgctatctgatattagtttcctgtattgggaagcacagcggtgttataaattattggtccaaaaaaatatttcgttcatttgtcaaatggttatggtggtccctgttggctgtaggcacctacagtgaaagtgaaactggaatggcccatccacccactactactgtttgtctgcatatggatttatgttctgcctgctactttggatctgagagtcaggaaacagtgatgattgatgaactggtgcctcatctaggcatatgaacttcgtatgagctgggccattcaaaaccagatgattgtgaatatttgatgcttacacttacacccttacattttttcatttctcgtgcaaaacgttagtggttttcattttttagcagttggccaagaaatctgttcacatgatttcacttgaagttaacatttattctcggtgttggtgctttcgttggatctccattgatttgagacattgaacatggagtttatttcctcaaagaagaacatgaaactgttcccgtagtgtttaactgattatacttgttcgacaaatatgtccagacatgagctaatcatctgaaattccagtgatttaggagtaattgatttcaggcttccagcacattattctatcatatatggacatatttgattgcacagataggttcactgacaaacatgtacaaatcttaactattcaaccggttagtctgaattcagaaacaaggaaggatgctagttttacccctgatctggccatagccaacttcagaatatttcacaattcgttcttcgatcattgaatttaaattgtaccttgcgctcttgcagggaattttagcatgtattgaatcttttgttaataggatagcgttgtgcaacttgatggtaccttttgctaacgttctatgaacacgtacatctgcatgcattcaaaaccaggttatattttttcttgttttgtactgtcctgagtcatgacatgactcatgaccaagtgtacatccatccaccaaatagtattttaagtttccattttggcaggtttccgggaccattcactctacaaggggcaccaggttttcctgtacaagagagcccagatctttgttgctgatttgtggggcgccttcaagggacaaaactatggcgagttccacgatatcaattccatcaccatatttgctgactacattgttccagcggtcctgagggagcttggagtacttaaatatggctcgaatctatcttgctccatcgactcgaacagtgagatagtgcctggaagcgaggaggaagtggagatacgcgcgtgctccatctatgcagtggagaagatgagggacctgatcagtaagaagtttggaaagcaggtaggcgcatctgaaccagtttcgcctgactacctgagacttccattcattaggcatgccaatgccgtttgctttctgacctgcattctcggtgggccgatttacaaaaaaaaaaaaaaagaaattcactaatcttcatagccgttgaacttgaacgagttaaattaaccaactcataaagcagtcactcgatacgtgaggttcggctcggaactaacgccctcttggtctcgtgttttctcggcagcttctgagcatcgacattgatctctggctctggtcctgcggcgtgcagaacatggcgctgtcacatcaccgcaccctgtcgatttactactagacag

SEQ ID NO: 10560 - DNA, 663 bp, Zea Mays
agaagataatgcattatccacagccttcggaggccgaggaaagaagagattgaacagagttttcgatgccattggctttgtttaccccgactaccgctatcctctgcgagggtagggaaagaagagaaaagctgctacttcggctactccagacgagcctgtgctgaagggaaaaaagttaaaggttcttacccactggtcgtgatatattgaaccggccgtggtgcctgagtttggcggggaggcttcttcagctgctgaatcaagagaacctgttcctcccacgcagaaggctgaagagcctgctataatgccgaaggcaccttcggttgagctagttgaaacaaaggttgacaaagataaggctgaaaggtcaaaaactgaagaagtaacaaagatgccagggattttaagtccttcaacagaagcaatagcgctgaaggcagaaaagagttctgccacaactcctaagagaaggaagatggtaaatgtattagatattttagaaacaaccgactccataagtccccctcccacagggaaggttgccgaagctgacaaaacgcaacccaatgctgatactaagcaaatagaagttgagactacaataaccaaaactgaaaccgaggcagggcccatagtgcctactgagacgaagcttgc

SEQ ID NO: 10561 - DNA, 432 bp, Zea Mays
ggcgtgcgttgcaatctggacgcgatggggggaggagatcggccggtccatccgtttgcttcgctgtgctgcgcgctgctcccccgtggaggtggttgcttcctgcagaggatggggtggtgccgtggtgggacttgaagtcaatgctcccagtgctctttacggtgcctgcctgccgcccatcacctatcggtcgccgcctacctccccgttcttacccaaacggttgcacttgctcacttgcatgcacctaggcggtagcttcctctctctctccaagttactccatgatgcgcccgcccgtaacccagtctcgagctggcagatgatgacgcgtcgtcgtagcccactcgtaccatgcactccactaatcaaagccccgccacatggacatggaagcagtgtgtgtatagcacatgcttacaacatgac

SEQ ID NO: 10562 - DNA, 722 bp, Zea Mays
aagcacacgctgtacaatgaggctctcataatgctctgcatcatctgcaccaatctgttcttcggttggttccttagtgcctgcatcatcagccacaagcaaagcaagtgtagcttcatccaaatcactagcagaggaatacccaccatcgtcttttaccaccaaaacacgctgattaggacaatcacgctgcacgtgtccatagcccttgcatcgataacatagaacatctcttgttctacccgtggaggctactgaagaggcagtacctgctggtttctgggcagatttggttgctgaatttgtggaagatgcacgtggtttgtcaccggaggaaggtggtggtgctggtcgactcggcgagggagttggtgcttgtgtacggccggtcatggacgtagtcgtgcgctactgccatggtgtagattttcctgcagaaacattagaccttacactagcccgtcgtccctgcacttccctatcagctttgcaagcaagatgtaacaatcgggttacgttagcacaatcgttataagcaaggatgtcctgaatttccctatttaacccgcccaaaaatctagccatagcagattcctcaccctcctctatgttacaacacaacaaacccatttgtaattcttgataatattcttctacacttttagtaccatgtctcaattgttgcaacttgtttaacatatcacgtgcataataagacggaa

SEQ ID NO: 10563 - DNA, 432 bp, Zea Mays
aaaacgtaaggccattggggaagagatcgataagcttttcactgtcgaattcatctaagaaattaaccaccctgaatggctggccaaccctgtattggtatgaatgaaaagcgggaaatggagtatgtgtgtcgattacaccagcctgaacaaggcatgcctgaaggatctgtttcccctcccgcgtatcgactaggtggtcgattcaacatctagttgcaaggccttgagcttcctcgatgcctacttaggctatcaccagatcgcgatgaaggaatacgaccagcctgtgacctgcttcatcacccctttcggctcatactgctatgtgacaatgtccttcggtctgaagaacgtatagccacgtactagtgatgtatgatcaaatgttttagtgatctgatcgaaaggtctgtggaggtgtacgacaac

SEQ ID NO: 10564 - DNA, 496 bp, Zea Mays
gttacatcttgtctgaaggactcaactctctagcctagtacatcatgaggtgccaaaagctaagctatgagtagtacaacttccaaacatgttctttgctaacccatctaatcgcaagaaacagaggtggcactacactcgggcgaaggggtcctctagagtgagcggtgtctaggctagaagctggctcgatctccttagggtcctcctcctcgctgtcttcctccacctccattccctgctgcatctcctggtggtgcatttctagatgagcattggtctcatccagctcgacctacacatcgtggagttggttctctaggaccttaatggtattgtccatgatctccacttgttgctggagctcatgggtgcgggtactcatctgctcgatttggaggtctttctccaacaactcaagggacaaatctaccacaaagacctccctgtcattgagggttgtcttggcaattcgacctagacctgccaagtgtgt

SEQ ID NO: 10565 - DNA, 908 bp, Zea Mays
cttctgacggggtagagccgaggcttgactcaggagcatgggcatgcgcccgatccctaacatgtacaggggcgcgggtgtcgagttggagtagtcgatacaatgattagcatggtcttctgcgagattcgcgggagagtagatgacatttaatgcgcgtctgctgggtgagttggccgaggccgagctcgggcaaggcggagatttctcctgaggtcgaggccttgatcggatgttgcctgtagccacgctcggagtggttgaaacaatggcagagtgggggaacagtgcctcgtattcgtgccctatgcatcgtcgtgggcggtaaaggtagattagaccttagtcgtgtcgtcctttgttgactttggcaccctcagcgggggcatgtgaacgtatggacgcacgttctggaatcggagtgtttggccgaggcgggtagcttccggcaggtgaatcggaaatatgcttctcgcttgaggttggcctcgggtgggtcgagactgtgtatcccgcctgagattggccttaggagagtcgtgatttttgtctcctcgagcctcgggcgagtcgcgactgcaagctctcgcttaaggttatcctcgagcgagttatgacttgggtccctcggaccttggtaaggttgagagcgtgtcttcttatgtccccttcttactcgagcgtatagagactttaggcttgtgatctagatatcactaaatatggtactcgacaagtacttcgctcgtgcttatctggtcgccatgacgcggaccatcgagatgacaaaaatggtgtccaacactactactactgtaatccggtgcaaccaagcaagtagtagtactatattctgctggacaaggacgaacctgtacggcttgcggtccggctccggcatgaacatg

SEQ ID NO: 10566 - DNA, 550 bp, Zea Mays
ggggataacgccatggtagggacttgaactttaggggggatttcttccatcaagctgagcttccagggctgcaatccttgtgtgtgcatcctccagctccaagtgtaccctagagaggtccagggtagcactatccaggttggtgttaagacctgccaccacaccagctagggtgttgaggcgatcttctccagctccacctagaacaatgatggtctggctttctccacgaatatgcagaggaagatgcctatacttcgtgttgtgcagctgttgtcggtaggtgtggctgagggaccatagagttcacctagcagcatcgctggccgaagaagagtaggtggatagcggcatcagggactcatgagctgacaaagtcctgaaccctctatcacctgcatccatcaccctgacatgaatgcgagtgatgtagtagcaagcctgaggaggctcgtacactcgccttatctcatacaggggtcggacataggttcccaacgcatgcagaacattctgtagcaggttagggaagtgccctgtctcgaacatt

SEQ ID NO: 10567 - DNA, 487 bp, Zea Mays
ggtatagtgacaccggagcaactgatcacataaccagtgagttggatcgtctcgccatgagggagccatatcgtggcaatgacaccgtgcaagtcagcaacgacgcaagtttgcaaattaagcatcttggttcttgttccattaacactgatactcgccctcttgcattaaataatgttcttcatgtccctcaaatatctaaacatcttttatctattcataagttaacccgtgataatgatgttttctttgaatttcgtccctcccattttttcatcaaggatcgtgccactcagaatcttcttctggaaggaaaatgtgaatccggcctctatcccatcaagcctgctgatcttgcgtctgttaaacaagcacatctgagctgttcggcgtgtacttcacaatggcatgctcggtttggtcacccctcagtccaagttgtgcggtccattttaagtctccatcgtctcccatgccgtgaagaaac

SEQ ID NO: 10568 - DNA, 805 bp, Zea Mays
gcaagggtggctctgccgaaggtagtttttattgggatgaaatgagctaccttggtaagacggtcgattataacccagatagaatcgtttcctttttgtgtccgaggcagtccgattacgaaatccatgcctatttcttcccacttctatttgggtactggaaggggttgaagtagacctgcaggcttctaatgctctgccttagttccctggcaagtgtcacaccgggccacatactgtgctatctcctttttcattcctctccaccagtatctggtcttgaggtctaggtacatcttggtggtccctgggtggatagagtaggctgagttgtgagcttcgtcgagcagaactcctcgtgcctctccttttggtacacacaaacggtttctgaaccaaaggattccttcttcatctgtcccgaggtctgggagttgttcttggcgagttctctccacaagacttgccgtctcagtgtctaggcgctgagccttgcgtatgaggtcttctagcattggcttgacttctaggctgccattgtctcccagacaagcattcagttgagctgattctttcttccaatcttccaagaagttggtttctttcttcccgaaaggttttcggctgagggcgtctgctaccacgttggccttcccggggtggtagtggatctcaatgtcataatctttgatcaattccagccatctttgttgatggagattgaggtctggctgagtgaaaatgtacttcaggctcttgtgatctgtgaagatgtgacatttgttcccaatcaggtagtgcctcc

SEQ ID NO: 10569 - DNA, 334 bp, Zea Mays
tttctctagctttgtgttcaatcagagagtccatttttacttttactgattcacttgttctacattcatgcatcataggcacggaaccaccagatcttgcttcacaatccatgtttatgtcatcaatatttgcctgatcatgacttgaagtagcagatcgtttggtggcatgcacttgcgtggcagtcctatttgacaactgtttcacatgaggttgactttcccgcataggagcatatcgtttctggttttgcacttgcatgtctctcctaccaggggatgttgatttcatattggatggctgcttcatgcttgaaggagatgcaggatgaac

SEQ ID NO: 10570 - DNA, 434 bp, Zea Mays
ttgctttggggcatgggggtggtggatgttttgttgttgttggtgtggaggtgggggtgggggaggtacgatttgtacttcctgctggtgttggtatgcgtggtgcggtggatgcggagcgagggcgtggatgtatggtggagggggttgctgatatgtgtgcgcgacaactctagggttgtcggctggttgcacccgtgccatcctgtctctggtggccttcgtctctgggcagtctctggtttggtgggcgcagtcttcgccgtgaaacaggcagtaaaatcggcgcagcggctgcgcacgtccctggccccgaccgcgagttccgtttccgcggccttgggggggatattcctggcggcgaggggcctcaccagcggggtgctggttggcgatgttgtgcacctgctgctgattgcggccgtcccgaccga

SEQ ID NO: 10571 - DNA, 386 bp, Zea Mays
ggagagtatagatatctagacgcttattatgtgggttgatgaatggataggttgggataaccaggattatggtaataagagactccatgtacagtggatcttgtttcgtctagcgatccaacttgatctttgaagacttgagttgatgctttttctcccttgacgtggttggtcttctttggccctcaattctagagttgccatccgagttaaggacatgtggctaagtatatataattaggatagccagggtacacgaggtaggtgggtttgaacaaagttttactttgcttttgtgatatctagattagacaacctatgatgtaggttaggttgttgtttacggacgagttagtccaaggtattaatttagggtaagatatgtt

SEQ ID NO: 10572 - DNA, 643 bp, Zea Mays
gttactcaccggcctagctgctgcgaaggcgcacgcccacgggagatggcggcacagccccaaatcttgatttccgatgaggaattcggcttcgccttgccccccaatcgcgcccggaatgaccctatgcaccatcagtgtgtctccccgaggcgcgacagcccagattcgaggcctcaactgtgacgcaacctcgggttgacggcaatggctcccatgacccgcggcggtgcccttctcccccgatttcggtggcaacccaggcgttgttgcgatggcggcgcacggaacggtgaggaggtcatcacggaatctgccagacccaaggttgtagtcctgacggcggcaaattagagattcccccgcggcggcgtttgcgtggatcgatggcggctgtaggaagagtggatgcgaaaacagagggtgagaggagaagtgagctatgctttttgaagccagcggcgagtcagacgcgagcggcgaaattccagggcgaccgtgcgtgcggtgcgagaatcgcccagtggcgtgcccgccatgctcgccgtggatcttgcgtcccccctgttgacggaccgcaccaagtaatgacagacgggccccatgcgcagtgagggagagcaatcaccagcgcgcccccagc

SEQ ID NO: 10573 - DNA, 544 bp, Zea Mays
tagcacggttgcacccaacccaaactaccaaaccccctcccttcttctcttcttggtccccgcgcgcgcacttgcatcattgcatgcagcacacctgaacaacttgcctgttgtactgtaccacgagcagccacatgatgacgctcctcaagacgtacaaccacaacgacaagcagcaccagttctcgcttcccaagaggaacttcgtcacctacgccgtctacgcgctcatcgccgtcgcgctcctctacctgttcgtcgacccggcagctccgcctgctgcgggttcgggtgcgactgcggcatcatctacgaccaccaccaagccatcatcatcactacctccttctccttattacgaagcatcatcgccgatcatcagcacttcatcagcagccgcaccgctgtgcgactactccgacggcgagtgggtgccggacgcccggccgccgctctacgacggcacgacctgcggcgccatcaaggacgacgggcggagctgcacggcgaacgggcgcgcggacacgggctacgtgcactggcg

SEQ ID NO: 10574 - DNA, 574 bp, Zea Mays
ttctacctttgcaaaatgagcatgcatcaaacaggcctgcaaatatgtagctttccttgcaagacggaagaaggaaataaagttccccattctgcatgctctgaatgtataggaaatgtaggcattagatgaaagctagtacaaatatgataagcacaaaataatgcttaatggtatgactaccttgcaacttctcttgcaaacaagatctctggactgcctctaatttcacgagacatcttagcaagatccagagataactcagcaggttcaacctaattcagatgtatctatgagtcagcaaatatcagaacgcaaaagaccagatctgctcaagttgcctcaccttgtaaccaggatgtttgtctaacttgagcagtgcataataaccccgaaactccttttctgttgagaagagaacaccttctctcctatggtcatcatacatttgaaatagctcaactgatgttttattcatctgctcaatgttgaggtgtgcatcaaaaccctcggaaaaaccttctcctttgttgtattcacataattcatgcatcgcaattatgtggagccttat

SEQ ID NO: 10575 - DNA, 364 bp, Zea Mays
tgggattcctggtttcacaccggggcattgaagcaaacccagagaagatcaaagcaattgagacaatgaggcctccggcccgaatcaaggacgtccagaagcttatggggtcactggccgcccttagccgcttcatctcaagactagccgagagggcactaaccttcttcaagctattacggaagtccgacccattctcttggaccgaggaggcagagcgagcttttcaagagttgaagcagcaccttgtgtccctaccaatactggtagctccagagccaggggagccgttgcacttatacattgcagcggctacataggtggtaagcatggtgctggtcgccgaaaggacggcacaacatcc

SEQ ID NO: 10576 - DNA, 628 bp, Zea Mays
ataaaggggtagactaggggtacaagcaaaaatagatttcttctaccttataatatagggagcataatagcagcagattgtagagggaggacttctgttggtgatggtcctcgacataagacgtcgacgcgactcggcagcacggcgataacgtggcacagagacgaacatcaaggcacgtcaccgtggagttttaccagcgagcggcacggcggacgtagaggcatggcactgatttggagcagcagagcagcaaccagcagagtggttgtgctcgaccaacagcagaaaacgttcagcagcagggcatgacgaactgccatacaggaggcggtggcgcacttttgcgagagcagcctacagtagggtcaggaggaggaagggaggcagggttctcacgcggcatgtgatttataggtcggggagagaaaatcaaacgatgccaagagggagatgaatggcgttgtcgccattaatggcagagataacagtcagtgattattggggaatggagagggacggatgtcgcagctagtgcgcgggcaaaagggtgcccgggcgagttccggcgagacaatacgatgacgatcagcttcggcttctctggtttgctaggaaccagcacggg

SEQ ID NO: 10577 - DNA, 590 bp, Zea Mays
tctcagatgcgagctcgttaaaacagacgcttccgtaagcatcgccagggcggttgcgacctgtgcatggctgttcagacttggttccctcggagtataaatatcaatgtctggcaacacctttggccatggcgcagataatggttaagctaggctaccaggctaaaccttcctcgagcggagcgagagaaagacaaagaagggtatgtcgtcgcggcaggcgatcctcgcgtgcacggccaggtctgagcgcggcatgtggtatagaaggatagcaggagatcatgatcgtgcgcgtgcgagtttccatgcagaagaccgtctggggatgcaagatccctcgtcgaagatgcaaagctgtcgatctgtttccagccatatgcaacctcgccttcacctctacaactgtggtgagtcacccgatctaatcatggccccgcggtgcgtagaacctcttgcatgaaatttagttcgctggaaaatctgggtcgtgggattggagttggccggcaatggcaccgccgccctaggcgctctcatccctcgcgtccgtcggccggagtgaagaagacaaccgggatccattgatc

SEQ ID NO: 10578 - DNA, 379 bp, Zea Mays
ttcatggatgtattcccagaagaattgccaggaatgccgccagaaagagaagtggagttctacattgatctaattcccggcaccgcaccaatcgcaaagagaccataccgcatggcccccaccaaattggcagaactaaaactccagatcatagaacttcaacagaaagggtacattcgtcccagctcatctccttggggagcaccagtcctgttcgtcaccaaaaaagatggaagtatgaggatgtgtattgattaccgatccttgaatgaagttacaataaaaaacaagtacccactacctcggattgatgacctcttcgaccagcttcaaggggccaagtatttctccaagatagacctaaggtcaggatatcacc

SEQ ID NO: 10579 - DNA, 408 bp, Zea Mays
ccacgtcggcagatggaagaacaggagcgaagagtccgtcgacgagggcgtctcctccaacgacggggatacgagggagatgaaaactgaggtgaaggaaaacaatatcaccagcggagccgtgatccatgcataatttgcatagtttctgctacttgactgtaaatagtctcttgtttgtactgaataaaatatcatatctatgtgatcagctggcactgacaaaatccgagcttggacgcctgaacgaagagaacaagcagctcaagaacattctcaccaggctgaccagcagcaactccaaccccctccagatgcagatgcaggccctcacaacgatgcaacagctaaggaacaatatcatccatcgaggtcttcgcggagctccaagccatgaggtaattaaac

SEQ ID NO: 10580 - DNA, 335 bp, Zea Mays
aaaagaggaaccgactagaacaccagaggcttaataaattggtctatgtcagttacaacagaaagatggaaaataggtttcgaacaataagagagctgggatccaaggggaaaagaagcaacccactggtgcttgaagagtttatgtgggaaaatgaatgggttgaagaaaataatgaagctgatggtgatagcagcatatggcatgttgtggatgaggcattaggggcaactcatgctctccaaggcagaaatttgccaagattagctgctgcaggtgctgcttcaagttctcggcctcaacgaacctatgttaggacaaggaagcgttcaaga

SEQ ID NO: 10581 - DNA, 605 bp, Zea Mays
cttacaagcggtcgagagagggaggagctcttaggtctcttgtgtgtgggtggacctaaagactatgggactggagtcctaactaagccttggacgtcgcggtggcttgcacgcttggcttcggcctccgggtcttctggtctcgtcaagtgtgtgtcttctgtttggtgttctccctttgttcctccattcgtattgtggtcgacctcctccttttaaaggccggggtgggggtcgccaggtcggccactggtaggttcctcgagaaggagctaccgtactgtggtaaaaccaagcattttacctgcattgttcgcatgcgtcttggtcgccgaatcgtctctgatcatgctcattatggagagcggcatgggcgacgaagagttctggcgccatcattgccatcctggtgccgtgccaacccctagctgtcatagcctgggtctcgacattgctcatcgtgttggagagcccgtaggctgccagtgcactcaggcctaggctcaatagggtgtgagtgggccataggcctaggaggccgtaggttatgagtggaaggtggaccgactcaccctctgctgcctagcacatttaatgtgttgcgg

SEQ ID NO: 10582 - DNA, 322 bp, Zea Mays
gcaagattaaagcaaaaggtaagcacagctacccacgacattgatgatgttgagcagtgttaggactgagagaaacataatagggcctagtgtacacctgcctacatctcaagcgccaatatttagctaatgtttgcattgtttgtaagccaaatctcatgcatctttgcatgactcatcaagccgcctccttcacctttctagtcctgcgagaattttgaatctgttaagatggatgtgccaacttttactactcccttctcttcttcttttccctttctgagagaagttgcatatccctctaattaattagtaagcaaag

SEQ ID NO: 10583 - DNA, 376 bp, Zea Mays
taggctctttaagttggctgcacgtgggcagcaagggactaaggcatcaacattactcctcctaagtcacgccgacccctggccttcgtagctcgagcctcaatgtttctcgtcatgttgcgaaccctatagattgtcaggaggcttagacctaggctcgaaaggacataagtgagccacaggtcgactacatcgtaggtcatgagtggggctctagctcgggttcgtagatcatgagtggaaggaggactggctcctttattgtggctcagtggtagtcacatttaatgcgatcagtcatttatgacgggggcagccctgatccgggtgtgaaatccactcgagtggcttcctctcatttcgcctgacccccccc

SEQ ID NO: 10584 - DNA, 688 bp, Zea Mays
gtcaatattaacatacctttcgtcaatattcgaatttggttctagactacttgtgtgttgcactgaaacattaccttgaaaattccattcatcataattctcaagtatcccattgcacaccaaatgtccatacatgtcatcccttgtttgaacagtagtgtgcacacatgtctggcatggacaataaatcttgataccttcaggtttatctttaaatgcaaattcaaggaatttctctacaccagctagatatggatcagaacctttagagtaacgcagaagacgcttgaccaggccaatatccattccgacactggaacaaaatacaaccattcatctacatatgtttatttctccaaacgtaactacaatacattgatccaaaattcatagatagctatctttgagacattggtaactccattgagtaaatgagtagtcagtttcagcacataatgatgtctacacagcacaccaatatctccatggggaatgagagggataccttgcctgagcgcttgtggcggggagtaggccttaatgaagtcgtggggatcacgtccttcactgtgggacaccggcgcgatcctattcctcgtctcctctcgctgtcctacagaaggcgcgcgctgacttttgaggaggcggtggtgcgcagcggccagcagggcgttggtgtggctggcgg

SEQ ID NO: 10585 - DNA, 479 bp, Zea Mays
cagctgagacagtcgcctccaccagagttgtgcggggggaacaaaacccgagcggggtgaggtgcgccgcgaatccgtgttctcaccggcgtcttgtccctggggtgcgcaccggagagtcattcgtgtgtggggtgtgtggtggcaacctcggctggggaagaactttgctaacttggaggtaattcgtcaccggagtgcacacttctccgcctgtccgccgtgcaccgtcggcagtgctctctacgccttcaatcgtaggtaagattcataccatcgtattcgctaggacccaatcatcgtttagcacctttcgtttgagagttctatgcactgttgcgtggatggccatcaccgaccatggctccgtcgtggggagccaccggtgccgccgtgcccggtctatgtagagggtggcgtttgtgtattgttgatcttggatgggacgctacagattagatgggagaacaccccctcga

SEQ ID NO: 10586 - DNA, 685 bp, Zea Mays
ctcttttgtaggcggatcttcaggattgttgacaaactctgtctgcatatcttctaacatatgatccaaccgatcaacgttttcaccgtcatccacctccatctgtgctgatactatactccgtgactcaccgtgcttatcccaaaccttataaccttgaacatacccatgactgcaaaggtgtagtgccacagttctcttgtcatgtgactggatgttcccacatttggtgcatgggcacctaatcacagcgtgggttgactctccacgagcgttctctaaaaacttttctgtcttctgaaaccattcctttgtgtgacatccgcccttcttccaaccagcatacatccactcacggtcatcttccatgtttgtggaccaggatggctcagttttgctgttgtgtaaaccaccaaccaaaaattcagcatataagagcgatgcacgtggcttaggtgataaccctactataggaaaggccataaacccacccgagaatggaggcggccgcatgcgactcgtgacgtgcccaatggtccgaacgaaatttcggcagcataaccccgctgttctccgaacgcacgcctatcatggtgcgacgaagaacaactgggttatgctgccgaaatctcgttcggaccatcggacacgtgcacgaatcacatgcggccacacccattctccg

SEQ ID NO: 10587 - DNA, 382 bp, Zea Mays
aatgaagcgaggggacaactttcctttaactttaaatctcctcataccccggattggtgacaccttcagatacacatgatcaccctccttaaactcaagtagtctccttctattatcagcataactcttttgcctggattgtgcaatgctcaaattttctcttatcattcgaacttgttcttctgcctcttgaataagttcaggtccaaagaactgtctttctccagtttgatcccaatacagtggagtcctgcattttctgccatatagagcctcaaatggtgacatcttcaaactggcctggtagctattaaaactcagcatagggtaagctcttctcccaactgccaccatgcttgagagcacaagctcttaacatatc

SEQ ID NO: 10588 - DNA, 1155 bp, Zea Mays
tgcgcatccaatcgtctgcatcgagggggttgcttgatccggcgaacgtgggaggtttgagtctcaggaaatcccccattatgtcttgtggtcttccaccattcggccgttgattttccagatttcgagtgaggacctcgatgagtcgggtttgattggctagaacttggggtaggtctaagggtagtggtggaggtgcggggaggtgggtttcactttcctctctaacggcttccccttcagctctcaggggaaaccctgctccaatcccggaggcggtaggcgtggttttatccgaagccatctgccagggaagagagtcactattatgcacatgcaaattgttttcaaccaagttattttattcattacaccagcacattacaagcataagactactataggtagaactacacgagagcgttccccgaggtactaccgaactccttctctaaggtatccccaaattccttgagaagatcatcaaggcttgctagggatatatcctcggcgtcggaccaatcatctactctggggggaggtggggctggaggggttttcttcttcttcttctctgtttggcatcctcggttggtggtgttcttctggattttcttcttgggggcgagcttccttagcttcttgtcatagtccatctttaaggtctgataggcctcacgggtgttggcttcctcgccttctgctatgtcgagactctcctggagggatgccttctcttgcttaagctctttgacctgctgctctaggctttccactcgggagtttaggtgggtgcagtgggaggagagctcatcgtagtggttgtcgagggtgtggaggtatccagccatgtagacgatagtggggtcatcttctgtgggatctagagcctggagtcttttcctccaggtgggggtgtttttgttgctgggtgggaaatatcggaggggggtttcagagatctctcggctatagttttggcacagttgtttaagggcttttcgggcaacgccctgacaggtgtctgggaagcggtgcccaatgaaggtaatttggaagggagggtggtttgggtagttccggctttctcccaagtagactgccatagagcacttttctattccattttcgcggtactccttccagacatattcg

SEQ ID NO: 10589 - DNA, 773 bp, Zea Mays
gtttaaggataattattgaagtactcgactcgtatgatgaacacgaatgcgttcgtgatttgggaagtaaatgcatggtgattgcgatttggagattagtggtttacgattcgtatagattggtcggtgtgcgaaaatacttgtgtatatggtgtttataaaattgttgtagtgtatgttgtgtctcggattgcgataataatggactagccgacgtgtatgttatttagcgggctatgtcgttactctagttagccgaattgttggacggctttagttaagcacgtaatcgcgataaatttcttgttgtagtccaaatgcgcatggttatggtcgcggttaaaattagtggtgctcatgtgatgtctaagtgaaaatgcaaattagtgtgtgaagggcgcaatcgatatacacatttataccaggtttgattaatgtggtgaatgtgtttgctgattgtgtatggtaattctagcgcacgaaataacttgtataaaattagtaagtctacttattggtcctaatttgattgttttaactctaatagatggtaaagtgttagaatggttgaagtctctagaacgcgacaattcttgaattgtataggagctgaaatttattaattgttgttttggactgcacgcagtgatttccctgtgctgtattttgatgaaccaaattgtgttttctgtagatatgtgctatagaaaagtggtagataactttattatcttgctggtgttaaaatttgacaggcataagtctgatcgttt

SEQ ID NO: 10590 - DNA, 425 bp, Zea Mays
agcagcagcagctaccaaaatgttttctttatggcgctagctacgcggcctttcgacgctctcatgggacaaaaataaagaaaaaggtcgtcacccactcacccgtcacagatatgctacataattattgggatctaattctactattactataattccaacccctttttttggttagcggtaatattttttatttaccaacagcgcgcaccagtactaataataacatcatcgtcgtcttcaagttctgacttggaaccatgcatgcgactcctactaacgtaaccatgctggaactgtgcggacaaacaatacaatgcagccctcttccggtccctgctgtacgaggcctgcgggcggaccatcaacccggtgagcggcgccatcgggctcatgtggacgggcaactgggacctgtgccaggc

SEQ ID NO: 10591 - DNA, 501 bp, Zea Mays
tttcatcagcgaagttctgggcccctcgaagaaaaagtatcctcaagtgcagaagctgttatacgcagtacttctaactacccgcaagctgcgtcactactttgatgaccacaaagtcatagtagtcaccggtttcccgataggggacattctccacaacaaggaagccattggccgaatagccaagtgggcctgtgaactgggatctcatgacatcgaatttcgacctcgtactgccattaagtcccaagcattggttgacttcatatcagaatggactgaacaacaaataccagagaacccagaaactgcagaagtatggaggatgtattttgatggttcactaaaactgcagggagcaggcgcaggaattctcttcatcgcgcctggaggcgaacacctcaaatacgccctccaactgttatttccagcctctaacaatgcagccgagtatgaagctctgatccatggactaaacatcgccatatcattggggatcaa

SEQ ID NO: 10592 - DNA, 524 bp, Zea Mays
cacgttagaaagggtttggccatgacctcgggcagacttccggctcgcccgagcttggctctgctctcaatatttgtggcaaaggacaccccaacgtcatcgaatatagaagcaccgatgcatcccataagcaacttttctccataccggagccctgtgacaaccactacggtatgggcaacccctccctcggggggctcatgtacgtagccgaaccctcaacctctgcctcggctctcagcgggaaaccaacaaactcaagtcaacaatgaagtacaaggtcatgttgtccacatgacacgaagacgctcccctcagcaacaaggcaatccccggatataatgtcttgctccccttaggtgtataaatagggtagtctatggctcctccaagaggcaggcgaacacttcagagtcttccccttgcattcgatattggcacttgcctcaatcatatttagggacttggggtcttcccctctcccgctcaccttgtaacccctactacaggcacttaggtgcgag

SEQ ID NO: 10593 - DNA, 410 bp, Zea Mays
gtacaagtcatcatcattttcttcttaatataatgatgcacaattcagttctcctacatgttcgggagaagacaatattcatcatccgttattttctgaattacgtttcaggttatggttcatggtacctttttccctcggattcgcttccgttacaagtaaaccgcctcagtacatgacttgcacttctgcacgtctattgaagtgtctatggtttcttttgtactcaaaccgtagataatggcgatgcataaactcgtctcgacgtggaactattcatgggcgcagcaacaccaatagagacacggtcaattttagtgttgagttcaaagaattctagaatctagtcttagtgtcttacacaaatgaatccagccgtgggtctcagaaaattcgccactggtgacagg

SEQ ID NO: 10594 - DNA, 746 bp, Zea Mays
gggataatcaagggggctaggagattagggtttctaacctagggattaaattttgggatgttacaaacctaccccacctaaaggaatctcgccctcgagatttagactgggcttgagaaaaggtaagggtattccctcctcaaagagtcctcactctcctaggtagcttcctcttctccttctctgctccactgaactttacagagtcttacttttgagttgcgggtatttcggacccgagtcgagaatctttactggcttttctcggtactgcagatccttctgaatctgaattgtcccttcttcgatgcgactttccggcactttcaggcatttgcgaagctgggatacatgaaacacattgtggatatctgacatggattctggcaattcaaggcggtaggctgcgggtcctaccctgccaatgataggataggggccgacgaaccgcggagctagctttcctttcacttgaaaccttttgactccatgcattggggagaccttgagttagacgaagtctccttcctcaaacctgagttccctctacctgttgtctgcataacttttctaccgactctgagcttcaagaaatcttttgcggatcagggcaactttctcttctgcctctttaacgaaggcagacccttctagtgtcttttcccctacgttggaccacattagaggggtctggcactttcgtccatacaatgcttcgaacggtgacatcttgatactggcctggt

SEQ ID NO: 10595 - DNA, 1267 bp, Zea Mays
gaaaaatacaaagcgacaacctacctgttcacgcacgacactttcaagcaattttgttgtcctttctctcatgcgctccctctcccactcagagaagaggaaggaaagcgctcggaagtagggatgaaaacgggacgggaaaatcccgtaccgaccggcaccgtataccacgttaaccgatcgtatatcgtattttcgggaaaaacaggaaacgggaaaaaatacgggaaatatggacggtaacaggaacggaatcagtaagagttgtttcccgaccgaattaacggttcccgtattttatccggaataatctcgtctgtattcccgtttgcgcttggcccaaatgcgtgcgtggcccaaatgtgtgcagtgtgcttggcccaaaaccccaaatgtaaccctaactggctagcttgtcgtcacggacgtggtgcatcagtgcatgtgccgtgcggatgtgctgtgccacccttggcttctctctcctccgcgtgcggcattgccgaatgcggctggacggcggacgggctggtggctgagcgcctgaggagtagaggaagcgattgctgctgcccgatttgctgctgcccgatggctctgctgttgggcacttgggcgtactactctctgctgttcggcactggtagtcctaatttctaaactgaataactgacactgttagtctataagtaatagtcgtgacatgttggcctgttaggcacttggtctgcaatttttcgtgttaccgattcccgatcgtaatcgactcgttcccgattgaaaatgttccgttcccgatatctcgtaatatcggttccgtttgtccgtccaacattcccgttcccgtttccgattttggcaaaaaatatagtaacggtaatggtttgagcattttcccgaccgttcccgatcgttttcaagcctactcggaagcgtgagccaacaagcaagataggtgtcgggagcagccgcgcggatgcgtcgtcctgacgctgggcacgcctcgggctcagtggatgattcgggaccagattctagaggcgcaacgacctcgacatctaccacggggaacgacagcggtggcggagagactggaaaataaaaaggagtgccagagaaattgtaggggaggcgaggtgagctccaaacctgaagtagccatagattttggcggtaggcgagaagaatggggtgtttgatgtgtgggcagctctagccgactgtagtagaaggctttgtgtctggtggttaaagttgattgccgcac

SEQ ID NO: 10596 - DNA, 286 bp, Zea Mays
gcccacgtccgctcactttttatgcaagcgaaccgatttagcgtaaaccgaaaaccaatttagcgtaaacagagtaacacccccgaaccctcgttccagaaaaagcggcttaggcccactttccacgtggtcaaccacctcttccatagtcaaaacatgtttacgctatttcaatctcctgtttatgcacaatatcgatttagcataaatacttcatccgaacccacgttctagaaatacaggattaggcccactaccccactttccacgcggtcaaacaattcta

SEQ ID NO: 10597 - DNA, 370 bp, Zea Mays
cgacgcgaaccagcaacctgacaagcgatgggagaagaggccacgcgaagaagtacacgccgccggaccacctgccgcccgcgctcgaggaggacctcgaggaggcgaacgtacgctggacgacatcctcgacgcccagtgcccataccacaaggacatgcgccacactcttcgtaactgccgagacttcaagcattccgtcggacacggccgacccttccaacctctacctcctcctccgccgaggggaggaccagatgaaccacgacaacctcatcggccggaggagggaggaggaggagcagcttttccacgcgttgacagggaggtcaacgtcatcttcggcggacacggatcgcaggaaagcaaa

SEQ ID NO: 10598 - DNA, 364 bp, Zea Mays
gcacgctgccgatcgagcgtgctcgcgaggatgagtggccacgctactgtacgtgcgtacagcaaagtttcgcgtgtgcaattgtgcatagcatacaagaaaggaagacatggtttgagtgagtgcacactgcaggtttatttcttcccggatttcgtgcggtgcgggcatcgcgtggtcttctgctcatgaaagtcatggcgttcgacacagcatgcgatgcgattcatgtatatggatggatggactatggaaaggtttcgaggggtgtatgtatctttgggaccagtggacacatggttcctcctgttttctctgtagtttccggccaaattccgttcagccgagcgatttctatttcttg

SEQ ID NO: 10599 - DNA, 613 bp, Zea Mays
cctgtttgatttactttcagttctcgatctcgtaggctaccctgttaaatcactacaaaacaatcctcgatagttggtgcactaggaaggggatttcacgctgatcattgaagatttgctgatagccatggcttcgcacaaggagaggaaatcttcttcggcaccttcaacttaactgacgatgcatccaagaatctcaggcatctacctgacacctcggtgacatcaaaatttctctttgacacattccactttgtcagcgacacgcttgggcagctctggctagtgcatgattcctaagaaacatcaagatcaggagcttcgaattgaatagatccaatctatgctttgatctggcttcctcgaggtctcagtttgtgatgattcaaacagacacaacaacttagactcaaacttcgattactcgaggtctcattttgtgatcatagaaaactctaggcgatgggagaatcttccctctaaggagaaaggtgacaacaatggccccacgacaaggagggttcaggaggaactatgacagagtggccgagatgcccacaaccaaattcaaatgatcgacttttaacgccatcaagtctacaccaccccgaca

SEQ ID NO: 10600 - DNA, 695 bp, Zea Mays
ttaagggagattttcccttgatatccttgccagagtcctcatcaccactcttggcctttttagcatctttgccaagagagatctcaccaaacccttgtctatcaaccgaagccctcttgcccagattaacagagtcatcattccaaccttcatcagtaatattgtcaattttgaagtaaatgtcatacaaaaaaggtttgacaccaacttcaatgataggagggatcatagcaacactcttcacatgaactttaaacctcacaatttctttagagtttaaagagttaatatccacttcttccactgctccaatagtggatcccaattcacaaatggcctgatagttttgtaactcttctggcacattctcagcaacaatccacacagaatgcagtttagatttaggcttagcctgagaactccaagaagagacagagattttggctccagacaatttcattttcaactcggggaaattaatcatttcatccaatctctcttgagaggggaattgcatgagaaaaccagaatggcacttagtagctttccaagtgcggccccaaggaaagtgaaaaccaaaatccttctccagatcatcggcggtgatcagaccctcaactatcttaaccaagccaataaaactacgtttaggtttgttggataggggtttggcgaaatgagaggaataaaaccct

SEQ ID NO: 10601 - DNA, 563 bp, Zea Mays
gcaagcaatgggcaccaagctagatttcagcaccgcttaccacccccagtcagatggtcaaacagaaagagtcaacaagatccttgaagatttgctaagagcctgtgtgttaactttcgacagggattgggagtccagtttgccgtacgctgaattctcatacaacaacagccatcaggccagcatcaaaatgtcaccgttgaagcactgtatggaagaaaatgccagactcccctaatgtggtccaatgtaggggaaaggacactagaaggacccgactttgttaaagaaggcgaagagaaagttgccttgatccgtaggaggttacttgaagctcagagtcgacagaagagttacgcaaacaacagacgaagagaactcagatttgaggaaggagatttcgtttatctcaaggtctccccgatgcgtggtgtcaaaaggttccaaatgaaaggaaagctagcaccatgtttcgtcggtccctaccccgtcattagccgagtgggacccgcagcataccgtcttgagctaccagaatccatgtcagatattcacaatgtgtt

SEQ ID NO: 10602 - DNA, 467 bp, Zea Mays
gaccccagtcacttcaagaataactgcccccagttgaaggcatcaggacctacttactccaactcggtgaatggccccaaaaatgccccagcgcccgcctccaagccaccctcctccatcagccagcagagcaagaaccagtatcatggcagggcacgagtaaaccacgtcgatgttcaagagggtgagcaagctccaggagtagtgctcggtgagtttcttgttgaatttactcccgctactgtactttttgattcaggagcatcccattcatttatagccactagttttgtggaaaagcatggcattccctctacccacctagaaattcccttggtcacccgaaccctagggtcagaccttttgtgccagcttaaatgctcctaagttagaattcttttaagtggggtagtgttcttggcagacttaaccgtcttgccatcccaagggatttatgtgatcttagg

SEQ ID NO: 10603 - DNA, 729 bp, Zea Mays
agttcactggagtagttccctgtgtcacccctgtctttgctgaagccagcccaggccttagcacgccttaagtcccctccccgtggctggaatcgctcaccggagtttctccggcccgcccgagaccttctcaccgccgttctcccctctctgcccatggattcatggcctcttcaccgccattgagttttccgtggcgccctgtccctctctgcccaactctagcgaccccggagccaccctagctcgcgcctgcctcaactccggcgacttcaccgccatggagaggagcggcgccacccgcaaccgtctgtttccccggtctgatcccctccgttcgattcagatcgaacggcctggaccgcgggataccgcttcgtgcacgcacgcctgatgccctggcccgcctgtcagcgccacccgcagccgctcatccttcccggtctgatttcccccgtccgatcttgatcgaatggctcggaccccgtcggacccttgtagccatccgtttcccctctggcgctgggcccgctcggtcagcgcgctctccccctctgtcactgacactccctatcccgcctgtcagcgctcgcccgcccgcgtgcgcgccctcggccgtagatctaatctcggctatcagtttctgatccaacggttagattcacccgataccccttcgcgtggctgttttgcttaagaaaccccctagttttaggaaatcaacccgcc

SEQ ID NO: 10604 - DNA, 959 bp, Zea Mays
ggactgtgggtttattattaaattgtccagggactctttaacaaaactagtgcgccgaaggggtatcgggtggttagagtcgtccgatcagaaagcaagggctcagattaaatcttttcctcgcctgaaccggtacacgatgattaccataggatcggaaatccacgaccgttatttaatggggagaaggggtatcgccacgatttaatctcgaccgtacattgcaagatctacggttcccaggtcatcttccacctctcgtctgaaccgtggggcgagggaaaaccacgacggttgcgctattgccgtggtaggtgatctagcatcctggtggttcctactggcgtgtctagggaatatacaggaaataggaacggcgaatctatggatagaaaatttaccggcgccaatacgtagaggaactcggccacgacgcaacaatccgactacgcactccttgtcgtgaatgattttccggccaccaggttctgctcgaagaagatccgcatggtggcgtttctatctctctctctctcctccgttgaccgcacgctacggaagacgcaggtgcaggccggccgtcgctacttgctcggctgtgtggaggcctcgcgacgacttgtagatggacgaggaggtggtcacgggtgctcaaccttatatatctagaggcacggagaaacggccgggcaatgcatgcttgcatgagtcctggcggttacgaggagttcggctgtttgttacgatatcaagctgagaggagagcatgtccgggatggcccgcacgtcagcgccctcacagatgcaagcgcttgcgggtcacacctaaccagcggcgaacgcggcgcgtggctgttgctccattccgttttagctgcgaggaggacgaacgagctgaccctcgtgctcatgcacaatggctcgccgtgaaggacaattgggttgctggtgaaggcacg

SEQ ID NO: 10605 - DNA, 488 bp, Zea Mays
catccatctgtagatctacggtttaaatcgaatgcgggcgaaaggggtattcgacttctaatctgagcccttcccaggagatcggacggcaccaggccacactgcgaaccggtatgttgatatctgatcttgaccccacgttcccaatccgacgcccaggcactttctccctaacccagccgcgccccgacgacggagctcagctcccgcgatggccggttcgccggcgagcacgaaattcgatgctaaccgcccccatctagaaattgatcgctactacatcgagaggggaaaatggcgaaactgcagagaggggtctcaccggcagtggtgctgcgtggaggctcagaccgcggtgagaagcgatctgcggtggtgcttgaatcgacggcgacaaattcaggcgacgtcggtggctaatcctccgccaaacgatcgcggtttccttcctcacggccgagagagtcttctgggttccacaccccgcg

SEQ ID NO: 10606 - DNA, 604 bp, Zea Mays
cactatttattatttctcactgttacttggcagacatgaattcaccaatattttttgtatgataggtaaatacaagtgatagccgtgttgaagtggactccaagatctagaaggttgttggggggaacacaacgcaaattctatcaaagagcttatcagcaacatgactctaaattataatgacaatcggttggtgttgcagcatgagtcatgaacttttttattctatatttagattattatatattaagtgggcatatggtaattttgttttattattcactgacttgttcctctctctgaacttaccatttgcaattactaagacaaatatgatgttctttgtagtttctttgggcaattcagatagtaaacagaaagtggctacttcttcagaagcgcaaggttgctttacaattgtattatgagaaaatatttgatgatgagaaatggaggatctggtgaacgacttcatgagtataggttcgtttcgtcgccgaaatctacttgtgcaccttattcatctggtcgttgtgcgctcttcgattcatgctccaggcgctctttcgctacaccagcttgagtatcctagaggaaatagttt

SEQ ID NO: 10607 - DNA, 672 bp, Zea Mays
aattactgctcggtgattggccacaagaaacgtacccatcattaccggctctccttccggtgtagtggccacttgagtataataaattcgcccagtcttcttgacatttttgcccgctgaattattagctatgttccctttgccttgattggagatcccagagttcggctgattgttggacttattctacctcggatatggacagtcttttataaaatgaccagacttcccacagttgaagcagccagttgaggaactagggagggcggggaaacgagcaccaggggcactcggctgatttgtagaagtggggacagtggtaggacgaataaacacaggctgtttgaacggataggagggtggacgaggcaaagaacgattctgattgaaaggtcggattaccaacctagttcgcttctcaggtccttgactggccctgtcacccccaaatccctttgattttccttggcctgtattcttggcttctactgccagcactgtgctgacagctctgctgtatgtaagatccagacaggtggccattttccattggagtcggttgttgagtcctcccatgaagtagttcttcttttttaggtcagtgtttacttggtcaatcacatattgggataaatgattaaatttgttgagatactgcatcacagtatcccc

SEQ ID NO: 10608 - DNA, 652 bp, Zea Mays
gcctcagggatgggcaccaccaccaatgtttcagcaggagcggcatcagaagagtcctcggctaacatatcaagcatggcacttatctctgcatcacttggattcaaaggcacctcaaaatggacctgcctctcgtcgtcaggaatctctccgagcgaggcaaccaaagcactaacttcttcaggagagggtcgcactctaagacccaaaccgctatcaccagtaggaggatttgacacaaaactattaaaagcctaggaaggaggcaaattctaggccgagtatgcaacaggggcgccgatgttcgataccttgcctctgagtatcatctcaagccgattcactaagtccacaataggaattcttctgttggttacccgtgttgagtcagccaagcctcggtacagataagccagatatgctctgtctttcagtggctgaatgttcttgaaaacaaagttagcaaccacagcttctgcagtcagacccctttccttcagcaatccaacttctgctaacaaaacccctgcttcagccacttcctggtccgtggaggactcgatccagctcggagtgcgaacatccggctgtcttcctgaccgtgggaggagggaattcccatgattctccatgatgaaccattacaggcgcc

SEQ ID NO: 10609 - DNA, 550 bp, Zea Mays
atgacagtgggtcgacggaggaggtgctcacggcagtgcagagagtggatttgggggaaattccaaattagggtgctacggtggacgatcgggcgcgaggagtggttcactgggttcaatttatagaggacgaccgagaggagggaaaatttggacggggaagcgctcgcggtgagaagggggaagagtcaccggaggtcgctaacgtggcgctcactggctaactatctacgacggtcactgccgagtccttatagcttgcgacgacgtggtgaatcgactacggcgtggcgcaatcacagtgaacggcgatctccacggcgatgaccgtctggccacgtcgctacgcaagtgggtacgacaactgggcagtaatagtgccccgacttcatcccctgcgcgatatctttcaccctacgtagttatccgcacgccaccaggcacaaatcgcaacgccgacgaggatcacgacgcgggatcaccggtggcggtgcactgaacctagcgatcttcgtcaggttactgtaccatgcgagttcctttcagtgtg

SEQ ID NO: 10610 - DNA, 651 bp, Zea Mays
caaatgtgaacctcatatcgaagtcacaaacgaccattacattctgcgatgtgtaaccgtgtcgtccaatatatttggcttgctctgaggccgggactgccgctggaaagtgactaccatcaattgctcctatgcagtccttgaagtgtggccaaaatctcgcctctcgcaaatgcggatgaatctcggtgaaatatgggtctttgggcttaatgatgtcagatgacatcttaaacagtgcatcaaggacttcactatacttgcgactaattgtttccaaggagtgaccaaacttattccgtatttgcctaaatgactgtggacccccacatgcccacaagaaaatgccaagtgcttccatagtactgacaccccggcttggaatcagaccataattctccaccaatgtgtcatgcaatcgtctaaacacagttcgtcacatgcaaaaacatatcgaagcagtcgttactattctccaacgttctctccacccattgaataccagtttcaaccaatattcttcttggaacctgactgatattcctgccccaaacatctacagcacatatagcaaccaccaattctgcatctctgtcatccatttcattatcaaatgtgtgtgcagcagggtcagacatctgcatgcacaca

SEQ ID NO: 10611 - DNA, 1269 bp, Zea Mays
ctcgacccacctcaccatttccccttgtgtggcccaagtccacggctccaagcgccatcacgcggccacctgtttggaccaatgacgtgtggggccacgtcgtcagctcctccttctccctcgtgttgcgtccgcaccagatcgtcgatgccacgaatccgccaccaggggttgtgcggatttcgctagccgttccaacctccccttcgacaaactcggccgtagaactcggacccgttctggccgttgctcccaggcgaatcctgtaacaggaagcattgaaacaactgggttcttctccataacaaattcagctagcgtcgcaacaaagctaggtaccacgggtctccaacaccgcccaactgaaccctcaccagccgccgagaaccgcggtcttggccccgcgcaagctcggactctccctgccttatataatctgaccgctcccgcgacgtcatttatctcgattaacggtgccatcgcgactgcttttggccaacatcgccatttaagctcgtacaagtgtcctgggaggttcgccatggtgcatcggtgtcgtgcgtagtctctccgtactcggatttggtgcgggcgtaggacgattgctcgccggagtggaagctttgcagtcaagccgccattagccgtgaaaagccctccctccaccgattcactctatggtaagacctctaaatagctgtgacttgatcctaggattatgtagcacctgtccgggggaagatccgtgcactggaacgccaggatggcttgctgcgatgtgcggaccaccgtgggggcagagcgccgccgcgccctggtgtgtagtggggaggaactccggtgatctccataggtggagctcggtctcgccgccgctactgcctggagatgggctggtgagggtgttgtgggacgctggccgttggatctccagacggacgcgctagattcaattctgcattttaaagatccggagcgtcgatctcttgatggacggtcttgatgggatataacatatctcttcgactaaagtgatctggaccgtgtatccctaatccgacgtgtcaggttgcataccggttcacacgctgtgcgatctagtctgatccgtctgttttggatcggacggctcataatagatcttaccctttcggccatgccattatgcaaaagagacaccgaaaagcttgctattcaacccgccatccttttctattgaaactaaccacaagttggcccctggtttatacaaagtcacccctaggtttc

SEQ ID NO: 10612 - DNA, 772 bp, Zea Mays
ggcgacgacgggcgtgcgggggtgggcgttgcggtagcggaggtcgtgcgagagtcacggcgggatgcgcggggaatgcgctgcggcggacaggcgggcgtgcagaggtttcgcgcggccgggcgcgcggtagcggagggcgttggggagaggcgggggcagtctacagttcgctcttaatagttgtagagattaatcaggccaatcccacgttaatctaacacaaagtcggtatactacgcacgctccttgtcatcgctggggcagtaatgatcgatcgcacaccatgatggccgcattaagctggctacatactcctgttactctgacaccgcgcaacaccaaggtccggggatcgaagtagaaagcatagagtgcagtgcagaggttgtacgtatacgtgtatacacaccaggttagatggagagtcctgtcagacgtgcatggtcccgtacgatcatggcagcgcgctcatgctgcatctatcgtacgtgtattattgtacttggccggccggccggtcggggccagaagtgcgcatgcaaaatactccccatcgtcgttcgttcacgtgtgtctccgggacgccagcagcccactacacccacacccacatggaattaatgccatgcatgtgctccttccctgacgtgactccactcgccagggctattaccactcccacactcgatcgcttggcgtgtactctactactctagtcacgctctactagctagcttgcagcttggggtacattcttgctcgttcaaaa

SEQ ID NO: 10613 - DNA, 412 bp, Zea Mays
tggcttattgcccatgacgtaggccagcgggtggagcatgacgtagggactctaggccgcgcggcctccgcatttattgcggagaggatgcgccgcctgtccaccctgctgtcaggtgatatgccccttcggcatttaatgcgtcctgtccactccgctggcagatggcgctcaggccatacagccggcggcgtgcccgtctaatctgaatagtatgcccgtgctgtaggatacgctatgtccaccagcacttgtgcattaccagggaagcttccccagcacgccaacactatgcggatcacaggtatcaaagcgtaggaagattgctccagcatccaactattgctgccccaagtcttacatccattgtgctcctgggcccacatgtcggggctcagcactcttgtacacg

SEQ ID NO: 10614 - DNA, 628 bp, Zea Mays
ttgtgtctgttcacctctgcgaagctttccttggaattcttcctcattttgggctttggaagtacctctaccactgtcggcccaagatggctggaggacagcattagcttgatggcggtgcagcttggaacttcgtcggggcaggaaagtcgaatatctcaatatccctctaaaggacaatatcaagggatggagccttgagtggtttaccaaggaaaaccacaacaagtccctccctcctcgatcagggaggcagcctgacgtctgcacgcccagctggacagagtcccccacagctttagagctagccgagcccggggtgctgcttgctgaaatatgtgcgctgaaagacaggggcctgactaccgaagctgttgttgctgattttgtcttcaaaaccatccaacctctgaaagatagagtttatccgacttatctgtacaccagggtcaatgaccctacccgaattaccaatagacagattcctgacgaggacctgctgaaccagattgacttgatgctaaagggcaagatttcgaatactggtgctcccttatcttattctgtctagaatctacctccatagagtccttttttttgaattcatttccaaccctcctgtccaaga

SEQ ID NO: 10615 - DNA, 544 bp, Zea Mays
tgatcgctggattcatggacaatcaatatctgcccttgcccccactttggtcagccgtattacagtgagaatcaagaaaagtagatctgtgcaagaagccttgataaacaataaatgggtaaatgacatatctggcagcctgtcagcccagattatcatcgacttcttagtaatttgggacctagtgcaaggttttcagttacatccggggattcctgatgtgcatcgatggtcaccgtctgcatctggagattattccaccaaatcggcattggtcgttttatggctggttcaatctcttttaagtcggctactagaatttggaaaagttgggccccccaaggtgtaaattcttcatttggttggcttctctaaatcgttgttggacagcggatagattaagcagacgaggtcttaagcatcctgtaaggtgccccctttgtgaccagcaggaggaaacagttcagcatatcttagtggcttgtgtgtttgccagagacacttggtggcagactttgcacaaggtggggctgcatcgcctgac

SEQ ID NO: 10616 - DNA, 492 bp, Zea Mays
gacgacaactgtggtgaaaagcaaaaggagaagagtgggtgtaccaaaacgaaggctagggagtgccggagcttcaccaagaggaggtgagggctctcgaaggcgtcgtagtatgggactaggaggacctcgcccgtgggtctcactcctcaaggtgcttcgtatgttgcccctgcgccctcaagagagggagggggcgtggtcagaagaggggcctcactggattgtttgtgcgccaacaactgagtgaggttttgaagaacggggccttagggcgctttttgaagacagggagcttaggcttatgttgtttaattttcgggaggctggtctaatcccaaaagcagagcttttgtaatccttagaagatttgtattgtcgtggctcgacgaatttaagtgaaacgctgccctcgccccccttcaccgagggacgactatgcgggtcttcgacttttgaatgtattcatgcattattaacgtttgacttttg

SEQ ID NO: 10617 - DNA, 996 bp, Zea Mays
gacattttggtgttaaaaagactgaggatgtgctgtccactcacttctattggcctcaaatgcaccgtgatgttgagcgctacgtcttgtgatgcaccacgtgcaacaaagctatgtctcgacttaacccacatggtctttatatgcctcttcttgttcctagtgcaccttgggaggatatttctatggactttgttttagggttgcctagaacaaatagggggagtgatagcgtttttgtggttgtcgatcgtttctccaagatggaacattttataccctgtcacaaaactgataatgcttcgcatgttgctgatttgttcttcgttgagattgtgcgattgcatggtgtgccaaatactattgtttctgatagggatgctaagtttagggtttagggtacgaagctggccctctctcctttgttgcttctcatgcattagccacatggagctgaagcttcctagctttgtatctgtatatgcgttgcatgggtgaggcccagcttcataccattttaaggcacctgaaacacacttgaaagccattagtgaaacaatttttgagggccttcggcaaaggtattcccccatagggcacgaacaccaagcgggaagctatattggccttagggctatcactgccaggggctagagtgaggaccagtttgaatcccctacggcgcgaagagacctctaatatcaaggaccgccccttgaccctagggctatcacttttgaggggaaaagggaacccattaggggccttatggtgtcaatgacccataaacccaaggaatgcgtttacacctatccctatgactattgttgcataaaggacaagtgggacaatgaaagccccctcttgaccttggaacattgcttttagggtccaagggggaatccctttgaggtacttgttgttccaaggacctcgaactagaatgcaaaaggctcctctagttccaagggctatccttatctagcgacatgggga

SEQ ID NO: 10618 - DNA, 572 bp, Zea Mays
tgcgcttaggccctgggcggtggtttccgcggtgggcgcgtgtaggcggcgcatgatttgcgctatgcgcgttgaggcggaaacgaggcgtgtggaagcggggttcgacgcgcagggaaaagatgagcacggaagctgctgcgcgggaatagaaagtgaataggagggaaagaggcgggaactgttgttgcccgggagagagtgaaacaggttgggagctgcagctgctgttgcatgggagaggaggaaaatagggtcgccgccagaccggtcctcttccccagccgtccagggccgccaccatcggtgtcctcttccccttctggtcaagtcgtccaggccgccggggtcatcgcctctctgctccttttccctagctatccaggcgtgctctccctctccctcctttgcttttgctctgctcctccatctcttctgttctatacttttattcattattccaggtaagtacccctaattcctagctaaaacttttttttctgtgcaaatatatattatattgtatattcctacaaacgcttaagcacgattaatctacgcctaagctctct

SEQ ID NO: 10619 - DNA, 340 bp, Zea Mays
aggagataaaagaaaaaaagggggggaaataggaatgcctcacttgggccaatttggcctagccggcccatttggctatccctccgcgcggcctagttctcatctacacgctggggcgccgacaacctgggcccacttgccatttactcacagacgcgtctaaccagtggtgttctctatgccatgtggacccgagaagtcagccgaaaaaccttaacaaccatggtcacgcatggcgggtgcgccggcgtagctgggagcggactcggggtcaaatccgtctccacctcgcctctataagatgcgccgcaaaccctagacgactcctcttccacctccg

SEQ ID NO: 10620 - DNA, 501 bp, Zea Mays
tatttctctatttttattcttctctggattgggcatcaaatttcaaaaagtgcagggggctcggcgcaagtaaaccctagactcatactgcaccgtggttggactgcgggtttattcatgtaaactgcagggtctctttagcaaaatgtacctacaaagcggtacacgacgatctcggccgcacgattaaggttctgtggcccagattagatctgagccccggtaggcacacgagccacaggatctacgatctacggctcaaaatcaatcactgaaccggtatgcagcttcgaccacacgatctccatccaaccgcccaagttacatctcgcccgaatagtacacacatccaaacctggcctctggcttctaaatcgatggctcactagtcatcttccccagctcgacactagggcacgcccgacagcgctcctagcggcggacacgccatgccgtgccactgctccctacgaaactaactggttgcacccaggtcccgag

SEQ ID NO: 10621 - DNA, 596 bp, Zea Mays
ggctccctcagtcgttggatctcggatcaacgaccgagattagaccggcagggcgggtgcgcgaggcgtgggcaactgacaggggggccaggggcagtggtgtgctgagggcgcaggctttaggccgttggatggggaatcaaggaccctagttcaacgaaccgacacgaattgatatccaaggatctggacccttgaatcgggggtgggctgtcaagatcgggtgccgagggggtttaacggctccggctgaccagggcggcgccactcgagcccttggtggcatggccactggagacaaagcgggcccgagatctatattagccgagcatcatggagacgcggcggtccgacgagcagtggatctggtgagctcaaatcctccacgacaagacagaattaaggcaaaagaagggaggagtggggttccttacccaggggtggtgctcggggaagcttagcacgacgtcgggaggctctggtcggctggacgacgaggaaacacggtagcgacgatcaccggtctacacagggagggagttagacgtggacgaggtaaaggggccggtgaaaggggaaactaaggcgagttcccg

SEQ ID NO: 10622 - DNA, 739 bp, Zea Mays
gtgcagccgggcatgcacaataagtgcacgacatcaaccacagggtgcgaagtctttacaaaaagacacgtccgagcaaaagccgcctaagggtgcagccgggcgagcgcaacaagtgcgcgacatcacccgcaggaagcgaagtcctcatcctactaagtgtcgcgcaaacacgattacaaatagaagcaatctcacaataagtgcagcacgcaatatgccatcgtaggtaacatacataaaacattttgttgccctcactctctattgcgaagagggggagggcagtgttttcactcactatcgcaacacgagagcgaggccagcaaaaatgctacataggctccgccttcagaataagacccacctcccggaaattaaacaacatcatccttaactcttcgccctcaaacagattccgcatgtccccctccccaatacacgtttcggacgtcgaggatagtagaccgcgttgacaaccccaatctagtcgaagacgagaccgctccatacccatccgacgacgtctcccacttcgtgacgtcccgccaatgctctgtttcgacaccacacttcgcctacgcgagtcttcggccatcgccctagccagggtggtagacacttcgtgcgcattaggttgtggcggagactccaatgcggccaaattcaacgtagtaaagtagtttaaatcctcctcagaagactcctcaatccatgaaaaagggctcccaaaatcatc

SEQ ID NO: 10623 - DNA, 685 bp, Zea Mays
taccgtaagcctacacgccccaccgccccacgatcggtcctattgcgtaaatcaaaggataagaaataccagccggcggaccctatgggcgcactactaaaaataccttgccaagactgtgtgcaggtcaagtcccagttgggagctccccttgagggtcacgacatcagttgccaattacgaatcctggtatccagccccgacgcgtcgaggccatatcccaggggggccaagtaccaaggaagaagttggtaacggtgcacgcagcaaaggaaaagtggtgtgcagataagttataatattgcccagtaagtagtacctgaagagtatcttgtgaaatcaatggtatattacaacccgctccccagcggaaacctcgttttctccacgcaggcctagctactcatcaccagtaggatcccgctgaaagcgctcggccaccgcgtccacaacgtcctgcacgccctcacgagcagcatcttcagcgttggccaccggacctgcgatgactggccccaaggagacagccggatcatggctccggaagcatgtcaagacgtattctattgccgaccggcaaagtctgctgccctcggcctccaagcgggcgccaagaatccgatccagacgtcgaaggcgatcaacagtagaatccagtaccgggagcgcgtcggagatagacgcc

SEQ ID NO: 10624 - DNA, 408 bp, Zea Mays
gttgtggttgtgtcacaaatgtattcatcggcatatcgtataaaggttgggtttgtatacacccatttacatctaatgcttttgctaaggttgactcaatcgtgaccttgtgtgatggagaattagacatggtagatttgttttatcgttcatgtgagtttcttaagcgtgtcttctatcccccaattcgttgttgcaattgattcccttgtagatctatgtattgtttaagggactagaggtcgtttgatttacttacattggggtttcacgaaggtatgagggatgacatctcgatctctccttgcttgatgatcttattgtgtcgatccatcttgaagtgcttcaagtactcctcctccacatccttgatttattgtgcctctcatcgcaatgtctcttctcttc

SEQ ID NO: 10625 - DNA, 592 bp, Zea Mays
caactttgatgtagagtgctgggttagtcaccacacaaaatttagagaaaattcgccccaaataagccctatcaagccaactgatgaaacctctgatggtacagtggcaaagaaaatctacagattccgtgaatctcgacgtcagtgaccctgcgccgtgattgttgccgatcgccacgattcgtgctttaggtctgtggattgagctcgacggtgaaaagatcacgccacggataggtccgggacactgtggtcgcgctgtccctcgaccacttcaccagcgacgtggccttacggccgtcatcggaatctgcattgttcacagcgattgcaccacgcctcaggcccttaaccacgtcgcaatagcttgggtcatctatatccggtgatcgccggagagccgccacggtagatgccaccaatcacttgcaccagtgatcccctctttcttcgactgccaccgtgcgagaccaaattcactggccactgcttagcgcccttataaattgatggaacggtttgctgcagtaagttatcaccaagccaaagcatccatccctgcctcgattagccaccatagctagagaatttc

SEQ ID NO: 10626 - DNA, 517 bp, Zea Mays
ctttcccctcaccccgcctgcccgagccgccccgtcgccactgtataccatcatcaccgacgtggcaagctcgctggtgctcgccacctctcctccttccccgacccgggcgcgtataaaaagtaccgcccgagctccatccttcctcgcaccggcctcagccactccctcaccccctacactggaccgaatcaagctcggcaccgccgcctcccttctctccggtgagcccctccctctcctctctgttagcttatagccaaattgctatagctcttaagctccgccactgcgccccaagttcagcatgcacccccccttcgcctattgtgcccagtagcctcaccggcgacttcaccgccgcgggcacccgccacatcgccatggaccggccaccccgagcgtccaccggccaaattgaccccacctccgtaatcccctacctccgctcatgccttgccacctttccgtcgtcgcggaaccgggccaccggcgaagaaccgccgtggaacttcac

SEQ ID NO: 10627 - DNA, 348 bp, Zea Mays
gaagggaacatatggagatggaggtaaggatgagggcgtagtaggaagcagaccgggcggctcgcttggcggattagtagaggatgacatagatgatccagtacatgcagagccttgacgttgcacagggatttggtccaccacctccgttttccctccatctgaccctgctcggttccatactcatgtgagtatcaaaattttagtcctacatgatatatattcatctagtctgatacatgcaatctcttctctgtgcagggacaatcagcatcatcaaacaaccctcatggatcgcccagcctatcgtcgaactagtccagatgtccaccttgctgaaatactttg

SEQ ID NO: 10628 - DNA, 484 bp, Zea Mays
gttaattgaaaaggaaaaggaatgcaaattcagaaaagggatttctccctttcccccggcccacgaccacttccagcccagcagccccacccaagcgcgcgcactttccttccctccttctctcactgacgcctaggccgcacatgtcagccgttccttctccccttcctctgctcacctgtgcctgcattggactccgccgtgtcatgcctcccgcgtagcaccgctaccgggcgattcattgtcaaactaaggagcacgccgagactctttcccttttccccgttagcccattcgatctcctctttccctcggtgcaaatttctttcccgttcgcggtgccatgtatggaaagtcggccatatccttgattccttggatgatcggtgatttggagcctgattctccctgatttctcccttataagagccgcccgagctcccgctgtcgatcccatgctccatcactccctcccatgccctcc

SEQ ID NO: 10629 - DNA, 900 bp, Zea Mays
atccaccctggtagtactaagatgtaccaggacttgaagcaaaagtattggtggtatggactaaagaaggatgttgcttcacatgttgcactatgtgatgtttgccagagggtgaaagcagaacatcaaagacctgctggtttactgcacccacttaagataccttagtggaaatgggaagagattggcatggacttcattgcgggattaccccgcacatctgttgggtatgactcaatatgggtgattgtggagcggctaactaaagtagcccactttattctagtgaagaccgaggatcacaatttgtatgcttacatggtgtgcctaagaagattgtgtcagaccggggatcatagtttacttctctgtattggaagaagttgcacgagtgcttggatacaagattgaattttagttcagcctaccatcctcaaactgatgggcagaccgagagaaccaaccaagtattggaagatatgttaagagcttatgctcttaaacatggtggtaattgggataagaatttaccgtatgcggagttctcttacaataatagctaccaggccagtttgaagatgtcgctgtttgaggctttgtatggcagaaagtgcaggactccactgtattgggatcaaactggtgaaaggtagttctttgggcgtgaaattatacaagaggcagaagaacaagtccatcaaataagggagaatttgagaactgcgtaatcaaggcagaaaagctatgctgatacatggagaagactactagagttcaaggagggtgatcatgtatatttgaaggtgtcaccactccagggtatgcgaagatttaaagtcaaaggaaagttgtcccctcgcttcattggacccttcttaatcctaaagcgagtgggagagg

SEQ ID NO: 10630 - DNA, 486 bp, Zea Mays
cccggattcaaacagcgatatcttttaaaatataattccaaatcgagcgcataagtactcattggaaagataagacaaggccctacatgattataatactggttgtcactaattacccacgaaaaattcccagaaactgctaatactactgctgttcgcccacctgaaaaatctgttttttggacaacaacatactcggattcaaacaacgatatctcctaaattataactccgaatcgagcgcataagtactcgttggaaaggtatgacaaagctctacatgattctccaactgattcccactaattaacccacgaaaattcccagaaatctctagaactactgctgttcgcccactcacaaaatttctagacagcacctctaccgattcgcatagataaacacataatcaaattgtttgcagcacaaaaacaacaaaagttaatcacaaattcaccttgggatcttcccttcctccttctttct

SEQ ID NO: 10631 - DNA, 461 bp, Zea Mays
cctgtgttctcgccgtgcccctgacgccgtttgtgagcacctgagtcttccctcaaggtaaccttcctaaccccgcccctattttcccctgtcttgcacttagtcgctcgtgattgttcaccggagtgttccccggtccgccgaggactccccctccaccgtctggtcatctcagccctgttcatgcaacctcgaccccgccataacgcttgtcaagtcatccccaacctctccagctatccagaccggcccctagcgccctaagaaccccggtctgcctcgcctccggcgacggcgcggccgtgtccacggggagcgccgcctctggcagactagtgaaggcaaagtccagacgcccatcttaaccgctcattcctaattggatggcccgacttcaattaaacccgacctaaatcctggtcgtctgattcggatctgactgctcggatccgcccccctca

SEQ ID NO: 10632 - DNA, 411 bp, Zea Mays
aaaaatcaatttccaaaattaattctctaattttactactctctggactgcgcgccaatttctggaaagtgcaggggctagatcgcaagttttcctagactcaggattccccacaaagtggactgcgggttgattctgtaattactcgaggtcatttttagaaattagctcgactgaaggggtatagagagatttgggtcgtccgatcctgaatctagggaccggattagatcccccctttatccgaaccggtatgcgctactggcccttcgattggtgatcgacgaccgtgattttaaaagcacgagatctaatctcattcgcacatttcgcatcggacggctgagaaccaaatccaaccggtacacaatgttagccattagctcgagatccaacggccgacaacactcc

SEQ ID NO: 10633 - DNA, 450 bp, Zea Mays
atatttttctacaagaggaaatgaggaggcaaggtggcgaaggaatcatgtgtacggggaaaggggcttcgatgagcaggggtctgataaaggaagggacgcgcacgaacgaataagaaacaacgacactctcgagtaaacagggaagacggagagctctagcatatggggaaagagtcacacgcgagagatgcgactagataaaacggtggtttggggtctatgcgagagctccctaaaacagggtctctagtgacaatcggagtggccatctaaattttgatgtcaacgtattcagccaatcgttgttgtccactgacgtactttaaggagaagcatcaaatgtgaacttcacgttgaatggacatgagtacaacctcgccgctgacatctacctttctggtgtttgtgaaaactaactctctcacaaactctgaagcaatagatgtt

SEQ ID NO: 10634 - DNA, 443 bp, Zea Mays
ctcaaagccggatggtctggtctttcacaaaacagtttggactttaagaccgaacatctaccgcagcgaaaagacagtattacggatgatctggtccccaagaccggaaagtccgccatcacacaaagatcatctgattcctctgtgggggacatgatagaggaattcagagatcttgataaactagggcaggggtttacatcgaccgatcctttggaggagattgacataggagatagtaaaactccaaggccgacttttataaacaagaccctggagaccgattctagaaatgagatgatcggtctattgaaggaatattccgattgttttgcttggaattacactgaaatgcctggactaagccgagagattgtcgaacatcggctgcctattaagtctggtttcagacctttcaagcagaaagctagaacatttcgtcc

SEQ ID NO: 10635 - DNA, 410 bp, Zea Mays
caaactcgcccagactcagacctgacccgaggtggacggcgggttaattcctaaatagtcgagggctctttagaaagattcctaggccaaaggggttttcttagatttcagccattggatcagatccaaaggtcgagattagatcacggtcatcttaaagggttacgctctgatcaccgccggatcttaatcggacggcgcacgatccctcgctcgctcgcggccgcaggatcatttatccacggtacaaatagaaatcccgaaccggtgcgctacatagtcgttggatcccaatctaacggctaggattctatctggcaacgagttaagctatactcaatcaccgtcgtccgatcctggacgaacggccggggtacgctctctccactgacgcctcaatacggcgaccg

SEQ ID NO: 10636 - DNA, 526 bp, Zea Mays
aaggaatagaggtagacccttccaaggtggaagcagtatcaaaatggaggcagccatccaacgtcagtgaggttcgaagctttctgggaatggcaggatattaccgccgctttatcgagggattctccagcatagcaagacctatgaccgagctcctcaagaaagaccataagtttgtgtggaccccaaaatgtgaaggaagtttccagatcataaaggagaagctcacgaccgcacccgttttgacactaccagatatacatcaggatttcgtcgtcttctgtgatgcctcaaggcaaggcttagggtgtgtgctgatgcaaaacgagaaagtcattgcttatgcatcgcgcctacttaagccgcatgagcagaattatcccacccatgatttggaattggcagccataatgcatgctttgaagatatggaataattacctaattgggaacaaatgtcacatcttcaccgatcacaagagtctgaggtatattttcactcagccagatctcaacctccgtcagtg

SEQ ID NO: 10637 - DNA, 590 bp, Zea Mays
ttacaatataaacctattataaacttacaggttatacatgtcctgtgctgttacaggcacactctcaggaccaccgtgcatttctgaaacataatccataatacaatgttgcgggattcgactctcctgcattgaacttatgaactccatgtattcaggatcatgcgtcttgttgcattgtaattgattttttctgtatccttcttaaaaaattcatgattatgatccaagtgcaacagatcaatacacactgatataactgtctcttttgcatcatcataaatttttttaagtttcataccggccttgcattgtgtccgcttcgagctggtattacgtacctttgggtttgatgttctccttactgcactctttccttccatcgagcaattcaaccacttacaattttccgttccctatactttttcaatgggaagccaacttcatatgcatacctactataaaatttatatgcttcatccacaccactgaatgtcataccaactttaggtaccaacctcggatcaattgtaacttcctgtgcaaaaaattaaaatatatatgtatgtacatatatccataacatgtat

SEQ ID NO: 10638 - DNA, 724 bp, Zea Mays
gtgataggacgtgctcatcttcaatgtagtacctgacagccggaaaagctcttgccacagtcggctagtaaatattcgatcccggtctgtcacaattgaaacaggaagcccgtgcagtttgtaaacacagtccatgaatagctgagccacctttagtgcagagaaaggatgcagtaatgggaggaaatgactgtattttgaaaaggtatcaacgaccaccagaatggtgttggcattggcagaccttggaagaccttccacgaagtccatactaatcacctcccacgcttgcttgggaattggcaagggctgaagcaatcctgggtatttgctgcgatcaggcttggcttgttggcaagtagaacaagaactcacatactgcttgaccatagtcttcatagatggccaagaaaaaatttgtttaattcggcgatatgtcactagaaaaccagaatgacccccaacagggctatcgtgtaatgccaacataatttgctgctgaagatgtatattattgccaacccatacacgacctttgtaccggatgatgcctgaattcactgtatagtgtcccaagtcattgggactaactgttaaggcgaccagcaatttccgagcctgatcatctcccatatagccctccataacctgaagcatccattgaggagtggctgaagacagactaaataattcggatgatggccgtcgtgacaatgcatcggcc

SEQ ID NO: 10639 - DNA, 463 bp, Zea Mays
cggagcaccagatcggtccctcaccgctacaatcacagaataagaaggcagttgaataaattagggttcaaacacagatcacaagcatggatcacaagaacaagcactagatttagaacttaccaaagccggagcaccatgtcagtcccttgtgactacaatcacagaacaagaaggcgctagattagggagcacaaacatagatcacaagcacaaacacaagattagcaactcaccaaagccagagcaccagatccttccctcacagctacgaacatagaacaagaaggcactagattagggttcaaacacagatcggtccttcacggctgcaaacatagaacagaaggcactagattaggtttcgttggttcaaccacggatccagaggcagcaaacacaaatcacaagcacaagcaaaagattagcaacttaccaaagccgaagcaccaaatccaacccc

SEQ ID NO: 10640 - DNA, 531 bp, Zea Mays
tccgcatcgtgtagagtctagccgaattgtaattcacgcgccagatcaccagggcgcagctcatcggtgaactttgccatggggggaaaagggagtcgtgtccggacgccacagataaggggaagaaaagggggaaagcgcccttaccgttgatctagggaggtgcggtcaggattagactgtggtgcggggtcgtgtagatagtcgatctcgaaacgaacagtccggattgccctgtagcgtaccagttcggtgagtctgatcgcaaccgttggatgggaatcaaacacgtagaaaaccatcctaaggattttaaatctaatccgtaggtttcggatctggcgattgggatttaggcagaccgtgatctaatctggggcacgcgttttagatctaatggctgacctcgtcccataccgcttcggcatggaagttttactaaagagaccttggaaactttaggaattaacccgctgtccagtgcagtgttaataatattgctattaggtcccgaaattcacactgcccccc

SEQ ID NO: 10641 - DNA, 587 bp, Zea Mays
gacgatcttacgcggcgtagaatgctactggccctaattgaattcacgacgaacgtaaggagggcttattaccttggtttgggatggtggctgccctacccccatggttgtacggttctgcgacggcatcgggttgacagtgagaaattgtgcttgcactagtggtctatccctggtactagagagatggccaccatcgtcgtgccatggggaagctgtcagacccaaagtcaaagtcttgacgtggtgaatttgtggatccccgacggcagatttaccctcacacgttctccgtcattggtgcggtctccatcgatgcacccatgtgatgaggcatgtagagattggtcaggagctgcgacccacgcttgagttttatatgcatgtgggggggtctagagttggccgcgcaacccggccaggggaggaggttgttcggggaggaagttagagccaacacgatggtcccacatgtcacccacattggccattgcattaccgtgggagcgccccactgaccgaggggacccacatgtcggtacagtagcgagctaggtgtccagggccacacggtgaatgggctggcg

SEQ ID NO: 10642 - DNA, 1014 bp, Zea Mays
aatgttggcagactttagatcatctatttgcctctgaagcaggagaggattccactacatcaaagacgaaacatgatcggggacaggagtgccgcaagattccaactgggcagatacagagttgagaacattctgcaagctcaaaagttagcaagagaactcgtttgtcaacataaataatgaaaggcaaagatcggctcgcctggaggttagaaagaaataaaggaaatcccagagctggaggcatcggtgcattctgatgatggagtgttgacagggacaatggtgagagtatcactcggggggacctcagctccgacagcaggcggtagattcccagcatccaggtcaccggcctctaaggtgaccggaccgacaagagcagttggcatattcctcatattgaaccaggggtgatccgacgtgaacatccatggaggcagccgaagaggaaccaagctcggcacccttggaggctgggtcatccccagaaccaccctcgggggctgggttatccttagcagcaccttcagaagctgaagcaccctcggtcgtatccacaggagctgggtgaccctggccggcaacgtcaagagcagtgtgtccccatgagctagaccaccctccaaggtcgacgaagcatgagaaactatctgggttatctcttgcccgataggattaccagccaaagggatgtcatccgggacctctgtacttatgacagaacttttagtttcatgaggctccaataaaagttcttcagggataatttcctctaatgcattgggatgtcactgctcctactgttgcggctgttcttgcgaatcaacgggaccccttcctcctcttcatcctcatcaagcacacgaccactaactctaacaccatcacaacctccaatgtcatcctcgaggttggtgctcgccgggccaccactgaggactgaggtcgtaggatcagcatccagttccaagcctgatgaccgccgaagtcttttctttcttttcttcccct

SEQ ID NO: 10643 - DNA, 1478 bp, Zea Mays
ccccgccacactgcgcagctgcacggcgtgcctgattattcggcagaccatgcgacatgcacggcatgcaacggcgtggcgagaatagcgcttgacgcggtcacagcgcagctgggtgcattcgccagccacctgtaattctacgcgtacggatactaaacgtgctcaagtacaacttgtctaatgcatctatatgctggatacaggattgacatgattacataatgctgttatgcaacattctcccctctaatcttgtcaatcttcagtcttccactctgatgattccgagttgccttctcagttcaatgaaccgaattctcccaagaggcttagtcagcatatctgctaactgatcttcagagctgacatgttcaattttcagtaccccattgcttacacactcacgaatgtaatgataccgagtgtcaatgtgcttgcttctctcgtggtacacaggattcttgcttaattcttgagcagaccggttatcaattagcagcctgaaactcttctgttcagtacccagcaggtcccctagcagtctgttcagccaaacaccctggcaagcagctgttgcagcagctatgtattcagattcacaagaggagagagatactactctttgcttctgagagctccaggtcacaatgttctttcccagaaagaaagcaaccccactagtgcttttcctcttttcaagatcacctgcatgatcgctatctgagaaaccaatcaggtctgcaattgctccttgtacatacttgcagccgaactgtttagtgcctgcaacatatctgatgatccttttaatggcagcccagtgttcagtgtttggcatttccataaatctactaaccatcccaactgagtaagcaagatcaggtctggtattaaccagatatcttaagctaccgactacacttctatatctggtagcatcaagtatgagttcaggttttccaggtgttagctttgtctgttgatccattggagtatcgactggattacatcctttcataccacaagattccactatcttctctgcatatgcactctggcagatagtaatttctccaggtttttgcttcacctccataccgaggtaataactgagtaaaccgagatcactcatgctgaagagcttcatcatctgttgtttgaattcagcaatacacttgctgtctgggccacagataatgagatcatccacatacactccaaccagtaatagggtcttacttgttcctctcttgtaaacagcattttcttcaagactccttttgaaaccaagattcagtagttccaaatcgagtctggcattccaagctctaggtgcctgttttagtccatagagagcctttttcaatctcagaacttttcttgatgcactagagtctataaagcctggaggctgacttacatacacctcctctctgagatcaccattgagaaaggcagacttgacatccatatga

SEQ ID NO: 10644 - DNA, 641 bp, Zea Mays
ggcgaggatgacaggggcaccgatggaaggggatggcagggagcggggcgagaatggcgaagggcggagcgctgggggaggggcggtggcggcgatgctggcgagattatcggggggcgggtaggcaggagggcgggcagcgggggcaggcgcgacatccgggcgggggcgtggtgaagctatggacgccctcattaggtccttatagagtagtagagatacgaccaagccaaggcacaacgccgttgagtagaggctgagctgcatatatcaccgagcaccctctctctatcgcccattctctgtctctctctgtttccctctatcgctcaacgtggaggtcaccgccgccacttgtacgctccttgctatcgtcgccctaccagcatcgtccataccgtcgtcctcagcagcagcagcatgctctgcgatgaaatagagctacgcaaggaggaagacgacggtcgtgcgagccgtcatggcgaggccgcatcaggtgtcgccgcctgccaccgccaacgccaccacgtaccgcgacaactggttcgacaagctggccatcgggtacctgtcccggaaccttcaagaagcgtctggtacatacgcagcacacacaacacacttgttgcgccctgcacacg

SEQ ID NO: 10645 - DNA, 436 bp, Zea Mays
gtgatgaagaggcgatttgttccttccagctatcaatgtgatcttcgaaatcgattgcaattattgaagcaaggaaagaaatccgttgatgaatattttaaggagatggagttgctgttagtgcagactggaatcagagaagatctccagtcaaccatggcaagatttttaggcagactcaatgaagagatttctggatttgtagagatgttcccataccgtaccttgcaagatcaagttgatcaagcaatgcgtatagagagaaaaattcaacaagagtcatgtggaaaatcttatgcaagtcattataatgttgtcccatggcgcaaacagcaatcccgtgcttcttttggtggaggacgatcccaaggaaatgcagctaggtcttctccatccaatggtacatcaaagatggcggcttctataggttcattcc

SEQ ID NO: 10646 - DNA, 547 bp, Zea Mays
gatcatgcggaattcagagcctttttcaatctttggaaccgtggtggccctaactggattcatgaattcaagaaatttattggtgaggagaatgcttcttggttgactgttcggggcaagaagagcttatcttatgcagatattgttaatctccctctctctggtgctaatgcggtcccgatcctcagcaaaaacaagttctcttgcggtgttgggcatccagttcagactagaatttctgtgttcaatcgcctgggttcttctattcgtaattcaggatttcagggatcgtggttctcgtctcctcagcgaaggttagggcctactggtcttcggattccgtcgactgcgaagatcaagccaactcccatgattgctcctcgtcggggggcgtcttcctcggtgattcactctgatcttaatggaggtgtttgtggcagcgggcttcatgggcgttcaaactttcaaaattcaaaatttaattggactaggcctcgcaaccttcagtggcgtcccattcgaaaacgggggcctattgggcctccgg

SEQ ID NO: 10647 - DNA, 551 bp, Zea Mays
gagagagaagagatacgccaggagagaagggcgcagcagcagcagcaacagcaacaacaacagcaacaagcaccactgcctccaccaccaccaccagttccacctcatgataagcaccgggagtttatgagccataagccaccgacctttgctagttcgtcagacccactagatgcagatgattggttgaagtcaattgagaagatgctcaacatcgcccaatgctcagaccgggagaaagttctttatgcctctggtcgtctgacaggttctactgctgagtggtgggaatcttatgttgctgcccatgatgctgctgatactattacttgggcagaattcagtacacagttcagcggctaccccattccagctggattgatgaacataaagaagaaggagtttctgtcattgaagagcggcaacatgtctgtcagcgagtaccgtgataagttcattcagctctccagatatgctccggatgaagttgctgaggatgaaaggaagcaggagcactttattgaaagacttaatggacccctacaatatgc

SEQ ID NO: 10648 - DNA, 614 bp, Zea Mays
tttgattaagagactaagcattagtgatgtatgataatgggagataaatggacatgaagtcacgttgtcagtcacccctgaagctgaattttgactaacagtgaactgggacagactttggggggcgactttgagtaagatccagtggatgtttgactatggttgctataacaaaatcaaagttggtttgtaggatattaattttgctacagaccaattagagggttgccacataaaaatttgtgaaaatcacccctgaaaatgccctgtcatgcgctctgaatgaagttctgatggtacaatactgaagaagatcttcaggtgcagtgcacctcgcagccggtgaccccgtgcctggattcgtgccggcgatgcgatttgtgcccgtaggcgcgcggataacgactcagggtgaaaaagatcttcaccgtggatgagaccgggagcgagccccatacccacttgccttgcggccggtctaggtaaccttgccttgcgaatgccacgtgcctcgaagctttaccacgtcgcagtaaaccgccttaggtagcttgatcatcatctaagacactacctgggtgaaagccacgacagctcacaccagtgaacttccc

SEQ ID NO: 10649 - DNA, 1001 bp, Zea Mays
cggcagcaaacttcggcggccacatcggtatgtctgtgctcaaccttctgtaagttcattaggctacctatgcgcaagtggttcattcccttagtcactatatgaggattgtgaaatggcttttgtcacacttacgaatgaaagggaggctcaacagacatttacgggaggagtctgatgtgagctgggtagcagagtgctcccagtctgttgacccacactttcgaaatactgagaacattgtagttgtatgattaatttttttgctctgctttgcagtttgcacgcacaactcgatcgccccccttcacttctccgagttcttaataatggtgcacggagtgcagtaccaccagacggtcatggtgcctcgggagtccatcctcaagaccgaggcggagtggctcaactctatcaaggccgaccttgtggtaccaatactatgatcactgatcgttaccggtttatgttgtcactcttctgtctgaacatctctacacaccgagtagagcttaactgaacccacttgagcaaacgctggcaggtttcagatgttgtacccgtcgtgtgtagggcagctacagatgctggcattcgatccgtgtgtgtcacgaatttcaggtaagcggtggtcctgttgcttctttgtttccacgtgtcgttaagagtgataaacactagaatacgctatagtctattatatttaattttgattcgtcaggtaagtgtctgggcgatctgtctgtagttactacaagcaacatgtaaatttggggatcggatcccctgacgtcgaagtcacctgacgcacctatattttctgcagctgggacttcacttatgcagagtacgttgtagctgctggacatcatcatcgctcaattgtgtggcaggtaccttactcacatagttcgtgaattgtgacacctacgtaagatggttgggctggtggggtgtaaagcagcacaaatgataaaatttagatccaagcttctctctgg

SEQ ID NO: 10650 - DNA, 416 bp, Zea Mays
gggagttgttccttgcaggccctttccacaagttttgttgtctctgggtctaggcgttgagatttgcatatgaggtcttccagcattggtctgacttcgagactgtcgctgtttcccagacatgtatttagttgagctgattctttcttccaatcttctaaaaagttggtcccctttattccgaatggttttcgactaagggcgtctgctaccacgttggccttcccgaggtgataatgaatttccaggtcataatccttgatcagctccagccatcttcgctgacggaggttgagatctggttgagtgaatatatacctcagactcttgtgattggtgaaaatgtgacatttgttcccgattaggtaatgcctccatatcttcaaagcatgcactatggctgccaattccaaatc

SEQ ID NO: 10651 - DNA, 748 bp, Zea Mays
atcggtatgtcacaggaaagccagaatgtcctccgacaggactatcatgtagggcttccataatttgctgctgaagaagtgtgttatttctgacccaaactcgccctttgtatcgtatgatgccagaatttagagtatattgtcctgaagtatggggactgatcaacatcgctactaacagtccttgagcttggtcatcttctttgtacccttccatgacctgaagcatccattgtggagtagctgaagagagactgaataattcagagtaaggacgacgagatagtgcatctgctgctccattgtccacacccttcttgtaaactactttgtattgcagccctatcaacttggagaacacacgttgttgccatggagtagacaaacgttgttcggtaaggtgagataagcttctgtgatctgaatagattaggaattcagcatgctgaagatattgtcgccacttatccactgccatcaaaatagcaagatattccttttcataagtggacaatccctgattttttactcccaatgccttgctaacatatgctaagggatgatgatcttgtaataacacagctccaatccccttactagatgcatccgtctcaattgcaaatggtcgagtgaaatttggaagggccagaacaggagctgataccagtgattgtttcaaggcttgaaaagctgtgtcatgaacctgtgtccacaaaaacactaccccctttttcagcaaatctgtaag

SEQ ID NO: 10652 - DNA, 608 bp, Zea Mays
cttccattgaacaattcaaccatttacaattctttcgctccctatatttcttcaacgaaaatccaacctcgtatgcatattgactataaaaattatacgcctcgtccacgttactaaatgccataccgactttaggtatcaatcttatatcaatattgtccggctgcgcacagaaatttaacatttacgattcaatagcgactaaatctgacgtaatataggtacaacattacaaaaagtatgtatgaaactaatagtatcataattgagagaacttacatggctttgaagaatatggggtgtgtcctgttcatgcgccccaatatgtctcatagggatgtgcttatctgcgcctaccatgtctatcgattttgtgtgctcatcaatatgtccaggtgccctcaatgccgcggggggagtaacagatacaccctctatgtaaccggtgatcgtagacgctacaggatacatgtccattgaagtagacgtacctgttgatatatgcacagacgctacaggttgcatgtcatcgccagcgtcgatgctggacattctctcgccgttaatcgccgcccggtgttgtcccttccgccgccgttaaccgccgc

SEQ ID NO: 10653 - DNA, 1007 bp, Zea Mays
tgtccgactccttggctgacatgggcacgtcggggccatcattcgacgccccccttcctatccttccttaagattcaatacgatcttgttctggaggatctcaacatgaccaccactggtcttgctgttgctctaatggccttcatcgccactcccccgtcgatcgcccccacatcggctgccctagctcctttttattttggcacactccttcgggacttgaaagcaacccactcccatctcacgatctgacaagaagaaaggtgtggtcggggtaacactctttggcgggccttctacaaccggtggacgggtagcatcaccatgctcctggcctggctcctagcagccagcagcaatagctgcgccaggtgtcctaggccatgatggcggcgtttgtactgtttggaccgtctgacatacttgtctcttaacccttataggcttcaacattcccatcacaaccgcctacaccgccaagttgaactccatgaaccgatagctgggattagtaaattcttgctaactcgtttagcactatggctctgcatccacatgttacgttcatcaattgggtggccgactctggcgcctccaaccataccaccaacatgtcggcaacatctccctcttctgctcatctaattcaactacaccttcatctattgttgttggtaataactccatcctccccatcacctcaacatgtggcgcggttcttcccgggccattctatctcaacaacattcttctcaccccttatatcatttagaatttcctttgtatttgttgcttcactattgacaattcgtgttctttggagttgaaggatctcgttacccgaaacatgatcatgaggtccaatagctctgagcctctgaccctttctacacacaatgcctctttgggtctcctgccccctgcgtcatgtctgttgttgctgcgtctacctggtatcgtcgtcctagttaccctgtctctaatgtgttgtctagtttgtctaatgc

SEQ ID NO: 10654 - DNA, 305 bp, Zea Mays
gtttactggatgctactactattttaatggtcacctaaatatatgtgcttgcatcatgaaatcctaaactggggatatgtgatgatgagatataaggaggtgattttctgacttgtgtggaggcacccagtggccattgcaggtgaaattaactaaaggtggccattgcatgggatgcgaatctccacgttcaagtgccatacaacatcagggggcctcaaacatttctgattttttgctattgaagagtgtaaacatgccatatttacctattgttgcttgtgatccctcagttcagtcagcat

SEQ ID NO: 10655 - DNA, 513 bp, Zea Mays
cggagaatcgctgttcggtccgccgcaccgcaagaaccgagctcgtcgtggccagcaccgtttaggttagttcatcctcccctctccctcgtttgagcactctcataactctgtgatgcttgccgaaccaccaatttggactgagagctcaccaatcaccgggaacacgagcaaatgcccataaccttcgctgttctcgtgggcagagtagaataggtcaccattcatgcaattaagttaggggagtggttcggggagggtccaattcggtgttagccgctcgggaaccccagtcgttgccccattcagccggtccaggagctcaccagagctcggccgcgttcgccgtcgttggggacccattctacgaagaaatagaagttcgggggcgtttctgcaaaccgtcaacgactcatgcaatagtgattgaacccacttcggattgatcagtaagccgagggcttttccgcaaaactgccaacacgcgcgcggacgcgcgagggcgcgcccccg

SEQ ID NO: 10656 - DNA, 591 bp, Zea Mays
tcgggctgcgagcatctccccgcgaagacctttttgctccagataagaccgccgcggtggagggcactaactccggctgccacgcagccatccctcctcccggccgtgtccggtcatcggcgccgctcccctccgttcatccatgccgcgcggatgtgactgcgttactgtcgcggcggggacgtggcaaacccgtgagaatagctatcgcttgacgccgcagttaatcgccagctaaggccggcgatggttatcaccatggccgcggcagtgactcaccgcggctataaattcaccacatcctcgctcccttcgctcaaatcaaccgagctccgaccttcgtctctaaattgcgaagccatagccaccattcccatctccgattagcccccctagccggtgaatcgccgttttcccccaaatcagtttaccgccgccgtaaaagcaccctcgcagtggctagccacttcgaggtcagatcatgctctctgcagttctgtttcagtacctgtgtgcattcgtgatgctcatcaacccacccaatcgaactagaccatccccaatccgcggcaacgtgtgctcccatgatcg

SEQ ID NO: 10657 - DNA, 702 bp, Zea Mays
ctggaatttcatcatgtggaaagagatcgcaacgcggcagcagacgcgttgtcgaaactaggatccagttggacctaggccccacctagagtcttcgtccaagaagtaccacgctcgagtatttccttagatcgggtagaagagtgcaatgttctgagccagccagagtcagactctaatgactggtgggagcccatcatcagatatataaagaatgaaggggaaccggatgacaaagctacagcagaacgcatcgcaaggcaatcagctcactacaccctcattggggaggcactgtacagaaggggcgcaacaggagtcctcatgaagtgcattctttcggctactgggaagcaactgctagatgagatccacgccggacagtgcgggatacacgcaacatccaagactctggttggaaaggtcttccgatctggtttctactggccggccgcaaaaagtgatgcagccgagttagtccagaggtgtgaagcttgccaattcttatcaaagcagcagcatttaccagcacaacaactgcagaccatacccgtaacatggccatttgcgtgctggggactagacatgattgggtcgtttaagaaagctcagggaggatacactcacgtgctggtcaccattgacaaattcactaaatggatagagtacaaacctattgcttctctgacttcagctaaggca

SEQ ID NO: 10658 - DNA, 297 bp, Zea Mays
cttggtcccggcgggaggtggccgcggcggccggaggacgacgaagaagcagaagaagggtgcagcagggagcggagcgcgaggtggaggaggaggcataggaaggcgctggagagcacgacagggtcaatgcacaacgccgcgagctgcatggtggcgtgctactgtgcaggaactggagtctggaggaggacatgcccaagcaaaggatgtccccgctgtgcacgacgacgacggctttatatttcctgagacgttgcatcctgcagcacgctgcgggcctgcggctacgtattc

SEQ ID NO: 10659 - DNA, 830 bp, Zea Mays
tcactcaggctgatcttaatatgaggcagaaagatggttggaattgatcaaggattatgatatggaagtacattcccatcttggcaaggaaaatgttgtggcagatgcattaagtcgaaaagcctagtgcaactgcgtaaccgtggactctaagatcgccactctgtgtgacgagttgcgcaagctgaacatggaagttgtttccccaggtaccttggattatatctcagtggagccaactttacaagagtagataatcatggcacagtttggtgacaagggtgttcaagtcattaaggatatgctcaaccaaaaggtggataagtacaaatgttttcgttaggacagcaagggtgttctatggtttgaagacagattggttattcccaaaaacccagaactcaggaagaaaatattacgaagctcatctttccaagttttccatgcaccccgggagtaacaggatgtatcatgacctcagatccttgtattggtggaccaggatgaagagggagatagctaagtatgtagctgagtgtgatacttgccaaagaatcaaagctagtcatctaaaggtagcaggtaccttacagcctctcctcatcccttcttggaagtgggaggacgtttgcatggatttcgttgtgggattgccaaacacctcccagcacaacgattcaatttgggtcgttgtggataggctgaccaaaacagctcatttcttgccagtacataccacccacaaggcaaaaaaatatacagagatctatattgaccaaatagtgtgtttgcatggaatcccgaggactattgtgtctcatagaggagca

SEQ ID NO: 10660 - DNA, 593 bp, Zea Mays
agcgcggtggtgcgtgcgggtagagcctcggggtggacctcggtgacctgatgtatcgcgcgggggaagatttcggccggacattaccgtgcgccgccatcagactattcactcccttgtgacgttgtcggccaagttccctccattggtggtgagttctcctgctcggtccctgttgagccttcgctgtgcgcgtagtgtcggacgagtccacagatagggtcacgtcggtccggttcgccggaatgatacgcgcgcgcgccgctgctatcctgtctgcggcatgttctgaggaggaagatgagtacctacgtcgttggatgatcagtggactgtccagatctgtcaatagcgtattcctcaaccgtaagcagtgtgggtcgtcgatctagacatgtctggctcagataaggtctagtatttgactcgtgccgcgtgttctggttcgtcaatctcggatcgaacacgcagagtgagagcgagtggcgggtagtagagattctaatctgaaccgtcgggctctgatcggacggtccgattcttccgataccccttcggcactgccgttttgtaatcgtgcccctgcgtttatt

SEQ ID NO: 10661 - DNA, 609 bp, Zea Mays
aaacagtgtagcctataatatcaaacattgttttacacacctatatgtgtgatcttttgatcatagccttagttatctagcaaatgcatgtaattatgtcgaaatatagccatgcatgcaatttaattacacgtacgggcgaccatatgcagggtagtcacaccacaccacaccacattacacactgaaagtaacaagcaatgcaaaaaaaaaattgtgacacaacgtacgtatgccgtacgggcatgctcgcctcattataaactccatctttacggggaatatcaaaggagatctccctgggatagagcaagtatctcatgggaataagagaagtacgtaggtgagggcaggcacagatctatgaaacattgtgtacgtaggtgagagcacactgtacactgtgccaccttctaaaggcaatcaaagactcaagggatgcatcgaatgatacggactcgtggtcacttggggtttgcagcatgcagctggtcctccgacgagaccacccaacccggctgcaaaagatggcctcattttcccgctactttccagctggtgtttcagtcgggtatgtgttttaggtccctttagaacgcaaagatctca

SEQ ID NO: 10662 - DNA, 602 bp, Zea Mays
gagcagggccgatgccggtggcgttggcaatgcatgcagcagcgacagaagggcggtatgaaacgtgtgccctgtcggtggaaaatcgttgtagaggaaggcgatgatggccgccacagaacgaccgagattggcaaccgcctgggctacgacttccagggtgagggtcggcgccatcgtcggtggcgtgagggaagtggctaatgtggctagcagtagcgcaaaggacgctagaggaaaggtggtggtgggtggagggcctgacatcaccaataccagattgataggattgcggatcctacagttgatgttgtgtagggaataagggtgggacgtaggggaccaacgacgatcacgacgctggggcaccgtggctgggctctgctaaaggagaacaagagaacataatgtgctacaacacccgcactacagtacctgcgttgttgttggattagggctgcaagctagaggaggaagaagggcggtggaggctagggctccattgttggctcaatgatgttgctaggggagatgtcggagtgattcgttgaaccggccatatggggccgatttgtggcatgtcagacctaattatggatctg

SEQ ID NO: 10663 - DNA, 356 bp, Zea Mays
tatgaatgcgatatatattgaatgaaaatgtggtaattaagaaaaacggagataattttctctgtaatagtattttagtttatgatgtccaacttatgtccaatggtttatagactgggaccaacgaacataacgctattaagtatgatgactgctatcagatgtaacactataatctttgagggtcaattatatcattggaaataagtcaattggggtccacctgccatcgttagagcaactccaaaagaacgtgtaaattaacctcaaaacagatattagtcaagaatagtggttttcttactccaacagctccctcattttttctccaaaacattagcgtcccgcatccaaag

SEQ ID NO: 10664 - DNA, 757 bp, Zea Mays
gggaagggtcggccgaagacatggcttcatggtcagggggcgacttattcaccagcacaggcgctccaccgcagtcatgcctcgcaccagggaccaacaacgccgcacagtctcctccgtcgcattgagccccggtaaagtgcacctcgcgtaaatttgtttccttggctatgttttgtagtactcggtgatggattttggtcaccgggcgttggtatgtgtgtccttgccggtgcgcgccgtcgtgaagcgcgtgggcgctgccgcgcgtgtatactagtggaagaagacgatgtcgtggccacaagatctgaaatggacgaccctgattagatccgaggataacccttcgtcatattaaatccaaaccaccagtctgggatctagcggatctggttgggtctgggagatgggggcattttggccgttggatctagatccaaggctctgtgttatgcaccgaatcgatgtaatgagcttctaatctggtgcgtgggtgatggatcggatggtcctggtcgaagtgtacccctttggcactgcaacttttctaaagagcccctgctctatatagtaatcaacccgcagttcttatctagtgaagaaacatcacggtttggaccagaaatttacagattagaccttgaccgtttgcaaaattgtgtccctagtccaaaactaatagaatattcataatttaaatcagaaaaatgattttctttgtataaataaatctatagacttgattaatccatat

SEQ ID NO: 10665 - DNA, 784 bp, Zea Mays
cctcgaaccttcgtcgcccgctgcacctccccgccgcgccccctacaaagccagccagcagctaaaaacctcctcattctcatccacttcctcccgcgcaaccgctcttccccaacttcgccgccgccatgggctcctcctacgacccctacccgtccccggccgccgacgacctcttcctctacctctccgacctcggccccgcctcgccctccgcgtacctcgacctcccgcccaccccgcagcctcagccgtacccgcagtcccagcagcagcagcaggggagcaaaggccccacgcaggacatgttgctcccctacatctccagcatgctcatggaggacgacatcgacgacaccttcttctacgactacccggacaaccccgcgctcctccaggcgcagcagtccttccttgacatcctctccgacgacgcctcgtccccgaccaccaccactggcaccaccaacagcagcgccagcgtcaaccactcctcctccgacgcgtccgccagcgcgccgctcaccccagccgcggtcgactcctactccccggcccccgccgtccagttcgacggcttcgacctcgaccccgcggccttcttcagcaacggggccaactccgacctcatgagctccgccttcctcaagggcatggaggaggccaacaagttcctgccctcagaggacaagctcgtcatcgacctcgatccgccagacgaccccaagcggtttgtcctccccacccgcgccgcagaaaacctcgcgcccggattcaacgccgc

SEQ ID NO: 10666 - DNA, 440 bp, Zea Mays
gtttggagcctaagaactcaacccagtcgagctctgcatggaaatactcctttcttcatggtctacggttcagaggcagtactacctgctgatctcaagtttggggcgccaaggttgatctttgaaaacatagcagaagccgaggctactaggctggaggatgttgatgtactcgaagaagaacggctgaacacggtaattcaatcagcacggtaccaacaaactctgaggcactatcacgataagaccatgcgacatcgatccttcgcagtaggagacctcgtcctccgccgaattctaacgggggagggacggcacaagttgtcacctctatgggaaggaccattcatagtagcagaagtcactcggccgggatcatatcgcctcactcagatggacggcatggaaattgggaactcatggaacatagaacacctcag

SEQ ID NO: 10667 - DNA, 475 bp, Zea Mays
ccagggggttcatctacaattctcccaagacacagactgcctccctacaggacggcgggttgattatataaaaacagagggtctcttttgactaatgtgctcgcaaaggggggtacggtgcgctcacagccgtccgatcttaaacggagcgcccagattaaatccagtcatacgcgaaacggtacgctacgacaagcgttggatgagagatctacggacacagttggatgcggtcgaattggtatgaagatctaatccaatctgttgcctaggagatcaacagatcgcttttaatgaaccaggattccaccaggaccgcccgatcgtatctaacggttggaatggattcatcgctcccgcacccaaacctaatctcagccgttcatagttgattgaacggccaaggggcctccttcatcctcccgaccgaactgggtggcgtcgccgcgcccaccagggtggagcaggccgccgg

SEQ ID NO: 10668 - DNA, 513 bp, Zea Mays
gtagccacgcatctacgctctctccccgtccgcagaccggtcgggcccattcttcagtgaaacgcatccacacactgatacgcgagccctctgcgtcggacgcgtgatgtctccacggatgtcgctctcgtgagactcacaaccccccctgcgcgtcagttctatcctccaaccaacccaccggtaatggcgctacgaacccaagaacatcggactcccctcctctgcttccaacccccgagccaatccatatgggctataaggcgtgtggagtgctttcgcccttttcccctttacacacatgaaccgcccttgtagtgtcgccgtgccgattgacttgtagcgaatacgccattgccgccgaccccgcgtattggcaaaacctcgcgaccgccgccatagagccatccatttgatcctgggcgctttgattcatctcgttgtaggtgtccccagactcgccgcgctggattgacgaccggtggcgcgtgaatttgttgtcggagtcatagc

SEQ ID NO: 10669 - DNA, 575 bp, Zea Mays
ctcggggtgaccactataccctactaacggagcaatcggcttaagtcggcaacgacttaaggtggtgcaacatgctcgcgcttacttaactcggggtgaccactataccctgctaacggagcaatcgacttaagtcggcaacgacttaaggtggtgcaacatgctcacgcttacttaactcggggtgaccactataccctgctgacggagcaatcgacttaagtcggcaacgacttaaggcggtgcaacatgctcgcgcttacttaacttggggtgaccactatacccttctaacggagcaatcggcttaagtcagcaacgacttaaggtggtgcaacatgctcacgcttacttaactcggggtgaccactataccctgctgacggagcaatcgacttaagtcggcaacgacttaaggcggtgcaacacgctcacgcctacctaacctgggatgaccactatgccctattaacagaagcgatcgacttaagtcagcagcaacttaaggcgatttgacgcgcttacgattactcatatagggatgacttctatatcccgtaaacaagtttcaaaac

SEQ ID NO: 10670 - DNA, 544 bp, Zea Mays
cgggtatgggcagtccttgatgaaatgtctggactttccacagttgaagcaaccactagaggaactgggaagggcagagaaacgagtaccaggggcactcggctgattggtaggagctgggacagtagtgggacgaataaagacgagctgcttgaatggatatgaaggtgggcaaggcaaagaacgattttgattgaaaggtcggattaccaaccttgttgtcttctcaggtccttgagtggatctctcacccgcataaccctttgattttccatgtcccatatttttagcttcaactgccagtgttgtactgatagccctgctataggtaaggtccagatatgttgccatttttcgctggagcctgtcgttcaatcccctcataaaacaattcttcttctttaagtcggtatccacctggtcaatggcatactgagagaggtggttgaatttgttgaggtactgcatcaccgtatctcctccttgcttcaacctgataaactcttctagtttcatctggagcactccctccggaacataatgc

SEQ ID NO: 10671 - DNA, 1808 bp, Zea Mays
aaaaaagggaattggaggcaggaaaaagaggaggatacagagctgctaggaatagtttggtagtcaaggaagccggcaacaacacagcatccaaggtagttgttcgcctcgacctcgattcaaacggctatcaccggaagagttagcgacgaagcgtgcaaaggggaaatgctatcattgcacagagaagtactcaatgggtgttgctcgggggggagggggggtcttgctggaattagaatatggcacttgagaggagaggaggcagtagtcgagttgggcatatcacataccacgtcgcgccctgactggaattgaagtaggggaaaccatgaagcttacagttctgacaagggagtgccactcacagcccaggtagacactggttccacacacacattcatcacagaggcaatggtgtctaagatgtaacttccactagaaaggcgccaaggcacagtgaaagtcgccaatggggacaaggttaccaacctaggattatgtacatggttatcagttcaaattgttgaagaacagttctccctaacttgctatgctctaccactggaaggctttgatgttgtgttgggagtacaatgtgatccttaggtctgattccatgggacttcgaacgtctatcaatgacattctggaagcaagaccacaaggtttgttggacagggatgtgtgactataagccacgctgttgtgcattttcagaagggaaggaattggtggacaaattattgtactcctacgaagacttgtttgcataaccctgcggcctaccaccagcccgacgccatgatcaccacatcaaattactgcctggcacgacaccaatggttgtacgttcgtaccgatacccctagctcttgaaggatgaaattgagaagcaatgtgaggacatgctgcatcgaggaattataagggaatgcacgccaacattctcttctccggtgctccttgtgaagaagtcagatggaacatggagattctgtgtggactaccatgaactcaatgggaagacggtgaatgaccatttccccataccagtggttgatgaattgttagatgagctttagggttctagattcttcaccaagctggaccttcggagtgggtaccaccaggtgcgaatgcaccccaaagatgttgacaaaacaaaattccgaacacaccgaggccactttgagttcctcgtcatgccattcggcctcaccaacgccccgtccacattccaaagcttgatgaatgatatcctcaactcattcatatgcaagtttgtgctagtatttttcgatgacatcctgatttatagcaagacgtgggcagctcacctccaacacgtcaagtaagtgttccaaacactgagaacacataagttggcattgaagcgctccaagtgtttttatggggttactagtgtgtcatatttgggccatataatctcggcatatggtgtggctatggatcctgagaaggtagcaacattagagacttagtcgcagcccagaactttaagggtgctacgtggtttccttgggcttacaggatattaccggaagttcattgcaagctatggcgaaatcgcagcaccattaactgtcctattgaagaaggaatcatttcagtggtcggaggcatcaacaaaggcattcctcgcactcaaacaggcacacatgaccgtctccttgctgcagatgcctgacttgagcaagagttttgtggttgttccgacgcgtcaggttccaggtttggggcagttctccaccaaggtgcacgagcgtgtggcatattttagtaaa

SEQ ID NO: 10672 - DNA, 456 bp, Zea Mays
gtccggccatggttctgcacgggaaatgagcgccctagactccacgatgcacgagaaacatgatgctgcaattgaatcgagcagggaagggacgaaacaacgagaccacggagctccacacgtcacccatggtgggcggcaccaacatcgagcataggagaggagaggagagcggagagtgggtgaggaagctctgtggagcatggataagggttgtgcacggcgtggggaaggaagggagcatggcactcggggtataaaaggagggagcgagatccagccattggcggacactggcggcagctgcagagctctagtcacgtcatccagctgtagcaggtggcatagcgactttggacggatgtttttggcattttccttttggaatcggacccggatcactgctgaagatatgttccttgatataaactctacaaagcttgtatagagattgag

SEQ ID NO: 10673 - DNA, 748 bp, Zea Mays
cgggaggcgcgcgggagctcatcggtgacgagaattcctcgccgatcatcgtcaccaagcacggatccgcgccgcgccgcgattgggggtcgactacctccgatttcggtgagaaaaacccgccactctgtttgccttcatgctctcttgcaatatccgtgatcggtcatcgaattgggggccttcgggcagggaataaggtccgctccggcgaaccccgtcgtgcgtgcggggcgccgccgccgttggcttgttatgttgggggtgaagggttggtgaccgttggatcttaaccaacgttcacgattagatctcggggaattaatatatgtgtcgttggatggccgcgggtcggccaggatcagtccgtgacataccaattcgctgggggatctagagcgttcgtttaggatcggacacgtacgcttagatccagactcataaaacccgagctattgatcctggatctggcggtcttggttacataccggtttgccgtgagcataatctaatctgcgccctccgcgcgagatccgacgaccagaaaccctggataccccttcggctagcgtattatacaaaagaaaccttatgttgttttagtatcaacccgccgtccatattcactatgctctgagtctaggatatcttgcactgcggtccctggccttttccgaaaatggggcccaatccagtgcctagttaaattgtataaataaattagaaattgagtatttaatacaaaaat

SEQ ID NO: 10674 - DNA, 489 bp, Zea Mays
ctggccacgatgcggcgtcacatgatggcgcagacaacagatttgggggaaaacgaaattctctggctgtggtagctaatcgagggcaagggttagcgctctggcttcgtatcaaactaacggagctagctgtgcactcaatttatagtatccatgagcggtggctgtgaatttggaagagggaagctagtggccgaagaggggggtgagtcaccggcgcgaaatactgtggcgttcactggggcaatgtttcaggcgatggacagactacctacgacggtctactgcgacatggtaacacttctaagtacgtggcgcccaggcggtaagcggcaaactctggcgagggtcatcttaactggccgtggggcaagtgggtacgacggctagctcacggcctcatccgcggtcaagatcttttcaccgccggtcgttatccgcacctagagcgcacgaatcacaacgccggcgaggatcacggcgcacgcc

SEQ ID NO: 10675 - DNA, 438 bp, Zea Mays
gaatcttcactggcttttctcggtacttgaggtccttttgaatctgaattgcctctgtctcgatgtggttttctggtacttgcaggcatttgcggagctgggacacatgaaacacattgtgaatgtctgacatggattctggtagctcaaggcggtatgctgcaggtcccactcggctaatgacggggtaggggccgacgaaacttggtgctagctttcctttcatttggaaccttttgacaccacgcatcggaagaccttgagataaacaaaatctccttcctcaaatctgagttctcttcgtctgttgtctgcataacttttctgtcggctctaagcttcaagtaacctcttgcggatcaaggcaactttctcttcggcttctttaacaaagtcgggtccttctagtgtcctttcccctacattggaccacattag

SEQ ID NO: 10676 - DNA, 600 bp, Zea Mays
caagttatggttttccagggcacaaattggtaggaatcgtagcggcggctatagagcacaggggcacaaacctccctggtataagcaacaggtaagcgccagatgatgaaacaaggaggggctgcaatgcaatgcggcttgcaacctaatctagggctagcgtggcgagaattcacacaaggcggctagcgagggcaaatcaagtaatgtggtgtctcgacttgtaatctgggtaaagtggatgggctagcggcggaaaaaaataacagcaatggagcggttgaactacgattacgacacgacctaaaccagcaacaagactcgaacacggatacaaattcaacaaagcaatctgaaacaaaattgcaaggctaaacagggttataggacagcggattttttttgtatggcaattatctggagttataggatgaaaaacctaaactaaactagggtaagcctgacggtaatacctgagtctttgaataccacttgataggaacggcggtgcccgatcttccgtcaggtgaagataactatcgatttggtggagatgtcacacagacgattcggcttccaatcaatacgactagaaccccg

SEQ ID NO: 10677 - DNA, 699 bp, Zea Mays
cgaggattccgctgtgccgagcttcgcccacggtgagttgcggccacggcggtcgcagtttcttcggggagaaattcccgtcggtcttgagcaccaatccacaccgggaaagcgtctatgtcacccacggaggcaccgcaaagatctccgacaaccctcgtactccacttttctatacttgcggagaacggctgcggcggcttcccccctcccagcttgcgagtggaaatcgaagatgattccggtgcaggacgagtttcagggtggctaggtcgggaatagggaaaggaatcgcggtggcccggcctttatggtcgcgaagtagtgcgccatgcggaggaacggagctccgagtctacggggcgcactcgccatagtcggcgaggcggttgtttagcgactgatagcccaggtccacaggacaacgaggcatccacacagggaaagcgtgcgggttcggacagctatctggcaggtggggctagtcgtgcagagggcacgcgatagcgggtctctagagggtgggctcgccctgtcagcgatagggagtacttggcgtgagcgcgcgcgctatggccaggtcggtcccactagtctgtgtgcgcgtgagacggatggcgaggtcccacctatcggcgcgccggatccctgactgggccttgcagcggggacagggttgatgggccgactgtgccgttt

SEQ ID NO: 10678 - DNA, 361 bp, Zea Mays
ctggtcttgaagtggattgtttgtgagcacaccagagattgtactcgtgattcacaatctatgcgcctaactcagcatgtcaaattcgtgctcaatgtattggaggctaatccatgtattcttttagggaagctaattaatcaatgcattctgaatattacagaatcagtacaatgtacacgtggtagcaccggacctcatcttgtgtggggagtagtaactaggaccgcccttccactggacagctccagatcacccttgactggaggtccgaaaagcgttcgggggaggtcccgtctcctccggtgttggccaacacgtggcaacaccagacacccttaggccggaggtccgacccccg

SEQ ID NO: 10679 - DNA, 541 bp, Zea Mays
atgagcctcaggaatcttaaagccacacacaagaaatatctcattgctgcaaaggtatgaaattaattgactcatctcgtgtgcactcattcagcattgtcgttagtaaatctttctttactctttattcattatgtgaaggaagaggaggtcaccgaagggaagaggcttcctctcgaggaggtggaagagaacgcatgcatcagccactgaacagaacaagcaggcgatttttttgtgtggatggcgtctgccacaaaaggattgaatcgaggagtgtgctctggttgtgaagtgataactaggctaccacatgttcattttcaaaagttttcgtgtgtgatcgtgatcaggggtgaaactgtggtttcagccaacaaacttgcagttcctattgcttctccccacttttttcctttatatatattttgtatcggttacagaacatggtttatccagtggtatgctgatgaaagatgctaagtttcgcttaatataatgtatatgaaggtcctgggtacctcaaattttgtccacattg

SEQ ID NO: 10680 - DNA, 922 bp, Zea Mays
tgagaattctgcagcctgtgtctattgggcagatactgtagtctgtgtcattgtagccctaggtgacccgacatacacaagtagaacggagtggaacatcaactaaacaagcagagaaaacgagccataattttcattcctaacttggcacaaactaatgtacatagctcgactaaacaaacacaataagctttaccttgagatagtatggtcgatgatggctgtgaggccggtgtagctggaagtgtgctgccaccatccatttctgcatttatagcattaacttggaaggaaacactgctataaataattgtgctttcggtgaagctaacattccactcgaaagacttctccagtaggttcgtaatttcgtttggaatgaaaccaggcggattagcttatatgagggtgtccacattttttttaatgaggcgctgcgccatccgtccaaagaagataaactcagcggtgtcagtgtcgtcttcagcggtgaggcatatcttgtacctgcagagagtggtttgattggtagccatcactaagcatggaatctgtagacagtgaaagccttagttcaatttagatctaggttttggccgagacactaaatatgtcctctagctgccatggtctgttttgacaaggtttctttcagctataccacaaaagaagcacactatgcacaaactgacataggcttatccgactactgttacggtatgtcaatactttgcatactaaagtacactaaagtggaggcactctaactgcagaggccatatactggctagcctccatcatagtgactcttgtggcagtagctgcaactcaagcagccatatgtactatttactcgtttggtaaacaagccttgcactgggatgtttcccatgtttcaatgttgtgcataccccaaacaaat

SEQ ID NO: 10681 - DNA, 719 bp, Zea Mays
gggtataaatcgtgccgctctcctctcgcccctcattgagccgtgcgattagccaacaccgccgtgtgaggacgccgtgaaggccggacctaggctgccgcggctccgccatttctgggaatctccgtccttgccgcgcccatccttggtgagtcgcttcccatatagatcgttgtgttattccttttgcggaacgctgctcggggtgggtagtgggtcactgtaacgccttgtggcggtgctccggtgagctcgccgtcgtcggctaatcatgccgccgcgattgagttcggattgggggggaaggcgctgagccattgatccgcaaacgaacgtcccagattagaggtgagggtatcgcttcacatgcggaatcagatctgttggatcgtgatcggatggcctcggatggatcacgattatgtaaaatatgtgtcgtagatcttagatccatgggctagcagcacttacggatccagatctaatctgatccgttgatttagaatcgaacggccgtaagaccccgatacctattcggccatgatattttgctaaagagtccccgcagaacataggaaacaacccgccgtcctaagcactgttgaactgggtctgggaattctttcgggaaaacccctggacttctctgtaattgacccgccgtactgagagttagtaaaattagagaaaattaatttggaaaggaatttttaatataa

SEQ ID NO: 10682 - DNA, 544 bp, Zea Mays
ggcttgggtgcataacagataggcgggactgaaggcaagctcaatttaaagggactcaccacgacggtggtcaatttgaccgcggaatcacggtggcggcgatagcccgaggagctccacgttagctcaacggtgtccttaggtcaataacgtggcggacttaccacgaaccccatacggtggttcaacacaagggcctccaagcagctccgtggatggccaaagcgtccgatggcttgctacggcggcggtgaatgaagcacggtgaggacacctgatgcccatggctagagcggtaactcggtcactgaatctgaactagagatcttttaccacttcatcgatccacgtctcaatggcaccaatcgtggggtgagctcgattcacggcgaaggaatgtcggtggcggacgcactgaactcgatcttattcagtttactgttcatatcatactgagttcagagtgcctcacaaagcaaattgagagtcatttttcttcgattttcattcaacaaaccaccaagtcgactatagcaaagttgtt

SEQ ID NO: 10683 - DNA, 571 bp, Zea Mays
atatctcaaaagctattgggacggcgatgtattctgtaaactgggaaatatatcatcaataaaaagacttccagagcactcaatatgttcactatcaacctgcattcttacttaactcggggtgaccactataccctgctaacggagcaatcggcttaaatcggcaatgacttaaggcggtgcgacatgctcacgcttacttaattcagggtgaccactataccctgctaacggagcaatcggcttaagtcggcaatgacttaaggcggtgcgacatgctcatgcttacttaactcggggtgaccactataccctgctaacggagcaatcggcttaagtcggcaatgacttaaggcagtgcgacatgctcatgcttacttaactcggggtgaccactataccctgctaacggagcaatcgacttaagtcggcaatgacttaaggcggtgcgacatgctcacgcttacttaactcggggtgaccactatgccctactaacggagcaatcggcttaagtcggtagtgacttaaggtggtgcgacatgctcacgtctacttaacttggggtgac

SEQ ID NO: 10684 - DNA, 529 bp, Zea Mays
aggggagcaaggataaagtcgcgaagggtgccgggggctccacgctttcgttgggtgtggatgatttcaacatgtctactatggagctggcgatgaagtcactgctgaagatgtctttgccagcaatttttaactcttgtgtgcacatgtgtaggggaggggtttatcgcctagaggacttttggtcctattgcgccaagggctaggtcgcggggcattgtgcactccggtattgaggcgggggaataggtcgacggctcgactattatgggggtggtgctgagggatgttgcttcgcaccttcgctcggtaagagtctttgtgcatggttcaacgtttttagggtgcacttgtggctgatttcgtacttcttcatcttgccactattatcgatgctctagcccccttggcggaaatgtgggaggcggtagctgcggtgagggccgagtgtttggctgttaaggacgagcttaaacagaagaagcggcaggcgaccgagttcgagcagcgagcgaagtccgctaaagct

SEQ ID NO: 10685 - DNA, 580 bp, Zea Mays
cgctgccgcttggtgcttggagctcgctctaaattcgtcaccaaacaccatccgcccccacaacacatcaccccaccaccgtcgcatgtgaacgtatgacgacatacagccagagcccagcctagaggctgaatggtgtgagcaaagtgcaatgctcggtgtttctcagccggccctctgcaaggcaaatttggccgttatcattgctgcctcccggatgtccaggaaaagggctctctaggcattatgagcgacagaacacagcgcagtcggcgaaagaatcgcgtcacctgtggttctgctgtgtgaacacatgtatttattttccccaaactttccccctttattattctcgaaaaaatactactactaaccatgtctctgtgctcgagaagcacatggtgttgcattggagacggcatgtgcttacatgccccgatgttggagtctttggatagtttcatcagtctatgggcacagtgcagctagcgtcgcagaaaagactctattgtcgtatcctttgaatgcacaagcataaacatgaacctatcaccgcttagaaactgaatctagatctaga

SEQ ID NO: 10686 - DNA, 376 bp, Zea Mays
gaaagacagcgagacctagatgtagagggagtagaggagcttgaggtggaagatgaataggagtccgtggtgttaagaatatttctttgatgatgctcgcctccccttgttcctactccttatagtgctcatttcagctagttgggccgctatgtaccatatggtcttggttcctaacatgcccgcgcgagcatgccttgcgtcgacccagccttgcctcccctcgctgcggcttggcctggctgcgaggccatgctcctcgtccaacctcactgtcggctgctcactcctatcgccatgcaagtcactgagtcactagacgctgctcccagcgcgccatggggctcgccgaactcgccccacaacaccttggtcc

SEQ ID NO: 10687 - DNA, 596 bp, Zea Mays
tgtcctgttaggtttgaaatttatttgatcggcgacagattggacgtctggtagatggctcttggctggtcttcattttgcttcgtgcttcaatgcttctgctgactagacttgcagctcagtagctacatttagctttcctttgatctccatcgatatcttccttctgcctcaatacattcattgcgtatactgtatggatgtgactgcttcagaaaatatattgaaaattcttggccatcccccacccaatgggtgtgaccaagggacgtcttggtacgcaaagcgtttagcacattgtcctggagtagtaacttgacatgactgctgggcgtaatcatattgcccaagtagttgaccttagtccaaatggtgtcgtgctacgcgaagcggtgtctgctgcctgactcgccttcaggcgatttgaattgcttattgaattcttgcgactgttcggtgggcgtggtaggagatgaacggttgcctctggcttctataaatagattgtctgtcttgttggtgtcttcacacatcttctgatcgtctgttgcttcttttcccatttttctcttctctgccaaccgaccatgggcaag

SEQ ID NO: 10688 - DNA, 454 bp, Zea Mays
accgaaagacatcacagtgaactcatacaacccatacatggtaatgaatgccgtcttcggaatgtctgaaggtcggatcctgagctgatgataacctgacctcagatctatcttggagaacacactggctcctctcaactggtcgaacagatcttctattctgggcaaagggtacttgttcttgatggtgacctcattaagagctcgataatcgacacacatccttcgggtgccatttttcttctccacgaataggacaggggcggcccaagacgaggtgcttgtccgaatgtaacctttctctgacaactcatcgatctgcttcttaagttcaaccaactctggtccggatactctgtaagctctcttaaagattggggcggttccaggaagaagttctatagcaaactcaaccttccgctctggtggcatacctggtaggtcctttggaaac

SEQ ID NO: 10689 - DNA, 325 bp, Zea Mays
gagagatagttgtatggttcacattgttcgttgcctttttgtctctattttgtgctaacaatgataggaccaaagaatcaaatggacaaggacaaggggcctaagcttaacgacgatgagtgtgtctctcagatggaattgaaggagatgatgcgcgcgatgactgaagcttttaaaaaataccaggaccctgcggcgacatcctatgagtagcttgatcgatgagttgctgaacttgttacacgcatggatgtactggaggctcgtcccccaccaccaactctagccctagctcactctcctgtggacgatgacgatgatgttt

SEQ ID NO: 10690 - DNA, 602 bp, Zea Mays
gactgcagacgtcttcggcactacaatcgactctttagtactctgcacagtcggggcagcgcgctttgcttcggcagcagaagatgtccctgcgccaaattcaggaaccatggccagttcaatgtaatgcggccgatgggtaagcaccttcaactttttgctcgtagcctctggcacaggcccaggtggggcagctgttgcatcaacttttctcttcttcccctgtccccgcagcgggtagcggtagtcggggtagacgaagctaatagcatcaaaaactctattcaatctcttctttccctgacttctgaaggctgcggataatgcattatcttctgccttggaatatgatccaagcagttcatcacttgtaacttcaatacacttcagccaatcatcgtttggttcatcaaatttgtctccaaacctgaaagtgtatttaagctggaccaaatctccttcgctaggatcattgatgatttccttcggcattttccagccttccgcaagcggccacactctaaatgctatatgctcttgaattaaatctcttgtaccaatgaaaaagcagacagtgccgaaagccttctggcacgcttccg

SEQ ID NO: 10691 - DNA, 446 bp, Zea Mays
gtgaaggtgcctgaaaaatttgggttcaagttgagcaagtttggctggtttgggcatttcaccgagcacttggtgtgcggggatctagggttttaggaatatggccatttgaggtgggaatgccctcccgaaggagctaaaggtttgcagggatacacaatggaggtacatgaacacatttcaacaattggattcacaggaatttgaagatttgcaaaaaggtgggagaaagggtggagagggggcagacttgtcacagaggactgaggggaagaagaacaggagatgggagagagacttgctcaccgagggagggatggagagaggcgaggtcgccggcgatgatggccggagatggtggccgccggagaggtcgccgggaggaggaaaacgccagacacagaggctgggcggctgggagaaaagaacaaccagagggcctctag

SEQ ID NO: 10692 - DNA, 422 bp, Zea Mays
caattggataggttggggagcatcacggttacctgggaatacttaaacggggaagtagaagacgtgagctaactcgaatcgcgctggtcacggaaggattcttgcggcagagctaagaacagggaggaaagggactcatgggttattcagtggaattgagccaattgattgatcgcttgagcgcgtgatgcaacgacgaagcaacgccagggcccaatttatagtcggccggccgaagatggatgagatccccgagctgtgactgcgctggcgagcacacccgcgcggcggattccggtgacatcgcggtgatcgccgtttaaccggagcctgccacctcagtgacactctgacacgtcgccggtaacttttgccgtggccgccgacgtcttacccgagccacgacgacatccttatcaccg

SEQ ID NO: 10693 - DNA, 551 bp, Zea Mays
ccacgtcaatacaacccatgtcctgccgtgttttttttcttcctccttttccagtcgtggctgatgtcgtgctgagaggatggggtgaatgaaatcatctggattttctcgcgtatcatcgacgtgtggagtcccttgtgcagttccatcccctacttcacgcatagtaaaaaaacaacgtgcagttcgcctgcgctctttccgcttggctgttcttcgttgatgactcgtgctgctggcacacacatgtgtccatatcgtcccatgcatggactccgattggcaaggctgtgtttcctccgggttgttgcacccaaaactttgtcgtaatcagcctcccgtaatcactggagtctgttacgatcggagccaactgtccgtgcttgtactcatctcctcgcggctatttaaacagagtttctcccctcatccgccattgtccgccgggattcgctcagccgtgtatccgaactgaagccaccgcgtcggctggccttgggcgcatgccgcaacaacctgccgagacccccgccgtgaaccgccctataaag

SEQ ID NO: 10694 - DNA, 386 bp, Zea Mays
ccgggggtagaagataggtgggcaacgtcagatccttgggcaacggtccagattaggatccacatacccttcgcgctagattagatcctggcgcttgattttggattgggtggagcagagcgactccagaataattaaatatgcgccatagatcgcggattggacggtctgtgccgcataccactttgctggtgacttagtctaatccgcgtcgttcgtgcgtaatccaatggcccaccttggccgatacccgttcggctggttgttttgctaaagagtcctcggattttctataaaccaacccgcagtcctaccacagtgtagaatgggccttaggaatatttaccctgagacccctggactttacagaaattgaggctcaatcc

SEQ ID NO: 10695 - DNA, 1164 bp, Zea Mays
gaggataaaaccgaggaccgcctggactctcggccgcgaccccatcccctcaatctatccgaaccggtagtgccttcaccaagccaccattgcagggagagagagaaagaagaatagcagccgcccctattgccgccgttggtaatgcccgcgcatggggttctctggctttggtcggctgcttcggttgcatcgcctggagccttgtgattccacgccggtgcgaactcattgccgcgcctggagagagatgagattgagggagacggtggatgcttctgtgcgactgaagttgtgcttgcgcaatggcgacatgcgcccgaccgcacccacgctgcagggtcgtgaagactggtcaggtgtggagtcctctccctgggacggtgaccccgagttcacccgccgttgagccttgctgcgtggtcagaccccccaccattaatcatttctttggtaagatgccatatctagttcattataaattctgtgtcgcgtagctagaggttgcggtatagttggggcgcttggttgcggaaccgtgtatttgtcggtgggaaaacgtcgagtgctttggtgtcgctgctgtgccggcgttcgagggtgggagacgccagtcgccggcgagcgcacctccgcgaacgacctgggccttttatcgctcggcctcggtcggggaagaagttcccccagccgtggaatctaggatgagcggtggagattaggccacgcacgtaccctctcgctaaattcatctcggcagtaggatcgtgatcggagggttagggtcggatctcgtgatcgtagaatactggccgttggatctagatccaatagttctcggtgcgtaccgtttcgacaaaacctaaatctaatccccgccatcggttgtcgatcggatggctcagatcctagcgtaccccttcggccatgcctatttatgtaagagccctcctgaaattttggatctaacccgcaatccagccctactgtgctctatgtctagggaaaattaggatttggcccctgtgttatctgtaaatagtgcgcccagtccagggaattataaaatccagaaaaagtgattagaaaatgattttaatgagaaaataaatgctagaatttgtgtaattcatataaaattcatatgaagtcctttttagtcca

SEQ ID NO: 10696 - DNA, 899 bp, Zea Mays
aataactatgtgaataactataaattgtttttttattattgtcttagattagacaagctgtattgtgggagtggtcgacgaaatcaaattttcaactcccaaccccttgcaataaatgtataagatcatggagtacggtcgagtcacccctttcataggggatttatctatattccttttgtcttctattctcctatctctcctaaaagaatatttattttaaactctctctcatcagttcatttttaacacaatacttttttttaagataaaggataattcatacccggcttcatctaccaaagggtagaatcaggccaattattacaaagttctgtccgtaggcctacacagcactataaaagttggaacttacatccatgcagactaaggaaaaaaggtaagtttcttgactaaaccagaccaatagacctatttgacagccacccattggaaccaaagaattgtaacgccgccgtctcttggtggcgcgtagcaagcatgagctggttccgttggtcgtcatgccgctgcagtttcgcccattgccggagccagtgggttccctgaaaagaatctgcaaaaaagattttggtctgcatctgtcaaaaactacctcatttctagttagccagactgccgaaagcaaagcggatgctgcagttaacaacaacaaattttgtttattaccacccatcttagaccagctattaaacaactcctctgtactttgagggggtgatattccaaacaataggtatacagcacgccacagaaatttggcataagaacaactgaaaaaatgttgaatagtctctggtgagtgacaaaagctacaacttgtatcaccagtccaatttcggcgagcaaagttatcgttggttaaaatcacacctttt

SEQ ID NO: 10697 - DNA, 419 bp, Zea Mays
cacattacaatacaagtcacaaattacatacacacggcgaagggccaccagccccacctcacaaataaatacagtcgtgctctcccctccctctttattacgagccgggggagggtagtgttttcacttactagtgacggcatcacacactacatcggctcagccttcgggataatgcccgcctctcgataattaaacaacatcattctcaattcctcaccctcaaacagattccgtagatccccctcaccaatacttgtctaaaacgacgaggatagcaaacgcgttggccaccccgatctacccgaagacgggttcgctccaacccatccgacggcgcctaccacttcgtgacatctcgccaacgctatgcttcgccaccacttttcgttgtcgtcgttcggacctcgcgccagccg

SEQ ID NO: 10698 - DNA, 321 bp, Zea Mays
gccactcgtgtcgatttgatttcggtcagtgctgtagagatctagctaaccaaacggttggattgtaaagctctggaacgtcgaatgcttgctcttctgcacttctgctgaaaattcgtaaagattcattgtgtcacgataactttggatgctataatgataggtgtgatacgatcgtgtagtagtatggtgtcactgatttcatcctttgatctccagaagtatggaatgctggggtgattgatttgcatagttaatagttctattccacaatacaaaattcataagcgatgctgagatgatgcttttaggtgctttctg

SEQ ID NO: 10699 - DNA, 897 bp, Zea Mays
aaaggtaacatacgcgccacgcactaaacctaaaagaacgaccacacagggctgctcaggcttccagccttggcttcctgctgagcagctcatggagggccgtgtttgtggccatacactagagctcactctcctctgctacttcctgacacaccaaggaaatactaggactaagaccctcaaaacgcacacattcctatgtctccaaattgtccaagcaacaagaatgattagagaaatccttttctcttctactttggcactttgttgactgcacatccccaccagcgagcaaaatttctcaatttgtggagcagcggcctgcagtccaacaaaacagaggattttggtccaagtctcccgggagaagacgcaagacactataatgtgttgagctgactcatcttcctggtcacaaaggaggcagacactaggatgtggcaacccatgtttcagcaagcgatccgtcgtccaaactctgttcttgattgccagccatatgaagaatttgcaccggagaggtgcccaagttttccaagtatttttgcaaggttcaatcgtaacagttcccaagaaaaaaggtgttataagcagatttactagaatactgtcctgaacttgtgaacttccaaaagtgatgatcaggaagggctggttgcaaggtaaaaccttccaccaacatccaaagcttcaggtattcgacaatcacctggactgtgagggctccctggatgtcagtgacccaacgcctgttagatagggcttgagaaacagcgcgttgtcttcttgctctcttaggaattaactgaaaaagattagggtccagttctcccacagagctaccgtgcagccaccggtcagtccagaatttggtatcaacaccatttccgacctttg

SEQ ID NO: 10700 - DNA, 621 bp, Zea Mays
ccaccacgccgggcccgcgtcgattttttataatcgattccgatcgcaccactagagcttcggcgtacgctcctagcagtgggggcatcaccactaggattccgagcggacgaagccatctgtggacgcagaaatcaaggtggcctgcccctcgcaccaggaagatggcgcgttcaaccttcctctgttgtgtcatcgccaccacccgcacgggagaaaattggaaaccagcctcaattattgcctcctcttctttttttttcattcccagtccactatctgcagctctattaattactccgtggtgggcgatgtacaagtcgtgcgtgccgattcttgtgtcagcgtcggattgactaggagtctgaagtaggtggcggattaagggcacgagacacggccaagtttagtgagcaaagcttccaccatttttaatgtcggagctagcttctgcttttgcttgtaccgggagttactacaatgcttgcacctttcttcctatcaatgaggggacctggaaaattttgctgatgctgtcactgctttaccttgcacaaggttgtgcacaggtggttaagttagcttggataactagtttacgattatacatgcctgaaagtg

SEQ ID NO: 10701 - DNA, 759 bp, Zea Mays
caggaggcaccaatagtctttattcgtttcatccttaatcgatggggattgatgagatttagggcttgttcgttagagttggaattggctggtatgatggcctaatccatgggtgtcatcccaacctggatcaaataccagcccacgaagaaatagttgttcgcttagcccacatgtgtttacaaaccaggcccaatccacacgaaaaacctcaaccccggcctggaattcgtccacaaaccaacagctgtggaactcatcccggccacactgcgccgcccacggtgcggaagcgagcagtggcgcgattcgagacgacggcgacgcaaggcttcttccgccgctggccgccctcttcgtcagggctcttttctcctgtgagttcttgcttcccttctcctctcccgtgtctatgtcctagggattgagtttcttgccgacgcttcacactccgctgatggtcgccgccacctacgggagccttgctgccctccgttttggatggaatttctaaacctaagaaaatactagtttgggcagcagcggttctcaaaactatttgctaatataactattgcatgcaaataccttagtaggctggctagatttggtcgtccaaatcaagtagcaacgtacgcgagaagctcgattaattacacgcactgctcgtcagctatgagcgtccggagtccggcaaagccagagttccaggccaaagcacgcgcagatcttgtccgggaggatcagaaaaccctgctt

SEQ ID NO: 10702 - DNA, 747 bp, Zea Mays
cactcggcagactctttgcagcggtgtagacggtctgcagcctagggccagacaattcgtgacctagacagcaggagtgggttctctatttgtcagtgtttgagatccgatcacgcactacgtggatacccacaaggtgcttttgggtaggatggcttaattgattacgacccaatggttcgtgtggtaacaagacagaaagaaacatagacttatacaggtacgggccaagggagttgtgtaatccgtacttcatgttatgatcctagtatttaaatgaagttacaagttgtgaactatgagtgtgtcaggccggatgagatgaaagtggtaggggtacttcccggccttatatacatgaccatggagagttatccccgcacaagtgataaacataatccgctcgcttttctccctgtttgtaacaaaccgtctccctacatatatagaatcttcctcattcatccctccgagttagtgtcgagggtttagcttgtcgggtgatcacaactgctccacctgatatgctcgtgctcccatagcgcttaactcgggcattggtcttcaccggcttagattgggcttgccttacatggttgcactcggcttgcccatccataggatgacccaggagaagacctgccagatggcccaggacacattttagtgtgcatgaggacccatgggatatccatcccccacaagcccccgaggttcgagtcaatttttgaggacaattgactagac

SEQ ID NO: 10703 - DNA, 284 bp, Zea Mays
aattattcgcaccaccaacaatatccttcgctcgctcctattccaagccagcatgcccccgtcctactgggtcgaggcccttcatactgccacatatcttctcaatcgccatctcactaaaaccttggcctccgccacacccttcctggcactattcaaagcacaaccctcctatgaccatgtttgtgtctttggatgtagttgttatcctaatctctccttcactgctgcacacaagctagccccacgctcagctgcctgtgtcttcctcagctatccctccg

SEQ ID NO: 10704 - DNA, 407 bp, Zea Mays
ctagaacttgggctaaatctaggggtagttctggaggtgcggggaggtgggtctcacttccttctctaccggcttctcttttagctcttaggggaaaccctgctccaatcccggaggcggtaggcatggttttatccgaagccatctgccatgggaagagagtcactattatgcacatgccattttttcaaccaagttattttattcattacaccaatacattacaagcgtacagctactacaagtcgtactatacgtgagcgttccctgaggtacttcagaactctttttctaaagtgtccctaaattccttgagaaggtcatcaaggctagctagggacatatcctcgacgtcggacaaattttctatcctggcaggaggtggtgctagaggagctttcttcttt

SEQ ID NO: 10705 - DNA, 572 bp, Zea Mays
gggaagttggaagcgtggcagcgttttgggatcgaagatgggaggtgcgcgactgcatcttggggaccgggttgccgagctcctggtcgttcctctgtggtccgatgaccaggactgggattgcatagatagagaggaaatttagggttagggatttcggaaaacttgagaaagagatggagcgaacaataggaggggaacaagctgcagctcaccactgtgtcattggctgccttcctccgtggtccggccgcggggcgcagactggggcgccctccaccgtgtccgttgtgctcccccgtggcaaggaagttggcgcccctccactgcgtgtagggagcatcgtggaggcccaaggcggacctccgtgcggcaatggttggggtcgacggtgcgacagctgcgtgtgagagaaggtgtagcgtgtgaggcgaggagatccaaacacgtgcgaggaccgaggaagggcaggggcgttgctggagagggagcggttgctgtgtgacgctcgtgcggaggagaggatgaggaggagcgaagcacgaacaggtctcgcggcggcaaaggctttt

SEQ ID NO: 10706 - DNA, 711 bp, Zea Mays
gcataaccgaccaagggtgacctaggaatactcgtcaatttggcttaaacactttgagaacggtctgcccacgtgcacggcggaaaccgtgacatcaagctcgcgttcccatttaatcatggccgaattgaccaaacgattgccacgacaagcttcacgagcataccaagctactaaaacaacactcgagacgtacagaaccttaccagagtggtctggccatggagcacgaaggacctgggctcgttggtgacagagaaagggggaaaatggtgtcgcggtggttctgggtgaaatttgggttggagattggggctatacggccgtaaggaactatagtttcaccgtgcacattcaatttgggaggagggggcagaggcaacgcgaattttggattgcgatcaactcactgggtggaggtgtgcataccccgccgtggttcatagcgctatttatagccacggcggtctggctagcgttctctggccatggataacttcgttagcgcatgcttaccacgtagggaagagacacagtgagggagatcgaggcatgggtgacaccgcggtgaaagttatctgagtcatggtggcggccggtgattaactccggccacgctcggctcagcacgcggaatggtgccacgtcccgagttactcccttgcgatcatatccccaccgattcatccgagctcatccaatccaacagtg

SEQ ID NO: 10707 - DNA, 737 bp, Zea Mays
ttatggtgtatggaaaatagagagttgtttatggaggtgtgtacacgattggagcagatggtgagggatatttttatccggctggtcagacgacacagaggttggctgtagagcagcaaaagaggaagaatgacgaggagaagaagcgagctcgcgagaaaaaggtggcttgcaatgctctcgagaggcgccaccgagcgcgagagagggagggggtgccactggagccattcccaagcacgatctccgccgccgccgacgatgatgacgacgatgaggggatggagatccggcttggcttcagtcccaacgttaggctctggtccgaaccatcctcaatgggtctgtacgttggtccggacgcgccggtgctcgggctcgagatgttagcacctttgcctgagatgcggacgcctgttgtgccggagtctatccccacagtcgaggaggaggaggttgtggagcggcctaccgacccactcccagcgccggcctcagggaccaacgacatgaggagcatggggccattgaggctaggcctgtctcggcccgagtaagttatcgtgagatatctgaaacttggtctttttccttgagtttttttgatgaatttctctcccgcatactttagcctaaagcgcaaagcgggacacacagtcgtgcagtggagtggtcaaaacagtagttgaagtggtctcctgcgggattcgtagggagttggtggctactgctaggcg

SEQ ID NO: 10708 - DNA, 328 bp, Zea Mays
cacatgatctgatgtattactagctagcttttaaggcacacaatagcaaccatgccttttattttcccaggcaaattatttgagatggtaactcattccagacatcttttaggctagtcgtatgcattagatttagttaacaccaatacccatataccatctgtgtagaaaaaatgaagtagataatctgtagatgcaccaatatcataacgtacgtacgtgtccgccatccataattctttggaaacatcaaattcctaaaccatgagtagccgtataagagcatcaccatatcatatatctatctggtctcctatattaaaaaaat

SEQ ID NO: 10709 - DNA, 448 bp, Zea Mays
gcaacctgtagatatgccgggagtcccgagagaattggccgagcacaaacttaaagtgtattcttaggcaagaccgatttgacagaagttgtgtcgtttcacgcttgataaaagggaagctatttgtgccgagttaccccgcttagtgttggcaggattcattagagaagtactacaccctgagtggctagcaaaccatgttcttgtactaaaaaagaataaagttgattggcgcatgtgtgtcgactatactgatctcaacaaacattgcccgaaggatcccttcgggctcccttgaatagatcaggtagttgactcgactgctgactgctctatgctctccttcctagattgctactccgggtatcatcagatcagcttggcaaaagaagacgaggagaagactgctttcatcacaccatttggagctttctgctatacctccatg

SEQ ID NO: 10710 - DNA, 623 bp, Zea Mays
gtcggggtggtggcatagcatagataggagtagggggccacggtggtggggtcaatttggtcggtgggggctcaggacggccggtccacggtgaggtggggtcgccggcgaggccatggggcgcgataggggaagaaggatggtgcgccgtgttcgcggtggagtggtgaaacttgtgaactatgttaattggactctgggccaccggagaagggagggagaactcaccggagcgatgggggacggcggcggcgctggcttgattgagctcgggggtgaggggtggctgaggccggtgtgaggggaggtggagctaggggcggtcccttttataggcgcccggggagggaaacagccgaaaccagctcgtgccggcgaggcgcacagcggcggcgatgatggcgcacagcgcaggggatgagacggctcagggtgggcttccgtgaagggatgcgagcacagtgaactgggggtggagcggtgcctaacttcactggcgcaggagtaatggcggtgatagatagggagggtggtggtcggcggggtttgcgccggtgaggtcacgggcgaggaagaagggccgactggtggggcccatccgtcagaggaagagcgggcacgag

SEQ ID NO: 10711 - DNA, 481 bp, Zea Mays
tgcagctgtgagccagggtatgctatttcagggtgagagttcctgtcacatgatggtttagcaaggttttctgatcagggtgagtgtttggtgagcaaggtagccatgaatacagattcatgtgatacgatagtgtgggatgaagaaatctgtgacaactctttctggcatgagggtttgttacaacagttagcttcgagcagtaagagcatagattgatttatgttgattgaatgaactacgatccacagatacccgtgggttatgattaaataaatagtctgtgtatctaaatatgtcatacattagggacataagatgctaatgcaccggtgatctgaatttggatttttttctgtaactaacactaatgcactagaaatctatgttcgttaatgtacataccatttataaatatttgctgattgctagggttgctgtgttgggtccccgatcccggcgaccgacttctcagaaagca

SEQ ID NO: 10712 - DNA, 716 bp, Zea Mays
gtgcgctagcgcagggaagctgggagaagcgacgcgatggagcttcagcagaggatagctgcgctcgtagataaagatcagggcggccaggaaaaaaatatcccccaagcggctgaatataggagcgcggtcaaatgaaaaatcagggagagagaagcggtgtggaggagatttttcagatttttctcatctttcttctctctttcttttttaagagaattacagatattttagatcacgatttttagcgataatcaaaggatcgacgcgccatacgactacgcatagtattttcttggattttgaaataggaaaccgaattggccagcaattgttccgatttcgatttatttaaacagtccgttccaagtagcgcatttatcgaatttatagagattgctcgaaccgagcgaaatacttaagcgacaattttagtttgtcttaattgattaattttaaacagacactaggctcgatattttagaaataaataaattttaaacggtgcgagccgaatgcggcatcgcaatcaaaatttcccgggagacgacgtcagcattgtcacgggagcgagatatagacgggtaaaaccagacgaaatcatattcgatattttagtcgacgtttgatttagttgaacctaaacaaattttgcctactatccgaatattcaatcggagaacaactcaattaacaatcatgcgcctggttttttt

SEQ ID NO: 10713 - DNA, 327 bp, Zea Mays
aagaaattagcaaatattggaaaaatcatctagagaaaaatgttgaagaacttcgcacatccaatgaaaggtgctttgagaaatccttagattgcgggaagaaaataaaagctagcttcgccaaagtgggtgcctactctgctgaagaaaatttcatacgaggcgatcccaaaggcgttgttgaatggataagtggagaagccgaaaccttcgaagaaattttgagtgatctcagggatgtttgcgcgttttccggtgcgcggggaatttcagccatcttggagaaggcaggatgtgatcacattaaagttgtagcccaggccgaag

SEQ ID NO: 10714 - DNA, 566 bp, Zea Mays
ccgagttaagtaagcgcgagcatgttgcaccgtcttaagtcgttgctgacttaagccaattgcaccattagcagggcatagtggtcaccccgagttaagtaagaatgtaggtcgatcatgaacaaactgagtattcttgaagcctttttttattgatgacatatttcccattttacagagtacattgtcgtcccgatagcttttgaaatacaactagggataacatttcctgaggtgctctatattccaacagttcccaatttccgtgccgtccatctgagtgagacgatatgatcccggccaagtgacttctgccactatgaatggtccttcccataggggtgacaacttgtgccgtccctcccccgttagaattcggcggaggacgagatctcccactgcaaaggatcatcgtcgcacgaccttgtcgtgatagcgtctcagagtttgctggtatcgcgctgattgaattactgtgttcaaccgttcttcctcgagcacatcaatatcctccagcctagtagcttcagcttctgctatgctctcaaagatcaaccttggcgccc

SEQ ID NO: 10715 - DNA, 450 bp, Zea Mays
tgcaaatgccttaagggtacatgataataatttgtaggtgatgcatatatggtgaaaatcttgtctaaatcatgtgcaccccctaatccctatgtagcttcgtccctaacctcgagtatgataatcagggatctaatgccccctactaaactaccctttccatccaacaagacagttcctccactttataatgcacgtactagaaaatcccctctcctcctccttagctaaaagacatctaagatcatcaattataggacatcgactatactcctcactaaagcatgaaatgataccccctataaaaatgttaagagcactctaaggcgaaacttttccttgttttgatttactcatcaacgaagttagcaatgctaccgcatgcgagcatgcgcagggtagcaatgtatttattatggggagagaaaccattgtgatcgagtgaattga

SEQ ID NO: 10716 - DNA, 749 bp, Zea Mays
atccgcacggcccactctacgctcttcccttttctttttcgtttgtggcgcttacatgtgggtccgctttgtcagccatctttcttcttcccatggcgcacagaagtccgttggttgtccgccgcgcgatatccgccgccagactggggcatcctcagccggagctctcggggtcggactctgcagtcgggtataaatgccgagccgtgcgcccttcctgctgcccaccatgtgccgtttcgtatccgtcgagagcgcacagagaaggaggtaccgagcacgccgtcgccatcgattcaagcacctatggccgttcggagcatgaagatggatcctagggcttcgctgggtgcccaggggcatactcattgcggcgctgggatcagtgaccagttggttgtcgaggaatttctcaccgccgttcgtgtgctgctatagatccgcctcgcccgtggtcggggtatatcaacgtactaactgcgggtaagtgtgccctatacctgctcgccgcaatctcagcagcgtgtatctttgtttcgattcaatggtggccactgggaggagctcctcgctcggttcggccatggcgcgccgtcgccggccacttctccctcgtctctggccatcgggaggatggagatgacgctcggatcgttggatctcatccaatggacgcaattagaccaaaggtaccgcttcgggccgatcgatctcatccgacgatcagtaatccaacggctagcgcgtgt

SEQ ID NO: 10717 - DNA, 338 bp, Zea Mays
gtggaagataaaatccatactcgccctgattttatcatgagtcggtacgggcgagactcacgggttaaattttggcccggacccgttggatcggatatccgatggatatccaaacgcgcgagtaaaattgccatctctatgtgggtcggtctcaatgtcttcgaggtgtccaagggcaggctcccacgtcggcgtcaaaatcgacaacgctgattttgccatcgccactgaggtggagatgtgaaggtcctccaggtagtttctggtgcccaagtatgttcttcacacttgttgttcctttcctcacatgaactgaacgtaatcaccttgaattgtcg

SEQ ID NO: 10718 - DNA, 459 bp, Zea Mays
tggttgtggagcttgggtcgtaacgactgggaggaaagtccgcctggactgcgcgcccgggcttgtcgccatcgtgcgatgcctgtacctctgtcgcggtgggccccactcgtcatgcttatgtccctcaacaaaccgctcggcatcccgggattttcgagctccacggctcaaccacccgcgcgattcacagttgggctcggccgggatcttcgctgcggactccgcgactccctgggcggccgtggataaatagcgtgcccgtggacccttctccccgcctacccagcatctcctccacttattgcacgaagccgcaaccacggcgtcaactccgcgctcccccgcctcggacctcacgaccgccacgaccacctctgtgccagccatcgcttttcttcgaccagtgggcgcctcgtcggagctcgggtgagcttcggccagcaccaattttgcgta

SEQ ID NO: 10719 - DNA, 509 bp, Zea Mays
caggggtatctcattagtgttggcatatcgagcagacatgaatgaatgtgtagcaccagaatcaaataatatggttgccagaatggcattaatgtaaaacataccgagtacgatgtcagcaccatcaggagtatcatcaacactgacttgattcaccctagctatagaatatcccatgccaggagtctgttgcttgttcttagctggtgtaccagaatttcccatcagacaagcattagcatagtgcccaatctgaccgcacttgaagcatgtagggccggtcttctgtcctgcaggcctcgtcggggtgccagtgggagtatcctgacaagtaggaggtgtccgtggagacccctgtggagcatactgaactgggcgtggtcctcctggtcgagtcggtgtactctgtggcaaaacgtagcggggacgaacactgctgctaccctgtccttgtgagatagccttcctcttcaaatcacccagttgaacacgcttgtgttcaatagcaa

SEQ ID NO: 10720 - DNA, 533 bp, Zea Mays
ttcttctgttaacttcactccgggagcttcctcttctacgagtattttcggagcttatgtgctaccctcggcggatggcagggagcaaggagaagtggtgacaggtacagtcttagtcgattcgtttgtggcccaagctcttttggactctggcgctagctatttgtttgtttcagagaattttgtgtcgcgggctggtcttttggtgcagaggttgagtcacccaattttggttagttctgctaatggctccattagtagctattcagtttgtcaggggtgctctgtcattcttgctgatgaggtcttttcggccaatcttgtggtgatttccttgggggcattcgatgttatcttgggtatggattggttatctcagtataacgcagttatatcctgtttttggaagacaatgttattgcaggcactatcgggtagggaggtggtattcttgggaagttccccaaagttcacgttatccttgttggcgcaattgcttccggatcgccggtcaaggaagtcgggaatttttt

SEQ ID NO: 10721 - DNA, 420 bp, Zea Mays
gcctttgatgctcactcaggcgacctgagttcattcgttgctgacaaaattcaaatgaaccagctgttacagcaacatttgcttcgtgccaaacagcggatgaagcaccaagcggataagcagcggtctgatcgagtgttccaggtgggagatttagtttttgtcaaactacaaccatatgttcagatgtccctcgctcgtcgttcaaacaacaaactctcgttccgttattttgggccataccgtgtactggctaaagtgggaacaacagcttacaaactggacttgccatcatcttcgtcaattcacccggttttccatgtttccctgctgaaacaatctgtgcatcctccaagtcaggtaactcctgcattgccagacctagctgattcatttacagtacctatggcagtgctgcag

SEQ ID NO: 10722 - DNA, 678 bp, Zea Mays
ctcgacgcaagtgacgatggacgacacaagcgggttgtagatttcttcatcaaggtcggtgaggacataggcgacgaactcctcatcgcccagaggttggccggacgccgacatctcatcggcataactcttcatcttggattagaatccggccattgtggtcgtgcctttcttcgtggtggcgagcgcaatgcgcgtgttgacagaacgcgcacgtgtgcaagatccgtacatagccgcgagggagctccagacgtcggccgaggtcgtggctgtcgtgacacccatcaagacctcacgcatcagagaggagaggatatatcccagcagcgcttgatcgtgagtcacccagttgatgtactcgggattgggcgtctccatataggcgtcgttagtcatcacagagacagtcttaaccagcatcttttctttgccgatgagcagaccgtagagctgtgcagattggatgggcggtaggatttgggcactccataggcggtagttggttttggtgagtttttcggtgaccgggatcgagaaggaggaggggatggtggtggaatttgagaatctactcgccatgatggatgtgttgtagaggacctggctatggtaccatgtagattggaatggttgatgtggcagaaccgcccggattattccagtttaagtgcccaa

SEQ ID NO: 10723 - DNA, 410 bp, Zea Mays
ctccgggattcatgccacgggcgtatggatttcgttcaccgggtaaatatctcgtcgcggatgtgcatgagctactgtggcctcgctgtcccctgccccttttcaccggcgacgtggcctcatggtcgtcaccggagttgtcgtgcttcactgcggctgtgccacgctccaagtcttccaccacgtcgtccctagccgtaacagctcactggtaaccgctgtagctcctcaaccggtgatcaccggaggaagcgccacggtgaaagccacccatcccttgctccagtatccctgttccccccggccgccagcacgaccttgcgaaattggacaccaccgtcgatgggacctataaattgagccccccctcggcttcgccatgtatcccagcagctaccgcacccacctgc

SEQ ID NO: 10724 - DNA, 388 bp, Zea Mays
gagaaacacagctaggcacatgagatggcacaaagaacatgaacgagaggacactcatgtgatgacacacccatctgacagcgatgcgtggaaggctctagatgactttgatccagaatttgctaatgaagcgagaaatattggaattgggttggcgacagatgggtttacacctttcaatacaaatgcggcatcatatacttgttggtctgtatttgttattccatacaaccttccacctcatttgtgcatgaaatatgattacatgtttctttccctaattattcctggaccagaccatcctaggaaagggctgaatgtgatgatgcaacccttgatcgatgatctcaaaaagttatgggaaggtgttgaagcatacgattgctac

SEQ ID NO: 10725 - DNA, 539 bp, Zea Mays
gcgggattggggctatacggccataagagattgtagtttcaccgtgctcaatcaatttgggaggagggggcagaggcagtgtgaattttggactttgatcaacacactcggtggaggtgtgcataccccgccgtggattatagtgctatttatagccacggcgacccggctagcgattttcggccacggataacttcgctagcgcatgcttaccacgtagggaagagacacgtgagggagatcgaggcaagggtgacaccgcaaaagttaactgagtcacgatggccgctggtgactaacttcggccacgctcgactgggttcgcgggattgcgccacgttcgaagttatccatccccagatcgattctcattactagatcacgcgagcccatccgattcaacagtggccctgatcttattgcgttcatcagatatttgtcacgattcgatcttcagcgttcttctgaaccgaccaccttctaccctctttatctctggatttttgttaagaacagagcaacttcccttaataaaattt

SEQ ID NO: 10726 - DNA, 474 bp, Zea Mays
cacgcgcgcctcctagctgcgagagatgtaggttagctcacagatggtggttcctgtgccaaacgcgccacctttcacttgaggcctagacctttcttcttgaatctggcgttcttgtgcgtaaggcttggaggattacgagctttggggattgttggaacttggatgtctcggtttgggtcctttagggcttggtttgggagtctagatccagttgtccatggaacgcatcttctagcggttagtttccttactgtttttgccttgagtattgttagctgcggcgtggatatgccactttattgttaaggaaccaaatgagtatcactataacatctactgcattttatattggccccacttgccacgaagtcgtcctcagtttagtaacaacggactgaacttagaaaatttctagctactagctaagatagtctcattgccctatctatactctagactgctcatgagcca

SEQ ID NO: 10727 - DNA, 623 bp, Zea Mays
tcctacgtcgtgaagatcgggcatcgtgatgcatcaatagtggtcaccctgagttaagtaagcgtgagcatgtcacaccgccttaagtcatcgccgacttaagccgattgctccgttagtagggtatagtggtcaccctgagttaagtaaacgcgtggattgataataaacaactcgagtgcccttgagaatgaagtctttttattgatgatgcactttccattttacagaatacaatgtcgtcccaatagcttttgaaatctagctaagggtagaacttcctgagatgctctatattccatgagttccctatttccgtgccgttcatttgagtgaggcgatatgatccaggccgagtgacttctgctactatgaacggtccttcccatagtggcgacaatttgtgtcgtccttcccccgttagaattcggcggaggacgaggtctcctactgcgaaggatcgatgtcgtataactttgtcatgataacgccttagagtttgttgataccgagctgattgaatcaccatatttaatcgttcttcttctagtatatcaacgtcctccagtctggtggcctcagcttctgctatgttttcgaagattaatctcggtgccccgaac

SEQ ID NO: 10728 - DNA, 345 bp, Zea Mays
cgttggatcgactacctacggatcagattagatattcataactgtgaaccggtacgcaactcaagccgttggatcaaagatctatgttctggattttattagggtgcgatcagatctagttcatccgatatctaatcaacggctcggatttaacctaacgaaaggcattcaacacttaatcagggtcgttcattctgatcggatggccaggattctacagctctgaaggggggactctgattaaatcggagccacacattctccgatcaaaggttagcaaactctcttccctcccgagctctggtcaaggcagcgctgcccaccgcggcgtacgctacatcgccg

SEQ ID NO: 10729 - DNA, 388 bp, Zea Mays
caaatctagtcaaacttatgggtgtttactaggtaagtgcccgtgcgttgcgacgtgacataagttgttgaaagagatttatggctactcgtccaagtcaatgataggctatcgttgttactagacaccatcatttgagtaaagatataagtatccgggataggaaggagcgtgaagttctacacaaaaccgaacaggtgcttgacggctcctaacttgcgaaacacgatagagatcctcttgcatggacgaaatcaatatgataaaatacatttatataaaaaaacacaaatagtagtagagatgctgctgtgatagtggaaatgtcagcaagagtactatatgaacaaatatgctagcataggcaagagtactgaaggattgattt

SEQ ID NO: 10730 - DNA, 357 bp, Zea Mays
ggtggagtcgctcgccagtggggatttcggtggcacaagctgccgcggccccaaccgtaacccgatcaccaccccgtagtcaagtggctacgatctccggcacaccagaagggcgattcaatgacgagcgcgcccatttcccccttctctctctcggtccgtgtttccccaaacaagcaaaatgcccaacgacggcacccgattatctattggagggttggggcgacgtggagggtatgggtcttatacccggcgaagtgggcgagggtggttgagggctggctgttagcgttggcggggtccgcagtgagagctctgggttgttagcgaggaagaaggcgatcctgacggtgcggg

SEQ ID NO: 10731 - DNA, 1040 bp, Zea Mays
ttggcgtagtgtcccggttgtccacacttgaagcatgccctgctggtggatgtgttaggagcaacgggtcctgctggggtgcttgcttgaggaggagcagttggtgcctgttgagtttgttgcccggaacagccactagctggtgtacttggagtggtagtatagcgaggacgggaactacttccagcctgtccttggttagcagcccttcttttctctccaaactcacacctcttgttttccgcaccaatagctttgtcgagtagcctttggaaggatgggaatgtgtgcgaaacaagttgatattgcaagggtccaatcaaaccgtctagaaagagctcctgcttcttctcatcatcctcaacatccctaggggcatatcgagatagctgaataaatttgtccctatattcgctcacggacatacttccttgcttgagggatagaaactcctttcttttagtcttcatgagcccagcaggaatatggtaattcctgaattgagtagagaattctacccagataattttgttgacggcggcgtgagcagcgcaatacgcatcccaccaatctacagcgggaccagtaagacgacctgatgtgtagagcactttctctctgtctgagcactgagctatgttgagcatcttctctacagactttagccaatcatcagcgtccagtggatcaggagagttagcaaatgtatgtggcttgtggctcatgaactcccgatgcttgtctcgaggtggaactggtggtggtggtggtggaggcagtggtacttgttgatgttgctgttgcacccttctctcctggtatatctcctctcgctcttggcgcatctcctggtgtatatcctctcactcttggcacatctcttggcgttcctgccgcatctgcgcgtgcatatccaccatggtgtctgccatctgttgcattatccgcatttgggctgcaactgcgggatcagctccggctggtggaggctgtggaggatccatcttaggttgttgttgtggttgtctaaatatcctccg

SEQ ID NO: 10732 - DNA, 714 bp, Zea Mays
ttcagattcatccccctcgccgctggtgaccctcacatcgtgatccgcgccgccgccacgattcgtgccctctggcatggcgataatcacggcggagtaaagatcttggcaccggataggtttggacgcggtcgctggtaaactcgctgtacccacttggactacggctggccaggatgatcttcaccgctgttagcctcttaacgatcatgctccacgcgtcttggaagcttagcacgttgcagtgatcctgtgtagcaagctcgtccatcgctagaggacttgccacggggagagccacgatatcacctgcgccagtgaccttccctctctttggctgccagcgcttctcttcaaaattcggagccaccgccctcggacactataaattgagcgtgccgctagctcatttgggtcatcatgaagccagagcacccgcccttgcctccgattagccaccataactctctaattcctctcttcccccaaatcgggtttccgtgccaccgtgaacgccgcgccggggctagctctctacaggtccgttcacgccctcctcgctctcgcttcaacacccctatatgctataaatgcttatcagcccagccaattgaactagcccgtgttggatcaccgggaacacctcagattatcctcggtatgcgccatcacagtggacaaagagtttttgggctagaacttcgcaattgcttg

SEQ ID NO: 10733 - DNA, 469 bp, Zea Mays
ctttttgatcaatggcttcttccatggctgcgagacccaaactcctgatgactttcttttgggcttcagtgatgatcggacctagagaacagggcttgacaccagccaccctcctactccgacgaggcacagcaacaacagtgttactgcttctaatcttggcaaccggcatgggcagcagttgtaccacttgcttgatgattttctccaggtcattgagagaaacagcaggcacatccggtgtagaacatttcttagtgtggcgctttcgcctaaaatatacctgaaggttggaagggaggccacctctgctattaatggcagcatcctgcggctcaatagacctatacctctcaacagggtgaggaataccctggttaggcacaatgtctggaaccacatcagcaccaagtctgccctcttcccaagtaagcagaggtaaattcgcggaaggaatagaggtgacaac

SEQ ID NO: 10734 - DNA, 615 bp, Zea Mays
atgcatttttcttcgatcctaaaattactttgtcatttgaaataggtgtgatgcgttcatcttgatgctagttctttattgttttaggtggtgaacaaactgtgtttgttagcaattttatttggttgaattctattgtttctgttgttttcaaatcaatggcagttcgtcatcactttcactgattaaatacaactcatttaccaagtgcaaatgctaaagagggaacaagggagggaacactgggagtacctcggcctttagtggtgaatccaaccaggagttgtccacatctgcaatggtgagggagaagttcgagttggcacaccttgcgctggggctgtgaggcaagagtctgccgcgagcacaccctcgaagtcgctgacgatctcatcgaggggcatgattggcttcgggtccgacggcggatccattgccgtcgaggagcacgtgagctcgatccgttctggaagaagaacgggaacgggccagctcagtcaaaacgtgtgatgacaggccgttcagcggtagataactgtccaacatggataaaaacataaggataatagaaatacaaagagcagcctattataataacagaattccatatgcttc

SEQ ID NO: 10735 - DNA, 546 bp, Zea Mays
tcttctttacgtgctcgccatcaccccctctaggcttatcaccgaccaattttaggttaggggcgtccgggcatcggattgcgcgaccgccggcgaagctccgccgtgggtgggcggcgctgctgtccacaccaccgtggggagggagaagatctctggatcgtgcatctgctgatggatggtcgcgattagaatagggaaaggaagcgcaggggccgttaatcgatggttggacggcgcagattagatcccaggtgtcggttcggccagaagaaatccaagccgttgatcgatggatggaggggcgtgaggtgatcctggcgttttaaaatccagggcattgatctcagatcctagggctctggatgcgtaccccttcgtcatctaatcgggactcttgatctttgatcgagcggccagggtgcatccgagttacaccaccttgacatttttccaatggagcccctcgtcttttgcgtaatcaacccgccgtcctatcctagtataaagtaattgcggccgggcccctggtttttgcaaatcggc

SEQ ID NO: 10736 - DNA, 391 bp, Zea Mays
accctccgcgcaaaaaccgactacgggtgcaactggaccaacacaataaacgcgctagatcaagtgcacaagtcccctacgggcacagccggatcagtgaaggcacacaacctcatcacacaaattatagttacatacatgcagcgagggcatcacgccttacattggttcagcctttgggatgatacccatctccctgtagttaaacaacattatcctcaactcctcaccctcaaagagattccgcagctccccctctcctacactcgccccagccggcgaggacaacaattcccgtttaccagctccgtccacatgaagacgaccaccctccacctcaccacaatgacgcccctcacttcgcgacatctcactaactctccgcttcgcc

SEQ ID NO: 10737 - DNA, 610 bp, Zea Mays
ttgaaaagtcatgtaatatcttcattgaaaatttgcaaagcttgcctagattcaaacacttctgttgttttttcatgtatcaataaatgaactgagtcaagagataacacagattttaaaaccatggtgggtaataatcttgcgtatttgtagttttgtgacaaccgaagcggaagtatgcgtgccctcatgcatgagcatctgtgtgatatggataggggtagagatgtgggttcagttttaatttgtagcgaaattacttgttaagtatgcatggaaggaacctgtatggtcacagttgagtatttgtgtcttgtgcaatctgataacttctttgttcttggatcagttgatgcatatctatgagtgacttgtttgctatgccccctttgattttatctcctactcattcctggcatatcaatctcgaaaaaaaaaactattgccactgttctgtactccaactagaagactgtctaaacagtttacattttactgcattcatgggggttaccaaacttctgttgacagcacctaaacaccatgcctaatagtgaacacacctaaagtttaggagaagcgcaacacagacaccattgctgaaaccagc

SEQ ID NO: 10738 - DNA, 452 bp, Zea Mays
gaaaccgatacctcctgggtcgaaacctcacaaccagcctagaagtcaccttgcgccgccccaactgtcccctgctagccccgttattggagccaacatgtggcccctagcaggcatactcgctccctcatagagtcgctgcgtgtgggacctgaccgcgagactctccctcggcttcacatgcgcaagtgcggactcgtcctgacatcgctgttgcaggggaccatgttgtcgtgcacaacttgaatggcagacatcatcgggccactcgttaggcgctcagctccgcacgcattggcactcaccaacatgtgggaccatgttgtcgggtcctccttcaccgcgtaacagagtctagttggttgaaatactccgtaactacctccatcttccccgctcgacaaccgggcttctagctcatttgctcgggtatataaccacgcacgtcgtcc

SEQ ID NO: 10739 - DNA, 363 bp, Zea Mays
gtcccaagtctccgagtatgattgaggcagagtgccaacatccggggtgaggagagttgtgtgctgtgaagtcgtgagccccccatagaagaccccgggttcctccttttatagtcacaaggaggaggcccaggagtacaagggtgtttgcgctgcttgttgtgatcaaaggagacgtgtccgagacctgtagcggcgtgatcggcgtgagcgatctcatccttgttgtcgctttcagtaatgaggagggtgtctcgtccctgtagcctgttctttttgacgaggtagagagccaaggctgggctcgaaggcatgggcatgtgttcgagtcccaggcggtacatggggttgacgaggagttgg

SEQ ID NO: 10740 - DNA, 283 bp, Zea Mays
ctcttctgccgaggatgggatacagggaggctaccacacatatccagctctggctccttggtgccctggtctctcactctgagtttgacgtcatggatttccttatttgtgagatcgaggacactgttttggatggtctgcgtgctcgacgccagctgccgtatgctcactttctgtgccacatttttgcgcagctgattcagcctccacagttttagggcacacttgaggcctcacgcctcggctttggatcctaccgtccagcgcctgaggatcctgtgcc

SEQ ID NO: 10741 - DNA, 614 bp, Zea Mays
tataagccagatcatcttaaacactcagatccttcataggtagctgctcctcgggtaccctgagacacttcttcagttgagacacgtggaagacatcatgcatatctgcaatatgatcaggtaattctagttgataggcaacttatcccactcgctttaggatcaagaagggaccaataaagtgaggggacaacttctctttgactttaaatctcctcataccctggatcagtgacacctttagatacacatgatcactctccttaaactctagcagtcttctccgggtatccgcatagcttttctgtcttgactgcgcagttctcaagttctcccttatcaatcgtacctattcttctgcctcttatataatctctggcccaaagaactgcctttcaccagtttgatcccaatacaatggagtcatgcattttctgccatataaagcctcaaacggggacatcttcaaactggcatggtagctattattgtaagagaactctgcatagggtaagctcttatcccaactgccaccatgtttaagagcacaagctcttaacatatcctccagtacttggttggtcctctcggtctgcccatcagtttgaggatgg

SEQ ID NO: 10742 - DNA, 829 bp, Zea Mays
gaaaggacctctccctgcgtttgggccaaaactccttccctcagcccactcttcttcccctcggtctgggcccaggaatcccgtgcggcccacttgtcctcagccgcactcgccacttacgtgtggggccgatctctcagcctctactggcgcgcgctcggtatgacatgtgggcccgcgtggacagcttcgtcttctccctctcctgctttctcgggtgacagctatggcctatggcgcgatgggagccacagcaaccccccaaatcggctctaatcccagaacctgaagctccgccgggcttccctcgcggtgaatcaaagactcccactcggattttctgttatcctccccagcattcggatctatctctctgctccatctgaattccgttgagagaaaatctctcgaatctgccggccacatacctccatggctgggcgaccggtgcatatatatgtggcccctttgcgtcagctacgtcttctcaaatgaaacggaatcgcgtgcggcaacctcgccggggaatccgcgcgtggattgctggcgaccgcgagatccgcgcaacaaccacaccgtgtaccccgcccggattcctgcgcaagcctatttaaccgtgccgcgtgaccctgcaacctcgtcatcgtttggtgcgatcctcgttccccccataccctacgcataggtgacagcaccgagccccgccgtcgcaagctgtcgcgaaccgcgtagaagggttcctgtcgtcgccatctcgggtacgtgcgtgctcccatgttcgcaacctcgaccacttcgagtagggcccattagagccggggatcgctaa

SEQ ID NO: 10743 - DNA, 495 bp, Zea Mays
ttaatatacatataaatatttgatgtttgacccatatacaaatattacatttcctagtacataagaatttagtcttccttcagtatcctctcgacgacttcatgtaaaagtttgtcgacgactttgtcaagaacttcattagcaatcttcattacatctaaagcctctttcattattggatccgcctcaggattgtatggctccggtggtggcgaaaggccggctgtaataaaaagcataatggtgaattttcgaagctataaacaaacaacgagacaaaaaagttttctaaaaaaggatacctataatcaatgcgcgtttagaagcttcttcagcctcctttgcctccactcgtgaatcgtgatattctttttcactcttttttatagcttcatcggccatctcacgatcgcccctcatccagatatcggaatagaacttcccacccatcaaagtagcttcggttgaaggttccttcgtatcgtctgcagagat

SEQ ID NO: 10744 - DNA, 533 bp, Zea Mays
tggctctggatctaccagtattggtagggacacaaggtgctgcttcaactcttgaaaggcttgttctacctcctcggtccaagagaatgggccggacttccgtaatagcttgaagaagggtagtgccctctcggcccagtcttgatatgaagcggctaagggcggccagtgacccgtaagcttctggacgtccttgattcgggccggaggcctcattgtctcaattgctttgatcttctctgggtttgcttcaatgccccggtgcgaaaccagaaatcccagcaacttccctgcggagacaccaaagacacacttttccgggttcagcctcgtgcatgttgcccgcagcttgtcaaagactagggttaagtcttccactagggtcgaccctctcttagtcttgaccacgatgtcatcaatgtatacctctatcctatccctaatcaagtcaccaaaggtcttactcatcgcccgtacaaatgtcggcaatgcgttttttagaccgtaaggcattacaacgtaacagtaaagcc

SEQ ID NO: 10745 - DNA, 814 bp, Zea Mays
ctaacaagtcgattaaccaaaggaatggtatagcccgccatacgacatacacgtcggcttgcctattattaacgcagtccgagacaccacatgtatatatatcacaatcacttacgccattgactcttacttaacatgagttggctaatgccgtataagacttagcaaaccattttagacatcgtaactcaaaatatgggttggagtcgattaatcagtgtttcttaaccgttgctcaacttaaattggataacacacgagtcacctaaaacgctatattttaggagaccttacatgtcgagcatcaattttataacataagtgactcaacctctatcacgcttgtccgaatctattggctaacatttccggaacaccctgtctatccttcacctttctaatcatattgcacgacataaaatatttcgatacgcattcaccccataagtaacatcatcacacttgactctgacttaaccgtagaggaagcgatgactacttcggcatgtcaccacctctctacaggccaaatcaatattaaccacatcgatcgagtcttatatcacgtaatacttataatttattatctcaaatacaaccatatcccggcatgtacttgggacacttcggttcaacttacgcaatcactactacaacgcacttcggcacacatgtttgataacccacctttctaaattaacctatctcaccttccaacaccaattaaatgtcacataatttacattttcacctaatttaacctacaccaacgatgaatacataaatataattatcctagaccaactcattagcc

SEQ ID NO: 10746 - DNA, 431 bp, Zea Mays
ttagctcagattgggtgcttcgatctctcggaatggcgtggatgtgttgcacaagtgtattggaatgttgcacaatagtatttatagcccccaaacccccaaatagtcattgttagaaatctgcaaaagctgctcttccctcgggggatcagaccagtccggtgcaccaccggacctccaacggtaacctcaatcgacgggattgcttttgactctgccttccgtggactcaccggaccagttcggtacaccaccagactccaccacgtgtcctgtcatgtcagctagccgttgaattgacttttgaaccttgaaatttgttgttggacccgactggtccaatgcacaccggactagtccgatgtaccaaggtactccaagcttcatctgcagacctctctagaaaagaggtccggtgtgccaccgatgcg

SEQ ID NO: 10747 - DNA, 726 bp, Zea Mays
cggaatgatactgtttggtgaattacaagggcatgttagccctgaggattcaaacaaaaaatttatggagattatcaatattcaaagaatgctctaggtcctcgccggatggcgttgttagcctatacgcgctggaggacgccttcgtcttgatgatgaagggaccctcccactttggctccagcttgccccgtgactctgtccgagttgtccggacgagtatgaggtccccttcgttgaattctcttgggatgattgtgtggtcgcgccatgcctttgtttgagcttggtatttgttgagggcctgcagggcgaagacacggtctccgtcgatgaggtccttggaagttggttcgtctacgtcggggagggctgaagtgcttgtccgcggtgactcatgttttatttcctgcggggtcatggcctccgatccatatagcaggcggaagggagtgaacccagtcgctcggcactcggtcgtgttcagcgcccagactgcttcaggtagcaggtcggcccatttgcccttcttgtcgtcgagaagcattttcttgatagcagtgaaaatcttgtcgttggcacgctccacgacgccgttggattgtgggtgatatactgaggagaaggctagcttggtgccaatggagaagcagaaatccctgaagtcctggctgtcaaactgtttgccattgtcgactatgagctcagacgggactccgaatcggc

SEQ ID NO: 10748 - DNA, 464 bp, Zea Mays
gggactaggcctgagtgcgttgaccgctagcgaggcgcaacacgacaaaacgcgctgagccccaagctacgaaggcaaggggtcggtatagcccgaatgatggcgctcgggccccacgctgctcgcgccttccacaataaaaaatacgagacaactaggtgaccgcaagcacgcgtggctttacctcgtggttggacgcccatttttaccatcacccggtggctccttcctaagaatgccaccaatggtgatcccctcagcctatacagggaggaagtcgtcccccggacatgagagggttctctgggatggagggacacgagagagttctcaagggcggaggatgcatgcaaagatcccagacgagacgacgcccagaaggactgatgaacatgaggaggacccagaggccgaagccccaccgtcaagtcaagacttatctaggactctacattgtaaccacc

SEQ ID NO: 10749 - DNA, 1109 bp, Zea Mays
cttttacaaagaggctgcggcgaaagggtatcggatagtactggacgtgcgatctggttttaacatctcagattagacaggcatcataaccgaaccggtacataacccggactgtccgatcccgatcggacggtcgtgattttaaaacagcgccaaagcataacccacgcaggattagaatcggacgaccgtgatcaatcccaccgaagcggtatcccaaggggtaatccgagccgttatactaaaatccgacgacgcagcgctcgtcctccacccccgtgatccccaacgccgaacaggaacgacgccatcaaccccgcggtggcaaggagcccaccggtggtcaccgacctccacaccccaagccccaaccaccgactcgatcatcgattcgcgcggagaagaacaatgcgaacacctgagggggtacctttttggaagaaacggcaggaacactgttggccacggcagggagcggatgacggtgagggaaggggccctgatgagcgattcagtgagccggtgtgcaaatttgtccaggtgttgccaagacgagcttcagtacgccccgacaacaaaccaggaccacacaacggtctgtaaacaacgatgaagaccccggacggcggtggcggcccgagcacctacaccgtcaatttacggtgaacccgtagagcgaccaaggcaagtcccgggcggaatttataggggcccaaagtccgcggagagatgaattgctgattccgcacggctggcacggaggttgagccccaggatttgcggacggcgttgagaggatctcgcgtgatttggttgatacgaagtctggttggggagagcacccgagcggaactagtccccacgtgcggaatgaggttccaggtcggagcaggccccactagcgatatcctccatgagtgccccgaagaggaggggtcgtttgcgccagttggagccgcgaaccttggagcggctgttacagcggcgcccgactcgcgcggagatggaggaagcggatgaatccgacatccagggcccacatggacgcgaggggagtgagcacgcagtgagaagagacgcagcccacgcgtcagggagaaatactccat

SEQ ID NO: 10750 - DNA, 358 bp, Zea Mays
ggcgggttgatattcattaaatctagaggctcttgtgaaaaagtgcgcggcaaaggggtatggttgtatatgggtcgtgcgattacagatagggggcttggattaaatcgcccacgacctaaaccggtaggctactatatttgttagatcaaggatctaaggcgtagatttaaaattgccaaactgttttctatgcgcccggactacatcgaacgacacggatgaatcctacgaatcggtatgcatcagtatgatctcatccgcacacttgaaatcaatggcaatcgggtactctcccacctctagcgcgcaggccagcgacacgggattcccatgcggcggcgcacaccggtgagcc

SEQ ID NO: 10751 - DNA, 524 bp, Zea Mays
cgagcgcccgcgtccgttctccctcggcgtaaagaaacttcaaagcagccatttctcttccccacgttcttctccattgaagccgacgacatcaatagctttgaagccggtcgtcgatcgcgcccttccctctcctcggcgccctctcaccttctctcgctctctataaagggcgtcgtgcactgggccatttcattctgcctccctgcctcgctctcacacgctcctcttcactgcttgcttgtttgcgtgtgtgttcgcgccatcgcgccgctcgctgtgactggaggacctgctccttccctgtcgccggcgaagacgagtccccttcgacgaatacatgcccagaacgccgttgagccgagtgaagccgcgaccccaggcaactgctaccggccaaacccctctgctcgatgaccctccctgctcacgcatcgttctacgcataggaaacaatgaaggtagaagatgactcaatcgcgatctacccctgcaagctatatttaatatcgttcagatccctg

SEQ ID NO: 10752 - DNA, 654 bp, Zea Mays
tttccaaaagactctccgtgcaaaagtcgcctaagggtgcagccggaataataggcgcgcaaaatcgaagtcttttccaaaagactctccgtgcaaaagtcgcctaagggtgcagccggaataataggcgcgcaaaatcgaagtcttttccaaaagactctccatgcaaaagtcgcctaagggcgcagctggaataataggcacgcaaaatcgaagtcttttccaaaaagactctccatgcagaagtcgcccacgggcgcggccggatcaacgaaggcgcgcagccttatcatacaaatagcagttacatacacatcaagggcatcatatattacattggctcaaccttcaggatgatacccatctccctgtagttgaacagcattatcctcaattcctcatcctcaaaaagatttcgcagctccccctcacctacactcaccccaatcggcaaggacaacaattctcgcttaccagtcccgtccacgcgaagacgaccactctccatgtcactacgataacgcctaccactttgcgacaattcactcactctccgttttgccaccgcccttcatcgcctatacccagcactcgcgctcgggagctcctcgaaaccctccgcgcgcggcgaaggctccgctacatccacatcca

SEQ ID NO: 10753 - DNA, 498 bp, Zea Mays
cacaggatcgcgctcgcccgtataggttgcttcttcggctctgtttggtcgcgaccctagggtaggcacggtgtcattgccagccgagccggaggtaggagataacgttgttgccgtcgattcctggatcggtggcctaaatataatctagcgtatccccttcgtcgatgagtcctgaggcgtagatcttggagtgagtggctaggattagtccacccgtaccggttcggctgaaccaatctggtttgtccgatctagatctagcgcttgtgatcgatgtaggtaacattaaacccaggccgtcgagatcaaatctaacggttgtccctaggtaccgtttcatggggcttcgatctaatcaggatcgtcgattgtggatcggacaattaggaataacatataccccttcgaccgagtattttcttaaagagaccctccactttaaactattcaacttgtagtccaccccagctgtagcctgagccttgagagtcttcc

SEQ ID NO: 10754 - DNA, 338 bp, Zea Mays
gcggtgtgctggggcagagcggccgcttcgatgcgttagtgtggcgtgtcacgtgtcagtgagtccaacgcgaaacggtgacggtgaggtgacaacaggcgagggttagcaagtgcaggcgggggttagcgagggcaggcgatgatgtggtggtacatggcggtggcagcagcaagtggcagccattgccgtgttgcaacgacatagtgagacccagtgagatagtgagcgcaggtggcgtcatggtgccaaagcaagatcctactgatagcctacccatctactggtgcggactacgaggcaaggtagcggcattgcgtgcaagatcctgatgaggc

SEQ ID NO: 10755 - DNA, 452 bp, Zea Mays
ctttcttcttttgccttgccctgccctctactgcttttccacctttgtttggtcgttcttgcatctcgtcgggttttgctggagtgagaacgagttcactcgcctttccgtgcatcgcgtcgttctggactggaggagtcggggtggacatcttcctcaacctcgtgatgtgataccggtaactggactcaaatctgctttgctgtgtcctgtctcgaatgggcacacacacgaatccacgggaccagctggcgaaacaagtttactcgacccgatccctatacgatacggcaggtggtgctttccgacctgcatcctcttacccttctgtggaatgtggtccgacttttgtgacattgtcagtccactgacgtccggtgcgttgcacgggaagcacgagctcgcctgctcgtgcgcgcggaaagctctccgtgagaccgtgacggcatcta

SEQ ID NO: 10756 - DNA, 700 bp, Zea Mays
cgctcggcggtgccagccgttcggtctcgacagatgtcgggacatggcgccggggaggagctcggcagtgttgggcggcgtggaagcggaacagacgaagggctcggcgtcgatggtgaggcggagcgtggcggtcctgcatggtgccagtgagtcgtggaggccggagacggatgatgcgacacgatgacggatcagctgcaaccgcgtgctgtcagcatctccagcttctccggtgccggaagccaacattggtcgctaacagcacgtgacctcttactaaaagattctcgtggcgtggcgaggagcgaggacgcgctgggttagagaagatggtgccttccgtgttctttttttttactgcccgactgtttgactcctctttggttggaggactctagaaatatcctgtggtgtcaggttgcatgatgagacgttgtattcaggggaagttcgatattcttttctggccgcatacattgaatccaacggctggtaaaattaaggagacgtggacagtctacttttgcagctttgcgtcatgctttaatatatagaaatttgattgatatgtatcatgtctagtcgagtaggatttggaaagaaaataggaaggtgggaagcatttacctttgttgttccaacgggtcatcgcatatgggtgaaaaccggtcgaacatatttgtcgtgtaccggatat

SEQ ID NO: 10757 - DNA, 762 bp, Zea Mays
ttctggactgcgcacacaattttgcagaagcctagggtataactcataaagttcaggaccaatccgtaatattaacagcacaggagtggatggcgggttgaataggtaaaacctcagggtctcttttgaaagaagtacacgacgaaggggtattggtgatcgctggccgtcggatctgagatggaaagctcagattaaaagaacgaactggcaagcgatttgatcccttggatcacaaatatacggccatgatttaatgtacgaagggggtatgcgcccacttaatcttatccgtgcgctgcaatatcaacggtctgtgttgaacctagtcacgatccaatccacatcgctcctgctagatcctacggtccttatgcatcttcttccttagtccgagctgggcgatgccttgtcccaaccgcggtggcggcctgaccgagccccggaccaccgttgccccgatgaccaccgatgtacggaacccaaatgttgtgacggcccgaccactagcctatccacggtcatacaccaggaaacagaaacagtgataacacaggcggaaaagtacttactgacgacgaccctgctacgatgcctaccacagctcaccgaccagatgaaccttggaaccgataggaaaatctgccaagtcttcggtgtcgttcaaagctcctccatggcactggatcggtctcccagatccggcgcccaggatcctggcgacgatgtgcctggtgtcctagttcctgcgttcatctctct

SEQ ID NO: 10758 - DNA, 655 bp, Zea Mays
ctcatatgaaaatgcgtacccgcgaaggggtatggcggtttacagaccgttggatctcgcgcgacggctaagattagaacccacctgcgacgaacaggtgtgttacgagaaccattggatcacccgccaaaggtgtggatttaattattccgaatctagcctgacctatccgatcagatcctacggtcaggatcaattccccaaaccggtaccctagcgtctaatcacagccctccgtcgtctgatctacggcccgagcgacgtcttccccaaccagctcaacacggcgggcgccgtggccaaccacggcggcgatcccaccggcgagcaacgatccattgatttagcgcaataatccgacccctagaacggcgctacgcgtggagcagatagcaatggaggcgatgcggtagtactcaccgacggtcaagcgacggaggagtccgaccacgaggaagtacggcgcggtggtgaagcactccctccggcgagcaattggcggacttccccggccccaatctcaaccctccgaagacccgagccgcttacccagcttctggtagacccacgcggacacccgcagagatccgagcgacaaaaaccgcgatgaatcgcacaggtggctgcgagaccgtcgtgactcgacctcccctcg

SEQ ID NO: 10759 - DNA, 521 bp, Zea Mays
gagggggccaagaccggcgctcccgagcggtggacacaaccttggatctaccccgactgtttcccctaagtgaattgcacgtgtggcgacccacaccgtcctgcccacgggaacagcggaggcatcggataaaactgcgtgttcccagagattggtggcggtataattcaattgggtgggtcggtgagcttaaggaggatccaagaatgctagaacaagcagcaaagggacttgagctcaccaaaaccgagctggccatggtgaggtcttctttgcggtggcagaaagttgatttgggggaaaacgacgattctccggctagggggctaatcgagggggagagtgggtgctatggcttcatggtaacttggcgcaacagccccggccatcaatttataggaaggtaaagcggtggccagtgattttggggaggacgcgcggcggccggaaatgaagaagaaggctctggcgcatgacacaggtggccattcaccgtggcaggtgctccggtggtcaccgga

SEQ ID NO: 10760 - DNA, 712 bp, Zea Mays
gaaaggacctctccctgcgtttgggccaaaactccttccctcagcccactcttcttcccctcggtctgggcccaggaatcccgtgcggcccacttgtcctcagccacactcgccacttacgtgtggggtcgatctctcagcctctactggcgcgcgctcggtatgacatgtgggcccgcgtggacagcttcgtcttctccctctcctgctttctcgggtgacagctatggcctatggcgcgatgggagccacagcaaccccccaaatcggctctaatcccagaacctgaagctccgccgggcttccctcgcggtgaatcaaagactcccactcggattttctgttatcctccccagcattcggatctatctctctgctccatctgaattccgttgagagaaaatctctcgaatctgccggccacatacctccatggctgggcgaccggtgcatatatatgtggcccctttgcgtcagctacgtcttctcagatgaaacggaatcgcgtgcggcaacctcgccggggaatccgcgcgtggattgctggcgaccacgagatccgcgcaacaaccacaccgtgtaccccgcccggattcctgcgcaagcctatttaaccgtgccgcgtgaccctgcaaccttgtcatcgtttggtgcgatcctcgttcccccccataccctacgcataggtgccagcaccgagccccaccgtcgc

SEQ ID NO: 10761 - DNA, 927 bp, Zea Mays
atttcccctcgcttaattgcaaggttcaagctcttaatcacactgcccacggtgacagcgcgagcaacggataaaccgagacgttcccggtgatcctacgagttctaactcaattggatgggtcgaggagtatcaagagcacacacggatgataaaactgaagctaggagggcatgatcggacctgtgaagagctgaccgcggcgagctcacacaacacggtgttcttgaccgatttgggggaatactcaaattggggagctgtaggggatgattggaggtgagagctggtttactggatgcacaactacctagcggagctgatggcacgctcaatttataggattcatgaacggtggcggctaatttggagaagacgcgcggcggccggagaggggaaagagcactgcgcaaaggattcgtggcattcactgtggcaagcttaccggcgacgacccagctatctaaagcggcttagtgcgacatggtgaatagcctgaggcatggtgcaaccgtggtgaagggcacaaactctggtgacggccgcttggccacgtcgctggcgcaagtgggcacggcataggacggaacagtgcttcaagctcatccgcggtgaagatcttttcaccccgaggcattatctgggcactagtgggcacaaatcgcatcgccggtgttaatcacggcgaaaggtcaccggcggcgatatcctctgcacctgaagatcttttgctactgtaccatgagaaatccaattcagggcctctgtccgaccaacttgcaggacccatatcttagttttctgtgtgagaacttgttaatctctctgtaacaaagttgtagccctataatccagctacaatcttgtcacagcaaccatagtcaaatacttactggatcatctccaaaagaactctcaaagttcatt

SEQ ID NO: 10762 - DNA, 509 bp, Zea Mays
gcggctgggggatgccgaagaaaaaggaaggggaaaaagtatgagcttgttcggctccactatcgcttcaaatttgagaaacagttcaagaaaccatgcaatgaatggctagaaatgattgagaccatgtgcaatgagattcttggcaattatacgaaggaggaccagctaatgactgctgccttctgtacccggccgaaacgaaggctgaaccgggtaatggatgcattgaacttcgaatacctagattatgagaggcttgacaaaggggccagaggtgtgaagagaaaaagggttgttagcatcctaagctggcaagctgcccggtccgtaaaaaaagatgaaaaagcccaaaagaaagcaaaaacagtgccagagccgaaggcaacaatttccaagaagcgaaagcttgaccagataccctctactgaaccgaaggtagacgaagaaacagagaaaacccctctgtcgtcgtctgctgccgaagtggtcgaaattttgaaggtaat

SEQ ID NO: 10763 - DNA, 287 bp, Zea Mays
gtatggatatttgggaaataaagtattataaatacaaatttcaaatattataaatagcatagaaagccggtgatgaaggtgctgcaagcgtgacctccccattcgtgggcatgtgctcgcacagaaaaaatggcgagtgatgttttcgtagcctcgtgtatccatggaggcacacacattgtggagagaagtgcgcccgggtgcttgcggcggcggtggcatgaccatgcacccgcacatagaagaagccggtgacgaaggcgttgtagttgttgcctccccatttg

SEQ ID NO: 10764 - DNA, 593 bp, Zea Mays
cggacaaactctcgccgacggaggttcaccatgccgcatggacagcttcgccttgcctcctaaccttcggtaatgccccttggatcgattcgacaccttctctgcattgcttagcacctagttacgcttggaatcaagccctggcatgataattgggtgctccgcggtcatggcgccgccgtgggtagggccggcgtgctgccgtattccggctgggaggaagaaaactggcagccattggattggaagttgacggttaggatgggttatgggaaggatgtaccgtggaccgttgatcgcggaatggacgtatcggattagattcacatatacccgttcgactcattaaatccagggcgtagatcttggatcctagggctcgggttgcgtaccgatttgtgcgcggccagatttaatcgtgaccttttggtttggatcggacggctctgaatcaacgataccccttcgcccctggctttctttctaaagagaccccggaaaacttgctattcaacccgcggtctatcgcctgggttctctgtgtcttggtgcactttgcgccagggcccctgcacttcctaatattagtgggc

SEQ ID NO: 10765 - DNA, 373 bp, Zea Mays
gacgatgatgataatgatccatccatacatacatacacagtacgtatatacaatacaatacatgcatgtatccaacaaacagcccatcatccaacacacgaatccaatgcaattatatatgtcctgtatccagcagagccgatcgatctgaatagaatagtttagtgatggcgaaaggcatcgtagctctatgatgatggtgatgatgagttcgtcacccaccaccgtacgctatcatccatgcatgttcttcttcctccttcctcccctctctgcaagcagcaaattaagatggtcgtcagtcgtcactatataagcatctcttgttcctcccctgcgccttcctctctctctttccttttcctcccgtccc

SEQ ID NO: 10766 - DNA, 614 bp, Zea Mays
tgagtactgcattcatgtttcagttcgaattcgaaaacccaatttggatttgaaataaaaaaatcatatagtaataagaaacataaaagaaaaaaaggaagaaaatgcagaatcatgtctgggccgaatctccatttcccaacccagctaatgcaaccgcacagactcgaatttctccccagccggcccaacactccgcgcttgcggaaacacccacttacctgtggggacagcaccactacccctcaaccgtagtcgctattatgtggggttgttgatgtcagcttcttcctctcaatcctggtaatacgaaaacaactcgatctgtgcgcggctggtttgttgatggtacctaatcactgatccgggcgggatatggtcccctgtgctaagtatatatatgcttgggtggctcgtggctttcatacaccatcaccattaagcactgccgccaggggattgggtttttcgccaagcgtagagtgagagattggggatcgccaatgaggagccgggccatgttgcccaagaaccttcggggcgcgttcgggtgaggctagccggagagtcctcctgctacgagttgaagcggagcttcgtctgcgacactctgg

SEQ ID NO: 10767 - DNA, 460 bp, Zea Mays
gtcatcctcaaggacggagacccattaggtctccttttaaccaaagtttgctacctacttttattgaaagcatatgatttgttttacaaccaaactgctgggggcaccagtttgcagcgaagcaacagagcacataaacaaaataaaactggggctagaaaatgtagacagggagccaactagtaatcatattctaaatagatagaaggggccatatattaattgccaattaatttagctcgggaaaagtatatgtacactagagtttagatgaagtatgcgggaagcatgaatcctgaggtccagagtgttttccaggacatcatggagcaaaggaaaggtctaatttagggctggtgccgtagcacaatggcaattaggacagcagtaaattattaggcaaggctgttttactttcacaaaaacccgagacatggatccggcattgtccgttttctac

SEQ ID NO: 10768 - DNA, 374 bp, Zea Mays
cgaagctcagccactggccaaaagcagatcgagcaattaagagaaaccagcagccacactgacccgcatcatttgcaccagccgcctctcggcaaacgttgcgctgtgcgcatacatgtgctagtaatagtagcacacgtcttcctcctcctccggcccggcccggccgcctgaggcagtataggcaggtagtagcaggctaactagtggctagcctgttgcgatctattagcgcgcgtccctctccagtcaccacgacaacttttccccccacgcgacgcgagacaaacgggggacggacgggagaaggctttatctggacacgcacgcctttgcattgcacccacctaacgccgccgctgacgatgactttg

SEQ ID NO: 10769 - DNA, 740 bp, Zea Mays
gtccctatagattgtgtctggagagatcgattctccattggggagctgtgaaggcgtgttaacaaagcaaaagccaaaatccgcaggatatcataggatgggttaggtcctatatagactgtgaaccggtgctccatctccttgaagcgagagagggcatgtgaaccccgctctggaaacacagaggatcgagttggaagtctatgagtgcctccgtgatggtgtcgaggttgctatctagaagagactcgaggacggggacctaaccagttgtccctcgggagtcaccacaaagttgaggctcctgaagcgtatgattgccgcgaggattactcaacgttgtgactagccatccagtacctaataatgaggataaagaaaacgtgcgagagcacttatatcacgtgtggttattctagcaggctcatagttaccctcataaactcgcgagaaactattggacctcgcaaaggaatgtgtagttgcagaatctattatttcccggaagaggccggcagtaccaggttcttttggctcaccaagatttaccaaaaggcaggggcatgtgttgagcactagatttggcaccttggcacggtcggacggtccgtgattagattagttcaagcgtgagtcctcatctcgtgcgtggttgtcgtaacaaactctcgagaaactgttggatcttacatatgaacggatccagacctcctctatataaatgaaggggcacggtcgat

SEQ ID NO: 10770 - DNA, 318 bp, Zea Mays
gactatgtgactaatacgtgctcacctcttctgtcatttcagtgaccttgcttaaccgtgtgctgtctcccgtcctgcctggatcgtcacctctcgtgtgagccttccaggtagacatctctttctttgctaaaatctatcagtcactatttgctctgtgcttagtctctctatctcatttgcagaccttagttcaggatgccgcgcacgaagaatgcgtcggcgtcagggggtggcgatgacgaggaccctcgtcgccccttcaggcaggtgaaggggaagactgtctttttggagcagcaggaaggccgcaagaag

SEQ ID NO: 10771 - DNA, 523 bp, Zea Mays
cggccgtaagagactgtagtttcaccgtgcaccatcaatttgggaggaggtggagaaggcagtgcgaattttgggttcttctcaagcttgcggttgaggcggtgagtgcctcactgtggttcatgccgctatttaaagccacggcagaccgacaagtgatcagcggccgtggataaccttgctagcgcatgtataccacgtagaggagaagtacagtgaggtagaaccacggtgcagaggacaccgcggcggaaaacgattgactcggtggccgccggtgaggtctccggctggactcggggtagggtgccacgtatgcgccatctaactccggcgttatctgttccctaccgcccacgaacccggacggcggcggcacgaattctggcgcagagaggtcgctggcggtgagcacacaacgctggcagtctgatcctcatccgagcactgtaccatggcgtttcttcagtcagtcgacctgacagagcatcttggagctcgatttactcctgattttgtgtgg

SEQ ID NO: 10772 - DNA, 613 bp, Zea Mays
gccccattcatcgttatgaaacagatctacgatttacgctaaaatttgtactcatttacgctggttcggttcacgttttacgctaaaatccactctagccagaacccacgccgtaatttttgggtcccattcgccgttataaaatagatctacgatttacgctaatatttgttatcatttacgctgatttggatcatgttttacgctaaaatctgtctgagccaaaatcgtgcacgatcggatggacgcctacctgcgcagaggtatacctggttggggcttcccggtactaatggaagccctggctttccagtactaacatgggcatccaccacagcttcaccgtgcccccgctctcgtgatcctcgccccgtctcgcatctccccttccttcgttgtcgcgatgccctgccaccgctcgtgtctgccgccgcatcagccttgccttcctcgcccccctgctcagccccttcgtgcccccacctgcgcatgcatgcatgcccccgggctccaccctgcactacgcccgacccttccccgcacccggacaagcgtcaccgcctgcgcacgactctgttcctagatcgcgccatgctcgcaggaaggtggatca

SEQ ID NO: 10773 - DNA, 418 bp, Zea Mays
ggctggctccagccagggtctgtaaaccgttctgttcggtatatttagcggagtcagtcctcctttatgcctccagcaggagacgctaaagcatccgctataatatagagtgtgttcttcgttcgctaaacgtggcgtgctcgcttccgccctgtatcaactgttcattctcgtgctccctccatccgtcgtctcccgcgttggctcggaacctttccttgcgtccgttgtgcaccacaacctcactcccgtgcaacgaaggtagaagaagacgtagttgccggtgatcgagcatggacccggtgatcgagatatggttgtcggcgtcgttgtctgtggcttcttccagaaggcgtcgccgacctccaatacgcaggagcacagaggagccgatcaagacagggcgacgctggacacg

SEQ ID NO: 10774 - DNA, 515 bp, Zea Mays
gtttgaactctgtttacatttaattcaaaatagaaatacaaaatatgagaggaattgaaaatagaaagaaaggaaaaataaataaacaaaggaaaaggtttatcacctatgctgggccccggggttgaattcggcccattccccaaaccccacgcaccagcccatctctccacctgtgtgcgcctgtgtcacttacatgtgggtccccaccgcagccggccagctcttcgcacgcgggcccgtatgtcgcgcgcagtgggatgatcctctgacgcatggggcccgtctgtcattacttggtgcggtccgtcaactggggggatgccagatccgcgcgattgtcgccgtactcacccacctcgcgcgagatgctcgccgccattgccgtgaatcgtggacgaccgccttccagcccgagccgagcccacggaggataagtgggagcactcccctgctccctccttcgcccacccagccttctcctcttcctcgtgcaatccgcctggtggtcgacc

SEQ ID NO: 10775 - DNA, 857 bp, Zea Mays
ctagatcgacccaacgcgaaacgttacgcaggttttaatctcagccgcaggtttggatccgacggcccgaaacccctcccctacctttcggtcgagcggacggcggcgccgcccaccatcgcggcggaaactcgccggagcaatgctaatctccccctctgctactacatttcgacccccgttcggtgcaatacgaagaggagacgagagcggacagagagaaagagttcaataccgggatatgaggcggtgagtacgctgcctgcgacgtgaggcgggtccgtggcagcgttgaacccacggcgagaaattgcggcacagttggcccccaatcgagcctgggatgtccccgtgcaccaccagtgtatctccccgaagcgccctggcccagattcgaggtcgcgtcggtgatgcaacctcgggtcgacggcagcggcctccatggcggatccgcgatggagcttgcacgacggcgagcaactccccgccagtgattggttgggacggatcagccacgggagcccggttttataatcgcaagggagcggagccgatcacgcaacgaccggcgaacttttcgcgggcggattcggagaaattcccagccacaacgtcgggttgagtttgaactgagctcgatggtgaacctgaccactagggcccatatgatagaggaacccgcacacgtgagcttttatcgcccccaacgagcttggtccgggtcgtcggggacggtgcgattcacgcgcgtggatcacgggagttcgttgcggaaggatggagatgatcctgacaagccgaccccaccagccagcgggagcgaggaagctgagcgcgcctgtgcagaggctgacaac

SEQ ID NO: 10776 - DNA, 520 bp, Zea Mays
acaatctgtgacttttgtttggttttcaggtaatcagccaattatagtatgtggtcctggagttcatagttttgctactttttctggcgcgacgatgtggcggaggcgatgacagggcctagaacggattggtcgtcctgctctgtgtcggaagttatgtgaattttctgcctcctagcactagacagatgattttcttcattttgcgaactccttgctcttgctttctactgttgtttgtttattttagtgcagcaacggagcctatgaagaagccctattttctgctgctgtttgccaactccaagcagatcgctcgctgaagaagcccaccctcctcgctatagaaggtatgtgtttagcatatatgaaatgttgttttgctgtctgtgtctgcaccgcctagcaagttcagaaggtttaattttcatttttagtgttggtatggactattggcatgaggtacatgggacagagaattagcaactcatcagcacaagttgtcatccttttggctccc

SEQ ID NO: 10777 - DNA, 311 bp, Zea Mays
gagtaacactaaggtagacaagactaccaacaatgtgacgatagcgagtaggacccaaaagaggctcaccatcagtggcacaaagacaaacattgaggttcatgagagtctcaacagtgtggtgataagtaagagaagcccgatcaagaagctcctgaatgtatttctcctgagagagatataagccctccagagtagagggcacctcaatcccaaggaaataccaaagaggaccaagatcaaacataaggaactgctcactaagacgcgccttcacaaaggcaatttactgagaatcatcccctgtaata

SEQ ID NO: 10778 - DNA, 557 bp, Zea Mays
agttactatagtcgatttgtagctggttggttgagctacaactttgttaaagacggattagtaagtattcacatgaaaatctgagatctgggccctgcaaagtggtctgtcagggtgactgaatgagaagctgatgatacagtgcactggaaatatccccaatccactgaatatcgccgcctgtgatcttacgccgcgattgtcgctggcaatgtgattcatgctcaatggagtactggtagttgctcggggaagtaaatatcgccttgtggatgaacttgagccactgtttcactccggccgtcgtgtccacctgactcacggccgattcgaatgaactcaccggaattagccacctatcagccatgcgccacgtgccttgatgtcttaccacgtcgcagtagctcgtattacccatgtctagtgatcgtcggtgagcttgccaccgtgaaagccacaaatctctttcgacagtgctctcctctctctccgaccaccaccgcgcatctcaaattcacgggacaccgctcggggatcctataaattgagcatgtcgt

SEQ ID NO: 10779 - DNA, 1725 bp, Zea Mays
tgtccccaggtcctcccgacgatcttctcgagcatggtcgcggtggcgacccatgggaggcgagtgacgtcgtgcgtcgtgtcgcctctcccgggccgactggcctagtgctaggctgttcatagagtctactaccacctccgtcctggttgcacggctacatgccggtgcaccatgatctcgatcgtactcttcccaccgcctcatctcgtcttcgtgctggcgatcgtgtgaagcgttgatgttgctccgtgcgtctcgccaaatgttgatgacgtggcacatgtctagcaccggatgggcaaggggaagaagttggttcgccgcatgggtgaggatctgctggtagccttccgtgtctagggaaagaggcaggccattggcgatctgagccagggctccgccgacttcactttgcgtgtttagggcttgagcgaagtcaagcaacagatttcgaggaaggagtgggttctcgtgttggagactggcatcatgttccgcttgctcccgctcgcgttcctgggcatggcgatgatcacggcgtcgggaattgtggcgctcgcggagtgctctgtcgtctagagtctctcctgctttagatgccctcgtcctgagatacaggctgagagggatcctattccccggcttcatggtgacgccgaatgttacggcgcatgttccgacgttggcgtgcctcgcgctgtgggggctcctcccagtacagtggactcatcatcggagatgggtacatcctctactcttccctagataaagaggacatccaggaagaaagagcttggagcggcgtctcgtgctcagccgtctcccatgtgagcggagcagccagaacaatcggtgttcttgttcccacggctatgccggtgccgaggttactcgcttctttttgccgagtgatctgggtccacacctgagtgggtgatgtggacaaaggggtctgctgcgaaagaggtgcagcctcagtcggtcgacctactggtgccgcaatggcctcgggcccaaccgacgggggcgcaattctacgcggggcggaagctggttgagtttttcacaccttagagttctttggcgcagttctcgctggagtcaggtgagacaaacccacctccacatttggtgccatcagagaagttctcttatcagacggatctgtaatgtggtgcaggacgccttcttgatctgcaatgtaggagagggatccgaagtagaagatttccccaacattggaggtgatcgggatgttgaagatgatagccatggagtcgttgtggatcaacgtcacaccccctacctggcacgccaagctgtcggtgtttatgacccgaccacgcaccatggggtttcccacgtggtgcttttgagtaggacgacatcattgactacgactcgatggtacatgcaggagcacgttagatttgcacaaggatttatataggttcgatccgctagaatgtgtaacaccctacttcctattgtggttgtgtattggagttgcactaaggtatacatattacaaatgagctgtgggtgatggaaaaatgagttctctagccgatctagtagctcgtgtttgctacgagaaggctaatcagctttgaggtggtgctaagatatggttgatgagagatggtgtgagcgtaggggtaccccatcagccttatatgagtgaccagagggttatccgtttacaatttgtgatcactatct

SEQ ID NO: 10780 - DNA, 461 bp, Zea Mays
cggcagtccacggatcggagatgtggagctgatgggggcgggctgtaactgtaaataataatcccgtcgatctaccacgtactgcggcagatgcacatgcggaggcctcgctcggctcgtcgatcggctcagctagctagccagcgagccaagtgcccaagtcctgaccttgctagcatgcatgcatcatgcattgatggctgatcgtgacgactgacgacgagggacatgtatgttccaaggattacctactgcacggtactactggaatactacacacacagacacaatgcacatccttggcttggcttcagcgcaattctcaattcctcggccgggccggggtccactgatccacaagccgttgtgtgcggcccgtgcatgctgctgtccagtccaggcagcgccagccggtatgtactggggccatgatgagtccatgtccatgacgcgccctcccc

SEQ ID NO: 10781 - DNA, 1151 bp, Zea Mays
aacgagcatcatatctttaaagaaattacacaagtttttgctgatgtcatggcactgaacggttcttccatggagaggagaaagaaaaacagacccggttcgagcgggaaaattgtaacccatgccagcagggctgcactccggtaagctgttttgttcattgcaaatgctggagcgttgtcgatttgatgagagatggtgccatatacgatccaccgccgatcaggtgggtacatccaatattttcgctttgccggcccagccaatcctgttggccactactgtgccaataattcagtccgggccattccattttcgaaagaaacccccgtagccaaccttgagtagctgggcgggtggacgattcctccgctgcggggaacctttccattccatggcacgcgcccgcgccgtcttcttctgggatttggatttggggttggtccttgggggtacgagtcccatccgtcacgcgacgaatgggatgctcccacgtgaacgagcatggcgctttgcctcacttgctctctggtcaagattatcatgccagcgacggttcgattcctccaatctgacgattcacttcctccacgtagccgggctccgtgcctttcctgccctggatctgtttctccgaaaggcccccgtgtttataagtacagcatcagccttcatttgatcagatgagaggccacactccgaaagagagccactccttcctgtatcctgcaagtgggaacacacagcatcagaaagggagacggttttgaaatcacaggaataaaatgggattccatgcaagaacaattgtagtagttaatccttatctatctatctatctccccccgcttcacgtccctcccctcctccctcttttacctcaagcccatcaagtccgcagagacatattcttgctatgatagaaagattaggggcatttgtaaatcatattctacactaagcgctgaccctcaagagctcatattctgccaggcaaactaggagggatgtatggagcacgaggaacttgcgtacaaaacttactagcaccatatgctgtcataacttccacgtcacaattcgcattaacaaacctcttgatggaatgcggcgtaggtaggagcaccgtaggcggtccaagtgaatcttcc

SEQ ID NO: 10782 - DNA, 434 bp, Zea Mays
atgagtattcgtaagcacgcaaaatcgtcttaagtcgtcactgacttgaatcgaccgcttttgttagtagggcatagtggtcaccccgagttaagtaagcgtgagcatgttgcaccgtctcaagttgctgctgacttgagccgattgctctgttagcagggcatagtggtcaccccgagttaagtaagcgcgagcatgttgcaccgccttaagtcgttgccgacttaagtcgattgctccgttagcagggcatagtggtcaccccgagttaagtaagcgcgagcatgttgcaccgccttaagtcgttgccgacttaagtcgattgccaacgttggcagggcatagtggtcaccccgagttaagtaagcgcgagcatgttgcaccgccttaagtcgttgtcgacttaagtcgattgctctgttaacagggcatag

SEQ ID NO: 10783 - DNA, 524 bp, Zea Mays
ctttcttcctccagcgcacaagctagcggcgcaggattcccacgcggcgccgcgacccgccggagttggcctacctatgcgctttgatgccctacccccacaccaactggtgcaacgcgatcgagggatgaaggtgaaccgtttgagggacttcttaccgtaaactttgcagcgagttagccagccaacggtgaggggcgactccgccatgccgccatgctccgatgagcaatttggagtagtgccccggacgcatcgggctcaccgatgccatgcatagcttcgaaggacgtccgtgaataaccccgtgcctacagagcggtcctggctagcagggaacaacgagagcaccgacggcggcgacttccttcctctaacctcacgttttctgctcgatctaggtgggggcgcggacccggttttatactccgagagatgcgctacggtcgggaactcgggggaatcggttacaacggcagcgcgatatcagagccaaggcgaaatcggaaatccccaaccaaatc

SEQ ID NO: 10784 - DNA, 296 bp, Zea Mays
gtggtggatgtttggctgatgcgggtgcggaggcgggagtggaggtggtacgatttgtacctcctggtggtgttggtatgcgtggttaggtggatgctgagcggggtcgtggttgtatggttgtgggaggtggtgttgatatgtgtgcgcgacaactcttgggttgttggctggttgtgccagtgacatcctgtccctggtggccttcctttctgggcagtccctcgttgggtgcgcgcagtcttcgccgtgaaacagggagtaaaatctgcgcggctgctgcgcccgtcctcggc

SEQ ID NO: 10785 - DNA, 398 bp, Zea Mays
agggagctctccgggattggccctgggaggcaaggaatcatggccgcccgccacgaagtggtcccacggcaatgagcaaacaggtgccccaacgccaaccacgattcccaccgatgttacgcgagctagagatgaaggtgagcagtttgagggaagacttaccgtgtagcgagtaggtccacacatggcgaatgccgtgctccggtgagcgattgaagcagcactgaggacgccatcgacccatcgatgccatgcatcgcctcgaaagatgcccgaaattaacctcatgccccgccataggcctaacgccgacttggctcccgtcaagccaacggcagatctcactgctctctctctccctcggtctcttcttctgttcccagccatcagcatggcga

SEQ ID NO: 10786 - DNA, 812 bp, Zea Mays
aaggaagtaaaagaatggcaggcttgcgcaacaataattaagaaaaagaaagatgcggttcaggatccaggacgaaccggccggttaagatgggatagggacccgcaggtgggtgggtgtttgcagccgcaggagactggcaggcgtgtcaacctgcctcgtcttcacgacgcacctgtagctagtatagtttgccaacagtattgtcctgtgtggtagcaccagcaccgcagcacgacgaggtcagaggtggtggcatcgtgccggccgcccggacctcacgttatctccttgatcaaacacggcgtgtgctgatgaagcggtggtgtataggaatcagcattcaggatacccaactggctacttgcattgcctgtgcggctgtgcctcaaaccacggtcacacctactaccattcgtttcagttccaaacccaatggaccgaaactaagattttttactgctataagtgctaagaggccagagttgaagtagtactagatgaaagaagcattgttatgctagatagggcagcaacagaggcgtagcgcaggcaatgtagggctataacaaaatgccaatagaccaatgcatatatacatagcactacataataactagcaagggaaagagatagagagcacgacctgttagatatgtataacttagaaccatggcatccaccagatgtacattttgccgaggttgttgagggagactgcttcagcgatcagccgccgggcttggccttccacggagagaggcagggaagggctggctttaacacccaccacaactccctggagccttgcg

SEQ ID NO: 10787 - DNA, 445 bp, Zea Mays
gagctatcaggctatttgatgtctgaagttcaggctatcagtggtaccaagtcatctttggacaggaaatcaagcatgatcgagtgagaattgggctataattgttatggcaagattatagctgaatcattggtctacaactttgctgcagagttttaggtgagttgccataaaaaatttagagaaaatttgccttgaatctactctgtcagaccgactgaatgcaattcgcgatggtacagtaaactaaaatggattaagctgccagctcagttcagttcaccgccgacgatcgtcgcgtgtagattcgtgccctcgcagccgtgattcgcgaccagatcgactggataacacttgaagtcgtgtaaagatcaccaccgtggataagtccggccagtaaaatattccggccgtcgtaccaagctcaccgcggtggaatccgata

SEQ ID NO: 10788 - DNA, 482 bp, Zea Mays
cgcgaaacaaatagcgagggaaagctgggttgttgagactctgtcgcaggccaggccaggcaggcaacgccgatttgaatgttttggataaacacgtagccactatcccgccgaacttgaacaacctttttcctccctatatcttcacaccaatttaaccgtggtgccctttcttcgaaaaccacaaactccgatagcagattgatcgccacgcttcgcttcgctgatggtgcatagccgccgaagcgcacgcgcaagggacgacagcgcaaagctccacgcagcggcgcaggaggtgcacttccttccgttcaacttcaaccccatcgacaagtgcatggcgctcaccgcctgcatcgccgacggcaggtgtcaccgcgtcagcaacaagggtgctccggagcagatcatgaccctgcgcaagtgccaagaagaggatgtcacaaacaaggttgacgccaccatcgacaagcatgctgagc

SEQ ID NO: 10789 - DNA, 444 bp, Zea Mays
caaagagaagctggaaggttgtatgaaataacaaagacgggtcaacatgagtatgatgatgccatttgaccaaaaggtgtgaagccatcggtcgcgaggccgattcgaacattcctcggatcaactgcaaagtctggatcaaacgtgtcgagagccttccaagcatccccatctgaagggtgcacgatcagctcatcgttctcatggacaccttctttgtgccatcgcatgtgcatagcggtttttagatagaaacaactgtttcactcgaggagttagtggcaagtagtgaagctgcttatgtgcaacatctgtcatcaccttgtcatactcatcattaacaacttccacaaatctagattgtccacatttcagacattttctctctcccgcatgttccttcatgaaaatcatacaattatttttgtacacatcaatcttttc

SEQ ID NO: 10790 - DNA, 1315 bp, Zea Mays
atcgggcccaggggccttgtctgatggaagttgcttgatagtgctcaatacttcaacttctgtaatcaagagctcaagagcctaaagatcatgctgctgtatgtctatggcttccaggttgatagcttggtttctttgctccccacttccaattagattcgaattaaaatccaggaagacttcggccttcccatcatgagaggtgatcagctgatccccatcctttattgcagcaatgaaattcttcctcttacgaaaccttcagcatgaatgaaaaaacttggtgttagcatcaccattcttgagccaaagaagccgagatctggttctagccactgtcctgagcagggaggcaagcgccaaagaatgtttttcaacctctgcagcagctagcattcaagatcattgagatatctgctctccctagccgtttccagctgcaacatcacctctctatccaactcaagctgcatcttgaaattgcccactttcttgtcactcccaacactgcagccccttagctgtagccttcaacttgagggagagggttttgagagggcaagagatgttctggacagagttccatgcactggaaaccgcatcatgaaagccttcaaatttcggccaaaagggctcaaaatgaaatcgcctcttaccccaatgattgtccttcaatccaaggagaagagggcaatgatctgagtcttccgatgcagagcactgaagcaagaaatctgggaacttctgctcccaatctaaggaacagaacatcctgtccagccgcaccaagacgtcatgagcctttgcccaggtgaacttccttccctgaaggtcaatatcttttattcccaggtcatgtatgcatttcctgaatcttcccatcatggctcagttgagattagaattatttttgtcctcatctgtttagattaggttgaagtccccaccaacaagccatggtccagaacacgcagatctaattaggttcaattcttgaaggaacaagagcttcctatcattactttgaggtccatagacacatgtaagccaccacccatcaccactagccgggcaaaacttgacagaaacactgaaattatccacacgtgaggcaacaatggttcccaacttgacctccaggccggcaacaccccaccactaggaccaacggatgagagaaccacaaaattgttgtcgaagtcagaacccaacaaggaaagaataaaacggttgctgcaacttggcatcttagtctcttgcaaactgataatatcagcatgaaccgactccatcagactctttacaaaatcctgtc

SEQ ID NO: 10791 - DNA, 464 bp, Zea Mays
gcctttttgagtggtccgactatatcaagtccccatacgtcaaacgacgaggtgacatggatggtttggggtgcttgcgcggggcagatgggtttgtcgcgtgtagtactagcacccttcacagtttctcaccacctggtgtgcgtctgacaccgcggtggaccaatagaatccctgtcagaaggtgttccccatgaggctccttggggtagcatggcgcccacaaatcctaccatggatatcttccaggatctgttttccttattcgattgggatgcacagctgccttatctcgttatgccccttcttgtagaactcttcctcaatcacgacgaaggacttgacctaccgatgaagcctacatgcctccatttcatcgtggggaagcaaaacattgatcaagaagtcatgatattgtgccctccaatcggtcacaaggtcggcgagggggtccatctactcca

SEQ ID NO: 10792 - DNA, 532 bp, Zea Mays
tcctttgtttatatgcctgaaacacatttacttatactaaaggttggacgctttgagaaccttcggtaagataggcccccaacagtcatcaagctaggaaggaccttatagagtgacacagtaatctttggtaatgcgtacatgctgcggacattgcagggtgatgagttacctaaggtattgaatggtcgttttctgaagttatatcatcccagtgtgtggcaagatgcttagaaaactgatgttctcacatcgagttgataacagcatgtatcaggtgcttttggttcgttttgcttccccaaaagggaggggaatgtattgagcaccatattcggcacctagaaaggttggacggtccgcgattagatcatatcaggcgagatatctcctttttccgtgcgtgtttatccatctaaaaatgcggagtttgttggagaacacctaaaattggtccagacctccccctatgtatatgaatgggtacaactgattgcgcaaatccccaatcgaaccaatcaatctatatttc

SEQ ID NO: 10793 - DNA, 415 bp, Zea Mays
tcgaggacttcggcggccttgaaagctcgttgacccggacagaggacgcggggacgggggctgaagagcaattagcgcctcaagccggccctcgcgaagaccctgcggcggaggctgccccaactggcgaagaccctgcagcggctgttgctccttcgcaggtggcggggtcgcgttagggtcgttgggtttaaggtttctttttgtgatactgaaggtcggttgctgcgcaggttccgacgtctgggcctacgcaagcaacccccactaatgttgatactaattttgtggtgtttgcgaatgcgatggccattaatggaaatgcgtctggttctaaaactgagtcgtggtcatcggacggggatgattttgggagcccgttttcgtggattgaggagtcttctgatgaagattt

SEQ ID NO: 10794 - DNA, 393 bp, Zea Mays
agcgattgaatacagtaattcagtcagctagataccagcaaaccttgaggcgctatcatgataaggctgtacgacatcgatcctttgtggtgggagacttggtccttcgccgaattctaatgggggaaggacgacataaattgtcaccactatgggaagggccatttgtagtagcggaggtcactcggccaggatcatataggcttactcaaatggatggcacggaaatagggaattcatggaatatagagcatctcaggaagttttacccttagcaagatttcaaaagctatcgggggagcattgtattctgtaattggaaaatacctcatcaataaaagatttcattctcaagggcactcgaactgtttattatcaatcagcacatttact

SEQ ID NO: 10795 - DNA, 696 bp, Zea Mays
ggcggatctaaatagtgatttacgacagcataagacctacgtcgaacttgcataaattgctgttacgcccacgatcctataatgtagcatatacgcacgcgaactcgccgtgattatcgcgtccacgataatggatatgtgcatgggcaaaaaggaaaggatcccacacttccagaaaagttagataacaagaatcatttgttagggtgcgcctggctgaaggaagtaaccggagctggaagatggcggcgccatggggtaaagagccaatcagagagtacacgacgccgaaatcagttcatcgatcaaatccatgcttggatatcgtaccaatggtgcaggaagatcaactaggagggaaccagtttgcctcagatgcaagtgcacatatgcaaacagctactgccgtaagggcaattactccaccagtagcattgagggcgccgggggttgatgatcagaacacatccgatgcgtcgaggatgaccataaatcaaggaggacaacaacttactactatgtgaactattggtgagcatgaacaggacacatcagtgattctgcagagacttgtaagtactatataactgatttggattttcagtagtgtagattaaattgtatacgatggaaaaattaaatcgagggtaatattatgcagctagatggtatgaaatgttatattgtgcatacgat

SEQ ID NO: 10796 - DNA, 364 bp, Zea Mays
tcgacatcgccctcctcctcctccctgactcatccaagtcatcgaggtcggacagctcgatgccccagagataagccctctccccgccgacatccccatggagtcgtccttgcaaacggatgatggggagccaggggacggcagattggtcctctcatcagagagctctgtgtcaccgaagtcctccgatggcggagttggaggatgtttcctcttatcacccctggtgttcctcctacccttaccgtctttctttcccgccatcggagtttctagaagaggagaagaggataggaggaaacaagaagtatgtgcaagtgaaggagtttgcggcacacagttggtctatttaaagaaatgaaac

SEQ ID NO: 10797 - DNA, 1050 bp, Zea Mays
tgtctgggccggctcctctgcagcccagctcgtgccttcatccgccagcccacctcatacaactcctagtcacttccacgcgggacccatcggtcagtggcatcttcatccctttccccacgccgcgcggattcctggctccgtggctcggactccgtacgccgcttcctcaatcccatcggggtttccgtatcccacgcgcaaagctcgggttgttgggggcgagctgcaggatcacctcttctataaatcccggcacctccccccatgccatcctccatcaaccctcgagcatcgttgtcgccattaaagatcggaggaaagcgctggtgggtctcgtccttgccgacggtccaacctcgggcatcgggtcagatgggcggtcgggatcttagcctgattcctgggacccgttccagtgcatcgcggaggtgcgtatagatgataggggtgctgggattgctcgccggtcacgtgactccgccgtcgggccgcatctccaccatggacaggggattactccgtgttagcgcaggtgaggttactcccgatcgactcgcctcttcccctgcatggtgtagcgtctgttagtttggtaattggaacactggtgtgcgaatcaggcttccgctggccatggtccgccgtgggcgtgcgcgcgccgccgtagttcgggtcggctgggaagctgggaaagaagacagaccatagaccgttgatacgtgatggacggctcagatcgtgcgttgcgtactgccctgggcgatttgatcgtgaccgtagatccgtaggggaacgattgggatatggtgtgaacgtggcgctctgtggatcacaggatcgtgatccgagcgcatgtgtaatgtgtagcttgctataaaatccaggccgttgaatgtaatctgaacggctgtgtgcatccgataccccttcggccctggaaacttgcttaagagtccctgtgcttttctagaatcaacccgcagtactacaaatagtattctgagtcttgaaacaacttgcgcagaggcccctgtagttccctggttt

SEQ ID NO: 10798 - DNA, 325 bp, Zea Mays
tccatgtcggaatgggtaaaggttgtaatggcccggtaggtttcaaatggacggctttcactcgttgacaaatgtcacacttagccacataccgagcaatttctattttcatcttagtccagcaaaacccttgcttcagatcttgatacatcttattgcttcctgggtgaatggaataccgagacaaatgagcttcgtccagtatttgttgacgcaattcaggtacctttggaactaccaaacggttttggaaccaaagaacaccatcttcatcaattctaaaacatgtagcttttcctgcttcaactcgttccttgatatgagc

SEQ ID NO: 10799 - DNA, 562 bp, Zea Mays
gctgtaatggcgtcgtcgcgacttgtgcgcgtgccgacagcagggtaagggtaaggcgcggtcgggggcctgggaatcaccgtgctttggtggagttcggcggcgagtaatggcgcgtccgccatgggggcggtcggctaagccgggcgggcggacggtgatgggcatcgacggcggcgccgtctggccaaggctcgccatcggccaaagcgagcagggaagagaggaaagcgtgaagggatgcccctgcttgttgatctggtattcaacggctaggattagacgacttcataccccttcgcttagatgatagcaaccgtccgattttgatccgagggccagtggcggatcgcgtggatttaaaacctgcgctgtcggatcgagatccggtggtctgcgctgcataccgcttcatagatttaatgatctaatctggtgcgtccgtagcagatctggcggccgagattgactcataccccttcgcgggtatgttttactaaagaacccctatagttttacggaattaacccgccatcccctcggggtgtttactgagtctgac

SEQ ID NO: 10800 - DNA, 772 bp, Zea Mays
tatctgcacagtctatgatgccattgtgccgggtcaaccaatccattcctaggattacttcaatttcgtgggatggtagtacggctaagtccgccaggaatactaccccacttaaaagaattctggcttgggagcatttgaggtggcagagaaggtctgaccctggggtccgggtgaccagagggacttctaatggtgtagtggggatgccatgcttttccacaaaactagtggcgatgaaagaatgagatgctccagaatcaaaaagcatagcagcaggggtaaattcgactatgaactcaccgagtactactacaggggcttgctaagcttcctaggcgtcgacgtggttcactcgagccctaccgtggaactgaatcttgcttaactgactgttggtggagggtgccttggaggcgggtgctgtaacattcttggggccattcacagagttggaataggcaggtaaggatgtcttcaagtgcggataattattcttgaagtgacctgggtctccacagtgccaacaagcattggctggaggttggctgcttgaaacgtgacggagcggatcctgctcgcttgctgaggtttgaccccttggacggaaacccaaaagatcgatccctctggtgcctgtcctattgttgagctcggagaatttgaaaatttctcatgaggtgacctctttcctcttctcgtgctctttccacctggatggccttgtttgagaggtgcgagaagccgaggaagtcttggctggcaaggatag

SEQ ID NO: 10801 - DNA, 434 bp, Zea Mays
ctcagacagatgggcagacagaaagagtcaacgaagtcctcgaggatctattaagagcatgtgtgctagcatttgatagaagttgggaatccagtctaccctacgcagagttctcatacaacaatagctatcaggccagcatcaagatgtcgccattcgaagcactatatggacggaaatgccagacccctctcatgtggtccaacgtagggggaaaagcactagaaggacctgcctttgtcaaagaggcggaagagaaagttgcactgatccgcagaaggttacttgaagctcagagtcggcagaagagttatgcagacaacaggcggagggaactccgatttgaggaaggagacttcgtctacctcaaggtttctccaatgcgtggtgtcaggaggttccaagtaaaaggaaagctagtactgcgattcata

SEQ ID NO: 10802 - DNA, 866 bp, Zea Mays
ggtggcctcgtcctctgtcccttcctccccttccctggattcgtccaccttcgctacccagggacggtccaagttctagaggtggagcgagagtgcgtcaggatcccctgaagacggtcttcctccacagtcctaggttggtcggcctctgtttcgcgacatcctgcttcaccagcgtgcacctcctgttccagcaccgagagtttcgactccgagggagccctccccacttgagaccgggacgtcgaaccctcatcacgaggaacggcaccgccggtttcgtgggctggagagtgcgccggagacaacactcggtgggtggaccagagtagaatcaaggaaagcgaagaagtgtcgcctgcgtgcactgcgggcacgtcgtccggtgccaggcgacctattcagtcgttgtttcaactgcttcgtggacgatcaccttgctgcatcctgccgccttgggccaagctgttttcgctacaaggcacttggtcatcgctcctacgcctgctctgggccagtgaatggtgataggaagttttctgtgcatcgacgactgttgaggggggcggtttggagcatactatcgacagttgcgccaacgaacaccgaccgtgcggcgacagggcctgtcccgcagcaccagttggctcgggcctcggtctgggggcgacttcagcctccagcgccccatccacgcaagaagaagagggtcagtgtctggcgtagaatctcccctccaggcattgaaaagggccaggtccatttcgagatgatggaaggggcagtggatgcacaagcatttttttctccctccagtgacgtcggagctgcagctggtcctgtctcgcagggccccctcccgcccc

SEQ ID NO: 10803 - DNA, 1089 bp, Zea Mays
aagaaaaaggaactataacattcctgggccgctcgggtgcaatttggcccaacttccgcgccaaccctaatccccctcacccgcatgggctgggttgcggcccaactgctctctcgcgcgcaccgtttgtttcccccccccctcactgacggcttgggcccactgtccagtagctcgcgctcgacgcaatccgctaccctgttcatcgtttccatcgaaccgggcaggcgcgcacctgacgccgcgaattccgcgcagggaccgagtccctcgctcgcgcaacgactgccgtgatacgcgcactacttcagggtacaaatacctggcgcgctcgtctctgccgcaaaccaggggaggccagccgctggaattgccgccgccatgggtacaagctcatgcggtcggtcggggcgcgcagacggatctgtgggcttcatcgggtccccgggaatgtactcatggcttcgggaggaaggattggacctgggtgtgccctgaaatgctcatcgtcgtgagactgtcgccgccggtagctccacgccgtgggcagctccactgccccgccatgtacggtaagaccagtgatctcaagttcaccatagcctctttttcgggtagagacttctgggataaagtatcgcgctctaggaggctggtctggtggggctcatcggtcgccgccgtgggggtttggtgccgccgcctgtgctgactcggggaggaagaaggtcttgtgaccgttgatctgctaatcagataggccaccaacggtgtagatttaatcaggtgtatgctagttgtcgtgtgatccgggccgttgaatccctggcgagcagttcggattagaccaaggcgtgataaagcttgggccatttgatctttatccaacggtagagatcgcgtaccggttcgcttctgtggtattctaatcgtggccatagaattctaatccgacgtctgccagcgctcgatacccgttcgttctgggtaattgcaaatgagtccctcgggaagtaggaaattgaacccgcagtccacactgtggggaattctgagtctggggaacaattgctagttagtccctaatcc

SEQ ID NO: 10804 - DNA, 1469 bp, Zea Mays
gaagaactgaacaccatgttttgttttctgtatgtgcctttttcatataagaaaattttaatattagttcaaaactttcttttgatgtgcccaaaatggttgcacctcttgtattgggtgatttcatagacatcatggttttaaattttaccaaacgtgccatttgagtttaatctgagctttgttgttgtattgtcttatgactatcatgcttttgaatatactgactccacccctgtaactggcatgaccccaagacttccacaatggttggtagggtgctcacacttctcaaagaggtatggttttatgtttggtataatcactatgtaagtggtacctaataatagttgaagctcacatagtcacacatctcctaatggctagggtattccaccaccaaacattcttgctatgacattcaccacggctgctgcctcagaaatgagagagaggatagggacagtggtgggaaaggcagttgccaaggatattgcaataagcacatttcactcattttgcttgcagctttgcagaacacatgctgaaaagtatgttttcccctgttggtacattatacttaggtgcagtggatttttgtatgcttctgctccacaaactgagttgccacatattaagaaagtcactgatgtacagcacttttaagctatgaagaaaatatgaacttatacgatgaaatagagcctgtgaaaaaaaatcatgttcaatgtaaattccatgttatcaagatttacttagattattttcagctgtggcaacaagcaattaatagtcctagatgcataaatgatcatgatcacttttaagctttatcaaattatttataatatataactccaatttgatatctggcaaagtcaaaatatatacaattattaatcagtatatcgcactatctaatgttatggtcttgtttcatctttatgctctgttttaataccttgctctttcttacagtttatcaagcatactaactgttgcagatacttgaaggcctggatatgtagacatttatttaataaattttagttcccctttataaccatttgaaggctaggacgcacatctgaattcataatctacggacatggacagcaacgaagggcgcttattgagacagagcgccttttggaaaatgacaaaaataatggtgttggagatacaactaaacagtatgatggggacataaaaaattctttcaaagacaaagctaaaaagtggcagaaatttattacacaggtacttcctacttttgatgaagaaatatttgttttcagtgacctctgtggctgatctacaggagtcctacaaggaccccaggcagtcacaatcacatttcgttactgttattttcctgaagttgcacaacaaggctgtatctgcctaaaatggtctatatgttttttatagactgtatctgccaattcccactgatcccaccttgccgc

SEQ ID NO: 10805 - DNA, 400 bp, Zea Mays
ggcgacccgacgcatagagtactttctccctgtcggagcactgagctatgttgagcatcttgtccacggactttaaccagtcatcagcttgtagtgggtctgaggagttagagaatattggtggcttatggctcataaactaggtggtgcttatccctggcggagctggtggtggtggaggtggtagttgctgtcgttcctaccgttcttggcacattttttggcgttcttgcctcatttcctgtcgttcttgacgaatctgtgcatgcatttctgtcatcgtgttggccatttgttataataatcgcatttgagcagcagtcacgtcatcaacaggcgggggattcggaggaggattcattgttggttctagattagctataactcatcttcgatgaat

SEQ ID NO: 10806 - DNA, 382 bp, Zea Mays
gaaaggttatatttgtgcttataatgtgcgaagtcgaggtccattttgttgatatttcacattgttcttggagcccctttaccctttaactctcattattcatctgtttaacttttgggccctatttttcatgttcagaaatggcttgaaaagcatgggccttttgaggcagtcgtggatgctgccaatgttggcctgtttagccacaaacacctttctttgagtaaggcatgtatattgtgctcaatctttcttctatatccctaaattttcttctaattgtgaaaatttctgaatgtttatttttcacttatctttgtttaactggacaggttaattctgttgccgatgcaataaggctaaggtttacgtcaaaaaaatg

SEQ ID NO: 10807 - DNA, 545 bp, Zea Mays
ccctggtgaactcatcctttcctctgcttcgcgtagcatgtttcaggagtatgaattggggcctgatggaccggcgggctattctctggcatgctctgccgccgtccggccatggcgccgccaccctacccttgtcgtagctagggttggggagatggatccctagccattggatcttggggcaagggtcgcgattggtagcgcgcataccgtttcgcgagattgaaccgtgggtcgttgatggcgcgatctgcggtgtagatttaagggcgtgtactgggttaggtcagagtagtgtggagcgttcgatttcgatcggacgggcagggaatgaatcgggattcattaaatcctgcgcgctggaatcagatcggacggctaggatagatctgtaccccttcgcccaggcctttttgcacatgagcccctccgttattaagttatcaacccgccgtccacattccatatttactgagtcttagaaaacttcggtttaggcccctggacttcccagatattgacgcccattccagaatagattaaaa

SEQ ID NO: 10808 - DNA, 362 bp, Zea Mays
aaggttatgaagacaccggtggtcagctatcgcactaaatggccgactgattggaaatctgaatggttttatgttaaaattgatgaagaaaaggagaagctagttcaaagcccgctaaagctaatcttcgggctgactagatctcaatgcaacatgacaccgggggatccatgccaagatgctgtgtatgagtttagaattgtgtctgaacacattgggtctagggacttagtccaggaatacctagccaacagagtgttcccaacgctgaagaagtggggtatgccgaagcttgaagaagagaagaaagtgggtgaactcgttcggccgccgtatcagtttaagttcaaaaaacacttcaa

SEQ ID NO: 10809 - DNA, 698 bp, Zea Mays
cttaactctatccttggttatgcttttcactgttatcatctttaccctcgtcacctctatatcttaccttgatgcttatattatatctgccctttaaaaccttctctcttccatctcaatttgagagttgcattttatctattttcccttggccacatcctattcttcgccgcttgcgagtttttaactccatcctttgttgtgcttttgtttgttgttgcctttacctttctcatctctcgatctaactttggtgactacactatgtctgttatctaaaatctctaatctcccatctcaattcaggaggggtgtcttacttatcccgccattagttatatcctattctttaccacttgctagtctcgccttaactccattcttggttgtacttatatccttggttcttatccacatttacctcttcccttacatccttgtccgttatcgcctttaaccattataatatctatatctttgttttgatgcttaccttgaacctatcctttgaaccctcctcttttccatcccagtttgagagtgatgctatacttatctcgcccttgatggttttccttattggtcaccttgcaagttttgtcttaattctatcctttgatgtgtttttgtttgttatcaccattacctttgtcatctatcgattttactttgatacttatctttatgcttgctcttta

SEQ ID NO: 10810 - DNA, 819 bp, Zea Mays
attcgatctaaaaacatttccctcgtgcttgtgcttgtggtaggtatggagcacatacgtatatacacgcccacggtccgacggtttctagcagaaaaaccttagaattattatttcaccgcaactctcctctttgaaattattgtgcctcagtgactccacgctcgattccacacttacgggaggtctcatggcgcctagaagaagcaggggtgcggcggacgtcatccccctaccaatcccaacaaccaactccccttctgtggtaactatgcctccattgtttctgaatctgatttgctccacctggtccagattggtgttctccctttgaaggagttgagtttatggcgcatttggcaagggattacagtgcccatagaggctactcatgagtctatggttttcatccctttcttgatttggggcctgggtctgcctgtttccccgtttttcgtggccttcttgatttctactccctcaatctgacccacttgaacccccaattccattattcaaattgccatctatgtgcatctatgtgaagcctatcttggattagcccacactttggattgtgtctatctctaccattgcaagccggggatggcgggtggacaacatcatgtagttggtgggctagccttgaacttcattagggtaggaaggttgaatatctagatatccctctaaaggacaacatcaaaggatggcacttttaaatggttcactatggagaatcacaacaattccttgcctgcttgctctagaaggcaaccggatgtgcgcgtacctagttggatagaggccccaaccgac

SEQ ID NO: 10811 - DNA, 539 bp, Zea Mays
gtggtatgctgagctgcgaataagcttggtgccaagggaattttgcaattgctcccaaaagcgcgctacaaactgtgtacctcgatcagaaacaatggttttgggcactccatgcaggcaaactatgcggtccagatatatctcagcatatctccttgccgaataagttgtgtgcactgggagaaaatgggacgtcttagtaagtctgtccacgataacccaaatggaatcatgtttctgagatgtattgggcaatcccacaataaaatccatactgatgtcatcccatttccatgatggtattggtagtggttgaagggtacccgctaccttcaagtggctcgcctttaccctttggcaggtgtcacattctgacacatatttagcaatctcccttttcatcctagtccaccagtatagggatctaaggtcatggtacatcttattgcttccggggtgcatagaaaatttggagagatgagcctcatccagaattttcttcctaagatcctgatccttgggaacaacaagtcgatctt

SEQ ID NO: 10812 - DNA, 948 bp, Zea Mays
aatcggtgaagaatcctcggctactattccctgtctcactgacattcacagtttggccctcggagttctatttcttcgcaacgacaggtccccgacggggaacgccggtgagcacgccctccggtgaacctgtaccggctgatatgctcaaagaccagagccctagcttggccgacacctaattccaccctcggcgacactaatccctccattaattgcacgaatccggcccggaattcgtctgcccccaacgatggcaagattcgaggagaaactatggtgttcagggcaattcagcgcggtctaattcaatcaaccgagcctacaagcatcaggagacctaagagatgctagaatatccaacagagaggcatgaaccaacctgaggagggctggccacggtgagagactctcggcggcgcggaaaacagatttgggggaaaagagaaattgagaggctatggtgaacgattgaaggcaaggactggttcactgggttcgtaacaagtagtcagaacaggccgaggcatcaatttatagaggacggtcatgaggagggcgaatttggacggggaagtgcgcgcggtgaaaagggggaggagtcaccggaggttgctaacgtggcgttcactggtttacgttctacggcggtcactgccgagtcttcatggcttgcgatgagtggggagatgacttaaggcgtgtcacaaccgagctagacggtggcacaacggcgatggtcggatagccccgtcgctggtgcaagtggttacggcgacagggcaaaacagtgccccaagttaatctcctgtgcgatatttttcaccctatgtagttatctgcactccaccaagcacgaatcgcagtggcaacgaggatcacgacgcaggatcaccggcagcggtgcactgaacctggcgatctttgttaggttactgtaccatcgcg

SEQ ID NO: 10813 - DNA, 404 bp, Zea Mays
ttgagcgggggcaggagtgggacggataaaacctagttgcttgaagggataggtgggtggacaaggaaaagagagatttgagttaaaaggacgaatcaccaacctcgatagcttctcggatccttcacccccttcgcgcccatatctctttgttttcccctaccctgtattcttggcttccaccgtaagcgatgtgctcacggccctgctataagtgaggtccaggcaagtggccatctttcgctgtagtcgatcatttagacctcccatgaagcaagtcttctttttcagatcctcgtcaacttgctctatagcatactgggagagatggttgaatttggcgaggtattgcatcaccgaatctcctccttgctttaagcacacaaactcttcaagtttcatct

SEQ ID NO: 10814 - DNA, 366 bp, Zea Mays
actggccgcgacaatgtgatccagggaggcagcttttgcccgtgagaaccacctgaggggttgtttccaggatttggtcctagcttacaatgatctggaggactactctagctgtactaccaactgcaccccgattacgcaccaggagcctgatgtagatctagaggcagagggtggtgttgtgttagctgatgggggtgagcctgatgtagatctagaggaagaagcagctcctatggttgcatcaggtggtggttctccagggggtagtagtgtgtcagagatagacactgacacagaggaataaaatgggcactaggtctatgagtgcatcctctgttgtaatattagtaccagcagtagtct

SEQ ID NO: 10815 - DNA, 455 bp, Zea Mays
tgaacatccaaggttgtaccagcttctgggagaggcgccaccgccaatgtcccagcaggagtagcatcagaagaatcttcagccagcatatcaagcatagcacttatttctgcatcattaggatccaaaggcacctcaaaatggacttgtcgttcgtcatcaggaatctccccaagcgaggcaaccaaagcactgacttcttcatcagagggtcgcgttctaaggcccaaattgccatcagtcgcaggtggatttgacatgaaaagagtgaagactttggcgggaggcaaattccaggccgagtacgccaccggagcaccaacattggacactttgcccctgagaatcatttccagtcggctcaccaagtctgcagaagggattctcctgttggtaacccgagttgagtcggctagccctcgatacagataagctgggtggatcctatctttcag

SEQ ID NO: 10816 - DNA, 369 bp, Zea Mays
ggggtattatggtaacgttcaaacgagcaacgcccttagcatcactatcatacatgtattatgatacgtgagcaaaacgagcagattacctcccaggaaaagctggccacgaggaggtgagtgattcggggaacgaagtcaccacgcgcgcctagaactccacggttcagttaaagcaacggagccaaagggttgagaaaatgtccaggaagtaatttaagtgcagaagaacggtatgatacggtgaggagactatggggacagctgaaacttgagtgagttcaggtgttgaactttaatacactatgagagggcataggagttatcggcttggttgaggcttcctttaggctttcagggggaataacc

SEQ ID NO: 10817 - DNA, 406 bp, Zea Mays
ttttcttttcctgtagtgctgagtccacaatgctagattcttgaggcatttacccctgctatagctaatagctccaccaccttttggatttttaccctattcagcttcatgtaacaactacattatatgtggctcatggtgggtttcatctctagcctgccccaattttcttgggattaaaaccttgcttgcttgttgttgagtatagcttcagctctttgaagacttgcttctttatgctatataaatggaatgctgattccactggtagggatgcaagtggtgtacccaatggtatttcttggtcagctaatgttgttcttttaccccctcagagtttgcaagtcctaaagctgcccccaacaggtcacccagaacgaactctcaccaaaacacacacgaaaac

SEQ ID NO: 10818 - DNA, 440 bp, Zea Mays
tgaacggccggagtaaaaagacgcacgtgagcaggttcaggccttcaggggttcagtgctctatggccatcaaaagatgcatcaagctgggctgggctcagcatttttcttaccagtaccgcaagcacttgtccctgacagcctctgacttcctgaaagcttcaggatcaattcaggcaggcagcggtagtcgtagccttgttcgtccctccaacttggaggaaaggatgccacatactcaagtttggcatccgctgatccacacaggaaaacaaccgtgtcagcggaataaaatataaccggtgcgtttagtagcctgtcagattccagcatactcctgctgctagctatgtggcacaacaaactttcagcgtctctgggatgtcagtaaccatcaaactgcagtctcaggagttaacaaacagaatgcaaccactgat

SEQ ID NO: 10819 - DNA, 355 bp, Zea Mays
ctcgagcttttgctgctgcctttatctactccatctctatgcgcatactaagacgtgtgcgcacgccgggtgcaggcgacaagtccttactcgactttcctgcgacggttgccaccgctaacagacaacatcgcatacagaagatgcgtcatacacttgcgtctgctgaacaaggtgccaacaacggatgttccctaccgcctgcctttttaaaaaacatctttaggtttcatatgtgatgggcgttaaaaaatcctatgaatttatgcccgacttgctgcttatagttagcacggatgcagcctcaccgcctcttgaacgatcatatgtcgagttgcttaaaggtgcttatgtt

SEQ ID NO: 10820 - DNA, 343 bp, Zea Mays
tacttgcacaaccagagcactagagaagagaggaagatggagatctggccagcaaagatggtgacttgaccaaaacgatggaggattaagagaagccgagtgctatttaggttagagacttagggattagggttagggttagctacttagcttcctgggaggagatccacaaccacaagacgtgccgggagcacaacaacgacggaggcacggagcagagaccaccagtgaatggcgatgtacggtaaggaggaagggaggaaggagagctagtccaaaccgtacctgacgtggtccatggatgacaggagggagagaagagggagatcctgtgagccgccgg

SEQ ID NO: 10821 - DNA, 910 bp, Zea Mays
attcgaccaattcaaagtcaccgcgacaggtagcgtagactaccctcgcgtgcgacactctctgcgcaaaagtcgcctaagggtgcagctagactagcacaacaagtgcgcgatacgaagtctcactccgtgcaaaagtcgcccaagggtgcagctggataagcccaaaaagtgtgtcaatcgaagtattttactaaaaggacactccgtgcaaaagtcgcctaagggtgcagccggattagcacaacaagtgcgcgatacaaagtcttttactaaaaggacactccatgcaaaagtcacctaagggtgcagccggattagcacaacaagtgtgcgatacgaagtctctcactcaaagaaggccaacaggccacattacaatacaagttgcagttacatacactcagcgaatggtcactagacccaccgcacaaataaacacaactacaccctccattaccgccggacaacgcgagggcaccacatactacatcggctcaacctttgggatgatgcccgcgtccctataattgaacaacattattttcaattcctcaccctcaaaaaattccgcagatccccctcaccaatgctcgtcccaatcggtgaagacagtagctctcgtttaccaaaccgatctacacgaagacggtcccgctccatccccatccgacggtgcctaccacttcgcgaaacctcgccaacgctatgcttcgacaccacccttcgtcgccggcacttggccctcgcactaggaaaatcagacacctcaccaacctccacccgcggcgaggactccatcgcggccacatctaacgcatcaaaataatccaagtcttcatccgaagactcttcggtccaggaaaacagactcccaaactcaccatcagacgaaaaagaaccagattta

SEQ ID NO: 10822 - DNA, 509 bp, Zea Mays
atcggtgacctctacgcaaggattcacgctgatcatggcgattcgtgcaggactcgagcaggataatactgggcgggtgaaaagattggagggggagcggatttggtcgcggggtgaagcttatcaaccgcgcttgtagccgtgcgacgtggccggaccgccggtgtcatcgtggaaactccgacgacctcaattatgccatgccgtggctctttactgcacagtagtaaccatggcacgcctaggctcaccatctcagaaccgctgcaccggtgaacgccacaactgagccaccagtgaccttcttcctctccgaccgccagcacgccatgccaaaattaggagccacgtcccttggaaacaataaattggtgccccagcctgctccgctaagtaattgtgcacccagtgaaccagccctcacctccaatcatccctcacaactccccaatttgggattcccccaaatcagtcaaaaacaccaccgtgtgtgagctcgtcgtggccag

SEQ ID NO: 10823 - DNA, 793 bp, Zea Mays
ctagttcaatcaatcgggtctacgggcaacaggggactcatggggtgctagaacaccaaacagaaaagcatgaactaacctgcaaatgcctggccacgatgagaagctcacggcggcgcggaaaactgatttgggggaaatcccgaattaaggtgctacggtggacgataggaggcgaggagcaatgcactgggcgagtaacaacctagcagagcatgctaaacactcaatttatagtgatcaacagcggtgacgcccaatttggggaagacacgcttgcggtcggagagagggggaggtactagtgcgagctatcgtggctttcactaaggcaatgactcaggcgatagacaggctatctactgcggcctactgcgacgtggtgaaatggctgacgatgtggcataatcgagggaaacggcgacacgactgcggcggtcgcgcagccacgtcgccggtgcaagtgggtacggcaaggctggttctatcctctccccgttgattttttcacgtctacggtaatatcctgcctgagctgagcataaattgcggcagaccacacggatcgcagcgcggcgatcactggtggcgaggttaagtgaacccaagatcttcttcagactactgtacaatcagagtcttcatcagagcgcctgacaaaggtagttagagggcttggttctccaatttttgtgtggcaattaatcatccgtctgtagcaaagctattgatctataatccagatttgattttgctatagcaaccataatcaaataatcactggatcctactt

SEQ ID NO: 10824 - DNA, 282 bp, Zea Mays
atcatggtcacctggttgtgagcctgtgacatgtgtttagtgtagagacacagtactagcttggcatggcgatagggcaacacgggtttgcatgaaacatgatcaaccatgagagtttcctgcaagtataagaattgtttccttaggcaggacccatgttgtagacccaaacaattctgaagatattttttagttcaggtctcagcatccaaataatgtatacatacctatcggaatcacttccctgaacatggaagaatataattgtttcccaaatattgc

SEQ ID NO: 10825 - DNA, 498 bp, Zea Mays
agcccgagctcggccggtcgccgccgtaccgtaccagttgcagctcgctaggatccagcgcatgtttccattgtcccacttccatatatatataaataacactactgtggctagtcgtcgtcttccccggacgacccccggccggccggagagcgcgccgccgtgctttcttcctgcggtggtggcgcgcgtatacatcgtcgactcttgacgagctgagggcgtacacacagctagcatacatacacacaaagcccagcagcaggtagtctagccaatcaaacaagcgtcgtttcgtaccgggaggccggccggccgcgcgcggagaagatgctgtcctgcatcgcgtgcgtcaataaggaagaagacggcggccgggaccgcgaggagcatggcggcgacaccccgagctgcagagaccccgtgaagtcactcacctcccaggtgcgtagtacgtactacgtccagctccagagctcctcctccttggcacccacc

SEQ ID NO: 10826 - DNA, 942 bp, Zea Mays
gtggttcaataactttttttttgtaacatcaactctcctttctaagaaaaggcaaatggtgtggatttgattggacgccacgtgatagcgcgtgcgctttcatcaaaggcttcaaagcagcttgcagcttggcttattaggtgtctgtgtgctttcttttgcagagctcgcttaagatgtcgccgtgtttgaacctcagttggacctggtcaggacaaatgtgactggttgggctatatacggattgacgtacctgttgcgagttgctgctgctggactgtgattgttttgtcacgtattgaggctcatggagtcacggatggatcagtacgaaatcatggagcagattggccgtggggctttcggtgccgccatactagtcaatcacaaatctgaaaagaagaagtaagatatagcgctcttccatcagtatgtaggctatatatggctttgtcccttccctaccatttgggtaactgtatgattgtcttgcaggtatgtgctgaagaaaatccgtcttgcgaggcagactgagcgctgtcggaagtctgcccatcaagaggttggtgaaatgtgatgctttatttctgattcatcggttgtgccttgaagagtcagtaagggaaaagctgaattgcagatggctctaattgctcggctgcagcacccttacattgttgaattcaaggaggcttgggttgagaaggttttgtagttcaggaacttgttcttaccttgtttcttctgtttgaacttatttagttgacaaggtgagttatgcagggttgttatgtctgcattgtcacgggctattgtgaaggtggagacatgtgagtgtgctttggcggtcatccttttagttgcaacataaccacatttagttatgagaacctttgtcttgtttttcagggatgagctgatgaagaaatcaaatggtaccta

SEQ ID NO: 10827 - DNA, 621 bp, Zea Mays
aggaggacaggggtcgacgatagcattgacagtgtgaggggggattaacactaacgcgagtgagggaggcgaggacgcaggggagggagaggggagactagggcggcagggtcgtagaggagagggatgagagattatccaaataatattgttcattatatttcagtaggtaagggagagaagttatccactgatctgaatcattcgttttgatggtgtgtgtagtctgggtgtattttgtttggtggatttagtggaggttatgggtgtggaggtgatttgattgtgtgggttttgcaaagtttaaacttgtggattatatagtggtcggtgtttcaaacatagctccgacaagtaaatttgttcatgcatattctaggttccggatggtgtgctcagaggatgcgagatttatattgcttcgagcagaacatccctacatccagttttctgaggttcacgctacaggcactgttgttgctcaatactcatggtaggggttacaagcgggagagagggaaaaggagatcttaagtatctaatgcatggctagacctaagaactacgggactagagctcttcgctaagccttgggcgtcgtggtggttcgctccagcctcc

SEQ ID NO: 10828 - DNA, 286 bp, Zea Mays
gccacggggccagtaagacgtcccgatgcatagagaactttctctttgtccgagcaccgagctatgttgagcatcttatctatagactttagccagtcatctgcttgtagtgggtccgcggagttggagaaggttggtggtttatgactcataaactccctgtgcttatccctgggtggagctgctggtggtggtggaggtagtggtggttgctgctgttgctccctccgctcctggcgcatctcatccctctcttggcacatctcctgacgctcctatcgcatct

SEQ ID NO: 10829 - DNA, 780 bp, Zea Mays
ccgcggtattgtattcaccaatgctactcattctacaagcatttactttttaattgtgctttcacttaaaatgtaattttgtcagttcacagtaccctgtactaccacactagcgaaaagggttttgctcttctttgagtgatggcatttacttgagtatgtagtgtacacatttttgtttatgtttcagagagatttattcatcagtgcttcacgtatttgattctgctagtccttagcttaaaacggtattgctgtttggaagttaatttgggaagccgtcctggaaaacgatacttgcgagctctacggcgatgcacaagagtgacatgagtcacatgaccacctcatcttccactgtaccgtcgcccgctccttctgggaacacatcggctgggcggctggcaacttgaccacttgccacccgtcaccccggctgtggcctgtgggagatgcctagtcctgcacacgccccttcagaaattttctcaaccttgttgctgctatgctgttggtggcgtatataaaaccaccggaatgacgtggtcttttgtcactagcaaccttgcctgcggagactcttagtggcctgcagagatgattgtcgtctctggcgttatcggctgcgtttacatgatagctggatcgtcgacgattggtgtcaattgtttgtcatggcctacaggcctagtcctcccctcacctctgcattgtattcccatggatcccaacccaaaacaactgcaggtgcctatgaaccctccatccctaacataccag

SEQ ID NO: 10830 - DNA, 384 bp, Zea Mays
tatagtttgaaaccatgttatcatagtaggcctcaaacagggagttggtgaattgtgtgccattgtgtgtgatgatctagtttaggtccctaaagcagtcggtgatcccctttaggatcttgactgcagaatgcctaccattcctagttacgagcatgttcttaagccaatttgtgaatttgtcaatggaaccatagatgtctttgttgtttcctacttccttgagaaagggtcctagaatgtcaaacccccaaaccatgaaggtccatgagagggaatgacttgcagtgcttgagcgagggtgtgaatctatttagcatgaaactggcagccttgcacctttttactagctctatggaatcttcgagggctataggacagtag

SEQ ID NO: 10831 - DNA, 421 bp, Zea Mays
caggtgcccaggtcttcgtcaggccctttgccgccgacgagcatcaaccctgtatgcccgccctttatctgcccttcctgccgtgcgaaaccgatcacccaaaccctaccttacgctatttggctgtttgtactcggatctggtctgattacaaacatgtacatgtatttttcctattaaattcgtttattttcttttgcaaaaattatagggcatacatgtgtactccgccccttatttgtagtgatcctggcttactatttttccattaacagatactaaggttattttggctgtgcatatcacgttgtagagttctgggtttttgctctgaagaacaaaatggacaatgctcagagtgacaaccgaactgataccaagcaagatgatgatgcgcgccaaagcaaacaggatgatgagg

SEQ ID NO: 10832 - DNA, 919 bp, Zea Mays
gggacccttagatccttctcgcccaacaaactaagaaccgggccctagtgtcatcaccgtggggaaggaagctgacgaccgccgctgttggcccacgttctcgtctcggtgccgacctggggagctgcaggcgggcaaggatgtatgtcagcgcccagggaactcgtaccatggaggttgggcctctggtgatcgcgcatgggtggcaatttcccgccgtcgctgctgggtcaccatccgccgtggccagggggctccatgcgatgatttctggtgaggcttcctctcccaggatcgatttcttctcctctacattgaccatagttgaatcgagctcttgtgcctgggagtcgaggcaaggcagtgcgacaatggcgccatggcggtgcacgctcgccgtcgtggcgtgggatactggatgaaagggagtaacggcttgtccgttggattcgagacatagggatgtgattggatctgggaaatgatggctccgggtcgttggatctttgtatctgtggctccgattgggtgaaggatgctccctccgcgtaattaaatcatgaccgttggtctcttgatggacagatctgagtagttatcgagtgttgggggcactgaggtctaattacgaccgtatgattcagatcgggcggctcatagtgaacgataccccttcggctgtgtggattcgcataagaacccctgctctttttgtaaattaacccaccgtcctagaactatagcagagagtttaatataggtccctggtatttatagtttgaaccccagctttctcagtaatcacggccgcagtccaatccactggtaaattaatttaattagatgcagaattcatgtttagtataaaaataatgtcttaatcttggaaaattcataacttgatgaatttaaccccgat

SEQ ID NO: 10833 - DNA, 425 bp, Zea Mays
ctcagcaggcgcggctggatggctcgtccgacgcaaacatttgcggcaaacactcccagggctctgaactccctcatcctctccaaggccatgtcaagttgcaatagtcaccgactcagtacgggcagagtcagacgattcaccccttagcatactgagaacaacgttcacctcaacctcatcagcggttgtcggcatctggaagtgaatatgtctctcctcttcagagagatttcagaatggagcaatgaaagcctcaatatcctcaggggagggtcgcactctatggcccggactgccatcttgaataggagggttgggaacgaactcagaaaaggggctctgtcgaggaagattttaggcagaatacgacaagggagcaccagcattcgaaatcttgcctctcagcataaaatcaatccggc

SEQ ID NO: 10834 - DNA, 690 bp, Zea Mays
tgatagagcctcagggtttgctggtatctggctgactgaattactgtattcaatcgctctttctccaatacgtcaatatcctctagtctggtagcctctgcctcagctatgttttcgaagaccagccttggtgccccaaacctgaggtcggcgggtagcactgcctccgaaccatagaccatgaagaaagggttatttccgtgcagagctcgactaggttgagttcttaagctccaaactacgtacgacaactctctgatccattttctcgcgaacttttcgttcttgtcaaagactttcttcctgagtgcttccagtatcatcccattagccctttccacctgaccattggctcttgggtgtgctactgacgcatatttgatctgaatgctccgttgttcgcagaaatcaaagaattcagagctagtgaaattggatcccaggtcggttatgatgctatttggtatcccaaacctgaatattatatcttgtatgaattccactgccttggctgaagttagagaagcaatgggtttgtattctatccatttggttaatttgtcaatggcgaccaacacgtgagtgtatcctccctgagctttcttgaagggtccaatcatgtccagtccccagcacgcaaatggccatgttacgggtatggtctgcagttgctgtgctggtaaatgttgc

SEQ ID NO: 10835 - DNA, 559 bp, Zea Mays
cttatgctgaatcgagtagtcgcgagcatgtcatgctgatttaagttactactaacttaaccaactgctccgtcggtagggtctagtggtcaccctgagttaagtaaacgtgggcatgtcacatcgccctaagtcattaccaacttaagtcgattgctccattagtagggcatagtggtcaccctgggttaagtaagcgtgagcatgtcacaccgtcttaagtcattgccgacttaagctgattgctccattcgtagggtatagtggtcaccctgggttaagtaagcgcgggcatgttacaccgtcttaagtcgttgtcgacttaagccgattgctccgtttgcacggtatagtggtcaccctgggttaagtaagcgcgggcatgttacatcgtcttaagtcgttgtcgacttaagccaattgctccgtttgcagggtatagtggtcaccctgagtcaagtaagcatgcaaattggcaataaacaattcgagtgcctttgagaatgaagtcattttattgatggtgtatctcccaattacagaatacaatgccgtccca

SEQ ID NO: 10836 - DNA, 459 bp, Zea Mays
aagaatgaatccgcacatgtctatcagcctccccttaaagcgtcccaaaggtgtaggtattgctgcagcccagacaatttaagaggggtctcaatgtcgctgacccactgccagttctcaagagcatgggccaccgttctggaagaaatagtctgtttcccaacattagccactatagctggggcaaaatcctagatacaagacccatccaaccacctatctgtccaaaataaagtattagacccatcaccaaccagggtaacaactgaagaagcaaagaatctcttgacatgttgctgaataggaaatttcagcccaaaccacggcttgttaggatctgttttttccaaccataatcatttagtttgcagtgcccaactttggtaatgcaggttagaaatcccaagcccaccaagatttaaaggccttgtgacaatttcccaagaaacaaggcaacta

SEQ ID NO: 10837 - DNA, 463 bp, Zea Mays
gtttcttcacgaggatgcacgttgctattactatatgttgatgccatgttgattataggcgatgatccagaccatattgctcatgtgaaggtgtatctaagtaaggaatttcaaatgtctaacttgggggcactcagttatttcttgggcattgaggttttgcagactcaaaatggtatttatctctctcaggccaagtacatacaagaccttcttgatcgttctggtcttagtgatactcacactgttgccacgcctatggatcttcacttatctcttcgtccgactgatggggcacctttggaggatccatctcgatatagacatcttgttcacagcttaatttaccttactgtcaccaggccagatattgctcatgcggttcacattttgagtcagtttgtctctgctcctacatcagttcattatgggcacttacttcgtgtgcatagatatttacgcg

SEQ ID NO: 10838 - DNA, 887 bp, Zea Mays
actggagatctttttgaatctgaattgtctctgcctcgatgtggttctctggtacttgcaggcacttacggagctgggacacatgaaacacattgtgaatatctgacatggattctggtaattcaaggcggtatgttgtgggtcccactctgccaatgacggaataggggccgacgaaacgcggtgctagctttcctttcatttggaaccttttgatcccacacatcggggagaccttgaggtatacaaagtctccttcctcaaatctgagttctctccgtctgttgtctgcataacttttctgtcgactctgagcctcaagtaatctcttgcggatcagggcaactttctcttcggcctctttaacaaaggcaggtccttccagtgtcctttcccctacattggaccacattaggggggtctggcactttcgtccatacaatgcttcgaacggtgacatcttgatactggcctgagggctgttgttatatgagaattcggcatacggcaaactggactcccagtttctgtcgaacgtcaacacacaggctcttaataaatcttcgaggaccttgttgaccctttccatttgaccatatgactaaaggtgataggcgatgctgaaatctaacttggtgcccatagcttgctgaaggctcttccaaaattttgaagtgaactgtgtccctctatctaacactatcttccgagggataccatggagtctaactatctctttaagatatatccgggcaagggtggctcccccaaaagtggttttcactggaatgaagtgggccaccttggtgagacggtctattattacccagatagagtcattccctttttgcgtccggggtagtccggttacaaaatccatgcctatt

SEQ ID NO: 10839 - DNA, 503 bp, Zea Mays
gtagtaaactactgaagcgtgtccggtcatcgcctgtgaccttggcacggtgaaagccacgaatcctttgcaccagtgctctcctctctctctggccgccagcgcgccattccaaattcaagaaccaccacccttgagccctataaattaagcgtgccatcagctccgctaggtaatcacacacccaacgcaccaactcgtgcctcagattgtccaccagagcgctccaatttgggatttcccccaaatctatcaagaacaccgctgtgtgtgagctcgccgtggccagctctccacaggtccaatcatgccctcctcgttcttgtttcagctctcttatgtactcttgatgcttctcgacccgaccaattgaattagaccgcgttagatcgccgggaacgcctcgggttatcctcagtttgcgccatcaccgtggacagcacgatttagagttagaactctgcaattgatggaggggaaatggtcgttaagggtaaaattag

SEQ ID NO: 10840 - DNA, 639 bp, Zea Mays
cggccggccaatcccaggtagcggcggcgttctgcccatagaccgcggcggcggccatggccggcacaagcccgagcaacgtccacgcacgagacttgaattgaactggtgcatcataggaaggagggcaacgagaacttcatcgacgatttcttacccagggcggacatgggaatatcctagccacggaggggacggatactgcccatccaacgatcaatccactgctgatgaggtcgacattgcccatatcgacgccggtgatggactccatacctcctggcgattacccgcggcgaggtcgagtacaccgaaagtcggcgggggcaaagaaccattgcgactacacctttttttcctctctctcccttctcggttcgctctcccttctcctccctgcacatgatgaagctcttgatgactctctgatgttgggcaggggtggcggccatcaatttatataccatgggcgacggaattccgacccatacttcctagctcgcaaatcggggtaacctcaacggcatccgcgcatcgcgcggggtttggcaatgctgcccaacagaaaagcggatagggaggagcggctttgattcttatactccgagaagcacgaccggaggaatcgggtccgagccc

SEQ ID NO: 10841 - DNA, 708 bp, Zea Mays
gttggcggtgtggcataccttctgtgttttgatgaagacggcgacgtaggcgcaaatctctggtggccgcttcatcataattaccttcttcattaaacaccgcatcatcgggaagacgtggacgaggaggtggtggtggcggtgcttgttgttgcgtctccaacatagcaagtctatcgacgatctgggacaatcgtcgatccagcctcccataagtcttgccaaggttcatgtcaatgaaggcatcatgcactgacttgtggaccatctcctccatttgctccttcaggagcttgttgtttgcctcaagatcttggcggctaacacattcatcgaagtctgtagggatccttgcttcctcgtcatcgcctgccatcgaaacacaaaaacagaaaacaagcggtgacggttatccctaataatttcactacacgctcctctcaggtggaacacaggaacacgctctaatgtatcttaccaagctcttaaaagtgtctgacgaaatacaagcaaaggatggtacaatcggaggctggttcatgatacttaccaagaggtagtgaaaccgcgattgcaaggtcaaatctgtattgatcagaagatagtatgtggagcttgggaggccaaaattaatatcaaggattagcaaaaatcgagtgcagattagcgaagttcaataagtgtccaaagcacaagtcacaattgctg

SEQ ID NO: 10842 - DNA, 632 bp, Zea Mays
ctaagcctacgccggcggtgccagagcgtatgccgcggcggcggacatcgccggcgagtgcccaaaccactctgagggccccaaacaaccattcgagcgacgctacacgcagagacgatgagtacaaacacaagggttggtagcataccatcgatcagagcagagtgggccttgcccacggcggatggcggaacaacgactctgtaggagtccagggagcaatttcacccacaccagtcgacttccgcgcatggccgccacattcgcgtgttctcagtgcttgagcgaacgtcctgggcatgcatccaacctgcgcacggcagtggagtgcgctgcccacggagccatgtgggtacgccgccatgagttctcacaagcgagcgacactggtgaacacaaggccatggtggcgccacttccctcaggatctacgggtctacatgctctttcggtcaaggagggtccacgaccctgggtatttatccgtagcatcgatatggaaggtggagtccacccgagatcccggcgactcacaaggcggagccccgcacgaaccgaagatctagggcgaacccgggtaacacggcgcacgatgcccgattggatgaggggaaaactccggtttatatggc

SEQ ID NO: 10843 - DNA, 804 bp, Zea Mays
cagtcgacggagtgaggtgaaggggagcaacaaccatcgcaacaatggggctaagagcggcggcatctaggcctgtagcagcacccagcggggaggtggcatctgcgagagcaatagggtcggtgcccaggccttgttcaccggagagcggcgtgcccagggcaccaaggctagcagttgattggatacccagaccaaagttagcgagcacgaggatcaaccactaggtagtccaggggtggcttagggcaggaaggaccaccgaaatgtcgctcggcttgcacgagctggcgagtgagggtgttcacagcactgcactcctgttcctaagtgagggcagcagcccactcgtgcttctggacagtggtggccttggcagccacaagagctgcaacaagggtggagtgggcagcaacgatgtcaggggaaggagcagtagtcgacggagtgaggtgaaggggagcaacaaccatcgcaacaatggggctaagagcggcaacacctaggcctgtagcagcacacagcggggaggtggcatctgcgagagcaacagggtcggtgcccaggccttgttcaccggagagcggcgcgcccagggcaccaaggctagcagttgattggatacccagaccaaagttggcgagcacgaggccactgtagtagggaggcctaggccgccagttgcggagcctatgcctgcaggtaggtcgtcggccgattggggaggagagggggcggcgaagacagacaagacgtcagccaccgccgccgtcgtagccaggagcaaggtggaggccgacacag

SEQ ID NO: 10844 - DNA, 509 bp, Zea Mays
atggaaatatcacgccgtggttgaactccggtcactattttactccggccgccgtacccgagtatgtcacggccgatttggataggtttgctggagttagccacctcgcggccttgcgccacatgcctcggcatttaccacatcgcagtcgctcgcgttatgcatgttcagtgatcgtcggtgaacccgccacggtgaaagccactaatcgcttgcgccagtgcaactcttctctccggccgccaccgcgccaactccaaattcacaggccaccgcccccggagcctataaattgagtgtgccttcgggtccgtaaggtagtcaagcacccaatccaccaagccgtgcctcgaattgctcaccaacgagccccaatttcggatttcccccaattcggtccgaaacaccacgccttgtgacctcgccgtggtcagcgtgctccaggtccgctcatgccccatgttctttcgtttcagtatccttgtgtgtccctgatgctcctcgaccca

SEQ ID NO: 10845 - DNA, 410 bp, Zea Mays
tggcccgcactcttttcctcctggggggtgaggtttttaacgaggcggagccatgtaatatacaagtgaaaaatcccccgcaaaaacatgcgtcgaaaaaagaccgcgacgacggtcttcgacattcgaccaatacgaagtcaccgcgaggctcagcgctagccaccctcgcgtgcgacaactccgtgcagaagtcgcctatgggtgcagccggattagcacaacaagtgcgaaaaatcaaagtctaccgcgaagacttaccgtgcagaagtcgcctaagggtgcagccggactagctcagcaagtgcgaaaaaccgaagtccactgcagacaccatccgcgcctaagttgcccgagggcacagccggacgaagcgtaacaaaagcaaaacgaccacaccaaactgtccg

SEQ ID NO: 10846 - DNA, 735 bp, Zea Mays
gtgcgtcctggttttcgtgcgttgtcctcctctccgcatctctaaaacgaactcctgcatgccacacgtagaaaccgcctccacacgccatgcgtcttcctccccccgttgtcacaaccttggagtgcgtcgtgaggataagtcctcgcaaacttcttaccgagctatacgaggataggccccgtgaacattgagtgactcgccacgccacaacctccgatagcgtgcttgccacgaccgtcgccactataaatttctggcctctagctctccgcgccagcgcagcgaaaatggttaccaccactagcggcagggctcgaatcccccgaggtggcgggctcttcagatatctgtgtcgtcagtctggtgttggcgtctgactgtttgccatgacacgtcgaggttagacgaggacacggagatatgctggtcggtggctgtggccatgggctccctcgctgtagcaccggcgacgaggaggctgtactcgagcgacgtggcgcgggtgtcgttgcacgtagggaggcgctatccgctctacatcacggcccattgttccatggtagttaaggactcgtgccaccaactctctgactctaacgatcaatcgatctgcttaggctgggaggtctcgattggtagctgcaagtggagtgctggcgatattgatgtgaacgaagcttaggagtcatattggtgcgtatgggggtgagcgatcaacttcttgcttgcccg

SEQ ID NO: 10847 - DNA, 341 bp, Zea Mays
cggatctcggagacaacgcacgcaaccgagcctgcagtgcactgctccatatatcagtgcaggtgcagtaccaaaaacatcagacagtactagcaactgtatcgcttgtcatgtacgtgcagtatgaccgcatctgacttcaattcttcgtgcgtgcctgtgccttggctggctccagtctgaagtctgacacagtgacacttcatcggcagttacactgatgtcaaacaggctaggactctgcagcctctcacgtttccgtttcagtagtgctaacttgacaagttgacatgcatttcgttgtagtagaaacagtatcgcctgtaccaagcactatttat

SEQ ID NO: 10848 - DNA, 449 bp, Zea Mays
cctagaaggaaggagccgttgcaaaagctaccgcgctcaccattcctgtagggcgccacgaagggaggacagaggctactgggtcgtcttcgactcccgccgcgtgggtagagggtggcgaggcagcgttgcctcctccaacgctagtcgatctggcgacgcaccgagagaaggtccgatcggtggccacgcctcctccagctactcctgtaccggcagcgacaagcagccgcggagtagggcggttacccaagtgagcttttcccggtacgtcgccacttgctttgtctagttcttctttgtctctgtttggggttttgatttggttgatcctgtaacgcgtacgtgccaggcaagacggtgaagggtgtgaagtgcgaccctcatggcgaaggggcgcctcgacctcccaagctcttgtgtcgtcgacaccggctagactgcttgtg

SEQ ID NO: 10849 - DNA, 567 bp, Zea Mays
acatgatcgatattatcactggacgtgtttgattcctatatggtttcataaacatgcttccctattcatgtatctagtgtgacattcgatggcccaccaaaaatgttcagtgcactggtgaggagtgcctttaccccctctatcacgtggatctggtctctatttcttatttgttctctcaagcttttgtactcatatgtcgctctagctcctttgtgtgcatcgagcttatcctcatcgccaacttgtcatgtcgttccacacaaccacatctgactttatgagctatgcatccctgtcgatgttgtgtcgtcgcaacgcctatgttgtcctatacagagtctgttattgcatccacttgtatttcactgcctctaagattattatacaccaatgtgcctccctaaacagcatgcatgactctagccagtgcacctccattgttgatccatcacatgcactgcatagtgctcttcctacttgtaccactatactattcacccacctaccttgtgatatccagtgagatagacaattgatatgaaacacagaaaagtcttgaaacaa

SEQ ID NO: 10850 - DNA, 589 bp, Zea Mays
gttcaaacttgtcgccacaacaatagcacagaccattctgcctcctatactccttcaccaatcgctctttagacaactcgggtaaggaagcagaccctctagtgtcagacctggacacagtaccccctagtcgacccggactgaccaacttgaatgatttctgtcgttgtttgtctaagataccttgttggatcctggctaacaatgctgctcgttccaccgaagctggcaaatgagacttaaccggtccctgcagctcttgcttcaaccccttaatgaaatgggccacatacaaagtctcatctaaatcatgattatggacagaagtggcataccatgcctcatcaaacacctttttgtactcctccacagatccagtctgcctaatctccagtaaggactgcatagcttgtgaatactcctccgacccaaacttcagcatcacagcttcacaaaattcctcccatgaacatggaccatactaaattttaaaaatttgaaaccacctcttagcattcccctccatgttcaacgatgctgacatcacccaaaccgactcaggaacccgatacaaagtgaaataatccac

SEQ ID NO: 10851 - DNA, 554 bp, Zea Mays
ggcattctaggcagttcgttagggaagacatcggcatactcgcagaccactaggattttatctaagggcaattcaatcatggagaaagcacatgaacgtgcactcctttggttgggtaggtacagggtaaactgtccatagatcgggtaatggatctcaacggctcgggtcgtgacatctaatagaacttggtgtcgggtgaaccaatcagttcccaaaatgatgtctacctcctctaatgccaagatgataatattggttttaatggttgcacttcctagctgaatggggacctgctaatttagttgatgtgacacaactttgccactcggggtagagatcatataggctcccttggtgtggcaaaatgacaatcaacatttggcactgaacttttggctaatgaaattatgtgatgcgccaaaatcaaagagaataattgcatgttgattaaaaacggaaaatgtaccggtcatgatgggtgctccttccgaaagatcgaccaatgtggtgaagttcaacttgtcttgcctcacttgcaccttttgtttctt

SEQ ID NO: 10852 - DNA, 1373 bp, Zea Mays
tacagagccttatgaatgggctacgtacccggaatcagcttaatctcaaaagctgcatcacgctccagaggaatgcctaaaagctcttccggaaacacgtcagcaaagtaacacaccacccggatgtcctgcacccgcaaggcagcctcaccctccaccaccatggagaaaaagattcccgacttcctggaccggcgatccgaaagcaattgcgcaaggataacgtgaacttaggggaacttcccaagaataccacctccctacctaatggcgcctgcaataacactgtcttccaaaaacaggatataactgcgcaatacggggataaccaatccatacccaagataacatccaatgcccccaaggaaatcacaaccagattggccgaaaaggcctcatcagcaagaatgacggaacactcctgacaaactgaacagctactaatggagccattagcagaactaacaaaaagtgggtgatccaacctcggcaccgaaagaccagcccgcgacacaaaatcctccgaaacaaacgaatagctagcgccagagttaaaaagagcatgggccacaaacgaatcaactgaaatcgtacctgtcaccacgtctccttgctctctgtcgtcccagcgggtagcacaaaagccccggaaatacctgcagaagaggaagctcccggagtgaaattaacagaagaaccccactgagccgccgggtgaggcagacgcggagctccaaactaagacgacataggagtagtcggtgcaggagtaggcgtagccagatactgaggaaaaccatgcatcggcatgaactgagaagtcctaggcacataaaactgctgcggaggaagtggaactaaaaactgctgctcagcacttgacatcatgttgatagtgccctaagaagaggaggaagttaccggctcccatgtgagcttcccaataggattcctcctacacaccacatccttgtggtcttgactgcagatagaacacctgccactccactagcactctgcacggcgatgcgcatcaccacaacagaaacacaccagccccagcccgggcttaggaacagcccgaaacctctgagtacttcctcccgaagtacccgagtcagaagatttgccacggtaaggatggtggcgctgatgctgagacttgcccctcttgtgggctggacctctagtgttgcccctcctcgcatcctggccatgaggctgatcaacacccgaagacttctgcgactccatggtatactgatgctgcatctccacacccagtgcctgctccactgtagtacggaagtccaccaacggaaaggctcccaaggcatgcctgatagaaggtttcaggccctgacggaactggt

SEQ ID NO: 10853 - DNA, 597 bp, Zea Mays
aaaatcttgatggggtactcagcataagtcaggttatcttgaacgctaaggtcttccattggtaactgttcttcaggtaccctgagacatttcttcagctgagatacatgaaagacatcatgaacatccgcaagatgatccggtaactccaattgatatgcaacctctcccactcgctttaagattaaaaagggtccaataaagcgaggggacacctttcctttgactttgaatcttctcataccccggagtggtgacaccttcaaatagacataatcaccctccttaaactctagctgtctcctccgagtatcaacatagcttttctgcctggattgtgcagttctcaaattctcccttatttgctgaacttgttcctctgcttcttgtataatctcaggcccaaacaactgcctttcaccagtttgatcccaatacagtggagtcctgcactttctgccatataaggcctcaaacggtgacatcttcaaactggtctgatagctattattataagagaactcagcgtacggcaaactcttgtcccaactactaccatgctgaagggcacaagcgctcaacatgtcttctaatact

SEQ ID NO: 10854 - DNA, 721 bp, Zea Mays
tcccttttcttatccacggccttgatcttcccatttctcccttccttcatggtctccttgacttttaggatctaaatctaactcacctgaatcccaactctattctgcaaatttttgtctttgttcatctgtgtgaggcctaccttggaattcttcctcacttcggtttgtggaagtatttgtatcactgtcgtcctggaatggctgggggacaacaccagctcgtgggcggtgcgagtctagagatgtgccgtgggaggaaaacagaataccttgatatcccactcaaggatagcattaaaggatggcgtttggagtgtttcattgtggaaaaccatggcaagtccctcccgcctcggtcggggagacagtcggatgttcgtactccaagttggattgagtctcctacagacttggagataacagaagccaaggttctgcttgctgaaatttgtttgttgaaggagagaggtctgaccgctgaagctatggttgcagactttgtttttaagaatattcagccactgaaggacagagcatacccggcttatttgtatagtggtgtcaccgactcaacccgagttaccaacaagaggattcttgttgtggatttggtgagccgactggagatgatcttgaggggcgaagtatcaaatattggtgctcctattgcatattctgcttggaatcttccagcttctaagtcttttttcaattttgt

SEQ ID NO: 10855 - DNA, 1030 bp, Zea Mays
gcggatttatgctacgaccggtgctctcgagcgacatacaccggattgaacccatcccgagcctttcccccaacttaatttcaagaatggcgatctaatttggtctggccacggtgagcgcgcagatgaaccaaagaaccacgcgttcccgacggtcagtggacccctagtccaattggacgggtcaacaagcatcgtagacatgtgagaaagcttaaacaagggagagggagggttgggctgaccgggaagggagctggccgcgttgaggtcggtttcgggtggcagaaactcgaattgggggaaatccagaattagagctcgctggtgatcggctgggggcaatactgggtggcttggtgcgtgaggatgttgcgaagctagccgcgggctcaatttataggaggagcgagtggtgacgggtaatttgagcagattgcgctggcggccggagatgaagaagaaggcactggccgcgtgagtgcgtgtccacagtcgtggcgagctcaccggcgacgatgggactgctatagggagtcacggcgacacggtggtaagactcggacacgcggcagacatggagatggcacgacggcggtgagcagctttatccacgacggtgagcagctttatccacgacggtgagcaaggggaggagtaccgcggctgaccggggtggcttccagcttgacggcggtgaggatctttcaccctgagaggttatccacaagtccggtgcacgaatccaaacgccggcgacacgaatcgcggcggagggatccgtcggcggtgaggacagccgcgctggcggtctgatccccaaacgttactgtaccatggcgatttgtattcagtccgtctgacagacaaagtttgggcctcattttctcacaaattcacatggtaactaattcgaggctctgcagtaaagttgtagactaacataccatctccatctttgttatagcagctatgggcaaattcttaatagattagtcataatttgtctccaaagatgatccaatgtcac

SEQ ID NO: 10856 - DNA, 271 bp, Zea Mays
ggctagattgcttagtaagaacgatgcatggtttcaaccaatttggggaaaatgagctcgttcacccctagtgtagcctatcatgcttcattatcttctgatcagtagttactgtgtgttttattatttcatacatattctttagtcacacttaatgttgggtgctaagtagttgcattaatattgggtgctaaaatctcaagtcaatttcttatgtcttcattcatgtgatgatactatcctagactaggtatagaagataagacactcc

SEQ ID NO: 10857 - DNA, 505 bp, Zea Mays
aggtcctccgcaagtgagttgaaccggcgtcggtgccggtgcctgggtccctcgcttcagcttccgcttccggctccggcctcactgttgttcctccctgcagtccgcggagttgagcaggttgtggtagctcgccgagtacgaccgtcccagcggtggtgagtcgtgttgggtcttgaaaactgatgttgctgttagctccctccctgcaggttcatcgacaagtctgggactcatgtcatcgacggggtcaagatgggaggcaaggacgtggtgtgtgcgtgaagcatctcaagggctctagccttatgtagagcgacgtgtagccctgctcaaggagctcgccggcgacaggttcttggaggattccacgacaaaatggcaagttctgatattcctcctctgaaatcccaagccccagttgatgacagtaaaaacagtcaaattttaacatctaagagttgttgtacaaaacaatttcccatgcacatgaaaattcaatcaa

SEQ ID NO: 10858 - DNA, 730 bp, Zea Mays
tgagaggggtctagcattttcatccatacaatgcttcaaacggtgacatcttgatactgtcctgatggctgttgttatacgagaactctgcataaggcaaactggactcccagtttctatcgaacgttaacacacaggctcttaataaatcttcgaggaccttgttgaccctttctgtctgaccatctgtctgggggtgataggtggtgctgaagtctagcttggtgcccatagcttgctgaaggctcatccaaaatttggaggtgaactaggttcccctgtctgacactatcttccttggatgccatggagtctgactatctctttaagataaatccgggcaagggtggctcctccaaaggtagttttcactgggatgaagtgggctaccttggtaagatggtctattattacccagatagagtcgttccctttttgcgtccggggtagtccggttacaaaatccatgcctatttcctcccacttccattcgggcactagaaggggtttcaataggcctgcaggcttctggtgctcggctttcgttcgctggcaagtgtcacaccgggccacatactgtgttatctctttcttcatccctctccaccagtatctggttttgaggtctaggtacatcttggtggttcctgggtggatggagtaggctgagttgtgagcttcatcgagcaagacttctcgtgcctccccttttggtacacacagacgattc

SEQ ID NO: 10859 - DNA, 558 bp, Zea Mays
cccggagacatgcatgtgttcagtcagtccatctccatggaggctccacccgccgctccagctccagggaccagggctaataaggtacgacgtggcatgcacggcctcgtcttagtaaaccgcaagtactcctgacgtggcatcgcaaccgcgacgagcttcccgccaccgcccatcacatccgtctacgtactgtaggataggaaatgtgtactagaacagaaggtatctgtactcctgtcgtgtctcgtgtgtgcgagcacacagtttgttgttggacgtcagtgtcaggtctcgtcgtcctcacgcccttgactgcaatttgggagcggtgccggtaccggtacggcgctggcccaaactcgcatgccgcccgagaccgagcgatgaccaacctagaagacggcgaaaggccgctccctcccagtcccagatgcggcatcagcattcagcaatgcaaaagaggattcgcccgaccccgacgacctttcccgctccttcctcccaaaaccctactactacccgcctgcccgctttccagttgcaggccagcctgcc

SEQ ID NO: 10860 - DNA, 662 bp, Zea Mays
tacacacagacagttcttgaaccaaagaactccttgttcatctgccctaaggtctggaagttgctccttgcgagctctttccataagtctcattgtctccgtgtctaggcgttgagccttgcatatgagatcttctagcattggcttgacttccaggctaccgttgtctcccagacatgcatttagctgagctgattccttcttccaatcttctaaaaagttgggcccctttatcccgaaaggttttcggctgagggcgcccgctaccacgttggccttcccggggtggtaatggatctcgaggtcataatccttgatcaattcaagccatcttctttgacagaggttgaggtctggctgagtgaagatgtacctcagactcttgtgatcggtgaagatgtggcatttgttcccaatcagatagtgcctccatatttttagggcgtgcactatggctgccaactccaagtcgtgggtggggtaattctgctcatgcggcttgagtaagcgggatgcataagcaataattttctcattttgcattaagacacaccctaagccttgccttgaagcatcacagaagatgacaaaatcctggtgtatatctggtagtgtcaaaatgggcgcggtcgtgagcttctccttgatgatctggaaacttc

SEQ ID NO: 10861 - DNA, 894 bp, Zea Mays
aatgaataaataaatatttatacaccttgcatcatgttggaatttatttgattgtgcatttaaaaataataataataggaatatacaaatggtgaaataggtatttaaacctaaatttggaaattaagatgtggagaaaggaagaaaagaaatattataaaattcataataaaataatgtaaactctacccatactagtaagattaaaatctacctttagtttgagtacaaaattcatattcatagttgaattcaaatccaaaacctaaatatgaaaatgagagaaaatagaaaatagaaatggaaatagaaaagaaaaaaaagaaaacccgctgatgggccacaccttcacattccggcccacatctcccatcccctcgcgtagccagcccaccagcgcgcctcccctgcggcgtagcaaaccctagccgccaggctccacatgtcgcgtgtgccctgtgccagtgactgatgggacccacgtcgtcagccaaggtaccgcgcgcgcgctcgagatctcctttcactgtatcgcgggccccactcgtcagacttacctcccttctcacaacaacctccgctcagcacgccgtgaactccgagctccgtgaaccatggcgtgatccccgcgcggacttcctgacctcggtgcataagaacggatccgcacccgcccctcttccatccgctcaccctgttccaagccatggggcactgtgaatttctcaccattgatgaatctctgccgccggtccgccctgcgccatggctggccctgttcccgccttcttcatcggtgaggcctcgctcgcgcttccctatggtcatcatgacgttttgctctaggatccactaggaatcgaacaccggaaccttggtgcctgctcatcggcc

SEQ ID NO: 10862 - DNA, 409 bp, Zea Mays
ccagcctctcgcgcccggggaggacctcgtggaggcgagcgcacgctggacgacatcctcgacgctcagtgcccgtaccacaaggacatgtgccacactcttcggaactgccgggacttcaagcattccgtcgggcacggccgacccttccaacctctacctcctcctccgccgaggggaggaccagaagaaccacgacaaccccagcagcaggaggatggaggaggaagagctttcccgcgcgttgacagggaggtcaacgtcatcttcggcggacacggatcgcaggagaacagaagacaacaaaagctcaacaatcgccagatactggtggcgaccactggtcctcccgccccgtaccggtggtcagagcacccaatcactttcacccgggcggatcaatggctca

SEQ ID NO: 10863 - DNA, 781 bp, Zea Mays
acggaattcacgttgccgtcgacgtcgggtgccggtgttcggatcagaagcctgcgccgggttgctgcgaaggtggtcgtggcactggtcggccggattgacaagctgagcgaccttaattgctcgtcggagtttggcttgggtgccgcgccgccctgcaccgtgaacggaaaccttgccgccgtgaaacaaggtaaatcaaccccctagtgcgttcgccatgttcttctttaggtgtatgcgttgtttaatttcaatttcgtggcgtgggtgcgcttgtggatgatcgccggggtgctccgtcacggggaaacttgccaccgcacggtagatcggctctgaggttgacgatggagtgtgaaccgttagattctaggcgtacgatccagattaggagagaggtaccgattcgggtggacggatcgtgcgtcgtctgattccgatcggtcggcggtgaatcaatgtaggttatttaaatctgagacgttgaagttctatcgtgcggctcggattgggtaccgtttcgatcgggattgatttaatctgcgccgcccattcaagatcgggcggtcaggattgcttcataccctttcggcttggcgattttgcaaaagagaccccctactatactagtatcaacccgcagtccacctggtgggtcgtctgagtcttaggattagttacacctaggcccctgacctttctggaaatcgaggcccagtccagacatgtttaaaaacagagaaataatattagaaattcatttttaatacaaaaacaa

SEQ ID NO: 10864 - DNA, 819 bp, Zea Mays
atcggtgggagcttggtcgccggcaattgctcgacggagcagggatcctgccgctgtgcggtggtctacgtgggcacatgattctgtacctctatctcgggtaggtgctctacctggcgattcgtgatgctctgcgcatagtgtagcattctcggaatttgtcaattgggcttcgggtgtgctggggcgcctatcgtcggtgtcggtatggcgaggtcgccgtcgcacgcggtaaaacggcctcagctcgggatggttagtgacaagtagttccagctcgaatccgttgtcacctctacgattccgtggaccatcagtcgaactcggacgtggggaaaaccggtcatccatgggcggtcgtggcactgccgccagtgcggaggccgccatggtcggtctcggtggaagcttagtgaaaggtctagggccgtagattgacccatggatggcttagattgagcaagcgtactcgttcacacaaccatgatccgcaccgttggatcgatttctggtggctgagattagttgatgtggtaccccttcgattcattaaaccagagccgttgagcaccgatcgggcggctcacaggagccgataccgcttcgctggctgattgcaaatgagcccttcggttattagataactaacccgccatcctgtgggtattattcactgagtctggtttaaattacccgctagcccctgcagtttttagtattcgaggcctagtccagataattaataaaaccaggaaaatagtttagaaaatggtttttagtacaaatttaattgcagaaactagtttaattcatagaaaa

SEQ ID NO: 10865 - DNA, 909 bp, Zea Mays
tagctctccaactttgctgcagagcatggagtatgttcctattggaatttgtgagtaaatcatgcctgaatatcgactgtcagactaactgaatcccaatccaatggtacagtagcctgataaagatcaaactgccagcgctgctcgctcgccgccggtgacctgcctgcgctgggattcgtgctgttgtcgcctagattcacgctcgggtgggtggataacatcgcgtgaggaaagatatttgtcgtcggtgggctggaggtcactccggtgactcaccgtcaccatctcccttctgttttgcggctgagcagataagctcgccggggaaccaccctcgcacggccttgcgccacgtatccgagtacctccaccgcatcgccatgattcgttttagctttccgtcgatcgccggagcaattgccacggcattggacacgaagcacttgcgccagtgaacgtttagtcctccgaccgccgcgcgtccttctccaaattcccggccaccgttgatgccctctataaattgagtgcgccacagtctccgtagggcagtaaactatccagccaccacgaatcagccgcatccatttgctagaatccgcgaattttgaattcgccccaaatcaatttccgtcgccgtgaagaacagctcgttgcggccagctcgattccggttagctcgcgtccctctgttccttgttctagcgtcctcatgtgcccttgatgctcaccaaaccgtccaattacactagaagcccacccatcgtcaggaacatccccctccatccgcaaccttcacggtcaccgtggccagcacaaccctgttgatcattagtgaaattaagttgggggaaaggtgtgggatgggtccaattccgtgtccgtcgctcgggaaccctagccgtt

SEQ ID NO: 10866 - DNA, 396 bp, Zea Mays
gacgtaatagaattacaaactaaaagttgcttatcaaataattacaaaactaattcttcaaacatcatttcatttgagctcaaatacatgactttaaaatagagaaattgttgcagggatctgaacgaaattaaatatagcttgcaggggtagatcacgattgattcatcttctaccttcactgtctcctatgtgtagaacgatgggtgagcaggaagggtcgtcgagcagaggggtttggccggtagcagttgcttggggtcgcggcttcactcggggcaggtattcgtcgaaggggactcgtcttcgccggcgacggggaagaagcaagtcctccagtcacagcgagcggtgcgatggcgcgaacacacacgcaaacaagcaagaagtgaagag

SEQ ID NO: 10867 - DNA, 867 bp, Zea Mays
cattctagcactttaccatttcttagagttaaattaattaaatgaggactaacaagtagacttacaaattttatccaaatcatttagtgcactaaaattacaacaaccaattaacaacgtattcttcacgataattacccaacgatttgcgttttcaattagacctcacatgagcactactactttttacccgtgcccataaccatacccatttagaccacaacaagcaattcaccatggctacaagcttaactaaagtcatctaacgattcggctaactagagcaacaatataggccgctatacatcacacacgtcggctagtctgttattatcgaaatccgagacacaacatgtatagaaaaatcacttaatgcaatcgactcctgcttaacacgagttggctaatgacgtgactatttcccaattaccaacatacaccacctttcgccatttttggataacctgcgccacacacagctattgtaatacatctcaagttcattcaaccccatcagtagagcactagcacatttcagaaaatttcctgagactacgacaacaaggcattgatctcatcatgcacatcaaagcatcacaagcgtttttacggaacctatcggttaacttgatcgacacactacccatgttccttgcctttcaaattttatcgcccaataggaatcatccccatttgccaatgacaccaaccatacctactgacctattgtttaccacccgagcatagttacatgccgcacactagtttctaacatgattctcgcataactcgtaattcaactactcactaacaataattcacgcacgacaactaccacatcgactaagagttctaagtattaaacat

SEQ ID NO: 10868 - DNA, 1133 bp, Zea Mays
gtaaccagatgatcaattcacttaatgaaccagtacctaccctggccatccgatctaggatcaacgacccgaaaccttccacgccaaattctcttccctggccctcgatctctcgatcaacgcttcagattctaagtgctgaaagggtatcctcacgttctaatctgagccgtttgctatggaatcaacggccctcggcccgtcatctacctcatgcctacaaccgagctccccacgtcggcgctccatccaagcacggccagtaggggcctcggtaccctaatccaacccaagttcggtacatacactggtgaggacaaggagcatggcatggaagcattaccgatgtcaggatttgaggaggtgctcgaccacgtactggaggaggtccgccacgcccaacgacgacaatgcaagcatcgaagctcccgtcgacaaacgaaccgaggccaaccatcacgcgctcgttaaagatccacacatgcgcatgatctctctctctccctaaccttctctctgccccgctcgactcaccactttccccgacgttcgtgtagaccggaggagaggaaaaaaaagggggtcgcggccttggatttatacccagggcggaaggagaaaatgtccgagcagggaagggcacatgcttcggtgatctcggtgatccgtttgccacaatcttcgaaccgagcggagccaggaaacgtccgccgagatctccgctgcatttgtttttctgctgcgttggcttcggggtgagcgtaagagggaaggtgtggattctgttatagggctatcgctgccatctcggccccgcatggaagtggcaggagcacaagagcgcagagtggctggtcgtggtgactgaggggagaagctagcgccaatggcccacctgtaagcgccataacaaaagaaaaggagaggagaaggagatgggctgcacggtgagggttaatgggctagccagttagaagcaacccaattagggttttgtttcctttattctttttcctgctttcttattccaaatttctatttctatttccaaatttaaacttggttttggatttctagtttaattaaatgcacaatcataaggaccagcatgagaggtcaatatatttatacat

SEQ ID NO: 10869 - DNA, 494 bp, Zea Mays
tccgcgattcagggctcttcgaccgttgcacggtagacgcgtggccacaaacactgctcgtgagcaatccagctatacgtcttcgctgcggaccagaaatctcaattcaatccagctaagtcgtgactcgtgacgtcctccagccctgactcacgattctgcatctgctcgcgtcgcatccgcctcaacgccgcccaacgacctggatcctggcctctcgccttcgcgttcgcactggccggtccctgcgccacgcgtcggccgctggtcaccagctccgtcgctgcctcaacaactttatccggtcattcgagggcgtaacatcattctattcgacttccgctagcgccaagacctacacctcggcggttgccacgtcggtgaagaagccatactcactcgccatggtcgcaggcaagcccatccctcccattcgccgtctgcgcttgatctaggactaggagactaggctgagtctcgggccacgttgtcct

SEQ ID NO: 10870 - DNA, 885 bp, Zea Mays
ataagtctagggtcttctacgtaaagatctgggctcattcgcaattactttgcacacgccaaggatggcgggttcattctggcaaagtccggggactcttttgtaagatagccgtagcgaaggggtatctctcgatattaaccgtccgattagaaatcaacgtcgaggatcacataatatttttaaacgaaccggtacgctatatgaaccgttggatcagggatccacggttcagatgtttaaaacaccagatcaacccggggtcgctcatcccacgatcaacggccgtgacgagtcctagccgaaccggtatctacttctaatctggaccgttggattcggatcacgcgcccacggtatcatcttctcccaccagtcaaactcgcagtcaggaacggtgcacagcggcggcgccatcaccggcaacacggtcggtcgaccctcgctgccccaactaacacatgatatcgcggaaaacaacgaggaaggtaaggaggatctgatggtggtcaacttatgggggatcgagcagtgttgaacttagtccacggcacggcggcaaggggaaaggagcttgccaccgacgaccacgccaagtccaccggtcggccactggcctgctcttatgaagtcctcccaaacccccgagccaccgcgcaagcgtagattgcaagaggcggcgccaaattctctctcctaccctcgattccacttctccatctctctgctccgatctcagtgctccagatggtggggaagagggtcacggtatggttttatagacgaggatggggacccgcatggccggcccgccctcgagatcggcgcgttttgtgggagaatctgctgccgccatcagagacgatcacgacaatttcggcgggg

SEQ ID NO: 10871 - DNA, 440 bp, Zea Mays
ctttcacatccaccacgaaaaaggtcgttgggacagttttgctgcccactgtgagttcaacagacataatcccttttgcttgttatggctcccctgaaaacccacttagattcatattcgtcttaattagttcactctctttgtatcctaatttagaaaacacggatagcggcattacatttacacctgctcccccatcgaccaacatgccccccattggcttcccatcaatgtgaccacgaacatataatggttttagatgagatccctgctcatttgtttttcaaacacagcacactcagcccccaatgttagctcagcctcatctccctcttctgctctgaatttagtaggtaaaacaaacaccatgtttatatccatgtccccttgtgcttcagcgatttcttctttatcagaaccactgctgctatcatcatctt

SEQ ID NO: 10872 - DNA, 1315 bp, Zea Mays
gcggaccctttcctacgatggttcgtcacgcaccaggcgtgagtccatcggcctctctggcgcatgtgatcgcatcggccaggtgtgcacggggagcagatcttcttctggtcttggtgtagatctcctggcctgtcgtgcccttgtctcgtataatcgaggcaaagcacaggaataggttgtggcatcggctgaagtgccactagccgtcgtgcccttgcctcgtctaatcggggcagagcacaggagtaggttgcggcgtagactgaagtgctactgtgtttagggacgctcaggtgacgtcatcctgtcttctccgcctatcacccttcgccttggtgactcgcacgttacagtggggccatgatggcatcagcccatgcggtgcagagagtcagatgtcccgcctctgtaacacgcaatccattgtgtcgtccgtgtacttcggtcgtagcgcccgccctggagtgggcaggtatacgtcttatccgcatttaatgctaaggagcattgtactccgaaggtcgatatcgggtttccccggtggcccatgctatgtgtcgtaggatacgcgacagcagtgtgcttttcctagtgaggggagcagcggtcggcaccgctcttccttgtgtcagctccaatttgccacctcacctagtaacctataaaaaggtgtccctgcatgtggccttattatggtgctcaacagtgtatctgtgggtcgttgttccgaacgttgtcaatcttttggattttgtttctgaacctcgctgagcagggtctcatgacctgtcccccggtcaggataaggcctaagcctttaggggctagtcctaggttctggaacaaccatcctaggatggtggagtgtgcggtcttagggtgctggaccaggctaagcggttacacggatccggattacctctgagaacgtgtccctctccccccggacctggcccttcatgatccaggccttatctgttatgagggaggatgagaaaccggatgacaaagtggaaacataatccaggtttcatgaatgtatttagaaatcagatcccacttcgagtgtgactataattaattaatcaactaatccttcaatagtagtgcttattctagccaaccctactttggagcatctcctgagtttggatgaggcctaggcctctaagtattcatttcgagatactcggttagctgttccaaggtgatggagtgtgttggcttagggtgcaggaccaagctaagcggctacgcggccccgaaccatccttgagaatgtggcccttttcctggactaaacattcggttg

SEQ ID NO: 10873 - DNA, 387 bp, Zea Mays
agcgccatggggaaaaagaaggcagttggagcttggacttgagccatggaggtgggatccggctagggggaagccatgccgacaccataggaagggggctagcggtttgaggaggagagcacgccatgtagaaggctactggggctgctgcgtttggaaaaaaggaagggagtctggcgagttggagcaagagaggaggcttaacgctgtataaatagagggggcggcttcagccattggtgggcgtgggagatgtgctgcagagcttgcattccttagaggcgaagcaatgaacaggtggaaggtgctaacatagctactttgggcggatgtttttgtctttttccctttggattcggatcttggtcactgtaggagatattttct

SEQ ID NO: 10874 - DNA, 438 bp, Zea Mays
gctagggctccgctcgaaggcggatgtaataacttttgcttttgtaaggtactttttaaatactatttatcaagcagtattagcacttatctgcatactatttgtccctattgcgtgtggtgttgccgactcctccctggtacttgccccctgggatgcacgctcgatgtgtcgaggttagataccagcgtacttgaaagagttggcaacaacccccaggaggtagccccgaccgggacctggacctgtacacagcttcggctagggggcgttagtagcacacccataggatccctcgtctgacattagccatcctttgatacatgctcgggacttgcaggatttagtctgggaagccaagttgtgtgtctggaccccctaggtcacggttctagatactaggacacccgtcgcatagtggtggagcgtgcaggctta

SEQ ID NO: 10875 - DNA, 1002 bp, Zea Mays
gttcgcctcccacttatgacctacgagcccctcggcctgcggtgcactcataacccatcaagcctaaatctgagtacgccagccatctacagaacccgcaatacaacgagacacgtcgagacctagactacggaggccaagggtcagcgcaacagggaggcagtaaggatggtgctacggcttcacgctgccaataccacccgccataatggacgcagttagggaagcccaaacagtcggggcacaagacaacaagtaagattcactggggtagaacatatcgttttaccacgggtcggtagctccttctatgaaaaggagccgataaccgatccccttctcagtctataaaaggaagggttggagacgaacacaaaagaggacacacacgcaagagacactcgataacgccagaggacgacggaggccagaaccaaggagcgaaccactgcgacgtccaagacttagcagagagctctagtccagtagtccttaggtctagccatgcatttacttaggagcactttttccctctctcgcccgcttgtaacccctactataagcattgagcaacgacgatgtcagtagcgcgagccaccgaagactggatgtaggaacgttctgctcaaaccagtataaaccttgcacccaccgaacacatcatccagaacccagaacgcacacatacaaatttacttgtcagagccaggttctaaaccgacagttgacgcaccaggtaggggccttgcgctttctcgatgaactctctaggcaccagatggccggtcacaacgccgatcagaccctcgagatggcgaccgtttcgggaacctcgacttcgtcctcgatggcgaaggggaaatggtcaggcccccagaagcctgaccccttctgcctaggagtctcgacattgccacgagggccagcggcggccccatattgtttgcactctcggagcgatcgtccgcttcaggggcctcgacttcatcatcaacgaagaag

SEQ ID NO: 10876 - DNA, 309 bp, Zea Mays
caataacacagttatctcctccctcatccctaccactctcaagccttcggaataggagtaaaacctcaccggagaagacggaccgagggtacgacctacgtagccgagggcccccttccctagactctaaggcccttgacaacctggtatcacggtcacgtcgatccgactcttccagttcatctgctacttccaccgcaaccaaccacctagcagccatcaacactgccaacgcaccgtcatctcccacctctgcctcaccccagcccagtgccatgatcgaacccacgatcgccgacctcgccaaat

SEQ ID NO: 10877 - DNA, 578 bp, Zea Mays
ggttttccaaaccaggtgatagtgaccaaaggacgttgagccaacaaagagaccatcatacatcgacttagccaaataattgccatctgccgcgatactaaatacatgcttatcttccacttcaggctacaacactatttctgatagaagctcccaaaggttcaaatcttccactataactcccacagacatagcaccctttatatcagatatccattttctattggaaagagcctcaagaacagttcttttattcgcaatccttttaggaatgatggcgaataacttaggcgccagactacacacattctggcccaagaaccatttatctgtccaaaacaaagtgtgtgctccatttcccacttttgagaccaaaccagtggagaagaaagatcctgcctttttggaacttgaatagcgaggtttgcccaaggttttcttggatcagttttatgaagccacaaccatctcatacgaagggcccagcataattccttcaaactagaaatacccaaacctcccaaatggaggggtctgcacacccttccccaagcaaccagacaatgtcctcccctgac

SEQ ID NO: 10878 - DNA, 353 bp, Zea Mays
gttgatgctgaggtagtggtccctcttttgtcgcttcatgtcgaagtcgacgctggaccctccagtgatcatgtgaatgactccgcgatatggttgatcatcgaagtattcctgtttcggtgcttggggtgattttggtggtggatgtttggctgatgcgggtgcagaggcagaagtgggggtggtacgacttgtacctcctggtggtgttggtatgcgtggttgggtagatgctaggcggggccgtggttgtatggttgtgggaggtggtgttgatatgtgtgcgcgacaactctggggttgtcggcgggctgtgcccgagacatcctgtccctggtagccttcgtttccgg

SEQ ID NO: 10879 - DNA, 542 bp, Zea Mays
aggaagatgcgactgcctaccatttcaacacaaaatggagttttcattgtgagatctgcgtaccatgtgctagaactagaagatggaatggagagaggatactaaggctctcatgtgcgccaaaattaagactcttcatatggagagtgacacacgatatagtcttcctctatagatgaagatcaaaagctgcaagattgatttaggcacaagatgtcccttatgcaaccagttcgatgaagatgttggtccttgtttgttgaaatgtaaatatgttcaccattgttggagatatctacagatggaggaaatcacacataagtccgttgaagatgagagctcatccaagaccttttgtgcaggctaccatgactctgcatatgaaatttgtgtctcaaatctgttcttctttctttgaaagtggtgggatacttgaaatggatctaggagattacacaagttaacacgggagagttgatgcatgcaaccgagctaggagattatacaactggtgattatgatggctgaagagaggcgaaaga

SEQ ID NO: 10880 - DNA, 572 bp, Zea Mays
cggagatctatggctagggttttaagtagtgcagatcgcgcgacagccgctcgattaagtgtggtccaaactgaattgcgtgaagggttctgatctgagccgttcgtcccaatccaacgatgtacgcagttccgcccaaccctggcccttgccggcgacgagggcgccccgcacggtggcgcgccatggccggaattcccccgctggcctacaatgcatgatttctcgccgcgctagttgctaaccgatgctgaggccacgacaaattctagaagggagtacttactcgcggtggagttgacgacggagcagacaacagagcgaagcggctccgtcgcggtacgcacgaacgacggggattttccggtgacctgagtccctccgagccaatggatcacgatgtccaccctccacacatccaactcctccttcccccaggtccagatttcgggttaatcggcggtggaagcgaacccccaatcgccgccgcgcctctcgcttctctctcttcttcttctcggtcagaggcaacggcaagtgtacgatctcacggagactctggtggattcaag

SEQ ID NO: 10881 - DNA, 392 bp, Zea Mays
gaaccctcgacctcgcgtactagggtgcctgcaaaggtgcagctgttcggggcagacgacgtcaccgtgaagaccatccaggtcaggtctcactactctaagaccacccgcatcatggggaatttgggggaaataggaaagtgcgctcgtcgccttcctccattaaaatgtggatgtgttcacgtgggaattgtcatagatgcctgggatccctagggaggtgatcgagcaccatctaaagatccacctagaatctaagctgatgagttagaagcctcaaaattagtccatcgagcggcaggacttcatccttgaagaggtccataagttgatgcacggtggcttcatcgaggaggtccaccacctcgtgtagttggccaattcagtctccg

SEQ ID NO: 10882 - DNA, 305 bp, Zea Mays
gggccgcatctcgccagcgctcggcgagatgcctagcctgctgcgcctcaacctgtcgctcaactccctctctggcggcctccccgcggagctactgttgtccagaagtgtactcgtcctcgacgttagcttcaacaacctgaatggtgatctccccgagctaccatctacgtccgccggacaggaacgacagcctatcaagttactcaacgtctcaactctcaaacaaccagctcatagggcaaatcccgccgctcacactggagggcatgaccaacctcgtcgctctcaacgtgagcaacaac

SEQ ID NO: 10883 - DNA, 463 bp, Zea Mays
ctagaatcggaatataaagagcccaaaaatgccctagagtacaactgcatgcactagaacagaacacccaataacaacagctgggttaatccacaccaacaaaatgataggggagtgattaggagcttgtataacggtattaccttgggaaaaacgaactcaattccctccactcctagttggacgatgacctgctcctagatgggtggcggcaacatacatcaatggtggagatggtggtggctgctgtgctccaagtgatgggaaaagtgggtgatggcagcggttgctgctccctttgctgctgccgtagggaggaaaaagaatgaaagaaaagagaagggattggtagctaaaaaccctaattatttaggatccaaaggcccagattagacaacacattctagacttgtccgtacctcaaatcatgtgtatgagtaataaaaaaatgcatctcgacgag

SEQ ID NO: 10884 - DNA, 379 bp, Zea Mays
ctagtgtcgtttgtgtataccaaaatcctgaaaagcagcaaacccaacttcatgtgaaaaatcagagtcagaaacgccacgaagtaggagcgatagtgctaggcttatggccggtagtgccaggctgcggtagtgccgtgtagaggtccggcaatgtcgggcacctcaaactacacagaaaaatctcaaactccacaaaaagtttgcacatagggaaatatgtatactggtggagtatgaacgtgaacaactcaagaatccatgcgcagattcaaaaaccaaggatgatggggttatgttggggttttctcaaaatgaactcaaaggggaatcaacttagatcacgaccaagaacatcactgtatgggtgtacgtagtg

SEQ ID NO: 10885 - DNA, 491 bp, Zea Mays
gcctgctatcagtgctgggctgaaacccacgtgtagcccatttttccttgcgctcgctcgcttcactgtccgccggccagacccaaaaattccgctcatgcacgtgataaatctgtggtgctggctgtgggtcccgtcttgtcatccctatcctctcaaacccccttccgcatctagcgctaactgatgctaggaaccgcggtttccgggctcgattcgtcgtcatcccaccgtgaagctcggctttaggaatataaaagccatcccccggtttcccccttgcctcacgatcgacttggaacccacggcccggcgagaacacagggagagggccacctgtgcgatatgaatttctcgccgatggggatcctctgccgctgggccactacgctccgtggttgtgctccaccacctacgtccagctctcgttgatcgacctgggaggatgcgcggcgcacacggatgttcgtcgcagcttcgcctgggtggat

SEQ ID NO: 10886 - DNA, 571 bp, Zea Mays
gttttgttaatgaatattggtctgctgccataaggatttatgagataaacaaggcttcaatagggatgagtgaaatggagtagtagcatatgtgttcatctgattcagtgtttggttagtaactgaagaagaaactcccctccctgtggttgcacttgtgtgtatgactggagatatagatgaagtgcatggataaggtctagaggcctcagaatatccaggatttggattgttttatgggctatggtgtgtgtggttcagtcaactgaagcatggatcagttttgggtgcatcaaatatcttctctccccgctgtctcccacttatgtgcacaagatgagttaagttgggatggacaacaaagggtcttgaggcacaactccctactgaaaatatcacagtgttgaaattgtttgtgcttatccacactagaagtcttaactgttttgtctcctgtgttcagaaatggacaaaggtgataggggtgagttgtgtgctgagttctggtggtctcacctctttagaaaatatcaagttgtgaacccatttgagcctgtacccaagggaggtc

SEQ ID NO: 10887 - DNA, 334 bp, Zea Mays
gcgggagtgtgtcgggatcccctgaatatggtcttcctccacagtcctgggctggccggcctctgttccgcgacatcctgcttcaccagtgtgcccctccttttccagcaccgagagtttcaactccgagggagccctccccactttagaccgggacgtcgaaccctcatcaagaggaacggcaccgccagtttcgtgggctggagagtgcgccggagacaacactcggtgggtggaccagagtagaatcaaggaaagcgaagaagcgtcgcctgccgacacgtcgtctggtgccaggcgacctattcggtcgttgtttcaactgcttcgcgga

SEQ ID NO: 10888 - DNA, 637 bp, Zea Mays
agaccatccaaacccttgccgcaggtgtgggggagttgttggcgccgccgcccggggagaactcgccccatcgccgatctgtacgcgtagtcgtgccgtggtgcgtctctagcgcgtggtgaagttgttcatagactcggcagagggagttgatcgtcggggcggagagaacttctcacaggagaaagaagatcgaggcggatcgaccatcagtgcgggtgggcctctctgtgccatcaaagctggtatgtttcccttgcctacactcgcacggcgattcgttaggttaaacgctggtcaggttggggaaagtgcaccttggcgcggggttagagttcaccggcggggtgcgccaccgtgcgggcgctgcgccgctgtttggtgacctccatggagaaggataggtctgttgccgtagatccaaaattggacatttaggatcacgtacggtgtaccggttcgagggtcttcatctgggtcgtccatttttgcttgtagggtagtgattggatctggggtattttaaaaccgccaccgttggatgatcgattggtggccaggattagatcgtgttttcataaaactcgaaccgtaagatttagacctaagggtcaaagactcgcatccctttgcgatt

SEQ ID NO: 10889 - DNA, 397 bp, Zea Mays
ctgtaatgtagtatctcaacaaattcaaccatctctcccagtatgccattgaccaagtgaatacagatctgaagaaaaagaattgttttatgaggggactcaatgacaggcttcatcggaaaatggcaacatgcttggaccttacctacagtagggctgtcagtatggcactggcagtggaagctaaaactgcaggacatggaaaatccaaggggtttggaggtgaaaggtctaatcatgggcctgagaagagaaccaggttggtgatccgaccttttaatcgaaatcgttcttcacctcgcccaccttcatatccattcaagcagcctgtctttactcgtcccactattgcccccgctcccaccaattagccgagtgcccctggtactcatttccc

SEQ ID NO: 10890 - DNA, 275 bp, Zea Mays
aacagcggagagaaggtctcggacgggtcggagtaactccggtgaggaatcccgaccacggggagggggcttaaggcgcgctaaggccttggctaacttcagcagagacagaggcaccttagggactaacaccggggaactagacctggctaaatcggccagccaccgcgtgagcacggcggttcgccgcagccgagcaccagcgaagtcgaaattggctgagcacaaggcacaatagggaaaattgggcacgaggacaggtgtctcacctcggg

SEQ ID NO: 10891 - DNA, 501 bp, Zea Mays
gcgatcttctccagcttcaccaggaacaacactagtctggctttctccatgaagacgtagaggaagatgtctgtacctcgtgtcatgcagttgctgtcgataagtgtggctaagagaccatagagctctcatagcatcattgctgactgaagcagcgtaggtagatagtggcgtcagagactcataggctgatagagtcctgaaacctctatctcctgcatccatcaccctgatatgcacgcgagtgatgtagtagaaagcccgaggaggcccagacactcaccttgtgtcatatagaggtcggacgtaggttcctagcgcatgtagtacatcataaagcaggtttgggaagtgtcccgtctcgaacattgaggtgtaatgctcagtgacaggccatatcccaacaaatttgtactcctgcgcgttgttggcttcttcattgattatttcctctccttcttcttcttcatcatcttctccaccatcaccagaatcatccag

SEQ ID NO: 10892 - DNA, 527 bp, Zea Mays
accccccgggaggaaaagagtgcgggccggaatgatactgtttggtgaattacaagggcgtgttagccctgaggattcaaacaaaaaatttgcggagattatcgatattccaggaatgctctaggtcctcgccggatggcgttgttggcctgtacgcgctgggggacgccttcgtcttgacgatgaaaggaccctcccactttggctccagcttgccccgtgactctgtccgagttgtccggacgagtacgaggtccccttcgtcgaattctctgggtacgaatgtgtggtcacgccaggccttcgtttgagcttggtatttgttgagagcctgcagggcgaagacacagtcttcgtcgatgaggtctttggaggttggttcgtctacgtcggggacgactgtagcgcttgtccgtggtgacccatgtttgatttcctgcggggtcatggcctccgatctgtatagcaggcgaaagggagtgaatccagtcgcccggcattcggtcatgttcagcgcccagactgct

SEQ ID NO: 10893 - DNA, 737 bp, Zea Mays
cgagaacactaaaacgagagggtaaagggtatgagcggacctgagatgagctgaccacgacgaggcctctttcatggtggtggaaagcaggtttgggggaaatgagaaattaacgagctctagtggatgattcgaggcatggtttgcttcactggttgcacaattacctagcggagcaggtggggtcgacaatttataggctcccacagtggtggccggtgaatttgagagagacgtgcggcggccggagaaagaagaaggttactggcgctcggggttagtggctttcaccgtggcagcccttcggcaatcaccgggcatgcatgatgtcattaactgtgacgtggtcaagtgctttagtacgtggcgcacggcggtaagcggccaacgacggcgaggtctatccgaccgatcgacgagcaagtgggtacggcgagcttagctgtgaccgagcccgagtcgatcaggtgccaagatctttactcgcccacggttatccgcaagtcacagcgcacgaatcacaatggccagcgtgaatcgtagcgtgacggtcaccggtggcgaagtctctgagctggcgatccaatccggtcattgtaccatcgcgaagttcatttagtcggcctgacagaccaagtttggggcgaattttctcccaattttccatggcaactaaaccaatgctctgcagcaaagttgtagcctaatgatccagctacaaacttactatagcaacc

SEQ ID NO: 10894 - DNA, 452 bp, Zea Mays
ggcaaatggaggatgtgtgtatactataatggtttaaataaagcatgtccaaaagttccttacttgatgcatactcaggctaccactagatccggatgaaagagttcgaccagctcatgacttctttcatcacctcgcaaggcaggtattgctacatgaccatgcccttcggattgcacaacacaggcgccatgtatcaatgttgcatgaaccacgtgttcagtgaccacataggctcaacggttgaggcctatgttgatgatatagtggtcaaaaccagaaaggtcgacaacctcatcgccgacctggaaatcgccttcgttgcctctgagctaagagtgtcaaactcaaccctgaaaatgcgtctttggggtccccgaggtatgctactagggttcatagtctcaaaacgaggaatcgaggccaatccagagaaggtctcgacgatcata

SEQ ID NO: 10895 - DNA, 877 bp, Zea Mays
gcgtcaagtactgaagagagcccgcgagacttcggtacgcggcggggtcggtggcaggagcgccctccatggcagagagcttggcacgagagtcaacaggcgtcgatgtcgagtgacactcggccatgcccgccttctgaagaaggttgacagcatactgtcgctggttgaggaagagaccgtcggaagagcgagtgacggatatccccaggaagtgatggagctccctaaggtctgtcatggcaaactcagagtgaagcccgtcgatgagtcgtcgaagtagagtagccgaagatgctgtgaaaacgatgtcgtcgacgtacaacagtaagtaagctgtggagttgccctcagtgaagatgaagagcgaggcgtcagtggcagaggcgacgaagccgagctgtcgaaggaacgtggcaaagcgttggtgccatgcccgaggggcctgcttgagcccgtagagtgagcgctgaagaaggcagacagcgtcagggcgtgccgggtcgacgaagcctggaggctgctgacagtagaccgtctcattcaggtggccgtgaaggaatgcgttcttcacgtccaactggtggatgggccactggcgagaggccgcgatgctgaggacgacccgaatggtggcaggcttgacgacggggctgaaggtctcgtcgtaatcgacgccttggcgcttggtgaagccgtggaccacccagcgagccttgtggcgagccagggtgccatcagagtggaacttatgcctgaagatccatttgccgatgaccacgttggcaccgggtggatggggaatgaggcaccaggtgttggtttagacaagcgccttgtgctcttcagccatagcctcacgccattgggggtccgc

SEQ ID NO: 10896 - DNA, 333 bp, Zea Mays
tccaattccattgtcaccaaatcagcccttaagggttatggttttctacaccattaaatatggtaccaagccaggttcctctctcccctaccctagccgccgcctccccttggctgctcgtcgctcaacctcctcagccattgccaccagtgccagggccatgaacgacttcccccctccagccccttccctcctcatggtagggttcctggactaaccatggacctggcgcagggagtaggaatgatgggatggaccgatggaaggagatcactagagggctgctgctggcgcttaggcgccgtgttcataggtggcagacatgagctgcag

SEQ ID NO: 10897 - DNA, 640 bp, Zea Mays
cagaccggggaacacaatttacttctcggttttggtagaagttgcataagtgcttggatacaagactgaatttcagctcggcctaccatcctcaaactgatgggcaaaccgagaggaccaaccaagtactagaagatatgttaagagcttacgctcttaaacatggtggcagttgggataagagtttaccatatgcgaagttctcttacaataatagctaccatgccagtttgaagatgtcaccgtttgaggctctatatggcagaaagtgcaggactccactatattgggatcaaactggtgaaaggcaattctttggaccagaaattatacaagaggcagaggaacaagtccggcagataagggagaatttgagaactgcacaatcaaggcagaacagatatgctgatacccggagaagactactagagttaaaggagggtgatcacttatatttgaaggtgtcaccgatctggggtatgagaagatttaaagttaaagggaaattgtcccctcgctttattggactcttcttgatcctaaagcgagtgggagaagatgcctatcaactagaactactcgatcatcttgcggatgtacacgatgtcttccatgtgtctcaactgaagaagtgcctcag

SEQ ID NO: 10898 - DNA, 591 bp, Zea Mays
ctggaccatccactgtgatggggcatggtgccacgcaggcaccggcgctgtagcaatcatcacatcacccataggactcaaatacagatttgccgtgcgtcttcgctttgcactggaataagataagtccacaaacaacattgctgaatacgaagcagtcatcttaggacttcgcaagctgcgagcccttggagtgaccacatacaacatcaaaactgattccaaggtctccgctggccatattgaaaaagactactctgccaaagagccagtactaatgtagtatctcgctcctatccgaagcctagaaaaataattcaaaggcttcacattataacatattgagcagaacaagaacgaagaagctgacacactagccaaagcagcagcgaagggcaaacccttgccatttgatgtattttttcatatagtcggcacaccagtcataagaaaccctgagggtctgcaaataacacaagacgtcgacgggcaccagatagtaaatctgataatggccgaagataggcgagcaccaatcaccctttatctccaaggccactagcatccctccgaccaaagcgaagccaaaag

SEQ ID NO: 10899 - DNA, 404 bp, Zea Mays
ctaatagaatttcgagttgattttttatagggctattcactcctctccaggcctccattcccttctaggaatcttactctgattccagagctggctttcggtttcacttggggctatccttggctctgacccaagattggctgatagactatttatatgggtctatgcaacatgatgttatggggtagtcatgagctaaatagtttattacacatatttgcaaacttaaagaccaagtttactccaccctcatggtcatatgccaaattttggcaaaccatccacgataggtgctgcacatccatgcccattctccaatctagcccaatgagatgaggcgacgtgtatatatagacttcctttttctttctcacgttagactagacttgagaaagtaaaaattc

SEQ ID NO: 10900 - DNA, 367 bp, Zea Mays
tgatgtgggcataattgcgatgctacggttctctccaccagtgattagcggcagctggttcgtcccagcttacaccattagagctgatttggtgatccgggatcccgtgagaattggaggggaatgagtgggaaactggtcacgccattccgtcatccaggttgcaatttgacgacctatgctggttcgcggtgaaaacagagctataatggtcgtcaatagagcggaatccacggaattaaattatgacacggggggagataatgggggcataattgcgatgctacggttctctccaccagtgattagcagcagttggttcgtcccagcttacaccgttagagctgatttggtgatccgggatccc

SEQ ID NO: 10901 - DNA, 453 bp, Zea Mays
gaagaagatgctcgatgccaaagtcgacattgtcgaaccatcatggcctaggcgtgcgccaggtttgctaaacccgagaatgtgttggggacgaaggcacgcaccggtgttgccagcatcggacatacaaggtagagggcccaaccacacgtcagtgtctgaagggagttaggaactagtagagaagtcctccacagcgattgcaatgcgcaaaagaacaacaaggaaggtgtcgatgcagcccgcggttgttggagtggacgaagtagatgaggacaaggggcaacaatgacgtgagtttgtgttggacaaagttgaagaagtagataagtgacgcatcgaggctcctggagtggcagcggtgagagagtcgcaccacacaaggagagctgcgatggtgttggagtgtcgcgttagcggtgctcgaagaaggtgacgaagagcatgaatagt

SEQ ID NO: 10902 - DNA, 341 bp, Zea Mays
tgatcgagcaccatccaaagatccaccctgacaccaaaccagtgagtcagaagcctcggagacagtccattgagcggcaggattttatccgtgaggaggtccggaagctgctgcgcgctggcttcatcgaagaggtccatcacccagtatggctggccaatccagtcatcgttcccaaggctaacgagaagcttcggatgtgcatcaactacaccaaccttaataaggcctatcccaaggacccatatccacttccacgaatagatcaaatcgtggattctacctctgggtgcgacctcctgtccttcctagatgcttactctggtttccatcagatccag

SEQ ID NO: 10903 - DNA, 1100 bp, Zea Mays
tcgagggcttactgactcaaggatggcgatgagaatctcctgaacaacgcatggaacatcgaaaacctgaggaaattctatccctaagcgattttccctcctttcctcacatgcaatcagcacctgctaaccaattcgacatgtcctactcatgggctagggaacgaacaccttccaacaccctagacggaaataatgtcacatatggaagcgtcttgcaagttactcaaaagttcattacatctaaaagggaaagcacaatctaggcgggggtaggcggatcatcgccggaagcttccagactcaaggaactggtcaggaggagcttcacatcgacccgacttgcaagcgactgagtgtgaagacgaacctattcatcgatggcgtctagttcctcctcactccgttcgatggcatatcccttcgcgatcacggcgtcgttgatctcgtggaagtatgcaccttcgaagaccacacgctccacgtgcctaggcaacacccacaaccgatcagccaaaagcgcctcagatggcgttggaggggagagatggtcgcacacatcacccgcgacccacaacttccagtggggctccacgccgaggtagacctttcacaacgtgatgaagcacactatgtgaaggatcatgttcagatgaagggttttcagcacccaaccgtagtagaagagcaaaccccgcacgaaggggtgcaggggaagcccaaagatgcgctcatagaaggaggccagcaccacgacctcaccatcacgcggcgctaaagcaccgccctcctctagatgccaaccgaagactgactcaggagggaggaacccattcctctccaggtcctcgaggcgttccctggtagcggagcacaagggaaaggtgtccatgaggccagggaagaagagcacagaagggaggttggcacaagggcgcgagaagatctccaagggaaaggggcgtcagatgctcgggcgagaaagcacagtaagcggaaccgaccccgaatgcctctgtgtcctatctatacataggaacagggaagcaaagcggtgcttgaaaggtggaccctcgcggacaacacaggagatcctaccg

SEQ ID NO: 10904 - DNA, 1117 bp, Zea Mays
atttccgaccccaggtgactcaagaacatccttcaattttagtttgcacactagagaaggtcctacccacgcgcatggtggaaaccgtgacgtcgagcccgtgttctcattcactcacgcccaaattggtcaaatggctgctacgatgagcttcacgggtatacagagctgcgaaaacaacactcgagagatgcagagccttaccagagtggtccggccatggagcgcggagacttgtgctcgctagtgacagagaaaggggaaaatggcgtcacgacggctctgggtggaattgggaggtgggattggggctacacggtcgtaaggaactatagtttcaccgtgcacacttaatttgggaagaggtggcagaggcagtgcgaattttgggctgcaatcaaactcactggtggagatgtgaacacctcgccgtggaccatggtgctatttatagccacggcggtccagctaacgatcagcgaccgtggaaggctttgttcacgcatggcaaccacgtatagaagaggcacagtaagggaaatcgaggcatgggtgacaccgcggcagaaatgaccgagccacagcgatcgccggtgggatatctccggccacgcacgactgagctcacgggatggtgccacgtccaaagtttacttctccgcgatcaaatccccaccgattcatccgagctcatccgattcaacagtgcacagatgttctgaaccgacccccttccatccactcaatctcttgattcttgttaaggacagagcaaacttcattaataaagtttgttcacctatcaaccgtcttcaaacttactataggatatttgggtcaaaatcgagtgaatccaaagatatggcgcgtccaaattggctccattccactgtgaccatttctgctttcaaattcagtttcagttattcaacaccattctgatagagtaactttgggctgccgtttctttaatttttatataacaactaaagaggatgtctgtatcaaagttattctcctataatagatctaggcttttgatgtgttgaccctaggcaaattctcaataatttggaaaatatagggtcccaaagttgagccaaatctctgaaattcg

SEQ ID NO: 10905 - DNA, 516 bp, Zea Mays
ctcacctttcaaaattctccatgcaccccggcagcaataagatgtatcatgaccttagatctttatactggtggaccagaatgaagagggaaattgctaagtatatatctgaatgtgacacctgccagagagtcaaggccagtcacttgaaggtagcaggccctttgcaacccctctccataccatcttggaaatgggaggacatttgcatggattttatcgtgggattgcccaatacctcccggcaccatgattccatttgggtcattgtggacagattgaccaagacagctcatttcttgccggtacacaccacccacaggacggagaagtatgcagaaatctacattgaccagatagttcgcttgcatggaataccgaggactatagtatctgacagaggagcaccattcgtggcacgattttgggagcaattacaggaatcacttgggacccatgtaataagaagctcagcataccatcctcaaacagatggccagacagaaagggtaaatc

SEQ ID NO: 10906 - DNA, 479 bp, Zea Mays
gaggtgggcggtgaagagagggtagggcgtcgaccatggcttgccaaagggaggtagggcgacaaagagaagggaggggtgctgaccacggcttgtcggagggaggggcgctggccacgacagcccactagtgggagaggcatcgattgcggcttgacggagggagagacattgaccacgatgggctgtcacggtggcatcaatgtctggggccacaggcagagggcggggcggtggacaactggatctcttgagcgtcggagagagctaggcggagaaggagtgcgcgatgggtgaagaggagagcgcgatggtggagcgtgtagcatagaggagaggagagaaatggggcacgatgaattaattccagcgattaagtacgtgtatgtctatttgtgatatcgacgtacctaacattaagggtgtgtttggtttggctttgacttttgccctataaaaatcaaaccaaagggttggat

SEQ ID NO: 10907 - DNA, 435 bp, Zea Mays
tgcctcacacttctggactaactcggcagcgtcactcttcgcagttggccagtagaagccggatctgaaagcctttcccaccagagtccttgatgcagcatgcacaccacactacccagcatgagtttcatctaatagttgtctcccggtggtcgagtggatgcatttcatgaagactcctcctacgcctcttctatacagcaagccccctatgatggtgtagtgggctggctgttttgcaatgcgctctaccgcagccttgtcatctagctcttcttcttttttatgtacctgatgatttgctctctccagtcattgggatctgcctctggctgactcagggcgttgcattcttccatctggtccgtgacaatgcttggttgttgtatttcttggacgaagatctcaggtggagcctgggccaaggtttacaaa

SEQ ID NO: 10908 - DNA, 387 bp, Zea Mays
atttaacagaaacccagggggttatgcgcaaaagacaccaagactcagaactcccacagtgtggactgcgggttggtatatataaaggacatggactcttttgtaaaagaaccgatcgaaggggtaagaacgtttcgtggccgttggatcaacatcggacggccccaatagatcaaagtctttaatgaaccagtatgcgccattagccatcggatccaagatccacggcccacaatcgatccgagggttggggcaggagatcagatctcacccaccgaatccaagatcgacggttacaaacgccccgaactaaccgttacctcttgaatctatcacgtccgtcaatatttagatctacggttcctggtacctctcttcggccgacgg

SEQ ID NO: 10909 - DNA, 608 bp, Zea Mays
gagccctgggcttcggatattaaagagagcccgggtcgtttccggggtctggtccactgagacaggcgcgcctgtgtttaacgtagtgcagacagacaacgtcgttacacggtttgtttaatggcaaggcggtaacacatatggtaaaggcgcagaattatagggattagtttcaacatggaaacgagcttgctatgttacgtgggcgcggaatttatggatcttgcatggggtgtaatggcggcaggtaaatataaagtagaatgcgattttgaaagatatggcataaaagcgatatagccaaaaagttgcataaatagtatatatcgtttggcgtaaaatgttgagtcattgtgcgtaaatagtgtattagggatattagttttacattgacatcgctataatatcgggacggtttcagaagtaatgggaataccctggaaacgtggatgttgttacttgtatagtatccgtgatttcctttcatccgaaaaaacaccacaaaagcctgcataactatttggaggtggagatggccggctctggagagtcgccggcgatggtaggagatggcgttcgtcttgatccagagacagagggaggagttg

SEQ ID NO: 10910 - DNA, 581 bp, Zea Mays
ctacctcagagttcttccccactttggtttatggaagtatctgtaccactatcgacctgggatggctgggggtcagcaccaactcatgggtggtgcgagtctggaaatgcgacgcggaaggaaaacataatatcttgatattccgcttaaggacaacattaatgggtggcatcttgagtggtttattgtggaaaatcacggcaagtccctcccccctcggtcgggaagacagccagatgtgcgcactccaagttggattgagttcccactgccctggaagtaatagaggctaaggttctgcttgctgaaatctgtctgctgaaggaaagaggtctgaccgccgaagttgtggttgctgattttgtttttaagaacatccagcccctgaaggacagagcatacccggcttacttgtacagtggtgttaccgactccactcgggttactaataggagaattcctgctaaggatttagtgagccggctagacatgatcttgagaggcaaagtatcaaatgttggtgctcctgttgcctactctgcttggaatctgccacctcctaagtcctttttcaatttcgt

SEQ ID NO: 10911 - DNA, 592 bp, Zea Mays
gaaagccctccgacaactatgccagagctacaacaaggtgatctttgaaacccccttcgctacttcccacccagcaacaaaaatacacctacctggaggaagagactttaggccctgtcaggaggagaccctattgaggatgaccccaccatcgtctacatgactggataccttcacaccctcgataaccaatatgatgaccttgcctcccactgcactcacctaaactcccgggtggaaagcctggagcaaaaagtcagggaacttacaagggaaaaggcgtcccttcaagagagcctcgagatagcagaaggcgaggaaaccaatacccgtgaagcctaccgcactctgaagatggattacgacaagaaactgaagaagctcgcccccgcaagaaaaatccgcaagaagaccaaaagccaaggatgccagactgagcagaaggaagaagcccctccagccctacctcctaccaggataagaaactcgtccgacaccgaggaaatgtccctagctagccttgatgaccttctcaaggaatttggggacactttagagaaggagttcgggagtaccctcgatagcactcgcg

SEQ ID NO: 10912 - DNA, 497 bp, Zea Mays
gcgtgatagtagatatgtttccagtcgaatctcgtcttgcaaaagtgttatttgtactagagcaacgcattcatttattattgcatcatgggtagaagcgcataatcttccaataaccaccatgacaacaccaattcaaaatgactcagccgatagaaaagtctgagccgatagtgtatgcttgaatgtaagtgtggaaataagggggatagagttccccgctaacctgatagtgacaggtactcacagaatagatgttatcctagggataaattggctagataagtaccaagaagttatcagctgtgataagaggacagtgaagttggtgtccccactaggagaagaagtggtgactgagctagtctcacccaagccaaagaaaggaggttgtcaccagatggctattgataacacagaggccgatccattcaagactatcaaggttgtgtcagaatttccagatgtattccctaaagatttaccaggtgtgccac

SEQ ID NO: 10913 - DNA, 605 bp, Zea Mays
tcttaatggctcggctcgtcaggatgttgtacgttgtttggtggactcagtcaaagctgatgttgtttgcctccaggaaacaaaaatgtcagttttttctcgcttgtttgtgttccgtttgcttgggtccgagtttcagaattttgttttcacaccttcagttggggctagtggagggattctagtggcttggaagaataatatcagctcatgtggctctaggattgatgatcattgtgtctcggtgaatcttagccttgagacttggtcatcttggtggttgtcatgtgtctatgcccctcaagggaatcatgagaaaattcagttcttacaagacctcagattgattaggacccactgttctgggccatggctggttgttggcgattttaacatgattctgagtgatgaagacaagagtaattccaatgttgatcgtgctatgatgggcaggtttagaaggtggaaggatgatcttgccctgctggagcttcctctgattgggcgcaggtttacttggtcgaatggccatgcctgtcctactttagtcagattggacatgatgttttgtactgctgattgggaagatttatttccagattgcc

SEQ ID NO: 10914 - DNA, 1014 bp, Zea Mays
accccatcgcaaacaactaaccaaagaaattctactgtcttacaggtgaatattttccacaaattccaaattcccaaggcacatcacccgaatgaggaaaaagaacaaaaagaataaccttcacttctcctctttgcaaaccgggtatcacactctaccccccttaaaaagaattcgacctcgaattctgacgcttctatcggaacgacaaaagggaaaaaaattaatgaatcaacaacacttacccacaacaaaaagttccggatatttctgctgcatcagctcctcaagttcccacgtagcctcgtgctcagactgattagtccataagaccttgacatacttaattgatctcttcctcaaaacacactctgaggattccaagttacgcaccagatgacacaccaaggtcagatcttactgcaccgcaattggttccatctcaatctgatggtccggatcccgcaagaacttcctcagcatagagacatgaaaaactgggtgtacccctgccatggaatccggcaattgcaagcgataagccaagctgcccaccggggccaagatagtgaacggtccaatatatctcgggctaagctttccagagacaccgaaccaaacaactcctttagtgggtgataccctgagaaggacttggtcacccactgtaaattccaaatcctgcctcctcacatcagcataactcttctgacggctctgagcggccaaaatattctgacgaatttcccaaaccttttcagaagtctgttgtacccaatcaggaccaaccagggatctctctctcaaggtctcccagcacagaggggagacacaccccctgccatacaaagcgccaaatggtgccatcttgatgctagccaggtagctgttgttataagtaaactctgccaatgcaagatgatcttcccagctacccttccaagacagaacacaagcgcgcaacatatcttccaaggtttggatcgttcgctccgactgaccatcagtctgagg

SEQ ID NO: 10915 - DNA, 1614 bp, Zea Mays
tctcatccatttgtcatcgatgtttcttgtactttatacagaggcagtgttcacttccattaattttggcattgatgtcatgaccccacaaaacatttatgttaagttgttaatgttagtgacttttaatgattcaattctgtggctatccttttaaattagctgacagatgaaattagaatgtgcaggataacatgactcagttggtcattcactattagtatagcattattaagttaaattctggattgtactggtcttggaaatatttgagagctttatgcgtggttctagcctgagcaacatctcttatgataacttctacttgagaagttgatcgcttattttctttaaaaattggtaagggttttctgttggaaggagatactgctgctaatattttaggtgtgcaattttcttttgtttgtgataaggcattacaaaatttgtatataatgtgtattgacatgagttggtgaaaggttaggttcatcagaggaaatggtcagagggtatacaaagccttcagcatggaatacgaggttacccaacatgtgcagatttatgggaggtgggtgctcccccccctccagtttgctcttgccaaggtttcttagtgtaacttatatgtgatgtgtcttcaagttatcaattattgaatttagacattccatatttatggctacaggcacttggtctggcataccaccgtttgggcatgttcaccgcagcagtaaaggtttgctgttttcagttgtgagcatccttaataactgttgcagtgcgctgtattgagccttctcaatgtgcttaattcagtttttgccggcagtcatatggacgagctattgaacttgatagttccagggtctttgcattgatagaaagtggaaacatccagttaatgcttggttactatagaaaggtaggaagttttctgcttgcttctttaactatctatcgttctgctggtatacatgatttaatcagtcaatgctaatctaacggtgaatccattcaaaaatctatgtagcactgatctctttcattgttaaaactatttaatttctctcgaaatacacaacgccagggagtggagcagtttcgttctgctttggaaatggctccatgtaatcattcagcatactttggccttgcttctgcattgcttgcatgggcaaggaattgtgtaactactggggcctttggttgggctgctagcctgttgaaggtactttgatctgatagtagctttttaaatatcattgaataaaccatagctgtatagctttaccatatagtttgttttctcataggaagcttcagaagcttccagaatttgtacttctttgactggaaacctttcatgcgtctggaaattgcatggagatgttcaggtatttgatatttcatcatttaagtctccttgtcatctacttataagtgaagagttgcaatattatattctactatataccttgcctgtttggtgtcagctcacacttgcgagatgctttccatgggtggatgggaaaatcaaaagggtcatggatgcacagatgttcaaaaattctgttcaagagtggagaaatacatgtttgttagcagcaattg

SEQ ID NO: 10916 - DNA, 532 bp, Zea Mays
ccggaatagcacaataagtgcgcaaaatcgaagtcttttcctaaaagactcttcgtgcagaagtcgcctaagggagcagccggaacagcacaataagtgcgcaaatgtcgaagccttttccaaaagactctccatagagaagtcgcctacgggtgtagacagatcaacgaaggcgcgcagcctcatcatacaaattacggttacatacacacagcgagggcatcatatactatattggctcaaccttcgggatgatacccatctccctgtagttgaacaacattatcctcaattcctcaccctcaaaaagatttcgcagctccccttcacctatgctcgccccaatcggcgaggacaacaactcttgcctaccagcccggtccacgcgaagacagccacactccatcccaatatgatgaccacttcacgacgattcactaactctccatttcgccaccgcccttcgccgcctatacccagtactcgcacccgggagccccccggaaccctccacgcgcggcgaaggctccgc

SEQ ID NO: 10917 - DNA, 341 bp, Zea Mays
cgacacgccatcggccgcccgagctcgcccttcgtggaccggccactctggcccacctccacccgatccagctccacggctagcttccctagagccccgtagagcttcccgagccttcaaaccgaatgctacttcgccggaggcactagatcaccatcgccggactccagccgaccgccatcgcgcgtggacctaactagacgatgagccatttccatattccttgcaccctcggcaccactaacttttcgtgaagctccccgagcacttgatttaaccctaccgccgtaagcaggccggagcatgcaccgctgacgagcccgatcgcctgcgcacgcggc

SEQ ID NO: 10918 - DNA, 853 bp, Zea Mays
aaaaggtatggcaagatctaatttgagccgttcaccccgtgatcaacggcccacggatctcgtcccccactcgcggcctgagacggcggcgtaacgcgccctacgcggcggcgccattgacgacggggtctgggacggtgacggggtactactcctaacccaacctggcgcaaaacagagagaagagtgtggcgggcacaacggtggaggtcataccgaaattttaggcagcaccggcctctgaccgcggatgtgagcggcttcacgacgaagcgcggtctccgacgaagaattgtccacgcctcaccgctttccacgcccaattgacggtagggaattgatgcacggttgcccccacaaacgtatccggcgctaactcggtctccgcaggcggattcaccgagatgcacatgaggcggcggtgaaccgagatggcgcccacaacccgcaatctctctccccgagtatagctagcggttattccctaatcaagtcctatagcacacgcactggccaggggattcccatacttgtagtcggggcgtgggtgagctcgagcatgaatcgcgctaccgaactccacttgcggcggtgcgacatttgcgccatccgttacgagggagacaaacgcgctgacgtgcgggcccgagctccagagagctgagcgatcggcagccgagaggggaagagcgttgtccagtggggcccttcggccagagaacgtgcaagagggatggcacggatgtggggcaacatgggccacgcggtgtggattttacgtgggccgaattgggtgccacgagcccaacaggtattcctttccttttttttcttttctctaatcccaaatcca

SEQ ID NO: 10919 - DNA, 597 bp, Zea Mays
atcaacaacaacaattaaatgacagtacatatgaaaaaacattatccctgagtccatgtactgataacattgtaaattgcggtgtctaattagaaatactaggggcagtttggatactacccaatatgagtctcactaaattttggtgtcagtgttataaaaaaattggacagcgccaacacgctaacattccaacaaaaaagcagttgtttgggttgtgaccctgccaatttgttgccactgacaaaacatgggacggaaacaagaatgaccttgctaaaattgttagtatggcacatttgtttttttttggggggggggggtacctaaatgaggtcttattttgaggattcaactgcaatgtttggattgcaaccttaccatttaccaacactcactagtattgtttgtatgacacacaccattcttttgtgtgggggtgggggttgtcaaagtatagctacatgatgtcttggtctgtggattcaactgcaggaatattatgatgtaaatttattgcaaaccagatagactctagggtttaaaaacatttgaagtttgttaaagcaaataatccagccagcagaaacatgccac

SEQ ID NO: 10920 - DNA, 430 bp, Zea Mays
ttgaccatgatgtcaacgatataggcctctatggttcttccgatgaggtcaccaaaacatttgatcatgcaccgtttgtatgtggccccgcgttcttcagtgcgaacatcatcattatgtagcaatacgagccgaaaggagtaataaaggaggtcgcaggttcgtcagactgcttcatcacaatccggtgatagccttagtaggcatcaaggaaacttagcacctcacggtcggaggtagaatggaccacctgattgatgtgcaggagggggaacggatctttcgggcacaccttattcaggctggtgtaatcgacgcacattctccacttctcgcttttcttttggaccatcacggtattggtcagccactcggggtggtaatctctcggataaaaccggtagtgaggagcttactaatctcttccccg

SEQ ID NO: 10921 - DNA, 654 bp, Zea Mays
ctcttttgcaaataagtccaaatctcaaggtttgggttgcaaatcttcataattgtgaaccatatgacttaagacatcttaacttcatagtttttgcactttagtccaaaagtgcactaattttgcacttagcccccttgggtttaggtttagggttttccaaggttccaattagggtttcttgcactcttagggtttggatcccacttgagttcatccatggagacactttatgactttttcaattggattttgaagtttttacttgtttaagccttgttggttctattacacccaatctagggttaagttccccactctagggttctatttgcaaaaggtcataccaatacaacttgtttgaaattttgcctagtgaatgcactctagttgtaacaaacatatggaatgccaatgcttatgatgttatgctcaagttttagtaacagtaacatcaggggtgttacaggatgtccccccggcgacgcaacgaagcaccaccacctttccctaagaccccaacggcgacgtagctgagggtaggctgcggcggcgctctggcctcacagttcttacggcggcagtggagattggtttgggtgggactaattgcgcgttgacggagtaaagggaggataagcgcccggctacgcc

SEQ ID NO: 10922 - DNA, 787 bp, Zea Mays
catgtgaatacttagttgtcgagagcaccacgtcggagcaatgagggagaaagagagagtgcacacgtcgtggtagtctccttttgtctacaccatcgttctagttttggctagtggtcgtggagattcgccaagggtttgtgtagcatgagtgctacgatgctgggcgagagggcttgttggaaccatagaattcctcatcgggatcgaggggcaccgtgaagctattgtatggcgtggatagcaccaccgacgcctcaaccaccggtaagtcagtccctatagagttattctctttctccgcattcgtgtacacagggtataggtcggagtgggtcactagagaataggggagcatacaccgacaaggggtgtcaccgtggtggatggacgctgctgcctgatacatcgagttggggaagaggggtctcttgtcgttgatcggccagtggactgttctgattcattgaagaatactgtttcaagtacatgcgatctagactattgatcgttgagcggacggttaggattttaagggcggcatacccgtttgttgattacaccagagtcgtggacctttgatcagatggcttgggttgagtgggggtgataccagttgtgtaacatttgcttaagagaccctgggaaacctaaaaatggcctacgacccaccacgcttgttccaacaacctaattgtttctagatttagaaccttaacaaaaagaaatagtaattactattagcaccaattggtattcatgattttattatgtccactgcgaattc

SEQ ID NO: 10923 - DNA, 705 bp, Zea Mays
gtcatcagatggatcctagggggaggataagaagaagaggggccctgatcaccttggtaaggaggaggaacaagctgatctgcatcattagcaagaaaatattcctcaacttcttcatcttcagcagacataaatgggacaccataggcctgttggtgccattcatttatatcaggaggtggtgcatgaaggggcacatcaggggagcgaggagcaaatgggtgacccatggagactgactggcggcgcagattgtcattcgtctcccgctggcacctagccagctcatgcacatcagcagagatataccgacacatggagaaaaaggccgcaatcccatgagccagtcgagctcccagaccgcgaccacgacctcgaccaccatggtccataggacatgaagtgggagcaccatgagaggaggaaggatgggtgggaccagcagaagtctgctcacgagaactagcaggagccttttttattctgcctatgagattattgggatctatccagaaaggggtgtaaggaagatgtctggtgcccttctcatatctgatttgagtaacaacttcaatcattttcataatgaaaggagcatgaaggcaacctttgaggggtgagcatgaggcatggatgatctcctaccaaatcataccgaagacattcagtcttacactgctatctggtttcatgaatgagagaaga

SEQ ID NO: 10924 - DNA, 284 bp, Zea Mays
aagaaggtcgtcaaggctagctagggacatatcctcaacgtctgacaagttttctatcctggagggaggcagtgttggtggggcttcctcttttcgttctatctggcatccttggctcttggtccacttccggatcttcttagtgggggcgagcttctttaacttcttatcgtaatccatctttagggttcggtaggcttcacgagtgttggcctcttcaccttttgctatttcgagactttcttggagggacgccttctcctcttttaatttcttgatttgtt

SEQ ID NO: 10925 - DNA, 608 bp, Zea Mays
cctaagtcctgttgttcttccccacgagcgtatccctcttccccttcgcaacaactttccatgaatgtcgccaacctctaccgacctcctcgatataagatcgagccggggcgccaggcttcccttgttcaccctatagattcagctagcgagacactaaccaggaaaccctaccgcgtcgtagctaggacattggagcggtgtgcgggacggtcgccggggttgacttcgggaattaccgctcctgagcaccaattcgtggtaggagtgtggtccctagtgttcgtcgcgcgttccctgccacaacttgtgcgttgatagggatcaccgggaaacaaattgctcacctacgttgtagaccctacagacttccgtcgtgtgccgtaggcgtgcctcctggtgacctaatccccgataaggttcccaccattgtgctcaccaccttcccctcttcgttttgcattggatcgcgttaaacttatggccttcctggcacgtgctcgggagttcaccgccgatggcaccaccacgcggctcggccgggaaagggtgctgagcttatgaccgttgattacattgcgaaggtccacaattagatctggggtatc

SEQ ID NO: 10926 - DNA, 471 bp, Zea Mays
ctccattgcactttgcacatctttataaccttattcctcgtgacacgagtcagtgtatcaagaatcttgatggggtactcagcataagttaggtcatcttgaacactaaggtcctccattagtaactgctcttcaggtaccctaagacatttccttagctgagatgcatgaaagacatcatgaacatccgcaagatgatccggtaactccaattgatatgccacctctcccactcgctttaagattaagaagggtccaataaagcgaggggacaactttcccttgactttaaatcttctcatacccctgagtggtgacaccttcaaatacacataatctccctccttaaactcgagcagtcttctccgggtatcagcatagcttttctgccttgactgtgcagttctccaattctcccttatttgctggacttgctcttctgcttcttgtataatctcaggcccaaacaac

SEQ ID NO: 10927 - DNA, 492 bp, Zea Mays
tcgccggtgaccccctcaccaaaatttccaactcctcccaagtcagatcggtcccaggcccacggtggatcctaccaatgtcgctggggccggtaaaccagcaactcagacgtggcctcccctgcagcggcatgactcggcgcttcaggaaatccccgagtacgtgcattgaggtcaggcctccaaccgccagttccctaatcctgtccaagatgggcccgaactccggcacgaggcatggtttcaccctccattgtttccgctcgaggctgagcccgtcactcggaagagcaaggcggtcgctggcctcagcgctggcgatcacccagtcacttcgccagttctcccacctcgcaccgccaagggaggcaatgtaggtcactgtcggatctgaccttgactggaagtagtaggccccgaggtgatccttgcccttcccagacctcaccagcacgaaaaactggcggaaaagggaagtgcaagccgccactc

SEQ ID NO: 10928 - DNA, 835 bp, Zea Mays
tggacggtgcgcggttaccagcccagcccacagggtcccggtggcggcgccgcccaccgcgcatggcggaacccacgtcggagcatactgatcggcgccccaaagctccccacactcaatcaggccacgattcgtgacaagaacagtgagtcaaacacgatggggatacataacgcggctggaggacaatggaggggaccggccacgggcgacggcgggtacacggcggagtgccaactccagcgaggaatcaacgggtaccgaacgactccaatcgtctgagaaggtcgccaatacgtgcggatggcaatgtcgaccttcccccgaacccaagcagagagcagaggcgcagatggcggcgcaatcagaattggcaagcgatggttttacggtgggtctcgacggcgtgatgtcgtgcattatgggggaaggggcgagttctggggatatatagcgcagagctcaaggggataggcatggaccaattgggtcacaactaaaacgctacagatgcggtggggcccgcgccgaggaggtagccgggaggtgcggaatcagttgtcgcgtccgcgattctggtgaggaggacgaatctggtgccatgggccaaccggtcattaacatggagcaaccgcaggcacccagcacatgaggttgacggggcagcccacatgtcagcgacggtggaggtattcctgggccgaggagaggggagaggaaaaaaaggaagtgggccgcggggtaacgaattcagcccaagacgcgtcttcttttgttttttatttcccttttctatctctatcttctactttcatactcccactcaattcataat

SEQ ID NO: 10929 - DNA, 1077 bp, Zea Mays
gaggggcccaagcctagacatcaccgggaggggcgaactcatccctgtcatttccagcgacccagacactttggactgaggcgaaaacggctgggtggagttcagaggcccaatagtgcatgtccagctgtcaataggggcctcatcaaggagattgtttggcttctctgtaggcaactcattaaggagtatcatcccattatccgaggccatctgctgtaactccggtgcgtcaaagagtggctgttcatgtcccctagatgtatgtgaagtccttccatgtccagacggcgggggaggcccaaggcgaaggtgaacagaccgtcgctggggcaaggaactgcccaaacgccgaggctcatcattcctctggtcatccatgtcgtccgaaccatcagactgatcgccatcctccggtggagtcagcagcgaggaacctctaataccatcatggcagattgcaagtacccttacgcttatattataggctaagcatctctgttcagagctttgtgggcctggctctagaatatgcagaatcatatcacggtgcagttgtttcggttggaagcaccaagcccatgctacaaaggatggaagagttttctgcaacagagtgtccggatgaacctcctcaatgatacaagaatcccccaatatgaattcagctgttgagcggcaccaagcatgcaccgggattctggtaatctcaacttccaccaagctcgacatgattgaggaagaggcatgagaaaatctggaccatcttttaaaaaccaggctgaaccgaggacctcgaagcactttaccatcattaagaaccctcatttcagtttcttcattaggaaagaatagaagaaaatcctcaggctttgcagattggattgtcatgtcttccaacttaatgctgaaacaatgtgccacttcttctaatacctctgatccaaggacctccgacctagtaccagtaacggtgacaagcaaggcccttctcaagtttaattcttcccttgccataccatccgagaaggccaaaacccgagatgttaaatgcggtggggaaacttcaggaatgac

SEQ ID NO: 10930 - DNA, 294 bp, Zea Mays
ggggtagctgatggcctcgacctgaagtactaccctcgtcgttcgaccggcagtgctggaggtgtgattgtctcaccagtgggtgagggcaatcccaggctgaacaacatggtcaacatggctgttgtgctcaacacagagttggaccacgcccttgacgagttgggcaaggttcgggcagaggttgaggaattgtgtgctgagtgcgtagcacgccactatctagatggtggttctcccgcccctgtcgggattcagcacccttaccgttcaccgccccatggtcgcttcgac

SEQ ID NO: 10931 - DNA, 625 bp, Zea Mays
cctgagatggatcctcccaatcctccaccagctgggagttgatcccgcagttacagcccagatgcggataatgcaacaaatggcagataccatggtgaacatacacgctcagatgcgacaggaacgccaagagatgcgccaggagagagaggagatatgccaggaaaggagggtacaacagtagcaagcaccactgcctccaccaccaccaccaccacttccaccccgggacaagcaccgggagttcatgagccacaagccgcctaccttcgccagctcacctgatccactggacactgatgattggctggagtctgtggagaagatgttgattatttcccaatgctctgaccgggagaaggttctatatgcttttggtcgtctgacagggcttgttgctgattggtgggattcatacactattgcccacaatgctaccgatactatcacatgggcagagtttgctactcagttcaggaactaccatattcctgctggactgatgaagattaagaagaaggaatttctgttgttgaagcaggggagcatgtcagttagtgagtaccgcgacaggttcattcagctatccagatatgcacatgatgaagttgctaaagatgagagg

SEQ ID NO: 10932 - DNA, 455 bp, Zea Mays
aaacaaactggtaccaaatcctgaccctcggattgccgatcaaccgttgtgatttaaaacacgacaagggggtacgctacttttaatcctcatcgtgcatccactgatccaacgactatggtttattcacctagatcgttatactctcatgttaatctactcccttcattctccgatcaacgaccgacgatgcttcttccccaccacgccccccagttgtggcgacgcgcgtacgggcgtggtggcgccatgcccggatcccctctggaacacgatcctagtgcaaagctcgactccctgatgatgcaaaaccaaattgaatatggtacgaagctattctgaaggttcctaccatgaatcatgccctcaggcaccctggccacgacgcagcacggtttcgcggtggaggatggccattgacgacgaattctcggtctccccgacgtccccaccgc

SEQ ID NO: 10933 - DNA, 686 bp, Zea Mays
cagggaactacaggggcctctgtgcaagttgcttcaagactcagaacactatttgtagtattgcgggttgatttctattttctgcaagggcttaattgctaatttgaccggtcgaagaggtatggagatggctgggcccctggatcgtcgcccgaacgtccggattaaaagaaatgccctatggatcatcaagcgcgggggatcgtcggatttatgatggacgatctagatctaccgaggtggatgccacacactaacacatcgggaccgcacaccctagaatttacggtttagatccgatatcccagcgtctaatcgtggccgtcggaagctagatgggcgatcacgccacaactcagctacacctcgctaatcgacgacgatgcaagcacccaggcgcggtggcgccctctccggagtagggcatcctccctatttccaccgcgatttcgcaattaactttcgctacattaccctaagatcgtggtgagttgatggggtggatacttaccgacggtaaaggtgcgaggcggtagcgctgcggcaaggcgcggcggaaggtctaagccggctccggtgaggaattccgagctcccgacttgtctatctcaaccggcacaagactcacgaccttccccaagtcgtcgcggagccacccaagtctggattgtagggtcgaatcgccg

SEQ ID NO: 10934 - DNA, 685 bp, Zea Mays
attatgtgctgcaatacatacatatatgtaggttatcagtacgagcaactaggaaacctggctctgtttcttggcctgttgttgatccaaatgcagcacagcatcccatggaaacaaaccagcaatgggggagggggaagaggtagcttaaccatagctttctgttgcgttctcggtaggagtccatgctgatccatggcaatgcgcttgcattgaacgctatcactacgctggcatcagcagaagctccatggattatagcaatgtatgtaggagtagacgaagaggagagcaagcagattgcttttttccactgaggagcacagaagcagcagaagtacagtagtgttcaaagccacaaacacacagaggcaacgccctagtactaccaccaccaccaccgcaactttgttttgttttgttttgctgctgccttttttctgtcttttgccttgtggcttggcagcagccccctgccacaccacctgcagctgcacccgccgttccttctactgctggttatgaacagcagctccaccctcgtgccgtgccccctcccccctgctcgctacctgttctgtctccctctgcaagtgggtccggaccacggtcgcttggtatcctgcgcgtagcgtattgattgcgtacgttacgttacgtagaccagacacggacacggtgtgcc

SEQ ID NO: 10935 - DNA, 376 bp, Zea Mays
tacaaatggtgaaaaacactacggggagcagggagagtattctagagctagcttaccagtaaatcgggtagcgtagaaccccaatccacggcgtcgtgatgaccagcgatatttcttgaagtccggtgagggttcctgagcgacctaactaccaatagattaaggtgaggccacgggtatccttggtaagccataatgatgcaaatttggcccgcaccagaggtccccacggtgacacaaccgagttcttatacggcgatgagttttctctccctctgtgttcttcagcgtgccaatggtttagggaagaccgaaggagcgggtttatatgccagcggttgatagaatctgctaccgagaagctcgggcatgcgcg

SEQ ID NO: 10936 - DNA, 714 bp, Zea Mays
ggctaatccagtaagaatttgtcttgggatactataacaaagatgaagatggtatattggactacaactttgctgcagggcattggttatgttgccatatgaatctgggagaaaatcgagctcaaagatgagctgtcgggccaactgaatgaagggcgccagggtacagtaactgaagtggatcagaccgccagcacggcaatctcaccgccggcgacctctccacacgtagattcatgccgccgctgtcgtgattcgtgcgcggtagggagtggataacaccagggagggataacccgtacgtggcgccatctcccaagcccagccggagtcttcaccggcggccaccgtgaccagtaaattttgccgcggtgtcacccatgcctcaatctccctcactgtatctctttctgacgtggtaggcatgcacttgcgatgctatccgtggccggaggtcgtctgtcgggtcgccgtggctataaatagcacggtggtccacggcgaggtgtttacctcttcaccagtgagctgatcgcaatccaaaattcgcgttgtctctgcccccttctcccaaattgagtctgcatggtgaagctatagtttcttacggccgtgtagcctcaatctccacccccaatttcacctagagccgccgcaacaccagttttcccctttcctctgtcaccggcaagcctaagtcctcctcgctccgtg

SEQ ID NO: 10937 - DNA, 627 bp, Zea Mays
gtcaattgcttaccggagatgggcgtgtgggcagatccgcaccacgtcgtggccagacatcgtcgcgccatcatcgccggtgagtcctcgtccatcatgcttgctttgttcgtctctgcgggaaacgctagccgcatcgtgtttgggctcagggcactcgccggttcgtggggtcgccggtgcttccatcgtgggggtgtggcggcgccacctgtgctgaccggaaaggaagaagggtccctcaccctcgatccagggatggacggatattgttgatcctgggcataccgtttctagaccgttgatccagcgataaacgcttacgattagatcctgagtatcccttgcttgagtcgatctggttcattgatatcaggatgagcggatgctgttagatcgcgcgttaataaaaccccgaccgtggatctcggatcctacggtggacagaacataccgattcgtgttatagtcgatctaatttgggcccttggttcttgatcaagcggctcgagatcgcccgtaccccttcgccacgtccgagttataaaataacccctgggatctccacgaattaacccgtagtcccaagcagttgaaagaaccttacactgaggccctggaattttt

SEQ ID NO: 10938 - DNA, 564 bp, Zea Mays
tgctccttgtgctactaaacataattttctactgtcgacttgaaggacttgaaggcatggtctctcaacctgaaaaagattgcgcataatatatggcgctttggtagctttacaaaaaacaacgacatgtcctttctttttcaaaagataacaatacatgattgaagaatggtagcaacaaatctttagatatcattataaccaggacaagtcaagaagaatgtcaaacatcgagtaaaaggataaggagaagcaggaatgggatgacacttaacatttgatttaccttttatcatgcagatattcatgccccaaggctatagaggggtaactctactacttctcaataactcactgccataacaatgttacctgtttgttagtaaccatgacaacaacccttagaagagaaaagcaaacaacataaacaaagaacacacctaaaattcaaagcattattaagagtaacgcacatgtgacaaaaacataatattcagacggtgcaagcaacaacataagtgttccctatctacaaagggggaaaacataagtgctaaagatttg

SEQ ID NO: 10939 - DNA, 1621 bp, Zea Mays
cgatacagggccttatgaataggctgcgtacccaaaatcagtttgatttcaaaagccgcatcgcgctccggtagaatgactggaagctctgctgcaaacacgtcggcatagtcacacaccacacagatgtcttgcacccacaaggcagcctcactctccaccaccatggagaaaaagattcacgacttccttgaccgatgatccagaagcaattgggacaacaatgataacgtgaactttggagaacttcccaagaataccacctccctacccgacggcgcctgcaataacactatcttccaaaaacaggatataactgtgtgatactaagttaatcaattcatacccaagataacatcaaatgcccccaaggaaatcaccacaagattagctgaaaagacctcatcagcaagaatgacggaacaaccttgacatactgaatagctactaatggagcctttagcagaactaaccacaattgggtgacccatcctctacaccgaaagaccagctcgcgacacaaatttctctgaaacaaacgaatagctagcaccagagtcaaaaagagcatgggcaacaaacgaatcaactgagatcatacatgtcaccacgtatccctgctctttgccatccgcatagggtagcacatatgctccaaaaatacccatagaagaggaagctcccagagtgaagttaacagaagaaccccacggagtcgccaaatgaggcagacgcggagctccaaactgagatggtataggagtggtcggtgtaggagtaggcgcggccaaaaactgaggaaaaccctgcataggcacgaaccgaggagtcccgagcacataaaactactacggagggggtggtactaaaaattgatgctcaacgcttgacatcatgctgacagtgccttgagaggaggaagaagtcactcgctcccatttgagcttcccattgggatttctcctacacaccacatccttgtgatcctgactacagatagagcacctgccactccactgacactcggcacggcgatgcgcttcaccacaacggaaacacaccagccccagcccgggcttaggaacagcacgatacctctaagtactccctcatgaagtacccgattcggagggtttgccatggtaggggtggtggcgctggtgttgtgactttcccctcttatgggctggacccccagtgttgcccctcctcgcgtcctggccacgaggctgatcaacacccgaagacttctgagactccatggtgtactgatgttgcatctccacacccaatgcctgctccaccgtagtacggaaatccaccaacggaaaggcgcctagagcatgcctgatagaaggtttcaggccctaatggaactagcacgccttctccaattcattgtaagccacatgaggaacaaagcggaccattttgttaaagcccacttcatactctgtgatagacttcttctcctgcttgtaagattgcaaatcaatcttcattttctctaggaaggtgactgggtagaacgtcctctcaaactgcttgatgaaaacatcccaagacaggactcctggtgaggaagagtgagctgcatgcacgcctctccaccaaatttgat

SEQ ID NO: 10940 - DNA, 343 bp, Zea Mays
gaggtgctggagaggcttggttttgggcctatatggcgcgatgtgcttagtaggctgctcatgacatcctctactcagatcctcaatggggtgcctggtgatttcattacccataggagagggctgcggcagggggaccctttgtccccattactgtttgtgctggtcatggacattctcaatgcgcttattgtcaaggcagcggatgatggtctactccaacctctatcttcgggttctatcaagcattgaatctctctatatgctgatgacatggtactctttctaagaccagtggccaatgaccttaatattgttgctcagattttggatctttttggag

SEQ ID NO: 10941 - DNA, 406 bp, Zea Mays
ggaatgtgatgattgacaaagtgaagcatcacattgccatacaacaaaaatcatgacaacaccgatggatactatccactaaccgtttgaaaaactgaacttactcctcgcttgccactacatcactcctcaatcacacgaccatcatgcatatacttcacacgactatataatagcaacctaagcgttgtgttacacaagacatacatcttccttcgttgcgagtataaccatattacggcatatacccgcacacctcaatcagttatcttacgccaccactattataatacaccacggcacatacacgcatacgtgtctccactgcattctcatgaccaattttagcacaattatttatgacaatgtttattgactacacaagtgaaacactaaccgatcattc

SEQ ID NO: 10942 - DNA, 560 bp, Zea Mays
tcatgcccaggttccatgtgtctaagtgaatcacctcggctccccacggtaccctgcagcggagcctacacaagaatcacccacggcggctcccatttccctttccctgcttctccgtttggcgcctgagccctctgctcccctagatatccgtagtggcttcaagttgacatgggcgaaggggttcatgggggctcaactggttaaataggagcgagattatgagatacaagttgcatctagtgaactcggttgagttgttgtgatcctcatctacatgagctggattctgttttgatatgggggagatggagctgaccactgggccccacgtgcgagcgactcagtgtggtagaagagggaggccagttgtgcggcccgacgtggcagtgataggaggtggaggtgggctggccgagtgtgtatgttgggccgacgaggtagaattggcccaggcaggtttaattccttcccctttttctttcttttctatttttaacaattaagttcaaatccaagtatagtttggttctaaattttcaaatcaaatgcaacaccgc

SEQ ID NO: 10943 - DNA, 689 bp, Zea Mays
cgacaacgagagtttcgatgtagagagcgggaatgaggaagttgaagatcggccgtggaggcctagccatgttgttttcggaaagtcctatgttaaccaagggcagatcaaagcaatgaaaggcagatactttcatgatatttctattgtgagggttgaagaaggggagagtaccgttcctcttcccgaagctaatgaggtggtagttttcagaagcttcatgaaagctggacttcgtttcccactgcataagatgttggtcgaagttctgaaaacttttgaaatatacctacatcaatttatccccgaggctcttattaaagtagggatttttatatgggctatgaggagccaagggttagagccagacgctaggtgcttctgtaatattcacgaattatcctatcagacaaaagcgtctgtgaaagaacaatgccacaataacatcgacttctatagcttcgtgccccgctctgagaccaactatcttgtgcctacatttcggaagaaatggccgggctcttggatgcaggagtggttttatgtgaagaacgacctggatcagagggaagatataaggggcatcattcaacgtcctatatggtcacgcctcggcatcagaagaccttcagccgcactcaggaatgacgtgcaagcgtgccagacgactttcaatactatatgcacct

SEQ ID NO: 10944 - DNA, 419 bp, Zea Mays
gtggaggtggaggtcagtcggccatggcgcccacactagcggctggaaggttgggcggcgatggtggcaggaggcggcggtggctgctaagggaaggagagactggataccatattggtcgagttgaaaccctaacccattgagtgggatgagtgttacatgtattagagctacatgggctggtctcaaggcccataacacttggatagaataaaatagtctaacagatatcattgttctgtgcctaatggatgacctgacccttttgtacaatgactcaggactggttgagattaagtggaacagtaaattaaggaagccatgctcacgaattctgtagaacccaattttatgtgttgacacaggatatgttaagtaactgctcacttgttaaatgggtgtacttgaaaattacttag

SEQ ID NO: 10945 - DNA, 455 bp, Zea Mays
ttttcgttatgaaatagatcgatggtttacactaaaatttatatccatttatgatgttttggttcacgttttacgctgaaatctgcctgaactcccacacacgatcagctccatatcttatgttctgatatatacggtaacttctagcttcgtgggcgcgctaatcacgatggtgtgtggacccacctgaacgaaccaatgaaaagttcgttgccgctctcatgttatgcaagtctgaaccattaaatatggtagcataaacacgagtaggaaccaactacccgaccagcgaacacgacgctgacccaccttcgtatatcccaactcgaccccaccacgtgtgcaccttctgtttacgtaaaatataacacatgtttacgcatgcataaacgtgctccacaatcgcgcggactcacgtgccccactggcccgacctgaccacgcgcgtgaccact

SEQ ID NO: 10946 - DNA, 596 bp, Zea Mays
ggtcgcgaatttgacaaccttcaagcccgcacctttttctcctcccatggagtccatctgcgcatgtcttgcccctacacttcaactcaaaatggtaaggctgaacatgtcatccgttccatcaacaatatcatttgcaccctcctcattcaatctagtgttccccctagtttttgggctgtggctcttggcaccgcaacatatctcctcaacatactactcaccaaaacacttgcactctctacaccacactttgctctcttcggccgcaacccatcctatgagcaccttcgtgtttttggctgcaaatgctaccccaacctttctgccaccactccacataaactatcccctcgctcaaccctttgtgtcttccttggttattccccccaccacaaaggctacctatgctttgatcgccaatccaatcgtaccattatctcccgtcatgtggtttttgatgaaacctcgtttcccttttctgaggattccaatccacccacaccatcggccttcgactttcttgatgatgactctaacccggttacagctccttttggactatcgcccgtgtcttctttttcaggtactcgtat

SEQ ID NO: 10947 - DNA, 360 bp, Zea Mays
ccgactccagcgcaaaatggatacgtgtctggatcttacctatagcagggctgtaagcgcaacactgtcagttgaagacaagaattcgggccaaggaaaaaccaagagatatgcgggtgaaggatcatctcaggggtctaaaaagcgaacaaggttggtaatccgtcccttcaacccaaatcgttcttctcctctcccacccacatatcccttcaggcaaaccgttttcatccatcccactcctaccctcgcctagaacaatcagccgagtgcccctggtgctcgtttccccgcctttcccagttcctcaagtggctgctttaattgtgggaagtctggaaatttcatcaaagactgccc

SEQ ID NO: 10948 - DNA, 545 bp, Zea Mays
agcggctaatcaatcccgaggacgagtcgtacacgttccgcgcggtctcgcgaagctctccagccaccaccggactccgcatgtacggccgagatcgacgacctcaaactcccgacgctgccgacccgcactctcacgaaaatctccccactcggttgcgttcgtgctgctaggatcacgaagatgggaaaggtggagacccaggaccccgtcacattttataagggcttcacggtctggaaagaggtaacaaaccttcccccatccacggcgtgcttccgccatgcccgagcgaggcagttcgggttgtgcctgacgccacgggcccaccaagcagagacacaccgaaaaaaactgagtgcgcgtggtgagctgaccagtggtccctgattgtcagtgaccgcgacgcgcgagggctgtggtaagcgggccgggcggtggaattcggtattgggccgacgcgtgaggttaggtgggtgagtgatcactatgagcccatgcgccttttttgctttttcttttttttctttcccattccattctcc

SEQ ID NO: 10949 - DNA, 740 bp, Zea Mays
gttacaagtatggtagaatgaactaccaacaccaaagcttaggacaaccacggcgaggatgccagcttccaaaaatgaggcggaggaactagggggaggtcgtcaatccgaggagggggatggggcaacaatggtccgcgtggaggaggggaagcgtctcgccaacgagggccattgccgaagtgatggggagaaaggagcgataggattctgcccccactctccaaaagcaatctggcggcggacgtgagtcagcagccagagacagggggctgtcgggtggagttcgggcatcagcgagatgggtgtgtctgcttcagttgcggggagggagggtgcagtcatagatgggtatgcggctggcaggtagagggctggtggcatgacggtggctagggtttgtgcggaggtgggtgggggtgggcatagacgagtcaaatacaatatatgtgctggctaataaattggctaattgttagttttagggctgacaaattgattgcctattaaccatttgactctggctaattgttgctagctttttgttgactaattattagcaactgataaaaaattagccaattagttaggagaatccaaagaaggccttaagcattccccaacatctaaaatcacgatcagaattacatgtgaagcattaggtggccaaaggctggctgggcagcggctaacgcgcgacaagcctgtggctgtcaatggtggcgaagggcttgggggcg

SEQ ID NO: 10950 - DNA, 401 bp, Zea Mays
cttgggagttgcgacaggagccttttgcaccttcagcaattttgcctctgctggtgggctcataatttctggcattttcattgtttttccacctgtggctcttcggccttatcatccttagcttcggctgggccgactgtaggcaccttcggcactacaatcggctcttcagcgctctgcacaatcggaacagcttgttttgtttcggcagttgaagaggtcccttcgccaaattcaggcactacggccgattcaatatatcgcggccggtgggtcagaaccttcacttttttgcccctcggcacagctgtggtggccgaagtgacaatctttctcttctttccctgccttcgtagcgggtagtgataatcagggtatacgaagccaatcgtatcaaatac

SEQ ID NO: 10951 - DNA, 278 bp, Zea Mays
aggggaagacatcgataaaaagaaatcaagcttggtcgtacctgtgccgtggaaggcgaggcgcttgtgagtgttgatggtgatgggcatacatgctcaaaagaggctgttctcgacagtgtggttcatgttgtctttgcaccttcctggtgaagcacgacgttggggcgatacatgctcaatgccatgctggctgtgccctctagctcatgtcactttaactctccttgtccttttttgcaccaccacattgtcagttagcacttgctccttggcag

SEQ ID NO: 10952 - DNA, 464 bp, Zea Mays
gacgggggtagacgagagtcgtctaggggtagacgaagggtaggcgaacgtagacggagtcccgtcgacgcactgcgcgcaagcaaacgcgagcgcgcgcactagttgcgtgacgcacgacacattgaataattaacacaccgcggctaaataatgacgtgacgacgaacaacctatattacgtttaaacgcgacaattatatttctaagttcgatttagttgacgtaactacttgtgtggaatattttagataacaaaggaattatcaattaatcggtgattaatacgagaactaattgactaacgcgtacgaacgattataacaaagtaaataattattgcgcgcaaactgcgcgcgcgacacgcgcgaaacagcgcgagggcactacaaacaacgacgacggcgcgcgcgatacccgtgatcacgtgcgaaactgcgcacgcgagactgacgagtacgcga

SEQ ID NO: 10953 - DNA, 613 bp, Zea Mays
agcaaatcaagcatagcacttatctctgcatcactaggattcagaggcacctcaaaatggacctgccgttcatcatcaggaatctccccgagcaaggcaaccaaggcactaacttcttcagcagagggtcacactctaaggcccaaaccaccatcagtgacaggtggattcgacacaaaaagggtgaaggctttgggaggaggcaggttccaggccgagtatgccactggggcaccaacattcgacaccttgcctctaaggatcacctcaagtcggttcaccaagtctgcagagggaattcttctgttggtaacccgagttgagtcggctaggcctcgatacagataagccgggtacgccctgtctttcaacggctgaatattcttgaagacaaaatcagcaacaacagcctcagcagtcagacccctctccttcagcaatccaacttcagccagcaaagcaccttcctcggctacctcctgatctgtggaggactcggtccaacttgaggtgcgaacatccggctgtcttcccgaccgagggggagagagtttccataattctcaactatgaaccactccaagcgccatcccttgatactgtctttgtgtaa

SEQ ID NO: 10954 - DNA, 380 bp, Zea Mays
acctccctacagctacaacttgctcaagcctgcgggaatgcagcagcagcgtaactggcaggcagtgctgctgctgggctggaagtggtacgataatgatgagagtctgctgttgggctggttgtacgatagtactactagtaatgagagtgacgctagctagctgctctgctctgcgtctccgatcaaacgagagagggatgacccacgcagacgcagcagcgcccgactgtttgcatgggctataaaatggaccaccacctcaatcgatagggatgaccgggtcacaatcacaactaccctacccactagtacatactagagcagccgatggactcctccgtttcgctgctcgtcaccatcatgttgttgttgctgct

SEQ ID NO: 10955 - DNA, 494 bp, Zea Mays
atagatctaacagcacgatggctgacacgcacatatacaaacgacacgatgaatgcaagtcacatctaagtggcatccatatccaccatcacacatatttcaacgtcatccatatccaccatcacattatgccatatccaccgtttaggccctagcgggccaggctcagactagggaacgagcccgcgggcttagatggcccggctcggttttctaaccgtggccgtttggccatctcgtcgccgtgctccctacgtccgctatcacgtctgtgtcccgatgacgacggccagaatggggttgaatgtggttgtggatctccaaagagaagggacatgatgagagacatcaatctcggaaaaaatttaataaggccttaccaccttaggttgtgggttctttaaaactgagacaagattaaatcaatgccttcaattacccaaagatgctcattgaagttctcaatatatctctactaagaacgtaatgtgggc

SEQ ID NO: 10956 - DNA, 345 bp, Zea Mays
ctctctccatacaaatatatgacatattttccgtccattcttaggctttgccaaataattgctacttaataagttcactatgtgatgcaaaatcgcaatcgtaagtcagcacttgtaaaaatcaatctaataacaccacaaaaaatatgcactaaggttgtccgcagtagatcatgtaaaatagtgaatctgcaatgtaaattactgtttgcagagtaaagtttgaaatagagaacatgataggggtaggataggatagctgctgaagacagccgaatagagtaattgttgttcgggtttggtgcggggaaggctggtttcggtttagcccttccctcatatccc

SEQ ID NO: 10957 - DNA, 601 bp, Zea Mays
ttcgtgaagtcggtgtcatcattgacgatccctagctcgtcgtgaacctccttttggcctcaatgcttgctacaccaacactgccgacgacatcaccaacaccaaacccctgtcgtccttcatcgaagcacacaacatgctggtcctcaaagaactgttcctcgctaacgacgtcaataatgcctagtctaccaccctccttgtcaatgacactgacaatggtgggggctgttctggtggctgcaagggccctgctacctcatctcaggaaggacactgttgcctcaactttgccactcgtcgtgttagcatctctcgccatgtcatctttgacgaacaagtcttccccttcaccacgtcctctctgccatggtcacgctctttcgattttcttgctactagtgatgtggcaacttccttcgtcgtctcgactgcggtcactctgtcctttatgggtgttgagcaatcgctcccttccatatgtgatccatcctccgctgacgttgagcagtcgctctagcaatccctcccttgattcgttggcctcccctacttctattgctcggacatccatgttgtgcctgctgcactggctcctgct

SEQ ID NO: 10958 - DNA, 448 bp, Zea Mays
ttaatgattattgtatggctttaggaattcaggttcagcactcagtcccatatgtccacactcaaaatggtttggctgaatctttaatcaaaagaataaagctcgttgcacgtccattactaataaattgctctttgcctacgtcatgttggggtcatgcagttttacactctgccgacctactacaactaagactaactgcatatcatgactcctctcccttggagttagtacgaggggaccctcctaggatttcccatttgcgtaaattcgggtgtgccatttatataccgatatcaccaccacagcgtacctctatgggcccccacagaaagttagagatttatgtgggttaccaatctccgtcaataataaagtatttagaacccctaacaggtgatctatttacggcctggttcgctgattgtatttttaatgaggaacattt

SEQ ID NO: 10959 - DNA, 561 bp, Zea Mays
cttcaacggctccccacgacaagaaagttcagtttgttgtcccgtccctgcccgcgaaacagcttcgtcacccacacaggcttgcgtctgctgcacagggagctttcactccacgccgcatcgatgggacttcttgccagccacagcattcaagccaacttcgcatcaaggagcaactatgcgaaatcgaatccattgaagatgatggtgcggctgggtggactacggtacattggaggcgccgcgggagagtcaattcggcagagcctttatgtcacccaacaagtagcctcccaactcacccccatccggtgtggaaaaatttgcaagtgagtgtgagaggtaaatgcttccgctgcttggccaaaggccactacgccattgattgcagggatccgatgaggtacctcggctgtggaggtgttggccacaaggcctggcagtgcccgaacaagcctgcctcgacaactgctgctactttctctccatcccctcatgtgccccctgcctcgacagttcgcatttcccacccctgtgccaggcaagcatggcaaggcccgg

SEQ ID NO: 10960 - DNA, 500 bp, Zea Mays
cttgcactggttggtaatataatatcctgggaacagtggaaagaaagcaaactaaggaaaacaaagtcagcaaagaagaatcaaagcgtctgcaacttctgcattcagggctcttaggttcatcctacagccgcctaaatagactttttaaggtaatctcatccactaacatgccacaacctgtgatgacctaattggtcgtgcaagtacttaatttgggtcttctcttgtgtgaggtgacactctttgctgctaagctgctagcaccaatgggcgttggtggccctggattttcaaaaccttcacttgtttcgaacacatctaacaggctaaaaacactacagattggtattttatcagaaaaaaagggttggtagtaaaagaaacctcctaatgtcgtcccaatcagaaccaactcccctttgcgaccccattggcctgtaatttcttttctgtgtcatttttcttatcaaacatctcgaaggggggaaaatatttgg

SEQ ID NO: 10961 - DNA, 562 bp, Zea Mays
aagcaacccagggtggtgtcaccagtaatcacaatctcctgcatgtccagtgccctttcctggtcgccccaactatatgattaagctctcatgacccggcctattcctctttacgttacctaataacagatcttttctcccctgggtcggaatcatcatagcttgtccaaagcatgcaacagcccttcttctgtctctgggctcgacggacagagaataggattcctgcaaggaagggtgagcatggcttgacttgctgacccgtattgcataataagctcgatcaaacactagctagctcatggatcacagacacagaaatcaggctgctttgataagaaatgctatcgagacagattcgtgcctgcgcgacgaatcatgagcgaccagtaaagccacggcaaaggcagatgttttctctgattcggaaaccgattcgatgataacgtacgccttgctattcgttaaacaacgccctgcatcgacccccccttaacgactatctggttctagcggcgcatgcaactggccggccggcatgggttgctgatcttgagttgtc

SEQ ID NO: 10962 - DNA, 837 bp, Zea Mays
agtctctggactgcgccttaaataacagaaaaggaaagggtctcggcgcaagaaacccgagacacagtgaatagctaaagtggatggcgcgtttatttcctataaacaaaggggttcttctgtaagttcgacatcgtgaaggggtgtggatcgagattagccgtcagatctaaattccgcggccaggattagatctagcagcgaatgaaccggtaagcgacgagaaccattggatctgaaatcaatggtgaggattttattactctaggtctatttctaaccgttcgttctcgatcaaatcttgttcgcacgatcaccgatcgacgtccacacagctcccctacgaattccaccccgttttcccccagctaccgccgcgacggcgccaccagcatacacggtggtggccatggccggaaatggccagatcgatattccggccacgaaattcacatcccgatagctccacacgatgttgcagtcacgacgaagatgggggttagttcctcgcctgagatgatgtcgagacgagccgcagccatggagcagtgcggcccgcggcgacgtcctgcgctccggtgaggaattctccggacccaagtgacctgcgcatccaaggaatggcacggacgagcaccatgaatgtcggcggacctccgagacccatcccgagcatcggtcgggcgcaaattcggaagtcgagtgcggcaatggcgagagaggtaatgaaggagctgccggtggctttgagtgcaatggagagaacgtcacgcgtataaatactcaaagacccggctaaatagtctagcgggttgcgcgcgggttggcgaactaatc

SEQ ID NO: 10963 - DNA, 1143 bp, Zea Mays
aatattgaagcgcttttcaccaatagtttgcattttaacttagacatcacatgagaactactacttttcatccgcgaccataaacatacacatttagactacaacaagcaaatcaccgcgactacaagcttaactaaagtcatctaaagagtcggctagctagagcaacaacacagtctgctagacagcatacacgtcggcttgtctattattatcaaaattcgagacaatatatatataacaatcacttaacacaatcaactcctacctaacatgagttggctaatgacgtgactatttcccaattaccatcacacaccgcctttcgccatttttggataaccggcactacacacaactattataatacattttaagttcattcaacccatcagtggagcactagcatatttcagaaaatttcctgagactacgatgacaaggcatcgatcttatcatgcacataaaagcatcacaagcatatttacgaaacctatcggttaacttgatcgacacactacacatgttctttgcctttcaaatttttttttgcacaacaggaatcatcccacttgctaatgataccaacaagacctacttatctattattcacaacacgaacacagttacacgccgcattctagtttctaacataatccttacataactcgtaatccaactacccactaacaataaatcacgcacgacaactacacaacaaccagttaatttatttggacaccgcctgcccagcgtaccactagtaccccgtattttgactcaacacataaacatagaggaagcgatgactacttcggcatgtcaccacctctctatttaagcaaagacaattttcacctacaacgactgaacatccccatcgagcacaccttattttactatgtctcgcatgcaaccatattgtggcgtgcactagagacaataccgattaacttaacgcaattaccactacaatgctcttcgatatacacattcgacatcacagtgcttcgacaaaccccacacttccaatctacttgtcactttcaaacacaccacgtttgataacacacctttctaactaaacatatctcgtcttccaaatacccatcatatgtcacctaatttatatcttcgatccat

SEQ ID NO: 10964 - DNA, 409 bp, Zea Mays
tggaaatcctgtgactactatgactttgtggtcgtcaaagtagtgacggagcttgcgagcggttagaagtaccacatatagtagtttctgaacttggggatacttcatttttgagggcccgagaacttcgctaatgaagtagaccgggtgctgcactgggtatgtatgtccttcctccacccgctcgactactaacgcggtgcttaccacgtgagtcatgcaggagatgtataacaatagatcctctaccggctgattcggtgtggctgggcgtggtggcttgagtactggtggcgtagtcaagaactttttcagtgcctctaaagcttcctgtgcctctgtggtccattgaaacttgtccacctttttgagcagtttgtagaacgacatgcttttctcgcctagcctt

SEQ ID NO: 10965 - DNA, 1102 bp, Zea Mays
gcacgctgaagatcaatcaatcgaggatcggcagccagtggtcgcacctcggtctcatctcgctcccgaaagcgggcaggtgggatgggtggagcggaaaagggagcgggaggaggagcagtggaagcaggagtggtggaggtggtaggtatggttgaggtggtggatggcgcaggagtgactggagcgggcgaagtggtaggtggagtggtagcagtggcgggagtagaaggtgcggaggagcaaggccgagaggcgagttgacgaactctgtatgcaatctcatcggatgaaatctgcagctgaccacctctctgtgtctgctcagctactgctagagctgctcgggctgctctatccaaacgctgcttcttacggccttcctgctgctccaaatagacggtcttccccttgacctgcctgaaggggcgaggagggtcctcgccgtctcctccccctggcgccgacacattcttcgtgcgcaccatcctgacctgaagactggaaatctcatgagagagggagagaatccaggcaggacaggagacggctcacaggcaggcgaggtcactgaaatgatagaagaggtgagcatgtattagtcacatagtcataagtatatgaaatgtgaataaatacatacatagagtgttatgacacagaaatcgagtgatttggcaatcgagaggtcaaacgacgcgaaaacggtgtttgaacaaggaacagtgccataggaggtttgaaattagaattgaggcatgaaatgactttgaattgagccgatactacatgaataggtttatatgggtaaatatgagtgaagtgtgcacttggtttgattttaggtgaagaaagtggaatttgggcactcggctcggaatcaatggctataaaggggaatttgtgtaaaattgaagcctgggatatcggattggcgtgagattttgcgaatatgttactagaggtatcatgaaggtgcctgaaaaatttgggatcgattggagcatttttggctggtttgggcatttcaccgagcacgtggcgtgcggtggattagggtttaggagaaatggccatttgaggttgagaaaccctccctaag

SEQ ID NO: 10966 - DNA, 610 bp, Zea Mays
gctgattcgaggtggctggttagcttactgccctacggagctggtggcacacgcaatttataggcgcatcgagggtcggtgacgaattcggccgaggtgtgctggcggtcggagaggggaggcgagctcagggcaggggaaaaaggtagctttcaccgtggcagtgactccggtgatcgccggacatgcaaccagtgagtcaccgcgaggaagttccgcgctgagacacgtggtgcgcaacggcggtagcttatcggcgacgaggctatccaatcgacgatgagctggggggtgaagtacggcggccttagccgtagctcaatccggtaccggatttttaccaggtcaagcttatctgttgtacatggtgcacgaatcgcaacaagagatcgaccaccggcgacagctcaccggcgacgagtgggggttaagtcgggatctccttcagttcagggtctactgcaccatggaatttattcatcagtgcgcctgatagccacattctagggcagtttttctcgaaaattcttcatggtaatatacccagacttctacagcaattctgtagagctataaaccagctaccattttgtcatagcatccttggttc

SEQ ID NO: 10967 - DNA, 476 bp, Zea Mays
aggcgcttgatcaaatttgaattaaaaggtgagctaactttaaaagtattcaaaaccttgttatctaaactagagcacgatgagtagaagtcctggcgtcatgaacgtacgtgattataaaaaaatgaattagtggaaccaaggtttatataaaaataaaaacaagataattcaatatgtttttttggccgtcggccttatcccatgctgcccagaagcttctaaccaccgcttttctcagccttatctctgctgctcgctcaaatttttttggttgaagctgctggccgcacaagcttgccagccatcttcctcgccaagccgctcgttgtgtcctgcttccgtagttctgcttcacctcgtcgtggtaaagtagccggtctctagttctttcccacgcactcggcctctcgtcttcctgctccatctctgctccagctctctcccatggccaccccagccatctcccatggtgg

SEQ ID NO: 10968 - DNA, 429 bp, Zea Mays
agtggcaggacgaatgaaaacaggctgtttgaaaggataggaggatggacaaggcgaagaacgattctgattaaaaggtcatattaccaacctggttcgcttctcaggtccctgagtagacctgtcacctccaaatccctttgattttccatggcctgtgtttttggcttctacggccaatgtcgtgctaacagctctgctgtaagtaagatctaggcaggtgtccattttcctctaaagcctatcgttgagtcccctcatgaagcaattctttttcttcaagtaagtgttcatttggtcaatagcatattgggataaatggttaaacttgttgagatactgcattacagtatctcccccttgctttagtcgaataaactcctcttgtttcatgtgaagcactccctctggaacatagtgttcacggaa

SEQ ID NO: 10969 - DNA, 581 bp, Zea Mays
gccgtagtaaagctccgccgcggaagcccctgttccgcgtggtagggcctcgtcgtcgcgccaacctctgagtaagatccccgaccactctcaccgtgttgttaggagtgcattgcgcccgtccgtagtgattcagggtagcgtagcgccgggttgggggagctcgccggacttctcagccgttggtgcggtggcgctgccgtcgcggggtaggaggtggaagaagtgttgtgagccgctgatgtgcagatgaacggtttagattaaaacggggcgcactacttcggctaggcacgtggtggccatctgatcggtgatcgacgggtgggattaggactcggttattttaaatcacgaccgttgagactagatcggacggtccgaatcgtgtaccggttcgtatagggctcggtctaatctgcgccctcgactttggatcggacggccagatttggccagtacccccttcgcgatggccatttcaccaaagagcccctgtagtcgttaataattgaacccgcaatccatctggtgggtttcctgtgtctcggtaacacttgcactgagacccctgacctttc

SEQ ID NO: 10970 - DNA, 614 bp, Zea Mays
atattattttattcagcaaactagttcattacaagcataacaaccaccatgtattacactatgcacgagtgtttcctactaatgtgtccccaaactccctaagaagatcatcaaggctagctagggacatttcctcgacatcagaaatgttctctatccttagggaaggcagtgctggcggggcttcttcctttgggtcaatctggcatccttggattttgaaacacttcaggatcttcttgacgggggctagcctctttagcctcctagcatagtccatcttcagggtccgatatgcctcacgagtgttggcttcctctccttctgccatctcgagactttcttgaagagctgcattttcttccttcaattccttgatttgctgctctaggctctccacccgggggtttaggtgggtgtagtgggagaaaaggtcatcaaagtggttgtcaagggtgtggagatatccagccatgtagattatggtagggtcatcttcattatgctctctccctgacagggcctggagtcttctcctccacgcagggttatttttgttgttgggtgtaaagtagcggaggggtgtctcggagactagttggagttttggcata

SEQ ID NO: 10971 - DNA, 514 bp, Zea Mays
gaaacccattgagcatgacttgtgtggtggatgaagcaagaagaccacaaaccatgtccctccagatctgtccaaacccaatctgctgcatgacatcaattaaaaagggccaggagaccgagtcaaaggccttggtgatgtcaagtttgaggagcagccgagataatctatgttgatgaaacagtcttgttgtctgttgcactaacatgaagttgtcctggatgaatcgccccttaatgaatgcactttgatttggggaaaccaattcattcagtcttggtgcaagtcggtttgcgagaattttcgtaatgagttttgcaatgctgtggaccaggctaattggcctgaaatccttaacttgctcagccccatctctttttggcaccatagtgatgtaggcagtgttaagtttccagaaattgctgaaacttctgctccaaaccgtagataccactgccataatatcacttttcacaatgttccagcacactttgtagaaaagaccagtgaatcc

SEQ ID NO: 10972 - DNA, 300 bp, Zea Mays
cgtgaaccgaatgggtggcggacagttgatcgtgttcccggtgattggtgagctcgcagttcaaattggtggttcagcgagcatcgtaggcatgtgagaaagcttaaacgaggaagcaggggacggggactgaccgggaaagggctggcgacgtgagcttggtttcacggtggcggaagcttgaattgggggaaactccgaattcgagcagatgagtggatgattgtggccgattagcggtggttagctagctgactacctcacggagctagacacgggctcaatttataggaggcttcg

SEQ ID NO: 10973 - DNA, 465 bp, Zea Mays
aggttggtctagccgcatagaagctgtgtgagggattaattggagggaaactagctgaagccatatgaattccttgtaggccgaacaacaccaccgcagggccgcaactcactgcattcagaggtgtctgtgcctctagggtcggtgagtatctacccttgcgatttgtcattatctgctcgatgtatagcactttttgtctaaaagcttgaatcctgatgtcggatctggcgaacaccgacgatgtcgccaccacggtgatgcccctcgccgccgtggtttgggatcgggtggggacaatggcttttgggccgttgattccacaggaacagttaggattacaatagaacgtaccggttggggtaggatggatctgcatcgctggatggggatcaaatgtgtatgattttatcttggacattttagatcctgatcgtcggtctggagttgagcggctgagatttg

SEQ ID NO: 10974 - DNA, 467 bp, Zea Mays
tttcccccttagaaagatgccgccacgcacaaggctaacggcgcgcaagtcaactggaccaatcggtgtgccccggcatcaactggcccctcgacatgaaaacagtagcagtgggagtaatgaccctataggagatcttgaagccccagtaagccgacttcaagcggaactgcaacacaggaccaatgcttgggtcgcagacggagatataataaatgaactaagaagggacatccatcatctgcaggatcagcttgctgatcgggacttagcactcgactgggcagtacagtcccgtttgctggcatgtgctaaggaagcaagggctcaggcccgaatcaaggaacttagctcaactatcgatgacctgcaggtctattgcaatacgttgcatgaggaagtccatgtactgtactcgcaattacaccctagtgcacctgcacaccctgctgaggcggaagccagac

SEQ ID NO: 10975 - DNA, 862 bp, Zea Mays
aggaggagatcggtcatgagggagggaacccacaggatttgactctcagaaccggagacgctcgacggaaggcaacgacacacaagacctaaagacctggaagccgaagccaaggcttagcgtagaacttgagtcccatagtcttttaggtccattcacgcataagatacatgggagctctccctccctctcctggcctcttggaacccctactacgagcgtcgagtaacaaaggtgtcggtagcgtgagccaccgaagactagatgtagggacgttctgtccgaaccagcataaaccttgcgccaccgagcacaccatacggagcctaggacacgcacatagaaatttacttgtcggagcagagtttcaaaacactgttagttggcgcgccaggttggggccttgcgcgttctcgatgaactctccaggctctggatggtcagcaaccatagtggcgtagtttaagtcctcaaaacgtccacccattttgggagtctcgacttcgtcatcgacgataggggaacaatgatcagggccccgaaagcccaagttccccgacaagcgacccgctcgacattgtcggaggcttcggcatcctcagctcggttcccctaagagaggcagcgggcgacgttgcacactgcgacccacttgcactgagatcgtgggggatgatagatcatgtctaggtctcaatccatgacctcttcttgtcgaggtcggacggtggacttagttccccatccaatggggccagccataatccgactcaggagtgtatcgtagccaactcgctggagggccgctctccgctcatggaaagcctcgactcgacctaccttcccaaaagtcgtcgccaag

SEQ ID NO: 10976 - DNA, 553 bp, Zea Mays
gttgccctaagatgggtgatcgcaaacgtgttgagtgtgctgtgccaatttaagtcagtgccaacttaaaacgaccgctccgttagtagggcatagtggtcaccccgagtttagtaagagtgagcatgtcgcaccgccttaagtcattaccgacttaagccgaattctccgttagtagggcataatggtcaccctgagtttagtaagcgtgagcatgtcgcaccgccttaagtcattgtcgacttaagctgattgctccgttagtagggcatagtggtcaccccgagtttagtaagcgtgagcatgtcgcaccgccttaagtcattgccgacttaagccgattgcttcgttagtagggcatagtggtcaccccgagtttagtaagcgtgagcatgtcgcaccgccttaagtcattgccgacttaagccgattgctccgttagtagggcatagtggtcaccccgagtttagtaagcgtgagcatgtcacaccgccttaagtcattgccgacttaagccgattgctccgttagtagggtatagtggtcaccccga

SEQ ID NO: 10977 - DNA, 532 bp, Zea Mays
tgtggtttctcatggactagaaatgtttgaggaacgagcagagagactcgtcgttgttgcgcctaatcgacttgaggtcccatggctgggtgagcttgtcggagagtgattggtagttggagacaaagcggtcgcaaaagttggcctgatggttgatgcagtgccaggggagatgacgaagccactaggttgtgtcttgccccagtacgatagggaggtacgctatcatcacatcctccgatgcctcgtcggcgtaggccaccgtcgagtagaattatagccaaccaccagggtctagtttggcctcgcacttgtcgatgttggagaccttgaagttaggcggccactggactgccccgtagctgtcgagtaaagactgagatacagatcacccctgggctttgagacagtcatcatgagcgtgggcatggtggtggtcccatggtggcgatgggcgacgtggattgtctagccagtcctgagcagaccagcgtggcactgggttgttcgttaaggcattgatggaattggc

SEQ ID NO: 10978 - DNA, 485 bp, Zea Mays
aaatttgatcgcattttcagtaacgttttgctggttggagctaatggatgtcttgatcatactaaaccattaacaaaagttagtcaagctaaaatattttaaaatccatgcattccacaaagatgattcacaacgtggagcatcagtgtggtatgaagggatgaggtagagtgcagctcagctgatgcattctagccttctgaccccattctagggacagaccccatcactcgtgcttctgaccccattctacgacggtgctgaggccaaattcagcacccaccagtctgcgaacctgtgatgccccgtcgctgccgtgagctgtctgtcctccagcgacccttgcagaaccgtcctcggtcagagcagaacggcaaagctctgttcaacaacggtaggctccctcgcccagctggagctggtgctgcagcaacagcaacatgtcgtcgctctccccgtccccggacggacccgtcggtaggccg

SEQ ID NO: 10979 - DNA, 955 bp, Zea Mays
gccggttgcgaattgaggcgcagacatgtgctagtggtgcattgcggaagtttctttttagagcatgatgttctcgctttgtagctgctgtcttaagcaacgggggaacatgtgttggctagttaacagcctaatggagacgacatagccacatataggtgagactgtgtgtgtgagagagggagaggcaaaagaaggggggcaggatcggatcctctgttccagtatcaccggctctctctccggacagtcacatggcttgcatgcgtctgtccctgggcaagcccacaggacatccctatgttctgctcgctggtcatatgctgttggattggagctcaccaacactaatcagcctctgattctgtggcctcactgccctgctctcctcctccattttcccatgcctgtactgtagaggatcagttccatggtgacccggccggccatcgttgttgagcttgagctgtgagctcagcttgtccgtctgggaattgattgacaggttggagttggagagcagctagcagacaccaggggtcctcacaagttagtttctggaaatctaatagcatccgggtgatggcaacttgggcacacatgcgcgaccacttctgtggtacgacttggaccgtcgcgtttgctgccgcctttccccttcctctgcgtatgtttgcatgtggaagacgaggcatacatacgcacacatgcgtacgcggcacaccaagctcgtgtcgattctgtgtggacgccatggagtccagatcgacgacgtcgcggaggatagcctactggagccgaacgcaagcagcggcggatcgtccgagcaagtcaagcagagcagcagattgctattgctagctggtcagtcagaacactcgtgacttgtagggctgagccgatgatgtcgctcgctgttggtgtcaaggaatttatgctagtgcagaggtgaaac

SEQ ID NO: 10980 - DNA, 560 bp, Zea Mays
gttttttatgtaatcgttgtgcactaataatttgtcaaatattttgtatgccgttgcaacacacgggcccctaactagtcacatttagggctggtcggtttagggtagacgattagcgaacctgacccgatcaagtgatatggtcgacctagtcatccgactagtcgacgactagacccgataaatcgctcgactagggtttgtacgctgtaaaaaattgtgggccttttttggcgggcggtccggctacaggagctgaactgtcagaggcaccgttgtgatatacccttgcacacgacggtttgtttccaatctcctcgatttctggcgtcttcatctccttctttcttcaattttggttctctatctctaatttcttctcttctcctgttaccgttctttgtcctcctggctcctgggttttgatcactagcgtcgacgcattgcacaaggctcctgcctcctggtaagttgatcaccacacatggattcagggacagtcgacgtattcaaaaaccttggccccagttcgtcttcctcgacacgcaacgcaaggcccc

SEQ ID NO: 10981 - DNA, 322 bp, Zea Mays
gagcgcactgctctaatggtataattcgataggtggtatgacctagctctctctcacgggtagaaatatttttaatttgtgtcatgtgttgtagacaaatccacattttcatggtgtgacaaaacaattgacaagtgcgttgtgttctataccaaaccacactttcgagagtatacacacaattccctatttaatgtaccactgttgggtattgccgacaatatgtgtatgcaacaaagaggaccttgttgccttcctttgtctatcgttggaaaaatacttatatttgggtcaattgaattcgttaagttgtctttgccac

SEQ ID NO: 10982 - DNA, 558 bp, Zea Mays
cggatctcgtctaattacaagtgtatacatgcccaacctactaacgattggatccgctcctgatgcatagtgctggtgcaactgatcgttaggttttgcatagtaaggcttcgattttggcgatcagggggaaatgagggcggatgggttgtagttttgcgggcacttgagctcactatctgcaatttgacctgtgactgttttctgtgtggttttttagtgcgaagttgtatttgagaacacttaagagcgcagaatttgctcagctgctgagatccatagacgttctagctgttggttttagctacaaatgctgtttctgaggggacacacgcaaattatttatgttgatttatgatgctagttttctgcagcagatgatacttagtttccttacctggggctgaaatgctgtgccctgtgtctgtgtgtaactactgatttctcttttagtgtgttaagtcacggcctctaattttactgagacaaatccttttgtagttcggtgttgatgttaagaaactgatatcaaacagaaaatgacctattcaaatccac

SEQ ID NO: 10983 - DNA, 488 bp, Zea Mays
atttatagttatgtagctactaattagtgggttgtggttaggcaataaccatccatagtagatattgaatgtttaattcgtgtttcaaatagatggacaattttttgagcttatatcatggaggcaatgtggaagaagatccgtatagaaatgccaagttcattgacatgcgacatgtgccggtactattcgttggtagaccctccttgagtgatgtgtttacaaaggctaaacaaaagctaggttaccatgaagatgatgacattgcggttgacagagtgcttaacattggtcatccaccaaatgtcataagatgagtcatcccaattgattctcaactggattgggataattatgttacttcggctatgaagacccatttgcaactcatggaggttgtggtgcgtccggttgtagtagaccgtccccctgaagactttgatcgtgatatcgatgacgtgccaactgtttctgatgctcaatctggc

SEQ ID NO: 10984 - DNA, 664 bp, Zea Mays
gcgacaatgaagatctgtggacgttgggtggtgtggggtcggcgcggcggtgggttacatcagatcggagatcggagcagagttggctaattatacggtggtcgagcgcgacgtgtgagtggcgggggcgtggccgagcgggacacacgagcgttgcgcggaaaatcggttgggtgggctagcgtgcagggatggttcaacagatttaattgggtgggttagttacctgtagatgatctccacatgtgtgagatgaataagaatatcgccccttatatgttccttacctcccatactacttaaatagcccattaggatcatagccccatatggagatatgtagccgttgcatcccaaacaaccatctctctatgcaccatcaaaccatatgacgcttggtcgccgaaccaatataatgcgtcagagtttgatgactccgaatggacactatatcagcactagtcactggtgaccgttgggcatgcctctgatctatagcttatggccgaaccaatataatgcgtcagagtttgatgcctccgaatagacactatatcagcactagtcactggtgaccgttgtgcatgcctctgatctatagcttatggccgaaccaatataatgcgtcagagtttgatgcctccgaatggacactatatcagca

SEQ ID NO: 10985 - DNA, 430 bp, Zea Mays
aatcagtgccccgtctcaatccccttgtcctaactgcatcctggatgggtgtttcagcctttcagggggctgtttctggactgattgacttcatgtgctgcaactgagagcttgttgcaatgcttcctgcctgtcaccattggttacaatgctaggttctgctgataacagttacgattgctgtgtttagagtgttggtatcctgaataggccgcttgttgctgcctgaccagtgctctttatgtacacgcgttggcctggtatcctacttacatatattgtcagaagcatcttgtatggaattagtgcggtggcatgctggccagatctctctcgtgctctgttttgtcagttctagattttgtggtactctggtggttttacgcatgacaattggcatgcaattccatagtatttttctgaataagag

SEQ ID NO: 10986 - DNA, 466 bp, Zea Mays
cccaagacgaggtacttggtcggatgtagcctttctctaacaattcatcaatctgcttcttaagttccaccagttctggtccagacactcgataggctctcttggaaataggggcgatgccaggtataagctctatgacaaattcaactttcctttcaggtggcatgcatggtaactccacgggaaacacatttggaaattctgatactatgttgatagcttttgatggttcaatctcctcaatatgggcggtgacttggtgacagcttcctttccttggtctagacaagaccaactccactaacacttcttctcctgataaggacactaacttcaccgttctcttgtcacaactaagactggcttggtattaggttagccaattcatccctaggatgacatctatagtcgcatcctggttacccaaaactattaaatcaatggggaactctatcccccttatttg

SEQ ID NO: 10987 - DNA, 531 bp, Zea Mays
gaaaactcggtccgagatatattggaccgttcactatcttggctcgagtgggcagcctggcttatcgcttgcaattgccggattccatggcaggggtacacccggtgtttcatatctctatgttgaggaagttcttgtgggatccggaccatcagattgagatggaaccaattgttgtgcagcaggatctgactttggagtgtcgtccggtgcgtatcttggaatccttggagcgtgttttgaggaagagatcaattaagtatgtcaaggtcttatggactaatcagtctgagcgcgaggcaacatgggaacttgaggagctgatgcggcagaaatatctggaactttttgttttgggtgagttccgttgattcattaatttttttcttttgtcgccccgatagaagcgtcagaattcgaggtcgaattctttttaaggggggtggagtgtgatacccaatttgcaaaaaaagaagagatattgaagtttactcttttttctgtgttttctcttgcgggttccgtgctttc

SEQ ID NO: 10988 - DNA, 565 bp, Zea Mays
cgggattcgtgctttgcacgcagaagatttctacgagaaggtaaagatctcacggaggggaatggataagatcacggattggagattatcaccgtgcttttagccatggcaacgtgcccggactaccgacgtcgccgtggaagcgccggtgacctcggttgcgccatgccctagcttgttaccatgcggtagtaatcgtggcacccttaggagtattatgcttgcgccgttgcaccagtgaacgccacggttacagccaccgtggtcttccctatctccggccgccaacacgatgtgatcaaattgagagccaccgcccccggagtctataaattgagtgcaccatcgacttcgttatgtattcaagcagctagcgcacccgtccgcacctcaaatcctccagtagagagcttcaatttcgcatttcccccaatccacccaagaactccacacggttttccctcgtcgtgcccagcttgccccaggttcgttcaagcgctctggtcgattgttctagcgtccttaggtcctcctcaagtttcacaactcctttgattgaactaga

SEQ ID NO: 10989 - DNA, 509 bp, Zea Mays
gccaaggttgatcttcgaaagcatagcagaagctgaggccaccaggctggaggacgttgatgtacttgaggaagaacggctgaatgcggtaatccaatcagcacggtaccagcagactctaaggcgctatcacgacaaggctgtgcggcaacggttcttttcagtaggagacctcgtcctccgccgaattctaacgggagagggacgacacaagttatcacccttatgggaaggacccttcatagtagcagaagtcactcggcccggatcgtatcgcctcactcagatggacggcacaaaagttgggaactcctggaacatagagcacctcaggaaattttatccctagctgtatttcaaaactgctggggcgacaatgtattctgtaaagtggaaatatgtcatcaataaagagagatttgaaagacactcggctcgtttacgattggcttgcacgcttacttaattcggggtgaccactatgccctacaaacggagcaatcgactta

SEQ ID NO: 10990 - DNA, 4237 bp, Zea Mays
ggcgggtcgcgcgccgtggcggtggcgggggcggcagtgctctgcgcggccagcgtggcgggagcagctgcggtgaactccgtggtcccagaggtcgccgccgtggggctgcacaattacgtcgcgggccacgacgaccccaccaacctggacaacggcgaggtggaggcaatcgcgaagaagtgagtagctctcgtgtcttgttgcagcattgagtttattggtgaaatggttcgagctactgctgtgttgcctcctggtagtcttgttgcagcattgacgttattcttatatttggtagtgagctacctggatccaatgaagtgccccttagttgaggtttttattttgctcatgaactaaatattagtacttgcagacataatatagtactgtgattagctcagccttttattgtgatacgcacttgtctccccactccatttccaataattcttgcacgcttgtttatttggttcccccatagtcccattgattgttggaatgcaagtaaattttggtttagctagttacatgtatgttaaaagaagttatatacaatttccatatttgtaagtttttttttggtttcttgggaatctaaattgcataatcagttcccgttatctcttttggaggctaattattgatgttgctgttgctcctcttcatatattcttataatgtgcaattttaattttagatatggagttagcacacaggatgacgccttcaaagcagagctctgtgacttgtatgccaggtgtgcttctcggtgctcttgttttttccccagctggcacatgtgcttgtgtgcattaagttttcttaaattcttaaggtgtcacctcacctcacgctttagtcgcttataagcgtaaggtggtagtaaatctcaatcgccccgcttcgtcctaccaacttgataaccatgggcataactagtgttgtgctactcactactcactacctgttgccccctgcatactacactagttggaggcacgaaggtttctgcaaacaattgcaggaaaaaggaataaccataatcctctagatgtaatcatactattgactatatattaagaagcaattggtctctgtttttttaatctatattaagggacccaggcaagcaaataaattattgctattaggcgcagtcagccggccactcagtttatttggtgttttgggtttgtatatttggtgagcaaaatttcagttttctgaatagaaaacccagagtttttgcctcaaaccagaacatacactttgttgttcggtgtcttcttgtgtttactgaagaaacggcatggtaaccagggacagatcgcaaggggtaggaacagtggctagtttggcggacttcatcaccacggctggcagcttgccgagccacgatgaccgaggtagtcctgccgaactccagggagacttcattcctcgatgatctcctaatacaaactagggtctgcctttatagtatgaggcagccacaaaaataggaactgaataacttattttggaagtaaactaatgcatatctccctagaataaaactttccaactaactcgatttctagccacgttgttggtcactttcctgttttccgcctgctgccccttgattactttcctgtcttgcgcctgctacttcttgggctggatcctggcgccgacgcttttgatattggcagcccacaaaagcgtcagtaacagcttgtcattgtcagtgcactacaatgttatcaagtcatctagttgatcttagtcgccatgggaccaaccaggtgactagttggtcctagtcgtcctatatatatcaggactaaactaatataccaaatatgtactgatgtactatatgtctggagtataaatcaagcaggaagataactctagggtggtggctgcatgtaggcctgcaaattgggttaaacaatacgggccttagtgaattatgctatcccagttgcagcctatgtcctaagctgtttggcaattccattatgtttctggtcatccacctcttagtcagatgactaatcggatgacaagaaaactacttgacctaaatgagtcgtagcccctagtcaagtccaggatactgattgggatgactaatcggatgggttgataacactggtgcactagctgaggctagcataccagtgagtggtggttgtcaagtcatgcgctcgtcacggccacctgcatgtccatgtgccatcatgcccatgttgtggcagctagctttcttgtttgcctgggtcagttaggggaaggagcggggagggataagtggatagtaacacaatgtggggtcagctggtccggttagggaacaaactgttgttctctgtacagggcaattcacatgcctagtgagctacctactaacgaaccatcaatccaacatattcctcataaattgccttctgtggccagagctaatatgcacaacacaagcaaataccaagcttgtttggtggtgttggttgtggaatttgtatttgtgcatttgggtggtgtctccaacttttaatgacagcctttcagtttcgtggatggatgtcaacaatcttgcctgggtacaactgaactcatgtatacaatactcatgtagtcatgtattagcatctagatcagatgggcagttatttggtcatccttttcctgaccatgcttttatgcaggtatctttactcagtacttcctccaggagatgaagatctcaaaggtacagaggttcaggcaattataaaatttaaaagtgctcttgggcttgatgatgtagatgctgctaacatgcacatggaggtattgcctcccgatctatctcctatgctcttattgttttcgtctttgtttcccacattctctatgttttatgccaataaggtacattttcctctttgattgttgtactagattggtagacgcatatacagagagaggttggaaacgagtgatcgtgatgctgacatggaacaaagacgggcaagtgtctatgctttgatatatgaatgagatgtttggaacttcctgttggcccatgttataaccatgtcgaattttttgcaggcatttcagaagttaatttatgtgtccaatcttgtctttggagatgcatctgtattcctacttccttggaaacgtctgtttggggtgactgattctcaggtaattaattataaaaatgcttgttaattttttgcatgccttctctcagttttatgctttgatctcacagagttatttgttctgtattttgaagttcagttcgttttttctggcaacgttgctctttgcatagttgttatgctgcttttgatgcagttgatatttcgaagagtttggacaaatgttcatcaagtgttaatgccactactcacagtccaaataagaatgtctttctttacttaccatggtattaagtatcatttgacattatgtttctagattgacattgctatgagggaaaatgccaagaatttatactcggtgcagctcaagtctattggaagaggtaatgctagaacacagttttgtttaggtgttagttcaattataaagtcatagtgtcatattattcataagttttgctttatcaagtaaatcatatagtgtgctgtaaagacagcaatatcaattttgttgttgttatatttattgtttgatatatctcttattgcatctcaagaacattctgaaatcacaaaatgctctcggtttaggtcttgacataggcacactcattgaagtaaggagagcacaacttgcatataaactttctgatgaggtaactcttttctcaactctgttgctgcttatttgttttttcttcatttgggatgaaatctacatcagtacttatagaacaatgtcattttatatccatgctatgatgcatatacactagctgagagtttagacaaaaataaaaggtcaattatcattggtgcttggaaaagataatagagtcaatgtaagcatgtttttgtttttaagtgacattctaaatttcttgcagattgctgctgagatgttccgtgagcacgcgaagcagctagttcaagaaaacatttcatcagcattagacatcttgaagtcacgtattccgtatggaacctacttaccctttgagaagcatgctaccagatttaattattagatgttgtgcatagaaacctgagtgatgttctaagctagatagcctgtggttcgaaggaaa

SEQ ID NO: 10991 - DNA, 858 bp, Zea Mays
tagagacttgaatcattctagcactttaccacttcttagagttaaattaattacatgaggactagcaagcagccttacaaattttatccaaatcatttagtgcactaaaattacaacaaccaattaacaacgtattcttcacgataatcacccaacgatttgcgttttcaattagacctcacatgagcactactactttttacccgtgcccataaccatgcacatttagaccaacaggcaaatcgtcatgactacgagcctaactaaagccatctaacaattcggctaactagagcaacgacctagccctgctatgcaacctactcgtcggatagcctattgttatcacaatccgagacacaacatatactacaacgtttttataaacatatatattcacaagtattttcgcataccgaccaaagcatacgaatcgtaacccactaatctccaaatcgaaatcaccatgcatttacttcccaaaccgtgaatacatacacgtttatcatatgaacacaacattccaataattattctaaagtgactaacttcattacacaacttgtatcacgatcctacttgatttacttgaagtgtctactcaaaatcgtgagcacgatcatacactatatgcgaagcataatttaacgaacacgcaatatgcatcgacacgactcgacttataaatatagagaaagcgatgactactttggcatgtcaccacctctctaattaggccaaaacaatattaactacatcgatcaagtctcatatcacgcaacacttataatttactatctcactgcaacaatatcacgacatgtacttaggacacttcggttcaacttacgcaatcac

SEQ ID NO: 10992 - DNA, 858 bp, Zea Mays
tagccataggtgtaggcagctccgacaacatggcctcctctcctctcgaaggcatggccaccctcatcggtgaaacaaggtcaaatgacctcattcatcggtgacgtagtcacttccaccacagacacctccaccgaggccgccctgaccacttcatccgccaacattggaaatgtcagtacctccattgccaaaggtgcaaccgtaggtgtagaagatggggtcagcacctccacctcaatgtttggagtcgtagcaaatccttggcatgacaggtacttctacagtgtgataagtagggaagagccctctctgctttgaatacgaaatcacatcaacatcagcaacatgtaaaaaccatttaaaagactataataatcagtaatgtcaccttaagaggaggattagcctagcctgaccttaccttgtcccttgtgtgttttaatttgacctctgatttcgagggcctaggcacaggtggatagggcaacctcgaggacgcctagggtggagcggagaccaccggaggagctggagctagtggtggagacgaatatgatgcctccatgggtaatgtcaggggctccaacctcgaggatgaaggcagaggggttgagaccttcagtacatgtattgccataagagttagagtcaccgagtgggtcggaacctcaggcatcaagaccaccataggcactagggctgtcgtgcatgccagagcctcgagcactagggttgtcgtgaaagttggggtttttgcatgggttaatacttcaggtatcaaggacatcgagggaggagtcggacacctcgaccttggagttgtcatgcgctcttgtctcgatgccatcgaggaag

SEQ ID NO: 10993 - DNA, 728 bp, Zea Mays
gcttataacaatagctaccaggctagcatcaagatagcaccatatgaggccttatatggcaggcggtgtatctcccctctgtgatgggagactatgggagagagatctctggttggtcctgattgggttcagcagacttctgagaaggtttgagaaattcattagaatattttggccgctcagagccgtcagaagagttatgctgatgtgaggaggcgggacttagaatttgcagtgggtgaccaagtccttctcagggtatcacctactaaaggacttgttcggtacggtttcttcggaaagcttagcccgagatacattggaccattcactatcttggcccgggtgggcagcttggcttatcgcttgcaattgccagattccatggcaggggtgcaccaagtatttcatgtctctatgttgaggaagttcttgcgggatccagaccattacattgagatggaaccaattgctctgcaacaggatctgaccctggagtgtcgtccggtgcgtattttggaatccttggagcgtgttatgaggaagagatcaaataagtatgttaaggtcttgtggactaatcagtctgagcgcgaggctacttgggaacttgaggagctaattttgcagaagtaccctgaacttttcgttttgggtgagttttgttgattctttaatctgttatttgtcgttccgatagaagcgtcagaatttgaggtcgaattctt

SEQ ID NO: 10994 - DNA, 708 bp, Zea Mays
caacattagttttgtcgcgctcctgaaagcgagtaggtggaataggtggagtgaatgagggagtggaggtagcagtggtaggagtgatagaggccgcgaatgtggtggaatctatgggtgtagtggaggttgctggaagctctgaggcgggtggtggtggtatgatggcaagtgtggaggaagtcggtggagtgataatggaagatggagtgataggctgaggtgagggatcaaggatggctggagaggaacataactgagacgactgatgtctgacacggtaggcaatctgatctgagccaatctaaatacttccccatgctccaccctctcagttgttgctgctgctatcgctgctcgaatagatttatcaaatttgtgcttcttcttgcctcttcgctgctcttaataaattgccttgcccttatcctgtctaggagggcaaggagggtcctaatcatcacctccacctaatggacccaggttcttgatctaggccatactatcactgagctgagtccaactctgatactgccaatagttgactgcgcacacattacccactaacacactgcatgggaatagagaagatgaggaactacagataagatagtcctttgtagcaaagcatgagatacgaagataaagtgaaggatttgctacctagggcacgtctctcgagggaaaccaagtagggaagaagaattg

SEQ ID NO: 10995 - DNA, 564 bp, Zea Mays
aagtaatgcaaattgaaaacacaagtggttatacagaccatacatcaatgttttggccatccagaccatagcatcacagttttggtcatagaatgccacagttttggtcatatagaccacagcactacattaacacaattctagtcaagtagacccaaaaaatagtacaaaagactacctagttccaattagacattgagctttcttttgcttctagttcccatggcaggactgccactgcaactggctttgcttctagttcccattgcaggagatccgatgacttctggctctctcttatttttcttcccatgtcctgccacctctttttttgtttcttgattctcttccttgtctgcaacctccattgatggcatcatgatagacaaaggcatagggactgacaatgccaatgtttggttgcacccttcacctgaccttttctccttgtactatggcactcatgcaaatgtgggttcttcttcacctgcacataaaaacagagtcaaacacactcaatcagatgaacacagagccctgcccccgaggcctaccagttgccgt

SEQ ID NO: 10996 - DNA, 304 bp, Zea Mays
cgaagacttggtcatgttggaatgaagcaactcaatcgtttaaccaaacatgatttagtccgtggcttgaaagatgtgaaatttgagaagaacaaattgtgtatctcttgtcaagccgggaagcaagtggcaaatactcatccaaataaaagtcaaatgtctactcatcggcctttggaattacttcacatggatttatttgggccaacatcgtttgtgagtatcggcggtaattcctattgccttgtgattgtggatgattattctagattcacttgggtttactttcttcgggataaatcta

SEQ ID NO: 10997 - DNA, 333 bp, Zea Mays
gtcgccagaatttactcctccatttactccctccacctctcccaaatttatggcctccttcctcagctagcctcctcgccccctttcccccggcctccccttcgtcactttccactatccaaagcttcttcgctcctgcttcccttttcacaccaagcaggacctgccggtgccaaacgcacgccgcatcacacagaagccaacaaggttgagaagagactgaggaggtcagccagccacttgcccacctccgagctgtcccccatgacaccaccgccaccagcaacccaagtaccaaacgactgggccgcagtcccgcaatagcgtcaagat

SEQ ID NO: 10998 - DNA, 594 bp, Zea Mays
cttcgcttgggtctccactcagttcagtcacaccatccagagtatccagtgcgacaacgggcaggagttttataacaatacgtctcgtgacttctttctctcccacagtgtccaccttcgtatgtcatgcccctacacatcccctcagaacagtagggctgagcgcatgattcgcacagcgaacgatgtcatgcgctccctactctttcaggcctcccttcctgctcactactgggatgaggccctcaccactgccacctacctcctcaactgtctgcccaccaaggaggttgctcaccccactccttacttcgctctcttcggcacccacccctcctacgatcatccacgtgtcttcgggtgtgcttgctatcataatctcgcctccaccactcctcacaagttagcgccccgttccactcgctgtgtctttcttgggtactcccccgacaataagggatatcagtgcctcgacctcacctcacatagagtcctcatctctcgccatgtcgtcttcgatgagctagatttccccttttactcttcatcctccactgcccctctcaccgagctcgacgtgttcctcgatcccgc

SEQ ID NO: 10999 - DNA, 788 bp, Zea Mays
caagagatgagacgatcgagaggtcaaacgacgtgaaaacggcgtttgaacgataaaaagtgccataggaggtttggaattcgaattgaggcacgaaatgacatggaattgagccgatacttcacgaataggtttatataggtgagtatgagtgaagtgtgtgcttggtttgattttaggcgaagaaaaagagatttgggcactcggctcggaaacgatcgctcaaaacggggaattgagtgaaagtgaagcctggaatatcagattggcgtgaaatttggcaaatatgttaatggaggtgttgtgaaggtgcctgaaaaatttgggttcaatcggggcatttttggctggtttgggcatttaaccgaacacgtgtcgtgcggtgaattaggttttcggggaaatagccatttgaggtgtgaaaaccctcccgaaggagctaagaacctgcaggaatgttcaagggccacaaaggaacacattgtacaacatggattcactgggattcacaagatttggaattgggcacaaagtgtggaaatgggtgcttcactggtggcatgaacagagagtaaaggaggaaagagagagaggtggattctcaccagagagagatgatgcacttggacgaggtcgccggagagcagatcaccggagaggagaggtggtcgccggcgaggggtggagatcgccagagaccgagagagaggggcagagaacagagaagtggagagcgcaggcctcgggcgcgagaggggaaaggtttttttaaaaaccggatatgggcg

SEQ ID NO: 11000 - DNA, 399 bp, Zea Mays
cagaaaaggaaaggtacggcttctgcgaaagaaactgcttcggctgctcctagtgagccagcgccgaagagaaaaagggtgaaagttcttacacaccggccacgttacattgaactagccacagtgcctgaatttggcagtgaaacatcttcggcccgcgaagctaaggaatcaaccccgctgccaggagccaaagagctggccgaagtgccaacaacgaaagactcggaggaaccggagactctactaccagaaaccaaagagctggccgaagcgccatcggtagaaaagatggaagaagcaaaagcattaactgagggggcgaagatatcagaaattttaagtccttcaggagaaattgaagcatcaaaaattaagaaggggccaacagtgacccca

SEQ ID NO: 11001 - DNA, 1195 bp, Zea Mays
gtgatcatggctacgcaggacaagaccagttggcccgagttgattggcaaggaaattaatgatgcaattgcagtaatagaacgagagcggccagatgtaacattctttgattcagtagatgtggatttgaacgagagcccgaggccttcggacgaactcgcacccggagctatacgtgttgtcatctactttggcctggacccaaacactaatgaggaaatcgttgaagaaactccatatatcaaggcataaaggtagcctttgctagtaggcaatacatttttatgccttgatataagaaaggcaagcatcaattgaataatgtgagtgtgatgtctgatcttgctttcatggttgatttcatacatttaagtgtatgtttgaatctatattgagtagtgtcctactcaatatattgaataataaacaatgagatgccttgtgttgacgagtgatgtatgtccggtgatgtatttattagtcctttatttttaggcgcaattatattctagaaattggtgagcaatacttgacacacttgtggatggtccccaatattggtgtcgagcattccaatcatggattaatgccgcaacaacttttgatccgatcctcctaggtacgaacatcatttctaggatatgattaataaaaaatgaacgagatgcatacaatatatatgaagcactagttataaccattacttatgggtgtcaccggttgctgctgtagggtctacatggtggactagagggggcgaatagtcttttctaaaacttaatcgcgttggctgaccgaaataattgcggaattaaacttaaaggtctagccacatccgagatatgaccacggcgaggtggctagaacttgcgaccacgacaccacatgcgcatggtgttactaaccatggcgaggcagcctgggccgatagcgtgatggccacagtacgaaactatgccgaaactgcaccacgacacaacgttcatgccggagtagtcatcgcaacacgcacgcagtgtcttcaggcaccctaggccggaactatgtggtgcacacgtggcttagataagcgtctgccttgttggtccccatacgcatagaggtgacccaatgcacaagcacgctagtgatgtctgtagtctgctctagagacggtgcctttgatacgatttgacttccagttccaatagttttt

SEQ ID NO: 11002 - DNA, 382 bp, Zea Mays
gaagcaactccttgaactgaagtacgatggcactaaagatagcgacttatatgactttgaagcaaacagtgtgggatgtgatgtcaagtatcagggaatttctgaccctcctgttgaaattaaggagagtgacgtgcacaaatttctgccagattcatcctatgatgatgtgggttcaagaaaatgcccgcaggaagaaatgaaccatgggcaggagcatgatgctccacctactgacagtccacatgattcagtccctgatgaaggaaacggatttcaggaccccaacatgatctacttggcaagcatcatcacatcttccagttcccaagaggaagaaggatgtgcaagtacttcactgcatgagaattcatctatggca

SEQ ID NO: 11003 - DNA, 540 bp, Zea Mays
gcagagagttgatcaggtcgctacataaaatctggagcaaatcgaccctaaacatgctttgtcagaccaactaaagaagttgtgcgatggtacagtaaccagattagatcgccagctcagtaaactcactgccggtgacccccgcgcgtggattcacgccgctgtagtgattcgtgctcggtgcagttggataacgcagagggagtaagaaatatcgccagtggatgaactccggccactgttcactctagccgccgtgtctgcttagctcacggccacttcgaatctcccctcaccggagttagacacctcacagccttgcgccatgtgcctcggcactttaaccacaccgccgtgactcatgttagcccatccaatgatcgccggtgaggttgccatggtaatggccaccaatcacgtgcgccagtgcacccccctcctctccaaccgccaccgcgcgagttcaaattcaccgaccaccactcaagagccctataaattgagcacaccctcggctctgttaggtattccagcatccaa

SEQ ID NO: 11004 - DNA, 304 bp, Zea Mays
tctcgctaccgtggacccctgccttggccccttggtcccgttggctggaggttgggaccaggcttccctcgccacctcgttcaacaccatagcactgactctgctccccacctctccagattgggtggtcaactcaggcatctcctaccacaccacacctgctatcggcacattatctcactctcatcctcatccctccctttcatctatcattgtggggaacggttccacccttctggtcacctcagtaggtgatttggtgctttcgtgaccgttctacctcaaagatgttcttgttgttcct

SEQ ID NO: 11005 - DNA, 452 bp, Zea Mays
agattcgggtggctgatgggagaactttgtggagcagtgctagattgcaaatgtttgtgttggggccttacctttgctaccaatatcaagattctaccacttggaggttatgatatgattctaggcatggaatggctggagagtcacaatcccatgtatgtacattgggtcaagaaatggatgaagtttgattataaccagagtcaagtaactcttgggggggttcacctaaagtcaaatcatgtactattgtgactaatttacaaatgaagttattgatcagacaggaggcacttgaacaattattggagttgcaagctgtccatcaattaactgcaatagtcattcctgacatcattcagcaagtagtggacaagtatcaacatctattttctactcccatagtttaccccctcggaggagcattgatcatgccattcccttgctccctg

SEQ ID NO: 11006 - DNA, 273 bp, Zea Mays
cagaccttgaggcactatcacgacaaagttgtgcggcaccgatcctttgcagtgggagacttggtccttcgccgaattctaacgggggagggacgacacaagctgtcaccaccatgggaaggaccgttaatcgtatcagaggtcacacagccaggatcatatcgacttactcagatagacgacacaaaagtggggaactcatggaatatagaacacctcagaaagttctacccttagcaatgcctcaaaaatccttgaagaaaagttgtactc

SEQ ID NO: 11007 - DNA, 424 bp, Zea Mays
acgttgtacttcgtcatcaaatccatccaactttgtccagaagctttcgaactgaaatcttcttttaccttgagtaaactcatgtaggccgaggagaagaggacaatgatctgagaacatggtggccggactctggaggatacagttagggaagtaaatctcccaatcagtggtgtagaacaacctgtccagcctaaccagagtaggtgaagccctttcattggaccaagtgtatcttctaccaagcaactccagctctttaagttcaaggtcgtttatgagacgacgaaagcgacccatcatggcacggtccaaattactgttatttttgtcttccgctctatagataaggttgaagtcgccacccactgcccatgggcccgaacagatagctttgatagctctaagctcctgaatgaaagcc

SEQ ID NO: 11008 - DNA, 702 bp, Zea Mays
ggaaaatgggagaaagggggaaggaacttggctctgtagtgaactgaacaagttctgagcagtccaaaaacctggaaatatctccatccactaactaatctaggaagtgctgggtgtgtggcatgcaaaggggctggtgtagaagagggtgtcacctgccattgcttcacaccacttgggatgaacttgaggaggtgtaaaagtccatttcctagctgactcagctagttagctgctgccttgatgtccaacatgcagcaagggagcttcaacttttttcctttgtgtctttcttggcgtggtggacatgcagagagtatgtggagcaccccggccgttgtttgtctctgtgttaaccccagtaaaaaccccaacagccccaaccattgtgactccttgccattgtaacttaagacaccaacccgagctccctaggcctttgttaattttctactctcaccgtgccatgcccttcacgtacgtctaggtcaggtcctcaagccctctccacccctctaattccctgtgaaagcttgaacacaaagtgagccctggcagtggtgaccacatcaacaaatccctcgactcatcgtggccagcttcccctggaaggtaatatgctcggtttgttcacatttcataacccatgtgtgatggtgatgcccacgatgttgtccttttgaatgctaccgtggtaccccg

SEQ ID NO: 11009 - DNA, 766 bp, Zea Mays
caaattatcgaaattagtgtggcgaccatcaccataacctctatggccatcgatgaagggattgaattcatggctgaaaccagaattctcatctctggattcttcacggttaaattcttctggatcatgatgatgtagccttcgacctcctgtcgtgggtagacgttcatttaacatcctttccatggcccttatgagtgagtcggccatctgatgcaattcagcccgagagatagggggctccctgtctccatgttttccaccgtgaacacttgaattggatcctaccatgttagagggaagcaagagaaagtagaatatgaaagtatttgtggaacactcgatctcacctcttacttacccaagctctttcctgatctctaggactgtgatggtgccgatgtgatagcttcgacataggtggtagagcggtcgaaaggatcacaagtcaaacgtcccggtttaggttttttagtggagctataggaggctgatcaaggtgggctatggtactgtcaaccgagtgtgttgacgtgctaaaagatatgaaattgttgctggaaagattctcaccaaatcaatgtaaactgaaattttcagcaacacactgcaacacaatcccctttcacaattttttcacttcttttttgacttctttctcttcttcttttttataacactaatggggtgctgagatcaaatgcaatgacacaatatgaatacgatggtggtaactagcaacttgaggaattttaaacaacacaag

SEQ ID NO: 11010 - DNA, 1823 bp, Zea Mays
agagtagtgaaagtatcgggctttgagtgcaaaggaaaaccaggagggtggaatcgttccccataataatagaggatggaatggatgtatgaggagggtgggagtgagataacatgtcggcatcaggagtggtgtggtaggaggccctggagtcgaccacctaatcgggcaaggtgagaggcggtgtcaatgcaatggtgttgaatgagttggtgagggagacttcatcccaaccaccatccctagggaatgatggaggcagaggtcccctgagcgagaggagaggtagagtcgacgacgagtgtggaagaggggacgctgaaggcggtggagcatcgaagtagacgtggttagtagagctagctggggtagacacgacaaggaagcaccctgggtcaggcttggccacatggagatggtcgtagtccaaggtttatagaaggatggccacacaggaccacccccacgaccgtgaggccaccatagggaggccagtgccctcgtggctattgtgtgcggagatggtgaccatcgctagagctagtagcctaacgagaagctttaggagtagtgagagcgatcgaagggcatgcagagcgcacactgagttttcaaggacgcatcatagagcgtcaggcggatgcgtgggacttggcatccagcatgagatccttgagaagtatctcattgttgacatcatggaaggaggggaattccacggaccgcttgatgaaggcctttaggtggtcatagcgccaactaagaccatgtagaaggtggaggatgtgtggtcagagataggttcacctagatcgcacagggagtctgccatgctttcatctagtggcagtactcagtgatagagaggtccacctgggagaacaaatggaatggggcatcaaggtggagggagtgggcctcctggttaccaaggaactgggccttgagtggaaaatgggcatgaccactgccctaagggtcttgcatgtgcagattaggaggacgaggcccttgcggccatgcacgctgggcgaagagatgaatcctaatggtgcaggcgccatggggagaactacagatggttctagggttgccgatgatgttggggagggaagcatagggttgtagagacccaatgtggctgaccaactatagcaggcgaggttggcgagtacagcgaatgtcggtggaccgttcgcaggtactagaggtggcatgttcatggagcatttgtggagcattggcaggggtgagtggaggaaacccgatcacatgcaccaggcaagttatgctggtggagcaagagtagatagaaggcatgacgagcacgggatgaccatccactaagatgacgaatgcattggcgagtgtcgaagaagagagtaggcaagaagacggtcatgccatcagtgatggctagatgggtgatgacgtttgcaccatgtaggggaaggggtgacctagtcaatggcaggatgacatgtgccccgcgtgcagagaagagatctagccagcaacggccatgtgcgccacgtgcggggggagcagacatgggtagcacgcctttgggaagataggtcatcgccatgaaggcattcatttggggaggggtggccagggggaactagcaatgatgaccaaccaccgatgggggcaagccatgggtggctagtggcaccttagtgcaggtaggggggagggaagagagaagagaatggaatatttggctagataccatgttggagcaaatgaaacccacggtttgaggagctatattaacagatggaaaacatatatgggttgtacctgtcccattacaactg

SEQ ID NO: 11011 - DNA, 812 bp, Zea Mays
ctttgagattgtgtatggtgattgtgttcgctttggcacacagctgctgaagggagaggctcaaaattggtggagaggcgtgcaggcagctcactcttcttcaccaagagtcctgtcctgggatgttttcatcaagcaatttgagaggaggttctacccggtcaccttcctggagaaaatgaagatttatttgcaatcctacaagcaagagaagaagtctgtcacagagtatgaagtgggcttcaacaagatggtccgctttgttcctcatgtggcttacaatgagatggagaaggtgagccagttctgttagggcctgaaaccttctatcaggcatgccttgggagcctttccgttggtggattttcatactacagtggagcaggcattgggtgtggagatgcaacaccagtacaccatggagtcacagaagtcttcgggtgttgatcagcctcgtggccaggacgcgaagaggggcaacacatgaggtctagcccacaacaggggcaagtctcagcaccagcgccaccacccctaccgtggcaaatcctttgaatcgggtacttcgggaggaagtactcagaggtatcgggctgttcctaagcccaggctagggctagtgtgtttccgttgtggtgatgcgcatcaccgtgcagagtgccagtggggtggcaggtgttctatttgcagtcaggaccacaaggatgtggtgtgtaggaggaatcccaatgggaagctcagatgagagctagtgacttcctcctcttcttagggcactgtcaacatgatgtcaagcgttgagcagcaatttt

SEQ ID NO: 11012 - DNA, 402 bp, Zea Mays
cactacaccactctttagtcacatgaccatcatgtgcatcctttattcgattatacaacagcgacctaagcgtcgtgttacccaatgcatacatctttcctcgtcgcgagtataaccatattacggcatatacctgcacacctcaatcaaatatcttatgccaccactactataatacaccacggcacacacgcacatacgtgtccccatattacgcacaagacatcaaccgcaccaatgactctaacaggattaatcatactcgtcattcgcctcgactatcccaatcatcgatcacatgcataaaacaattacacttttcacgtagacacctatcgatgcattccccaacacataatccacattttaaaaattatcctcacagtaaaccacacatcaaat

SEQ ID NO: 11013 - DNA, 329 bp, Zea Mays
gcggggttatcagtgtaatgtttcccaagacttaggacgctgtttcactggacggcgggttgaaacactgtaaacataagggctcaattacaaaaaggcaccgcgaagcggtatcatggatctggggccatccgatcaacaccggacgctccagattaaatcgccaggggtttaaatcggtacacaatcatgttcctccgatccgagatcgacactcgagatccgaccatgtcagtgctgcatccgagccctcggatgggcgacacacggaccggattttataagaccacgctacgatcctaatcgttgatccagggatccacggtcca

SEQ ID NO: 11014 - DNA, 413 bp, Zea Mays
gtcagttataatgctattcggtattccgaacctgaatattatatcttgtatgaattccactgccttagctgaagtcagagaagcgatgggtttgtactctatccatttagtgaatttgtcaatggcaaccagcacgtgagtgtatcctccttgagctttcttgaatggtccaatcatgtctagtccccagcacgcaaatggccatgttacgggtatggtttgcaattgctgtgctggtaaatgctgttgttttgataattattggcaagcttcacacctctggactaactcggctgcatcactctttgctattggccagtagaaactagacctgaagaccttcccaactagagtcctggatgttgcgtgtatcccgcattgcccgacgtggatctcatctagtagttgcttcc

SEQ ID NO: 11015 - DNA, 491 bp, Zea Mays
cgcagatttgggcagcaggagaatggcggcacgagctcatgttcgggggagggagggggtgcctcgcgagcggggcggttgcgcgacggcttcggggcttgtgggcaggatcgaggagtgggacatttgtgtaggatcggacgccttagatcacagaaggatagaacgggcggctgagattgtctaacggcaaaacgcaaaggagacaggctacccccttgcgttctcaataagtagtatatagaataggtggtcttttacgtctacacccgcaggatgttaagcactcgttggatgatcgataattgaaaataattaaataaaagcaccacaaataacaagaaaaatacatataacactcgtattcttaatatctaatggcagaattttctgtcaacacccgctggatgattgataattgaaaataattaaataaaagcaccacaaatagcaagaagaatacatataactatctacactaccgaactggt

SEQ ID NO: 11016 - DNA, 1159 bp, Zea Mays
cgcggctctaatttataaaaagttcaggggccatagcgtatgaatctggacctaaccgtgatggttttacaactgagatggagtgcgggtttattcttaagaaactcggggactctttagaaagtttgccacggctgagtggcgtgcgtgaatcgggaccgttgatctgccgatctgcgatcgagatccattgtgcggaagtgtatgcctacatctaattctagccgttgattagaggatcaacggtggactcattgtcttcttcatccaacgtctggacaccacagacgtcgcaactatggcggtgccgtcaccggtgctcagcctgccggtgatctagggccctaatgcgactgcggctacgtgaaatagggagcggagacgatagcagataggataggcagcgtcttaccgtagtacaacgcataggcgatgctggcgggcgccgtactgcggctccacagcgaagcgtcctcactggcaacgaattgcgccctcctgttacatctttggctcggctatgtgtggaatacgtgaggcatgctccgacgagcgctctgactttatacccgaccgcacccctgatcggatagtcaccctgctgagacccatcaacagcatgggcacgaccagctctctctctcttcgacctcttccactggttttgatgctccgctcaacgctgcgatctcccagcctcgatacattacgggattgttgaatcgcagagcaccccagccggtatttaaaggcgcaaggaggtaggattgaggcgagaaatccgcactggcgacctccccagacgtccgcccaacctcacgcagacaatagcgattctgttacgttaggagtccgtccaggtgggagctcggccggctgttccaaggatcgcgagatcctagcaaagtcgctcgaaggatctggccgttaccgcgacgattacgccaactgactttgagaagagcgcgggcttctgttttgtgctcgcttcggtgaagtagagacaccagccgatctagtcctaggcgtcagcggtggcaaggagattaagcgcgcatagcacttcgggtgatgtcaagggacgtgagctcaaatagagctgttaggaagacgtgccagctcaaataggttgcttccgcctccctttttttgtttttct

SEQ ID NO: 11017 - DNA, 312 bp, Zea Mays
cttgtgctgcagaagaagctgatgaaatcacaaccttctgattattttctgactttccatcagttttcaagagatcgtctggacacagatggcttctaaggtcgaccttttctctcgccattgtagaattattattttggtctactgtactactcactggatgtccatccaaattgttttgattttctgagagactttctttggtgcgctttagatcgtgattatcttcataagttccgacatatgcacttcttaaaactcctggagatgaatctgcattgctatttccataagagtcctgattaccctgga

SEQ ID NO: 11018 - DNA, 442 bp, Zea Mays
gtccaatttgaggaaaacacacgggcgaccggagagagggggaggtcactggcacgagttaccgtggcattcactggagcaacgactcagacgatatcgatagacaggccatctatagcaacctactgcgacgtggtaacaaggtagtagcgtggcgtgcctgggttaacggcgatcatgcggcgacgaccatgcggccacgtctcggcgcaagtgggtgcagtgacagagtggccacagtgccccgacttcatcccttgccaaagatctttcaccccgagtcgttatccggacgccaaggggcgtgaatcactgcgtcggcgtgaatccgagcgtagggatcactagcggtgaggtgcattgcacctgaagatctttctgttactgtaccattggaaacttcttcagtgcgcctaacaaagcaggttaaagagcttggttc

SEQ ID NO: 11019 - DNA, 696 bp, Zea Mays
ggcttttaaagatgcattcaaggtaagcatttaggtagaagacatcaatatcacaaggttcaaaggcgataacagacaatggtatatgaggaaagatgaaggcattggagagccagtggtatgagtacaacaaagaatgtagttgcacccaagcttacacgcggtaaagaagaggatatagccaagagtgaggtaagtaaaacatcgctctcaaactgggataggatattggagattttatagaacgaacatagtgtaattaccaaggtaagatcgagagatgataaaggtaaaggtcatacccaaccagagcacaacaaaggatggagttaaaaactcgcaagcgacaaggaaggggatacgaccaagggaaaaatagataaagtacaacactcagattgagatggaaagaggagatttttaagggctggtataagataaacatcaaggtaagatattgaagtggtaaggttaaatatgatgacgaagtggagaaaacaatcaaggataagataagtgaggttccgacagaagagttgaaataaaaatcaattaccgaaagaagttacaaggaattaacgaggtcaccaaggatgtgcaaaataaaaggatcgctcatggatcattgagaaacaagggtggtcaagggcatgttaactgaaatgttttaaatatacattggatataaaggtaagc

SEQ ID NO: 11020 - DNA, 658 bp, Zea Mays
tgccatagcacaagctgtggagcctcatcgacgactcaggaaatccaaacaactctctgatctgagttgcatgtagagtcacatcctctcgctcaaacctaaacctcatccactaatgatctggatctatccatactgtggcatagaagactttgacccactcctcaatatatctgccactgaaggtcagaagagagtgtaaacctggcagatatgagatatgtccctccgactctgcaccggctgctgaaaggaaggcaggaatatccaaatgctggtgcgctctcaaggcaatctgagcatacaactatgccctgaagaaggactcctgggtcctagtgctaaagagtggtgcagctgttgggtccctctgagctagcaaccaagcatccacaggtacatgtctgaaccgacgtaaccggatagctgtggctcgctgaagatcaagcaggcgaggatcagcagtaagtggtctcacctcggtctcgtcacgcttccggaaaagaggtgggggaataggtggagcggaagcgggagcagtggaagcaggagtggtggaggtggtggaagcagcgggagaagtggacgacgcgagagtggtaggagctggcgaagtgggaggtggagtggagactgggtcacaagaagtggagcgagc

SEQ ID NO: 11021 - DNA, 616 bp, Zea Mays
ctactctgtaggagtaggtgctttcgtcgttctatatgatgagtgatgaagatggtgattgacatgtgagtgacgagaagcgaatctactgagtgaccagcagtcttggctgcaccctaagcaaagcaagaagcgccgaaactggtgtcggtacggcccgtctggcacgggaaacgatcctgcacaagtcagagtggcgctttactgctgcgctgcacaggggcaagcagtgcgctaccgatgcgcgtcgcgttttggaccacgctggggctggctggcatgcccatcctccgtgctgtgccagtgcaccactgcccagtgctgaagtgaattttgctttcgcttacgcgaactgaaaagcctgaaacgtctctgccccttgggccaagtcgtcgctcaagactcgcgcgtggcagcagtgcggcggagggggcacaggaagggaaactccagcccagatcgtatccgtgtctgggccaggccggatcgaatccatgtttcaggcccgttcagtgctaggtcggtatagcgcgttgagacttgagagtgccatgttccgatgttcgacgacctggtcgtcgcttcgctgaccgcgcgtgccttgcctccctcgcat

SEQ ID NO: 11022 - DNA, 556 bp, Zea Mays
gaagtgcattcccttgcaaattgaaattttccattcccccctagctgccacagcccttcttcctcctcccggtcaccctcttcttcactgcatctccatgcttgccccccagccgagctcgccacttgcctcactagtgccggttccaccttggtcacgcctgccactatgagctccccacgtcgccatctatggcagccacttcctcaacgcctccctctcgccccagcaccagatttcctccactcggcaccccctacaggtgcagcagttgagctcctccatggctgcgtccaaggtcggctccagcccccctcctctctattccttgcgtagaggaacttcttctccaagaccagcgctttccccctccctgcacctcccctccatgccggttccctgcttccctcgaatcccaatagcgtgagcaggcgccttcctccaagcgcctccatgctccaaaatccggtgaaggccttgcctccatactagctcccttggtcggcgagattctccatctctgacgctggccacccccttcaccgcacgatgtctc

SEQ ID NO: 11023 - DNA, 571 bp, Zea Mays
ctcgtcacctcgccgagcaccagctgctgcagccagagccgccccataccgcactggcctcgcccgactggagcgccgccgtccccgcttggagccatctcgctgatggattcgccgtcatgctcgtcctcgccgcgtatcgctgcgctacgtgcctacgcactcgtcgtgctcgtgtagcagggccctatgagtcgcctcacacctcgtcgcaccgtcgatgcccacaccaccgtgctgctgcctacgtcgttccccgtcgtgtgatgcacgccgcagccaccgcgcctcactgacgtcgcgtcgtgcgccaggagcctcgatgtcgcgtctaggaaccccgttgtgtccgtcatgtccttgcttgtcgatgtcatcgcgaaggtgagttgtctaccgctcgtctaccccttattgtctagcccccatctaccccctagacgtcgtctatcccttctagagcccatctgtctacccccgcgtgcacgcgtcgagcgttgaatcattgcgttgtgctcgctgcgcgttgctgtcgctcgatcgcatgttgtgtcgcacacgtcatttcacg

SEQ ID NO: 11024 - DNA, 699 bp, Zea Mays
acaaactcttccactaaatcccagtcgttgcttagccaagctgcgtagcaaagggcctcctcatttcgatcccccttcttcactttaaagtgtggaaagatcacatagcaatgcgagcacaaaatggtcgggggcaaggcaggcagtccttcgacatccccgggcgccacataaaaccaaaagtcccaccagttgccccacttattcttggcacaaggaataatctcaatcacttcagccgaagtattcccagtcctcggcgtgaacgtgcacgacccaaattgagcaatcaaaccacctatcttccttttctgccagtgcaggcaataattcttggcgaagacctcaacagacggttctccaccatatgatgatatagcccagacatactcctctagtgcaaccatagcattcggtttcaattgatgaatttgaatttcaaagttctgcagaacttccactacgaagcgatgcgccggtaagcgaaagccagcaacgaaaaactcctcgaacacaaccaacacccttctggctctgggacatcttcagccccaggcgcccgcctgactccgttcccaaaataacccagacactgcatctccagcatgcggcccgagtaaatcctcgaggtaccaaactcgaccgtatgcccgtgctgcagttccacaaccgccgccggatcgctaactgtcttctccg

SEQ ID NO: 11025 - DNA, 1202 bp, Zea Mays
atgcccgagatgtgtgttaggtgtcctattaatgccaccacctcccgctctatatctatcgggctctctggtggctgaagaatattcgaccctgtgtacataaggatggcacggcacggttataatatgttgccggtggagcactctgcatattgtgcagctcctagttttatgtacacatacctggacgatccagcgtaaggatctggacagtccgtgtctggactgaatggtccaagtgtgtatccggactgtctggttgtatatggcactgcctgggtagttccatacctgaacggtctggtgtgaggggccagacggtccgcgacctgaccgaattgtttggggttgtacccaaatagtccgcccatgtggcttgacctgggtggtctgcgcgtagattcgcgcggagtttgacggtctggcgaaacatgttggacggtccatgacgtatctagacggttcggtgttagggaccggacagtccacgaccgggacgaatgatccggaggtacacctagatggtccgattgtgtatggcgctacctgagtgatctacgtgtgggcttttatagggtgggactgtccgagatgactcacagacggtccgattgtgtcgaaaactggtcgtgtgcctggcggcggcggctgtgatggtgacacgaatgtgtgcatcagcgtaccatacgatggctgggccaaaggagacccatttatagccgagtgtttggtacgaatggttccgtattggattcacgcgagggaaactaagggcggtaggtttcttatatgaaagcgcccatcttttaatagattcgtctacgtattctttcatagttcccctcgttgttccatgaaatcctcaaaagatggatctggggtacatacaatgggaaccaaaaggcggaggtaggagagacgtcgtgtcgatctccccttgactgatgatcttctagtggcgatccaccatgaagtatgatatgtacttttctgtcgcctttatgtgtcattccttaagttgtcgcaacacctcctcctcctccttgtcgcgtcgttcggcgagttgtcgcagcacctcctcttactcgtgccttatgaggttatcgaagtgatgctggtcatcagccgagagtgcctccatggtcagcttgatgatgttggtggagacgtcggtgtgttctttggaaccgcccatccggggg

SEQ ID NO: 11026 - DNA, 475 bp, Zea Mays
atgtacttgcgtgtctgtcaactgcgtatcctgctgggatgctggagtagacatatcgggtacagtttgggggggggggtggacatgtacatccttatttacgtatcatgtaaacaaaaaaacattgtttaaaataatggcatcaaaacgatatcgacaaatgtttgaatgaattttttatattgacgtaaagaccataaaactgactaacctgcagtctggggaagaatatcatctgattttgtagttgttttctgcacatcataaccatcttcattgtcccccgactcagcacggaggacctcatcaattaactcgccaaaaacatcagatagattgtattgtttctcaacaatctgctgaagagtctgtttaataactgaacatgccttaccaacctccgtatcataatgtgacaacttctctatgaaacccaggcggtggcgggatggaagctgattcagcttgcttgata

SEQ ID NO: 11027 - DNA, 778 bp, Zea Mays
ggaaaaagggacgatgacgaaccatgtctatcgttgccagaattggggtccagtaggattcctatagaacttggtattccatccatgtgaatgtggtcctatgctcatcaggtgtgccacgatcttggtcttgtgtagcgtagtcaaattgggactcccctacaaagttattaaaaatatggttagatatcaatcaccaatttattaagatatgaatttaatggtacctgtggaatgtatcggaggcaccaactcgaactcaccaccaccaccaccactaccaccaacaccgctagcacccccaccccaccatcatcagaagatgacgtaaaactgctatcgataaactcttgatatattggacttctaccaccaacactgctagcacccccacccccaccatcatcagaagatgtcgttaaactgctattgataaactcttgatatattggacttttaccaccactttcggtctcgtcatcgcttgccaccactttctttccttcctctttcgcttttggtaacacgaactgcacctttcgcttgtgagtgtctctcacattcttccacgtctactcaaccaagttttctcttcaagtgcctttaagccacatggtaatggggtgtcactcacggtgtcatcctcatccaacatttcctccacgggatgcaagcgttgtttaaaatgtgtagcactgcctctcttccactgtgttttacaatacatgcacttgaatctaggatatacgttctccccgtactgccaaaccgaatcgat

SEQ ID NO: 11028 - DNA, 456 bp, Zea Mays
tagaaggggtgcgacaggagtcctcatgaagtgcatttcctcggttactgggaaacagctattagatgagatccacgccggatagtgtggaatacacgcagcatccagaactctggttggaaagttttcaggtctggtttctattggccaacaacaaagaatgacgcagccgagttagtccagagatgtgaagcctgccaattcttgtcaaagcaactacatttaccagcacagcaactgcagaccatacctgtaacatggccatttgcgtgctggggattggacatgattggacccttcaagaaagctcagggaggctatactcacgtactggtcgccatcgacaaattcaccaaatagatagagtacaaacctatcacttctttaacttcagccaaggcagtggagttcatacaagacataatattcaggtttgggataccgaatagcatcata

SEQ ID NO: 11029 - DNA, 494 bp, Zea Mays
aaaagctgagcctgaagtccaaaagtctggaaagagcctttctaacccttttctccactgctctacctcttttttatagctcaaatgtggagagtgatacatgtttgatgagtagtgggccctacctaatagaggctcaattcctatcttttatttgacatggagtcgtatgtggcgcatgccttggacgtgccacaacgttgagctgtgctacaggcctacaacctataggggagatacattctatcgcagtggcattactgtaggccatgccgttaggtacgacgtagttggtaaacgatgtagttgcttgtactttataatgcttgcaggtatgttagtatgttcaaacgtggctatagtgactgtggcacttactgcacaatggccttgggtacacctgccacccattattgtggttatagggacgatgacatgtactatatagtggctatgtgtgcctactgccttcatcgcagccacagtgcacctcc

SEQ ID NO: 11030 - DNA, 336 bp, Zea Mays
acctacacatgtcctgtatgcgatcgttaatgtaggaatcgacgagctgagatccacaacgcatcttctatcccattagtctcttggactttattgtgggcatcatctctcctttgtcgtcgtaactctcctaactgcatttcctcgtctcctacaaaaaagagtaagtacggttgtaacattaaagctggtgcaaacaataaataaataccaacctcattgtaatctaccatatgtccacaaaaatagccaacaccaagctcgaaaggaactaatccatatttagcttcaacaccacatttgcatagtactggatcaaacttcaactcttctgcc

SEQ ID NO: 11031 - DNA, 590 bp, Zea Mays
cccggtgagcgtgtcagcgggacgggggcataaccctgccggagttatcatggagcgagagtacgagctccggagtagaggtccggcatccctgctgaacactgctcttgacaccaatgcttctgtttgtgttcgtctcctaggtacgcacctctctctcctcgctcatcttccttccctcccggggatggtcgccgccggtaggccatagctgcactcaaggtccccacacgctctcctgccaccaatggaggtccccatggtgaatcttgtatcacttacgcatcccgttcacgatctccccatggatgatgtccgccttgccaccttccgtggcttcccccacacgtgtcgccacctttcgtggcttcccccttacgcgccaccggcgtgacggcgacagcaatgatgtcgcgagtgccatggctgccctcctcggttgatatattggtgcacccctatctacgccgtcgtcgagaacaacgacatccatgatcaggtcatggacttcgcacctgatgtcaacgccatgattggtgtttgtcaactccaacatcctccacccctacggttgcatggtcctgctcgtc

SEQ ID NO: 11032 - DNA, 1614 bp, Zea Mays
tataacaaatttccaaagctctaatgaaaaagaaaaaggaaaaaggttgaacaggactgggccagttctagcccagtcggcccaacccaaagggaaaggcgtgcccgcgcccgcgcactggcaactttgcataggggcccttgcgtttctgtctaacagcgaacgagttctttcactgtttaacagagccactgacaacttgcaaaagagacccccggtttctgtttcttagcagtgggaggtcctcgacggcgtcgagcgcggagaggctccggcgagctcctgtgttggccgaatggggttatgaccggcgctcccgagcggctaacactcagttgaactctccccgaatgattcccctaagttaatttctcatttggtaaactatcctgctctgtccacgtgaaccgcggacgatgaagaaatggtacgtgttcccggcaatccctggcggtccggttcaattaaagggtcggggagcatcaccatcatgtagggatgctagaacaggaacaagaagggaatgagcagacctggggaaggctggccacggtagggtgtggttctcggcggcggagagggatttggggcgaattcaaaattcgcgagctctggcgaaggactgctagcgattagcggtgaccgggtggaggatgaccttgcggagctagcgggggcttcaatttatagggctcttcggcggtgaccgtgaatttgggcgttgatgtgcggcggtcggaagtgaggaagaacgctggtgcagtgaacacgtgttcatcgtcgtggcagtaactccggtggtcgacggggagtttagagggagtcacggcgatgcggtggcacggttaggacacgcggtggacaacggcgatggcacgacgacggtgagcagctttacccgcgggcggtgagccaggggaggagtaccgcggctgaccggggtggcttccggcttgacggcggcgaagatctttctacccgaagcgttatccgattaccagcgagcgtgaatcctaacggcggcggcgcgaatcttcgcgcaggggggtcaccggcggtgagcaagctacactggcattctgatccactcggtctactgtaccatggcgagacccttgcagtgcacctgacagccacagttgagggccaaattgctcctaaatttcaatggcaacacacctaagtttctgcagcaaagttgttcttgtatagtagccctacaactttgttagagcaaccttgggtaagttctcactgtatcttagtggaaatagctctcaaacttggatcaaagtcactgtgaacttaaagttcagactgtatcagtctgacagtccaactttggacataaatatctcagaattctttatggtaccaaggcatgagttctatagcaaagttgtgctccttccatagatctacaatattgatgtggttacctagggcaaaaaccccataatttgaaagttacaagggcttcaagttgagtcaatcacactggaatgcagacttaaccaaaaagggtcaagtatggctcttttgcacttaagtccaaatctcaagttttggattgcaaatccaccttcttgtgaaccatatgacttaggataccct

SEQ ID NO: 11033 - DNA, 923 bp, Zea Mays
tttgggacaagatatcaggatattattttgtttgatttattgcataaaggactacgatatatatcactcagctgcatgtatgttggagtcagttccttggagctccttgcaattgaaaattgaatcattgcccttgaaggaaactcatgctgtggtctttgcttatttgaacatgtggcttgcaccctgattctggttgtacgttatgcagattgcatttcacttggttgcatattggattccaacaatgaaatgaacagttttattgatctttttgtctatttgtgtttcttttcgagtattgagtattttctgaagatcaattctattttcctcttaaatttcttatatttatattttttggggacattcaagagagctgtttgtcatttatcagagaatcaaagaaaggatcggtcccttccggagccctagggtgatgaccaaacttagacatgcacgcagaaacactagttatccttgctgattgtgacatttacacgtatggttttatttactgtcgtatgtactttggacttatgtttctatcatttgttggtcattaggctatagacttgagaaataggtggaacttaagtttttattgggtgttttactatctgttttgtcttcttttctctatacatatgttacaattttgtaatggaagttacagaatgcagatgttgtgatgtgctctttgttctctcttctttaaaaaccttacataaactatttttttgctagttttcccatgaaagtaatgtggtaacagttattttagagggattttaatcatggtcttaaggcagtaaggctgagctgtggtgagcactcccttccaattgcctaggtgacgtctaggcagtgataaggcgaggaaaggctatggcatacgaatgtaccatgtggctgaggaaaaa

SEQ ID NO: 11034 - DNA, 340 bp, Zea Mays
cgctcacttgtttatggggagatttatgctgctgcataatttttgctcttgaggtatcctagaaattacagtagtcgattggtacttgctagtgtatctaaacaacttggcgtacctccatgatctcctttaatcatggattgtgaaaccaccatttttgggtgttggttacttcgtgacgaggggaagaagacaccgagtggcacggtatggaaggaactcaccgattttctaacctactgcattatgatctcttctccttatttttgtatatttcttgtttggaacaaacatttccataagaacaagtaacattctcttgtgttataagctgtttgcg

SEQ ID NO: 11035 - DNA, 1096 bp, Zea Mays
gccgctggcgcttagggttttagcggctcgcaagcgacgttggcgccgcgcttcacggcaatccgccggctacgtcattgatttgtttcgcgaccgcccgcgcacccaccctgtgctgccttgcgcgatctccttgtttttgctcgacccgtctctgtcaacggggatgtgggcgctggctgatgcatcgaggactcgaggtgatagggaaacgcctgtgctcaatctgtcccggaagcaggggatagggaaacatcagccctctgtcttgaattcgttgccacagagccgcgagaccggatccgaaaatggttatttgcagttttgcacgatgtatcacgatcgcttcagtaccactgatgtgtcacctcgggttttgtcagatttaggatgcgcttaaaacccactcgtagatctaggatgcccctaaaacccactcgtatatctaggatgcccctaaaacccactcgtagattcacacatgcagtcttggtgttaaatgatttagggtgcagtgtgtagatcagtagatgttcaatccacttgtctactgcaagttgcatgagcaagctctggtcgctcacagcgtgtttggtttgcatcacaaaaccattccatggcgtgtgctgcagtttggtttaagttgcagaatcaatcagtctttcatggagttgttctacgtagagaccccccgttggctattcctaaggaacaaacacattcctccaaaaagttcagaccatgcctcactggtacatgcggttttggatggatatccaaactaaatgggatgtttattggcttttttatgcttaagtaggtcaaatcatactgcaacgtcaaggcatctacagaccaaaacaacagtaccatgtgacaaaagttctctgtcaaactggttttactatctattaagttagtactgtagagaacttaatttatcaaatccagttcgtgggcgtaccatgcttatcaaaacaacagtaccatgtgacaactccgcccgcccgcccgcaaatccctccgcgctacgcagccaacgccgacaacgccgccgcaatccacccgcctccgcaaaccacgccgcgacgcaaac

SEQ ID NO: 11036 - DNA, 385 bp, Zea Mays
gcgacatgctcgcacttactcgacttaggatgaccactataccctactaacagagcaattggcttaagtcggcaatgacttaagacggtgcaacatgctcgcgcttactcgacttaggatgaccactataccctactaacggagcaatcggcttaagtcagcaatgacttaagacggtgcgacatgctcacacttactcgacttagggtgaccactataccctactaacggagcaatcggcttaagtcggcaatgacttaagatggtgccacatgctcgcgcttactcgacttagggtggccactataccctactaacagagcaatcggcttatgtcggcaatgacttaagacggtgcgacatgctcgcgcttactcgactcagg

SEQ ID NO: 11037 - DNA, 355 bp, Zea Mays
gacataaatgcaagcacagatccgtcgggacgataggaaatgaggcatgaacgccaagaaatgcaccagacacgacaggatcgacaacatctaccacctccaccaccgccagctccacccagggataagtaccgggagtttatgagtcataagccgccgacattctccaactcccccaatccactacaagctgatgactggttgaagtccgtggacaaggttctcaacatagcccaatatactgacagagagaaagtgttatatgcattgggtcacctcaccagcccctctgcggattggtgggatgcatactgcgctgctcacgctactgccaacaccattacctgggcagaat

SEQ ID NO: 11038 - DNA, 365 bp, Zea Mays
ctagccgtccgatcttagatctacggtgcagatttgctgactccgaaatgtttcctacttctaatctgagccatcgatcattcgatcaacgggccacgatcaactccccaaacccaggctgtcccgacggcgacgtcacacaggggcgcggtggcgccatcgccggccatccggaaccctcggttctagcgccctaaacacgattctgttggctgctacactttagtaagggacgagcgaacatggtgtggtggttgctcaccggaatcgagaaccgaacgaagccacccgcgacgcacggcggagatgcagcaacgacgagaaatccagggcgcttgggcggtcgaccgagcgtaatacttcac

SEQ ID NO: 11039 - DNA, 400 bp, Zea Mays
ctcctatgttcaatcctatgctacaaacatggttcgttcgggtagaagctaaatgtgatgaagcattaccgccagagcatccaacacgaccttataacattcaatttgagagtaagattttcattgtgtcataatgcatcttcaacatatatgatattaacctcaggagtgttgtagacttcctatactctgacttcctagaaattagactcaagattgtgtgttgtggagttgcccatattgcattggaagtgtggaaatcatattctctattttcgttatggtgctattgctcggctttgtgttgctcgtgcacttcatagcgaagttaggtatgaatacaacattgtccccattgtatgttcttacctcgccaactagccttttgggtgtatgtctc

SEQ ID NO: 11040 - DNA, 681 bp, Zea Mays
aactctgtgcatggattatgcttttcatcattatcacctttatccttatcacctctatatcttaccttgatgtttatattatatcggcctttaaaatatcatcttttccatctcaatctgagcattataatttacctacttttcccttggtcgtatcctcttatttgtcgccttcgagtttttaactctatcctttgttgtgtttttgtttgttatttcctttacccttctcatcactctctcctaccttgtgattacattatgtctgttatctaaaatctccaatctcctatctcaattcaagagcggtgttttacttacctcacccttggctatatcctcttctttaccgtgtgtaagcttgggcgcaactccattctttgttgtactcataccactggctctccaatgccttcatcttttctctcatacccttgtctattatcgcattttacccttgcgatattgaggtcttctacctaaatgctccctttgaacttaccctttaaagctttctcttttctgacccagtttgagagtggtgtgttacctatctctcccttgattactctccccttttgtcgcctcgcaagttttgactcaacctcatcccttgtcatacttctatttattattactctgtcatctctcgatatttaccttgatgcttatgttgtacct

SEQ ID NO: 11041 - DNA, 450 bp, Zea Mays
cccttaaaaagaattcgacctcgaattctgacgcttctatcagaacgacaaaagggaaaaaattaatgaatcaacaacacttacccacaacaaaaagttccagatatttctgccgcatcagcttctcaagttcccacgtagcctcgcgctcagactgattagtccataagaccttgacatacttaattgatctcttcctcaaaacacgctccgaggattccaagatacgcaccggacaacactccaaggtcagatcctgctgcaccacaattggttccatctcaatccgatggtccggatcccgcaagacatgaaaaactgggtgtaccccaccatggaatccggcaattgcaagcgataagccaagctgcccacccaggccaagatagtgaacggtccaatatatctcgggctaagctttccggagacaccgaactgaataactccttt

SEQ ID NO: 11042 - DNA, 326 bp, Zea Mays
gcctgtcgtgctcgagttcagcatcgtcatcaggagtgacaacgatgtggtcagcacggacaaggatgtagacaacaccacgtcatcgcctcctcaccaccgctgataccgctatagtagcagggcatgacacacgtgctcttcctagacggtgctgtgacattgggtcgagctcagcttcctctccgctgacctgcagtagaagcaatagtaggcgtcgggtcctaggatcctaccgaacccgcatgctacgccaccgaccaagaagagtcgccacggcccacgctcccgtagctcgcagtactacaatgtcaccttcaaccgcc

SEQ ID NO: 11043 - DNA, 705 bp, Zea Mays
gacgtcttctgttgccccagtagctcgagcggtgatggtgtagacgtccaaccagcccctaggtcttgcttgggttcgtatttgtcgacgttggaaactttgaagttaggaggccattggatggcacagagccgggggtgagcgtggatactccgcatgtttcctcctatcgatgatcatgctgccagtcccggggaggggagcgagtctcatgtcacctcgaccgtccccggaccggactgttggtggaggctgccgccaactcgatcctagttacacggtcacgtgcttgtgtaccatgatcctagtcgtattccttccggtgcgttatttcattttcatgtcgacgatcgcatgaagcactgacattgctccgcgcgtctcattggttgttgatggcatgacatggatcgttcgaggatgggcgaggggtagaagatgattggccgcttgagtgagcactcgccgatagcccttcacgtctagggttcgcggaggccaaaggctatctacgctaggaccccaccaacctcgcttggcatgttcagtgcctgggcgaagtcggggtataggttctgggcgaggagcggattctcccgccggagcctagcatcttgttcggcttgctctcgctcgcgtttgtgagcttggcaacaatcgcgacggtgggagttgcgtcgttctcgatgtgttctttcatcagag

SEQ ID NO: 11044 - DNA, 701 bp, Zea Mays
tctcttcttcctctgacctgctatagcggtagagacgggcaccacggcagctcccacgccggtgaacccgactcagttccccccgagtgcgcagaaatccaccctgttcacgatcagccgcaacgccgcggggattaaaaactccgttgaacgattccccgcgcccaactctaccaatccaatcccaaatctggtgtacttatcggggtaaatgaattgaatgccaaagggaaggccataccggtgctggtgatgccaggaagccggtccacgtcgaggcacgggcacacagccaagcacgatacgacgagcaatccaaggagcaccacagctccacacaccgatgattcttcacgtgtaactccctccgcctaccacgacaatcacacgaaccctgcatatgtgctccaggcttcgactagggcggcgaattgcgacagcggcagacgctctttcatgacccgaaccctctcctctcgacttggcgctcaagtggtttggagaagatggtgaacacgaacgaggaggggggtgcttggcttcttttttgtagtcgaactgagacgactactcggtcagctggcgcccacgaggattgcggcgactctgttacgccagccggagttcgtcacggaatagaaggaaggtgcacggctcaggtccactactcagcgagtgcagccggcgtgtgggcgggaccg

SEQ ID NO: 11045 - DNA, 364 bp, Zea Mays
ggcgcgctgccatggaggaagagcatgttgcccttctgcagaatcacacttgggatctcgtgcctcgaccacctcagaccaacgtggtaacaggcaaatggatcttcaagcacaagttcaatgccgacgggacactggtgcggtacaaggcgcgttgggttcttcgaggattcacccaacgcccaggtgtggatttttctgaagcattcggcccattggtaaagccagctacagttcgcacagttctctccctggctctataccggaaatggttctctctagctctatcccggaaatggcatgtagaccaacttgatgtgaagaatgtctttctgcatggaaccctgccagagacagtgtactc

SEQ ID NO: 11046 - DNA, 403 bp, Zea Mays
cgagaatctaggggcgcgcggtgacctgagccttggcgattgctcgccgggatccgcaagatccgccgtccgaccatccttcgtggtcagctacttccatgagccttcgtcgccggtacgtgttctcatgggatccatactcgtcacctctgcgtaaatttggggttttcactaaggattcaccaacggggctgcctcgattgcttaccgtcgggttcacgacgccgccggtcggagtagcgagagggggtttggggacgatgactgtgcgccgtcgaattcagcgggggcgtagattagatatctgtaggatgtagagttgaattcatctggaccatagatggggaaatggagagctaggattagattcagcttgtcgtttcgaccaagttgtgctcggccg

SEQ ID NO: 11047 - DNA, 354 bp, Zea Mays
gttgtacacatttttgaagtccctatttttgaagtcgatcaacttattataatttatgaattgtacacatttttactgtaatcatagttgtatttactttagccagcaatgcacatcaaatcagccccatcagatcaatccgcaaaaaagatgtcacgttttcaatgtgcttgtgctctgctacaatatatatgttctccagattttgacaagagcaggtacatggtttaaacagtctataaatttaatgtcatgcacaccatcttggtgttaaccacacaatccattttatagggtatactaacatatttcatacatcaaatttcatctctaggaccatcatgcacattggac

SEQ ID NO: 11048 - DNA, 1052 bp, Zea Mays
ctggagatctccctggcctgcagcagcacgccggacatctggcaggtactgtagtccgcgattcacgcatttccagttgccaagaagtcatggcagcgtcagattggcttcctgttgggtgagttttcatttttcttctcttattccacttgttcttggagatctcttgttcttgtgctttgatatggtgtttgaacctttaaaatccgatgtagcaacatatatttgatggttcattcatgaacaggatggaccctaagtcaagttatttgctgaaaatcagacttactggtaatcctaaaaagcatagaaaggacttttcatactttgaatgcagcaaggttgtagattccgatttatgcaatttcaaggatcttgttcaagaaattgttgatcagtacccgcatggatacaatgagacagtgcatgttttttactatgatgttgcccaaaaaaccttcccacaaattaaaacagaccaagaactcctgaaaatgtttagcaaacatgttggcagcaagatagtgctcatgaccattacatacactaagcccaccgatgttgtcccggttctagagtggtgctacactgaagaagatatcccatgcataccttctttggcttgtccatctctaccaccagtgagccaaataaccgaacctatagcaaagcttcccacacaaccttgtacaagtgaacctagcacatataacaatgacgatgatggttatttggcaaatcctgaaccccataatgaacatgttggtgttgacgaggaaggcttttacttgactgctgaaaaaattgcgagtgaagagagtgactctgagtctgattctgaatctgatgaagagtacgatgaagaggatgggttagttgggaaagatcttataccacctatgcctattttttgttatgacagaaatgaccctccaatgagtgtaggcaacatatatcccaacatgcgagaatttaagttggcattaaatcaacatgctatcaaatctgaatttgagtataatattgaaaagagtgacccagggagagtgagg

SEQ ID NO: 11049 - DNA, 489 bp, Zea Mays
gtttttgcgaattacaagggcgaatcggccctgatgagtcaaacaaaaaatttgcagtgattgtcaatgttcgaggagtgctccaggtcttcgccgtttggcgttgcgagcctgtaagcgttgggggaagctttcgtcttgactatgaaagggccctcccacttgggctccagcttgcctctggactctatccgagctgttcggacgagtacgaggtccccttcgctgaattcccctcgggatgactgcgtggtcgcgccatgcttttgtctgggcttggtatttatttagagcctgtagggcgaagactcggtctccatcgatgagatccttcgaagtgggctcgtccacgtcggggacggctgacggaactgtttgcggggacccatgttttatttcttgtggggtcatggcctccgatccatatagaaggcggaaaggagtgaacccggtcgccctgcactcagtcgtgtttagcgcccagaccgc

SEQ ID NO: 11050 - DNA, 439 bp, Zea Mays
cagagtcgtagcttcgcctcggggatcggaaaggggtcgatacggactgaggcgacacctgtggaaggaggaagagagacggcacgacagacaggggaagagaaaagagagtatgcgagcaggtttatttcttatgaagaagtggcgggagccggaagcatatggggtcgccgcgatgagggcggagatgttggacgggaacatcgagaggttgccgtcaccagaggagggctaggtctcggtaggtggggttggcggcggcgagtttgttgttgggaagaagaggtatggatcccggtggagggggttgcgaaagaggacgggtgtgcctaagcgtcggtgaagtgacgaccggcggcgttggcttaggagtgggcggcaacgcctacgccagcgacacgacgacatgagtggttgtagggtggcgcggaggaggggg

SEQ ID NO: 11051 - DNA, 439 bp, Zea Mays
tgggtgaagcggctgctggatctgaagggggacgagctgagaccctgcgtcggcggtgggtgaaggcggcggcgggatccggaggaggacgaggcgagacagggaggcggagagcggacgagacgaggcaagacggtggttgcgtgcccgaccttctgacgcgtgtttttcctgcccgtgaaaaccattccgaaccggggtcacgcttcccttccaatggacttccaatttccaaacgtcgacgcagccacaggagtgttgtgttacacggggcatggagaagctgggttttggctgggaaacccgcgggtttcgagagtcccaaacgagttcgtaatgtaagacgtcaaatatactccctccacaaaagagtgcaattctagctttgaatctggacaactgcactctttttgcgacgggggagtatattatttcttcc

SEQ ID NO: 11052 - DNA, 761 bp, Zea Mays
tgtaggatcatgcatcatgtttaaacaatactaagtgttctccccctttacagagaatggcacgcacaaagaccacccttcagaaagcaactggatctcatggtgtgccccgtcatcagttggctcctcgccatgaggggagcaacagtgggagcaatgatcccataggagacttggaggatagagtcgaacgtctgactgcagagttgcgacacggaggtagggagcgaatgcgtgctagtcgccgcattgctgagttgtgaggagaagtagaactcctacagtgggagttggcggagcatgatcaggctatcgactgttctatgagttcacgattcatagctagaattgtgaggcgactgcccgagcttgggtggaagagttgagtctagccttagaaaaccttcaagtgtataacaacatcctgtacgaggaagtgaccaactacatccaaatgtaccacccgatgttgctaaaacaggcgctggcgcgggaggagcccctgattgcaagacgtgatcagggtggcatggcacttaccagtgaagaaccatgagaacagggcggcgatgcgccaaagcttgtggtcgcaaaacgtgtgtagatttacgatttccataatgagtgtttacaggtacatatttatagtccaagggactctccaaccctagtgtaacagataagctctatcttcctattcttaagctaacttattatcactaattttgtggctgcttatcccgaaatgttatcgtgcggcg

SEQ ID NO: 11053 - DNA, 428 bp, Zea Mays
agtgattgagcaccatctgaagatctatccaaacgccaagccagtaagccagaagcctcggagacagtccaaggaacgataggacttcatctgtgaggaggttcggaaactgttgcacactggcttcattgaagaggttcaccaccccgtgtggctggccaacccagtcatcgtgccaaaagcaaacgggaaactccggatgtgcatcgactacaccagcccaaataaggcatgccccaaggacccgtacccacttccacgtatagatcagatcgtggactctacctcagggtgcaactttttgtctttcctagatgcctactccggttttcatcaaatccggatgtctagggaagataggaagcacactgcttttgtaacggtagatgggttgtactattatgttgtgatgccttatggtctgaaaa

SEQ ID NO: 11054 - DNA, 308 bp, Zea Mays
tcacctctgatttctgaggcacacaaaggcggcccctgaaacgaaccaaatcattctcatcaatggagaactcccggggtttaccatcgccaaccctctttcgagattcctgcaataaacgatcctgctgctgagctgcacacactctctccatgagggaagattgaataagcatacgaatctcctcactagcggtgccgacatagcacaaagcgatccccaaacggtctagatcagcgatcaacggcaaggccacttttggaaccccggacctgctaagggcatcagccaccacatttgccttcctc

SEQ ID NO: 11055 - DNA, 317 bp, Zea Mays
tatgggaaggaccattcatagtagcagaggtcactcggccgggatcatatcgtctcactcagatggacgacacggaaattgggaactcatggaacatagaacacctcaggaagttttacccctagctgtatttcaaaagctatcgggacgacgatgtactctataaactgggaaatatatcatcaataaaaagacctcaagaatactcaaattgttcatggtcgacctgcattcttatttaattcggggtgaccactatgccctgctaacggagcaatcggcttaagtcggcaacgacttaagacggtgcaacatgc

SEQ ID NO: 11056 - DNA, 486 bp, Zea Mays
ggagaccaaggcacgagcaaccaggatgggtggttgactaggttggccagggcacgatcaaacacgggccagtgaggcatgtggtagccaataaacatctaacacggtctcagtggcaaggggatggggagggagggcatgcaacatggtaacatgggcacatgcactatgaccggttacattgggctatggcaggactaggggcaagctagactaggtgtggttgtcttaggctagctaggtcaccttgggctagctatggccaacttaggctagttggtcatccagtctagctaaggtggaccttttttgattgtctcatcctccaagtacaagttgtagtatctgaaactcacacacactacatacgcacacccccccacacacctaccctatgagctagaactacaacctatacctaaaggtacacacgtaaagctgagtgataacaaaggcaaccttcgatgatgacgagcacgtttctct

SEQ ID NO: 11057 - DNA, 605 bp, Zea Mays
ttcagaaaaaccccaaaaaagtcaccaaagagaagaacataaaagaaaaattaggtttttctcaagttcaaaaccgaccctctttcaaagatcaaacatgttcaccttgttcccaccttcaaaaccttatggcccaattgacaaaatggcgcccaaagacccctagaacaccctgggaaagtttgaacccaaccctaagccatttgacacgacttggcatggcttttgtctcggtgtggacagctcggacagagccaacttctcacccccatatctctctaccccgaccatatctttgcttggaactcacatcgaaaaggtaggatttggtgcagagaagagatcgtacatgggggttttgctaagatctgcatgctaagtcgaccaaatcggccgttgaaccctggcagaagtaaacccccacgtgttcgacgtgggctgacactcgggggcgcgtccagagcacgcccgcacgcaaaccccgcacgcgccctcggccgcctcgtgcccacacccgcgccgcggctataaagcccaccctagtgcacgaccatcttccccgttgcctcctctgtaccacgcctaactctcccgagctcgcccgc

SEQ ID NO: 11058 - DNA, 511 bp, Zea Mays
ctctggtagagatatagacaaaagtggatcaggcaagtgtggggacagaacattgtcattattagaaggaaaggacaataaagatgtggtctgtaaaggagaatacgaagaggaagtagaagaattgtaaaagaaaggacgattttcaataaataccacatcacgtgaaatacgcatgcggcgagctgaagaatcatagcatttatagcccttatgctcagaactatatcctaaaaagacacactcaacggattgagcagttaatttggtgcgctcgcggggtgctaggagaacataacaggtgcagccaaaaacacgaagatggtcgtagctaggaggagtaccaaaaagtacctcacccgggcatttgttggctaatttagttgatggttgtctgttgattacataaatagcagtagacacagcttcaccctagaagtgagatggaacaaaagaagcaataagaagggtgcgagctgtttctataatatggcgatgcttccattcagcc

SEQ ID NO: 11059 - DNA, 531 bp, Zea Mays
gttggcattgccattgatatgtggatgatggatccctcgaaggccgggaaagcaggcatgggccgctgcacggacaagatcgagtagcatcggggcagcagcatgcagagcaagcaagaaggcagaggcaggcatctcgctctcctccctgcacggacaagagaatcaacgaccacgacacacgcttctgaacttctctctctctctctctgcggttggcatactgccaattaaaaacgagttcgagaggaatccgatctgcatcatcaagaactgatcttacgggactaacaaaatgctgcagtgagattatacacttgctaagctgtttcgctggcaagcaatcttgtcagatgttgtcgcctgaacctactgcgctgtagtgtacgtgcgtgtaggcgtagcgtgtggtactatcccggaacaaacaaaacgacggtttcgcgggattttatagttttccgagctggcaggcgtcgctcacacgtgcgaaccgtccaatcattcctagtagtagcagtagtacgccct

SEQ ID NO: 11060 - DNA, 519 bp, Zea Mays
aaatctttcccaacgccctcctctttgttcgatcacactttcttttcttgctggaatgtttgctccacctatttattaatgggaggttgctcatttctgtggagctgtggtttctagatacgatggccatggcgttcttcttccagctgctcccagatcaccccggggttctaatagccgcagcccaagtaaacgatggatttctggttacgcagcctcgcacatcaattcgattggtgcagctctatgttgtagccatttttttctcttcaataattgtttgctgaaacctggtgacgagtacagtctctgctgctgcgtggctgtgatgacaaaaaggttatttggttgattatgattcttaatgccatttaaggatcaaattgtgatgacctatttgtgcgtgtctgagccgatgcaatgaagagtccatttttgctgaccgttctgctgatctttctgctaaggattttgcactattgtttatctgattttggtcgtgggatggtaatcaattcg

SEQ ID NO: 11061 - DNA, 1635 bp, Zea Mays
ttctatgatattgagggcattgtattcacaagagacggtattagagtacaactagtggatgaagacgttattaagctagcaaatgaccttttgtgatagcaaaatacctaaaatcccctctatttaacgcatacctagatggtatttgtgtccactcaagtaaaacaccgcacatcattatgccacatcgtttctcaaaataaaataaagaccatgggaaatttagccaaattgcgtgagagaactttccaaacataggttaaggttgtaagacaccttttttccaccatacagttgctaaaaagcaggaatataaagaatttaaaacaatagatcaccttttataccacaaatgacgtttcccagatgtcaagggcattgtaattgcacgtgaggttattagaatacaactagtggatgaagacgtcattaggctagcaaatgacattttgtgataccaggtttcctataatcccctctattcaaggcatacctacaaggtgtttatgtccactcaagaaaaacaaaacacatcaatatgccacattgtttctaaaattaaaataatgaccttggaaaatttagccaaattacgtgagtgaactgtacaaagataggttaaggttgtaaggcaccttttttccaccatacagttgcgaaaaagttggaatataaagaattcaaaacaatagatcaccttttaaacctcaaatgacgtttctatgatattgagggcattgtattcacaactagtggatgatgacgttattgggctagctaatgaccttttgtgatactaggtttcctataatcccctctattcaaggcatacctagatggtgtttatgtccactcaagtaaaacaccgtacatcattttttccacatcgtttctcaaaataaaataaagaccatgggaaatttatccaaattgcgtgtgagatctgtccaaacataggttacggttgtaaggcaccttttttccaccatacagatgctaaaaggttggaatataaagaattcaaaacaatatatcaccttttaaacctcaaatggcgtttctatgatattgagggcattgtattcacacgagtgggttttagagtacaactagtggatgaagacattattgggctatctaatgatcttttgcgatactaggtttcctataatcccctctattctaggcacaccaagatggcgtttctgtccactcaagtaaaacaccacacatcattatgccacatcatttctcaaaatataataaagaccatatgaaatttagcgaaattgcgtgagagaactgtccaaacataggttaaggttatatgacacctttttccaccatacagttgctaaaatgtaggaatataaagaattcaaagtaatagatcaacttttaaactaaaaatgatgtttccctgatgtcaatggcattgtattcacacgagagtgtattagaatacaactactggatgaacacgttattggactagctaatgaccttttgtgataacaggtttcctataatcccctctattcaaggcatacctagacggtgtttatgtccactgaaataaaacaccacatattaatatgccacattgtttctcaataaaacaaagaccatggaaaa

SEQ ID NO: 11062 - DNA, 493 bp, Zea Mays
ggagcgcaagcgcacaggataaggcctgacacgtgtcagtaccggacccttgcttatgccagggtatcccctgtcccgggacctcattgtggcccggaccttactcggagggatctggaccccatccaagggacccgacatgcttacttgggagtcccggaccataatcgggggtctgggttgtgcgtacaggggtccggtgcttcctcgcggaggtacggtccaactaatacatcctgggatgtatcatcttttctcgccacgtggtgccccttgagccgtccacatggtggggtcgggtgttgttcaccgtacggctagagatcgccgtacgggcaccatgtcttcatactgtagcaaggggtacccctgattcagggtaccgacagtggcccccgggcccacctcaggggaggatacgagcctgcaggtggggccaaagtttagttggcgattggctcgctgtttctgcgcgcccgttggtgtaattact

SEQ ID NO: 11063 - DNA, 589 bp, Zea Mays
agagtggttcggactgccgtagcgtaataccctactccacttgtgagttgtattgttgagagcttgagaaagcttgggtgtcggggtaagatccctggtccctggggcccatcggtcaacgagcgcactagggtcaatggtcttcgtcctgtccccttcgcctgtctctttgcctggtgctgtagtgggaacaacgggggtcatgatgggagttacccgtgcacaacgaagtgggtcaatggtcttcgcctcggtaacgtgtgggttatttgggcgccccatgccttgtggactgtagacactgcctgcatttaatacggggcacacactacatgcgcgtattgtggacaggtgcttatcctacccatatttaatgtgggcgaccccgtgttagaggcccacgtcaagcgacgtctggcagcttccgcgagacgcctcgggacacatgggagcacagcacccctgcctaggcaaagagcaatggttgggagcgtatgcagacgtggcagctccggacctcctctggtcgtgggtccagaaggcacctgtggaggtccaggtcccatccgtgatggcccgaacatgtggc

SEQ ID NO: 11064 - DNA, 283 bp, Zea Mays
agagagatgagtggagattggtgcggctcatcatcagtagccgcctcttcatcatcgtctgccaagtccaggagaaagatgcgttggcagacacgattgtggccgcgcgcaaatttttcgttgcagttgaagcatagccccagccgacgacgttcttccatctctgactgggacaaacggcgaatcggccgaccatcagttgctggtggggaagaacgaattggtggtgcgagtagagccagcggtggggcgggtcctgacagaaggccccgaccgcccaagc

SEQ ID NO: 11065 - DNA, 453 bp, Zea Mays
ctgggaaggacataacttggataggtgaagctgagttcggaattacggtgggttgatcagttttgcctatgttggctacagtgcagtgctccccctttgcctatgttgttgttgtctgaatatagccgccctaaagcctaggtaaaggacggcgttgcgatataccaagcgagttagcgcttgacaacctataatcacagtgggcgagcctgcaaggctgcaaccatcacactacacatcattaaaaccatgaaaagggcaggctaggctaggttgcgagaaaagagaagcagagttgtgttaggctggctgaagcagcagccgcgtggtgcccctccccttccactgtgcatgcgtagtgagtctttacgcgcgcagcggcggcctccaaatgacccctacgtgctacaacgctcaagtcttaacatgtttggcttccgagcaaattttttc

SEQ ID NO: 11066 - DNA, 352 bp, Zea Mays
cggtccttctgttcctgttgctgaggaagtgccagtgcctgaatttgctgaagctgaccccaatgggtgtgacccgactgctgctgaccccaatgggtgtaatcctgctgaagttgaccccattgggtgtactgtccgtgttgttgatgaagatgatgaagaagaggatgaaatccttctgattcggaagaacagtcggcgttacatagttagtggggaaagtagtggtgttccttctcctgccttgtctgccctaattggtctgcaagaattatctctggcgaactttgatcaaactcttgaagacatggttccagaagatctgttgtcagagccggcagatggtggcgcg

SEQ ID NO: 11067 - DNA, 555 bp, Zea Mays
aagttcccttgcctgcgagtgtttctcccctgtgtcctcaccgcgttcttctctatcataacgtgctactcgttcggagcatgggtcacctggggttgcgggtgcgcgatgattgccatggccgccgccgtgctagcggggagcgtcgccgaactctggtgtggggaggtgattggtaagagtgggtcgtcggatggggatccaacgacgctgattatatccgcatgacccttcggtcagggcccctcatgttcgttgatctgcgatctggcgcttaggagaagatcttgtgttgttttaagtccaagccatagatataggatttggtggtcgtgacgtgctcgggcattgggcgtggatcttggatccgacggacagctgtgcataccggttcatgttgggtttgatctgatcttggcggtcagatatagatctaacggccagaaaacccttcgtgccctttgaccgtgctaaagtgcaaatgagcccctcggcttattggaaatgaagctaacacgacttgaacggaccaaatcggaattaaaacgaacaagt

SEQ ID NO: 11068 - DNA, 305 bp, Zea Mays
tgaaggttgacctgattcaaagggaggatataaaaggggttattcagcgccctatatggtctcgcttcggcattaagaggccacccactgcacttggaaatgacgtgcaagcatgcctggcgtctttcaatacagtgtgcacttatatcggcacaagagacttggtccaagagcatattgcttatagagtgtggccacttgcaaacggatgggaaatgccgaaggaggctgccgctggctctagccaaaatggtttagtctatctgaagtatacctttcgatataggagccagtttgatgaaccg

SEQ ID NO: 11069 - DNA, 436 bp, Zea Mays
gcccactagcgcttgcacacgtcaaaaccctaaccgcctgacctccgctcgccgccatgcgggcccacgtcgccagcctcactcctcaccgcacgcgcgcactgccgcgtgggtccacctggccagaatccctatcacacgtcgcagccgcgtatcgaccgaccgtatttccattccgcgttctctcgccttgtgtcactggtggtggggccggatggccaggtccgtctcctccctcgaatccgcgctagagcttcttccccgcgtgaaccggatcgcgctgaccagatcctccacgatcgcgcgactccctcgccagctgaagtcgttacggcctccgccatttccgctctgacttcgccctcctagctagccgggacctcgcgacctcctctcttctcgtcctcgctcgcacatgctatgattccccgcgtcg

SEQ ID NO: 11070 - DNA, 1661 bp, Zea Mays
tggtgaagatgtcagcaaactggtatgtcgttggaacatggagaactcggacatcaccaagagcaacatgctcgcggacaaagtgaaggtcaatctcaatgtgcttggtacgctggtgctggattggattagaagacatgtagactgcgctaatgttgtcgcaatacaccagggtggtcttgggcaggggggagtgcaactcagtcaagagctaacgaatgcaggcagcctcagcgactgcattggcgaaatcgcgatattcagcttctgcactcgagcgggaaataatgttttgccgcttagaggaccaggagactagattgtccccaaggaagactgcatatccagacgtagatctatgagtaactggacagccagcccaatctgcatctgagtagaccaccagttcaaactgagaagggcgcacaagaagaaccaagtccaatgtgccacgaatgtagcgcagaatacgcttgagggcagtaaggtgagcctctcttggatcgtgcatgtgaaggcaaatctgctgaactacatataaaatatcaggacgtgtgaatgtcagatactgaagagcacctgcaaagactgtgaaaatctgtagcgtctgaaactagatcaccatcggctgaaagcttgggatttatatcaacaggagtagtgcatggtttgcattcactcatgccaacttgctcaaggatctcaatcatgtattgccgttgttacaggtagagaccggaactggtgtgttgaacatgcattccaaggaagtgatgtaattgcccaaggtccttcaaagagaattcctggtgaagagcactaatggtgcgccgaagaagtgccatggaggatgcagtgagtacaatatcatcaacatagagcaggaggtaaatcatgtcttcgcctttgcgatacacgaacaataatgtatcagatttggtttatgcaaaaccaagctgaaatagatgagaggcaaggcgactatgccaggcacgagaagcttgcttaagaccgtacagtgagcggttgagacagcagacataatctggatggacagaatccttgaaccctgaaggttgtgcacaataaattgtttctgacagagtgccctgaaggaatgcattattgacatctagctaatgaatgggccaaccatgagatagagccagtgacaggactgtccgtacggtagcaggtttaacaactggactgaaagtctcaaagaaatcaatgcctgaacgctaggtgaagcctcgaagaatccaacgcgctttgtagcgctcaagagaaccgtcaacaatgaaattgtgcttgaaaccccatttgccaattacaatattggagtgtgaaggacgggagatgaggtcccaagtcttgttatcaaggagcgctgagtactccaattccatggttgtccgccaattgggatcggggagagcaacacgataactctgaggcactggtgagagcacagaagcttcaaacagagccaggaaccgcagtccgcgcttgccacgagtggtcatgtcgtgctgattggtgaccgggggaacaagtaccgcaccggcagggactgagggtggaggcgaggtcgtagaagccaggacgcagggactgggtggcggtgaagttggcgccacggtgttgttctaccatcgaga

SEQ ID NO: 11071 - DNA, 1241 bp, Zea Mays
tatacttgctagcttggaagttggtaaaagatgaactcaacacgccgagcttcaaaagcggcaaagtcaacaatcaattaccacaggttttcattagatgagcaccacttatttgagccagatgctttgattaccaaggagcgagatgccaatcatcaatcaaggcaaagttctcaatcttgcagaacatatgcatacagaagattgaccactccccagtttgtatctgcattgtctggaatctggaatcttgttggccagcctgaatcatctggcacagctcaaagatctagtattcatgggatttcgagtagggaagaccctgtgtgctttagcagggaccaacaaggaaatatactgacaccttgctgtgtggaaaactctagtggtctgagatctcaatactgtttctctacaccaaaagaaatttatgaggatcttatttacgtaaagaagaagatgttaacgctgacaccattcaataacattgttggtgcatcatccacatggatgcatatgcattccacaaataaggttgaaggtgcgcattatttgcaatttggaactatatactctgtgcaagctgaaaagatggaaaaaatcgagacttctcagaatagcaaaagaagcatgtgtgaggaaacttgtgctagttccaacaatatggatattagggacaatagctattcaaatcaaacaagacacatgcctaacgagctatttactatctcaaatgaagaagctagcagtacacatgattgtgaaagttctcggcacaatactgaatgcaatctagaaaaaaatcaagaagattctaattttttagcttgcccagtacatgaaatggaaattgccaaagaggtgaggataatgccagggagtcaggttttcagtaaggcgtgcacagatgctcagcttgacaaatcaaagcacatgtcttgtctggtgggtgatgctgttgttcttaattcagcaaatgcagatgaaagtgcttgtagggaggacgtgtgtctgcagctttctctagacaagtgttcacaagagctccaaccaacttttcagcatcgatttgatggtgctgttaccataaacaggcatgctgtggcaggagcattagctgggacagcagtcagtgtttctttgcatccaattgatactgtgaaaacgataattcaggctaacagttatggacagagttcagtctaccatacactaaggcgcacccttattgagagaggtaa

SEQ ID NO: 11072 - DNA, 828 bp, Zea Mays
aagccatctgtcgggggtgctcttcctttgagggaaaggagtcacagacatgggtgtcattggagcctacctttggtgaggggtgtctcctctgaaggctcgatctatggccctatacgagatggggaaggatttttgtcctcaagcgtcgaggtccttccaagtgactcggaggttgcccgatgggtgagccaaactttggaaattcagaaggaggcgcatggggaagcacgactatacttgcatatagcccccgagtgtcccccaatgcgtctcgagctgagtttcattaaattcgtgagtagcttttatcgctcccttaagtgccttcgcatatctcatgggcctaataaatttatttcattgatcttgtagccctttccgattagggaaccgacacctaaaggcggtttgtgacgatgccttctttctgccaccccgactctctccctagggtggcggttttcagagagcgcagtgctcctgaaccttttttgaggttgatgccatcttttggggagatctaggcactaccaaggaccaccatgcctgctgtacattcctcgatggcggtctgagagcctgcctcgatgggtgtcattgacgttgggcttcctcaaccatggggcttgccacgggaggccatccctccattagacttcctcccgggggcaccatccttcctgcatcagtcgtcggtcatggtggagttgcagcctcctcgtcgtcggggaggatcgtgattggaggacggggatggtccacacacagcgtccgaggagcatgggcaccctatggtggccaggggagtgtattattttccctgag

SEQ ID NO: 11073 - DNA, 433 bp, Zea Mays
caacgactggcagcatcacacaaatcagtatatactagttgacaccaatcaatctcagccatctggtccatgtttgttgtcattaggacctcgttgtccgtaataccccatgaagcagatgggaatagaagttgattgaataaaatcagaaaaaacatctaatggataactcatcatcattcccaataactagcttgtcctatagcttaacaacatcaaactcttctttacaaatgttgagatcctgtctcagttttgaagcagcgtcaacttcaccataccaatcagtgaactccctgccacctccagcacttggcaatcccaatataagacggaccgtctcttttgttatcttgagttctttaccagcccctgggcgtattgtcatgtcgtctggatccagcttatccatcaaccaccttatgagagacct

SEQ ID NO: 11074 - DNA, 651 bp, Zea Mays
ggccagttaaggccgtagaagcacgtgctgccgtcaccccatcggaccggattggggatgacctgatgtggacatccatggaagcattagaaagagagcacgcctgaacatccttgggggctggattacagcttgcactacccacaggggctgggtcgctaccagcaacaccctcgggggatgggtcttctgcagcagccacttctaaagctgaaggcccttcagccacctccatgggagtcaggtaactcggataagtgtctttgcatgggagactgccatccaaggtcgatgatgcacgagacaccactcgggttacctcttgcccggcagaaccaagcaatgaaagcccaccatctaggacctctaaacagacggctgggatatcagcttcaggaggctccgatagtatgtcttcaggaatgacctcctgcagtgcttgatcaaaatctaatatcgaaagcccctgaagaatgacaagggccgacaaagctggagagggaatatcgctaccccctcgctgcctctatagaaacggctgttcttgcggatcagcgggatttcttcttcttcctcctcttcatcctcatcaaacatgctgctagtagcctgtgcattgtcacagccttgggcgtcaaccttgggaatggc

SEQ ID NO: 11075 - DNA, 691 bp, Zea Mays
gtttggttcagctgctgtggagacaagctggtgggtagaatctggatgtttggatacgcagattatgagattgtagattctgattgaaaaaagaaaacagataaatacagacaaccaactagtgcattacgggattaaccggattattaaatatcagtgtctgaagtctatatgcttaaatgtccaaattatcgtattgataacatctgaacatgaggatttaaggtacacttaacaactgtaatggcagcaacgcatggatatattgttccaaatatgagttaaaccttcattagaaacatgtgttgaatttacgttccatgcacaatatagatagaacagtaaaactaaggaatacaatttatttaacaacaccataaaactgtctcgatcacaattatacttatttaacaacgaataaaactacatttgccatagcataaaatagtactttatttgtaacatgaacgttttttaaaacagagcggagtactgcatttaaaacagcaacagagcaccacaggtctcgtttcatggtgcggagaacgccagaagtcgtccagcttcccgaggcagcggctgcgtgggcgcttctcgcgaaccgttggccacccacttcctggagaagcgcttgaagaagaagctgggtaagaagttgaccgtttggttcggtttctggcttctgacggcc

SEQ ID NO: 11076 - DNA, 643 bp, Zea Mays
atggagcttaggcagattacctagagatctgctaaatgatgacgagttctagacatggtgatcccaaaccccctgtggcccactacgatgtcccaagggcgcatcaaatgtctgcagaaatagagtattatgaggaggtggaccagggtcgtgcataccatcgggagatggtgatggaaatgggtatttccaaaaccagtcccccgatgtagaagaggagagtcgtgtcccatgggcccgtcggtgtggttcacggacacaggttggcgctcctctgacgacgcgaatgagccaagcaccccagcgtgggacgttggttcttcgaccgctgcgcgctccaggaaccgagcgaccttgtggagctccgccttgatgccctccatggaggaatggatgtcgtggaccaacccttcgatgtggggacgccatgcttcgaaggaggaagtgatgttctctagggatgcaacacgtcctgatgcatccgccgccagcgcgtcgagaagatccatcacaaccgcctgcatctccgccatctggccgtcgagacgcgcctttaagtcgtgccccaggtccgctcggggcagaatgccttccacctcgtcaaatttggcagacaatgatgcaatattatcgaagttcttcc

SEQ ID NO: 11077 - DNA, 662 bp, Zea Mays
cgcatatggaaatcatttatacgggcggttctttataagaaccgctagtagaaactgttttaattatatacgcctcaatcgtctcctcacatttcgccgctccaaacgccctagtactgtccctgctttccattctcgctccagccgccgatgtgccacctcccgcctccccttcgttgtcgttgccggatccaccctccctccgtcgtcctagccgtagtgaagtaggcggcgggctcggccgtcgactctgcacactgcgtgccagacaccaatatgtggatctaggtcaactgcttagttcctccattttactattgatatctgccttcatgcctccattttaatgtattaaatcactcttcttttttggcgcagttcctgcataaggttgcccaatctggcaccttcatttactgattcttgttctccggacaaacctacttagtataacctgcgtggcaagacaactgcacctactcagtacaacctacgcagaagcgtgccaaaacaactcccacgacaagttcttatgtgcataacttatcttgtttcttatgtcctctgttttagaaattgttaaatgcgcctttgtattcattgacctacaacaagttcttatcttgtttctttgaccacgacaaggtcttgtttcttttact

SEQ ID NO: 11078 - DNA, 385 bp, Zea Mays
aacatagcacattgcagtatttgacaataacaccgtatcatgagaaaaggaaatgtataaatcttggacgcctgaaagccaagaagcacaaggacgaatctgataatggaacgggaaaagcaaccccattcaccaacgcaaacagaaacatcccaatctatctacatgccagtgcagttcagagggcagtagtgaacctttcttggaggcgtccccttcgtcgccgtcgaggatgaggtgcagcagcgctcgagccgacaccttgtccccggccttcgcattccgcaacagcactgccatgtcgccggactccagaacctccctccgtccgacaaccctgtacttggccagcctcagcagcttcgtcacgggcgacgaaatgttc

SEQ ID NO: 11079 - DNA, 348 bp, Zea Mays
ttccaagctcggcctcgtcgacaccagtcaagtaaacaaggcttagggggatacttgttgaaaaaataagccttatcacattagatacgtagtcaacacgttagttgcatgcattagctagttagtgggttagtggcagcgcgtgtggtcgcatgagcttctgtggacgccatgcaatagtgggttagtggcagcgagttgcacgcatgcctgaggacgtggacgtactcgcggtgtgcggacgtggggatggacacgtcaatactgtacatcgaggagacgctcggactctacttgtattcctttgcttttgttataaagtgcatcagaaaacgtcgcaagaattag

SEQ ID NO: 11080 - DNA, 449 bp, Zea Mays
cataacgtgtagcgctgttttgtttgcgcattggctcaccggggtgtcggttttgggtttaccggcaaggtctccgtcatcgcgcatgggcgacgccatcactagcggccaggggtgggagacggcccctacgccgtcaaatcggggatgtgtggtcctgattaaaagctggataccctttcgtgcattcaatccgggccaatggatcagatcgagcggtttcgattggatcacacctcattaaatcgtgggcatggattgtggatcccgtggctataaaagtgtatcacttcataatctatctgtagccgtcaaatcgagatctaagggatctcttatgcctgtaccccttcgtcgtgtggtgtttgctaaagagtccccggcttatttacaaatcaacccgccatccccatatgtataaagaccattgaacataagtcctgcatttc

SEQ ID NO: 11081 - DNA, 384 bp, Zea Mays
cgcggggtaggagggcctggaagtgattggcgtactcgtccacggtgcccgtacgccgacactctgtcagctcgaataggggcgccgaacacaagggcgacccgaaacgcagattgaggaggtccttgaaatgcccccacgacggcgtgccctcgtcttcctggtgctggatgaaccagagttgagcgacgtcctcgagattgtacgacgccatccagacgcgttcctcgggcatggtgcgctactgcctgaagtacgactcacacttgttgatgaagagcatggggtctgtcttgccatcgtagcgggggaagtctagcttgtggaacttgggaggacggtcaaggtcgcggtgcacctcggaacggctaccgccaccctccg

SEQ ID NO: 11082 - DNA, 682 bp, Zea Mays
cacttgtctgtcaatatgagtggtgaggtgtagttgatgttgaaggcattgagtcatcaccatactgatgagctttgttgcgtttagagttgttatagtgttggtgcacctgtcacacacatgaaaactggttcgaaggcataggaaaaaaagacatggatggttgaagcatgtcacgtccctatgtgcacacatgtcagcagggatttgaagtttagcttcaagtaagagagtggatgagggaacgaggaaaggtaagtatgggtagttctaaataggaaagagcatatagaaagggggagaaagagtgactaagggttacctatctatgggggatgactacataactatgactacataactcttggaggggtgagatccacctatagtacttaccacctaggccaatagtggggcagcatgtggtgtctactacaagtgatatgaggaaaggacaaggtggatgatagaagggaagatttgtaccatctacatttgtccaaccatgaggcaccatgtgggcatggtgtggctcgcttggcgatgacgtggaggaatccaaatgaaggggcaatttgggttgtggcgttgggttggaaggatgatagaagggagagtatgccagggccaaaaatggattgtagtgatttttcctcttctctcacttgtatatatatatttg

SEQ ID NO: 11083 - DNA, 2082 bp, Zea Mays
tgtgtggatatcctttaaacttgggtcttcttcaaagagtaaggcagcatgtgtgttcatatcaggcatatgaccatcagcatattgacctccagaaacaacaggttccttagttaacttgcttggtcttggaggcactaaagaagcattgcccactgctttccaaggatcctgatttgagaaaagtgaatcagtgtatgctggttcttgtgtagcttcaacacgatcaattccaacagtagcctgcaattgaaatttactgctacgattggggagagcacaaaccaagtgattgggcatttccttaggatgctgtagaggaggcccagcaggaagctgagcaccagagttagatggttgaacggtgaacttttcattagaaacaggtggttcaatcggaactctaaggttgctctggacaggcagattgagtggtggtcgctggattatgtcaggttggacattttgtgcaccaacatcaaaatcacaaggtggctgctcactgtgcctggcaatgttgtcctcttgggttaaaacaggagcagtaaaggcatttgtgatccccatatgataccctccagcttgagatttgcagaaagaagtaacatcattatttacaggtggcttcccaactttggcatgatcaatgacaacatgaggaatagaaggatttccttgcacactagattctggtggtgcaataggacccaaatgaactgcatgcatacgagcatcaatagctctagcatagtcatgaggaagatcacgggcatattctctaagcggttccactgctgcatgatttgaatctttgtatgcactggcaccaatgccttgtgggacattcactggaactagcggcggttgcatgctataagagaatggttgctgctggtacctgacatgatcttcagccccagccgaaggagaatgacccacaaatactccttttggagcaggtgcactagacactgggaaagcaataatggtgggttgaaccggcacaactgtatccgcatatgcagtcgcctggactgcaggttttctggcaggaagagtcgaatcaaattgtgccatcactgctgtgttcccagctcttggttctgccacatagttcgtgagtgttcctgaacttgcacctggattagatttgttggatgcggtgccttgatgtgggctgtaaaacattggagctgcctcaaggttgcccattgcacaagaacttccctgctcccggatagtattatccgaatgggcatgtggcaatgctttttggcacattgtgcaaccatcatacctcaatgatggaacagtggccgagctaaccacaacaggaattgtgcctgagctggtcaccactggcatgcttactgcgcttgtcatcgcttgttgggcaccaaatttctgcctctgcgcatcatttgtctgcagatgcacagaagacaaaggaggaagctgtgacagtggagtgtgcaccacccggtaactctgatcaacctgagcttgcactggccttgtgaactgcgtggtctctggaacaggttctacacctgcggaagcgggcttcaactttcccacttgagcagcagtggtcgccatagagcccgtcacaggaatgttgggcatgaattggctcatttgcacaggcacatagttgacagattgtggcaccccatgcacaccaaattgttgggcgttgatgtagtgtacctgctgcggctctatatacgactgcggcatctgctgcacataagcagcagactgaggctgctgttgtggtacgtaatgggtgccttgaggctgctgctgctgctgctcctgcacataagtggtcacttgaggcggctgatgctgtgttgctgctgcataaacagcagcaacctgatgaggcggcaacgtcgactgctctgtcctaaccaggatggggttttgagccgggatgcccatcgccagaggtgacgccgagactgcagtgagcccaaccgactccgggaaagcacggaggtaatgcgctccacctgaatacgaatactcagtcgcaacggaagcaggcggcggcaccgcccgcggcgacgtactttc

SEQ ID NO: 11084 - DNA, 420 bp, Zea Mays
ctaaattagaagattaaaaaaaatatcgtggatgtgcgttggtgccgtggtacgtgaacgcgactgacggagactcgggcactggagacaggagcagggacgtcgagcctacactgaacaatgcatgctggctgcagtacagagcgacgtgcgtgagcttgactactgcacggctgctgcactgcatgcaccgccccgcctccgcctgtgtccaaacaagctaggctggggactgggggcacccgaccgagatgcgcgctcgctctcacgtctagccgagccgtcccatcccatccacccacacccagccagctctgcaagccaccccgtcctcccttcgtctcggacggtgtatccatcccgcagccagcggagcgggtccaaacaagcagccctccgccgccgccgcctcctcctcca

SEQ ID NO: 11085 - DNA, 435 bp, Zea Mays
ctgatgaggagcaaagaggtggtgcgccaggtgagaggaaaagtgttcttccccagactgatccgggggaggagcactgccagaaggatcctggggcggagggtgagaggacgattggcccggatccccgtgatacggaggcgggacaaactgctcacgttcatcaaaataagcttcttcttcttcgtcgtcgtctgctgtcataaaaggcaccccgtatgcctgctggtgccactcgttgaactccgggggaggaggatggagaggcacgtcaggtgagcggggggcgaagggagtacccagagaggaagcttgacgacgaaggttgtcatcagtctcccgctgacgtcttgccacctcatggacatccgcagcaatgttccggcacatggagaaaaatgccgcaaacccatgggccaagcgggcacccatccc

SEQ ID NO: 11086 - DNA, 368 bp, Zea Mays
ctcgaatctccaatcatcgttcatgtacagatgggagcacaccgtcgctaagctccccacgttcacgagcggttcggccacctcgcgcccatgcccctatctataaatgcacgcaccccaacgacatcgctaagcctcgcccttgatcatcgacgtcgctaacccacctctctgctcatgtgccatcgtcgtagcagttgttgatgtgttcccatgcctgttgcttgtcaccaccatcgagttatgtcgataagcatcgccttcaaatctcgtacccaaaatacaccacagttcgctctctcacgcgtccctttgccccttttaccgccatccttgcagttggatcgtcgctctagttcacatccggt

SEQ ID NO: 11087 - DNA, 834 bp, Zea Mays
ggtcgacgagcatcacgggcacatgagaacacttaaacaagggagcggagggtatgggctgacctgaatcgagcgggccgcggtgaagtgttcttgcggtgtgttcaaaccgattttgggggaagttagaaattcgagctccctgttggaggatttgaggtgcgggtgggtgcgttagctgcttgaatgcatggcggagctaagggcgcggtcaatttatagagcccgcgagcggtggccgtgaatttgggcgatgacgcgcggcggccggagggaccaggagttaccagcgcgcgattagtgtttggttaccgtggccatctccccggcgattggcagaaggttacagcgggtcacggcgacgcgatgaaggtgccagggcacgtggcacatggccggaaggcggcagtcaccggcgagcttatccaaagcgaccgtggcaacctgtatggtggccggagttgtttactggccggacctatcaacgacggcgatatttacgtgaccccaagcgttatccaaacactggtgagcacgaatcacctcaccggcgagaatcgtggcgcgagggtcgtcgacggcgaggggagcgatcgatctaatcttcatcagatactgtaccatgggagccatcatcagagtgcctgaccgagcgatttgaaacccaatttccaccggattttcaatggcaaccagctgattggcctgtaacaaagttgttgtctgaggatccaacaacaatcttgttatagcaaccatggccaaattcttattagatcagggttgatttctagttcaaagttggctcagtatcactgttagtctggatttcag

SEQ ID NO: 11088 - DNA, 530 bp, Zea Mays
gtcagtgagtacgtgcacaaattcacaaaattggctcgctacgcgcctgatgatgtcagcacagaagccaagaagatggcccgctttttgaaagggctcagaccagaactcaagaccatcctagccagccaagatttcctcagcttctcgcacctctcaaacaaagccatacaagtggaaagggcaagggaagaagaaaaaggtcacctcaagaggaaattccaagtcctccgagctcaatagcaagaccggcaccagagaactcgatcctttgggtttccacccaagggaccaagcttcaatagaccagctggacccactccgtcatcttttagtcagcagagtcagagctcctttcaggcccccatgattgcaagcaaccaaccgccagcaaatgcctgttggcactgcggagaccctagtcacttcaagaacaactgcccctagttgaaggcatcaggacctgcttactccaactcggtgaatggccccaagaataccccagcacccgtccccaaggcaccctcctc

SEQ ID NO: 11089 - DNA, 732 bp, Zea Mays
gcatgctaaattcacttaacgtcggagacatcctgttagccaagtattcttgaactagatctctagtactgatttgttcagccaccaccctgaattctgatacagacagttggcatgctgaccctggattcatgttgcacaaaggcctggtcattccaaagcttaaagacagcgggctcatcaccatcgtcatcagtttccctcttttcttctcatcggccttaatataaaaccactcactcttctagctggttggccacttggtgcgatagctgtggaccggagccttcgtatccttgcgatacgcgaagttataacaaccaaaattttcatgtagtctgtcttctctggccttcgtttggtaatgcaactcatgaactcggtggaaagcttcagcatttgggtccatcccttggcttcgaagggcccagatgaagatgctaggcctaatgatagcgttaggggtcagctgatgaagataaatttcaaaattatccaaaacttctcctatcatctcgttcagaggaaaccgtaatcctgctctgaaaaagcttttgaaaaccactacttcatcatccttcggcgttggagtggtttcttctccggcaaaacgaataagcttctttttagcttcttcgaagtagcccagtttcatcatcatgggcacgtcggcttcaaatacaatagatttctcaaaatcaaggtggctgggttttgatgggatcaaaatgc

SEQ ID NO: 11090 - DNA, 573 bp, Zea Mays
catcagtccattttccttacatgtataaatttgagtctttgtgggtgttgctagccaatgttacatgatgtagagtgtgtgtgccagtcatccttgttgcaaaaaaggagtgaagtaccttagagcaaaaggtcaacctacaaatcaatatgagtaggtgaccctaacaaatgagaatcaatcaaaggtcaacctagtaaagttggaaaccctccctatctgacctagcaacacactgttcaccataatgtatgtaatgtcaatctcccatgcacatgaatgtgaaacacctactgtcctttcttctctctaccaaagctttagagccaccacaaatgcacctctagatccacagatctccaagaactcatacatgaaggaggacaagagaactaatgctatgagatacaagaaggaatgtgacgaggctccaaaggtcattcctccacctatccaaagtgctcaacaagttccatggtccttagatacatgcaatggcgaataatgagacatcgttgtcatcgtcatcttctactgtcactttttctctctaagtgcatacaatcccagatc

SEQ ID NO: 11091 - DNA, 517 bp, Zea Mays
ttcgttaacaccgccgaacagtgtagcccctggcttatatccgcaggctatagcacatttttagctctgctttttcagcgtctgtcagtccttgcccaagtaaatcttgaaattcaaaatcttcttcctccaaaatgtcctcagcctgttctttccccttttaagtagctgtgcttgccgcagccacaacagattcttcctcagtcatttttaggagtatgttatcgataacttcaagtgtctcttctaggttcggatcttctgtagccccgatttcagccccagcagcttcggctatgccagtttcagcttcgaagatttctgctctgatggcttcggctgcggcgcctttagcttcggcggcttcggcagtctgatcaatggcaattcttgatgccagtgttggagacggtgtcccatgaattacatctcctatttgaataatccttcgttttttcggcagtgcaggaccttcgtctgccgaagctgccttgtccttctgaaaaaacttcgtcag

SEQ ID NO: 11092 - DNA, 485 bp, Zea Mays
gagcatgggtagcccgcgggtacccgccacccgtgcgggtacgggtttgggaaacaatcgatacccgacaacgggtacgggtttcttagcgggcgtagtttatcctaacgggcacgggtttgggtaagcaataccctgcgggcacgtgctcgttgccatctctagagttacaccttcaggtccaagatgagtgttggtcatgtcaatgtcatagacggtatcaacgttgccttggagatctgtataccttcatcctattgtgtctcctctcctctttgaggagtcgaactgattgagctataaaccgaagtgttagtgcttgtcggcatagattcattaggcctaccggcatggccacaaccatggagagggtttgtgcccctgattagggcatgtatttgatcctaacttggtcactttatcgagtccaaggacacatctaacattctccccttttatttctggcttgctttgttcttgactcc

SEQ ID NO: 11093 - DNA, 812 bp, Zea Mays
atcaggaactctctgtgggtaaatgcaaggtggcatggacaccaatgtgtcagctattagaaatgggtggccttggcattctggaccttgaatgctatgcttgagctcaacgcttatggtggctgtggtttgaatgggttgcactagagtgcccttgtattggcatgcccctgcctgtagagctttactaatattgttctcttcaatgcagctatggttacccaactgaacagtggcctcatagaccacagcttgtctctggacatcgagttgggttcgaggagacacactgtcagcactcttcctgtccctgtttgcgcacagcagaaggaaaaatacaatggctgaggcagtgaggctcacataaatggtagatggatttccagatttggtccatgttctcacatattctttttcctttttgaaaaaaaatcgaattcatatttctgccaattatgtatcaggaacttggagatggcaatgcacctagcatatgagcgtccagtaataaagatgacatgggcggtggtggtgatttgaccgtggcatgaggggctacaacataccacctagcagtcagctacctccctgcagaattggctacattcaaacattcagttaacaaacaaggtcagccttctctggtgctgggtctcaggtccctcatcatcctcagaatctggaaaatttggaaagaaatgaagaacagagtgttcagtagacagtgccgctctaaatctgggatcctctctggtagcagttactcttagattaatgttgtgttatgtgtcatgcattttcctggaaatcgt

SEQ ID NO: 11094 - DNA, 752 bp, Zea Mays
cgcaggctgtatcggtatgaccgatctaacgaagcacatgatttggcacttggcagccaggaggagcccaggaccgggtcgattgggacgcactcgcatactgcctgcacgccacgcccacgacgcggacatgggttccagattcctgaattaatcctgtccagtactgcatgagatcactgtagcaattagtgtttgagtttcattaaaaagtaataagagcaacgcaattagtgtttcacaccgtagcaacgtactccgtatctcgtactttgccctttttttcttcccgttcggatgctaaatcatattcttttcccgccaaccacggattggaaatggaaaaggcccggcccaagttgagattctgtccccagccggccagccctcgcagcagtcttccctgaccgtccacccatcacctcactggctcactcatcactccctcagcacctcggccctctgcagtctgcgtctgccccctcttccaggtcccagcgctgtctagatccagatgggagctccaccgctgcccttctccctgccccacgccgctctcctctgatcccgcactccccgaagtccccactgccggcgcgatccccgcattccctaccgcctgctagccccaccacccgctgaagccgtccatacaggccattgcgctgcccggaatcccggcgtgaacagccgttgctgcagtgcggcctggagctccgcctgttccccgcttccgcccgccaccgcctttc

SEQ ID NO: 11095 - DNA, 613 bp, Zea Mays
caatgcacgaagattgggctatcaccaatattcaacctttgccagaacatgaagtgcttttccctgcggttagagatgtggtctgagaatatctagttgagcatcgaaggctcggggtgagggatattcagcgctcacacctgggtcaggttttggtgcagtttaacagcgtgctagatagagaaaaccttgttttgcttgggccccagcaatatcttgatgccactttcactgctcaaaggcataatgatgcctggaaccacatggcacttttttttaaccgtgagtgctggctaatgctgttgggatttcctctagactatcgctcctctgagtacttgcaggctgccattggctctttcggcagattaatcttgtgggaggaggacaggcacaatgtgactaggactatgcttagggttcgggtcacatctcttgaggaagtcccctagttcattgtcttttctgaagcagatggtttcctcggagattcctggactgtgcaatgcgagatcattcagcaaaatttgctgggtggtcagcctcaagatgaagacccagttccgatggtccctgaagatggtcaacagcttcccctcgcgttctttagtct

SEQ ID NO: 11096 - DNA, 482 bp, Zea Mays
ctagggctagcgtggcgaaaattcacacaaggcggctagcgagggcaaatcgagtaatgtggtgtctcgacttgtaatctgggtaaggtggatgggctagcggcggaatcaaataacagcgatggagaagttgaactacgattacgacacaacctaaaccagcaacaagactcgaacacggacacaaattcaacaaagcaatttgaaacgaaattgcaatgctaaacagggttataggacagcggatttttttgtatggcaattatctggagttataggatgaaaaacctaaactaaactagggtaagcctgacggtaatacctgagtctttgaataccacttgataggaacgggggtgcctgatcttctgtcaggtgaagataactatcgatttggtggagatgtcacacaaacgatccggcttccaatcaacacgactagaaccccgcaatcgcagcaccacttctcctctggttatcaa

SEQ ID NO: 11097 - DNA, 589 bp, Zea Mays
ggcagacagcatggccataggcgggccgacagtaattacatcaacaggcatgcaggtgcagcaggccaaccaccaatcagactctggccccacctgcagactcacatcctcctctgaggcgggcccggggggccactgtcggtaccctgaatcaggggtaacctcttctacagtatgaaggcgctgcacccgtacgacacctccaggtcacacggagagcggcacccaacccccaccacatgggcaggcctaagggcaccacgtggcgaggaaggataatacgtcccaggaagcaccgttgggtccggacctccgcagaggaacaccggacccctgtgaatacgagcctggagctcccgaggagacatgtcgggtccccccgagtgaggtccgggccttagcacggtcccgggacgaagaggaccccagcacaagcaagggtccggtgccgacatgtgtccaggccttggcctacgctccccgctcaggcggaaacccgccgcggccgcatggcttgtggcccataacgtaagccaacgggccgagcctgacgtaaggcacatatggttgtgcagtctttgcatttatt

SEQ ID NO: 11098 - DNA, 448 bp, Zea Mays
gaaacagtggcattctgtggatatggctgggttcatttcttggtgctcttgcaattgttctcgtcattgcttttttggcatggaagaaaagaattcttagcagggataaagggtgcaactccttcataggtgagtgtgggaaaatagaattggtgggataattgttgtattgcattgagcctcatgggctgattatatagattactaacaccccacatgagtagacaatggagtactattcctatttactctaacttccatcatagtcacaactagagtgtcgtagacagtgggacgggagaagaagctgacaagctaacatcctcccatggtcataacagttgatgtgtcacggatgtggtagccctttgtgtcaatgtctagataaccaagcatgagggcagaggagccatggtcaaggatgtcgtgggtcaatgtagcagtcgag

SEQ ID NO: 11099 - DNA, 702 bp, Zea Mays
cgcgggaggaagacaaaatacctcaacagtcctctcaaggtagcattaaagggtggcgccttgagtggtttattgtggaaaacaactgcaagtccctcccccctcggtcggggagaccgccagatgtacgtactccgagctgggttgagtctccaacttccttggaggtaacagaggctagagttctgcttggtgagatctgtctgctgaaggagagaggtctgactgccgaagctgtggttgctgactttgttttcaagaacattcagcctttgaaagacaaggcgtatccatcttacttgtacagtggtattactgactctacccgggtcaccaacaagaaaattcctactgaggatctggtgagccgactagacatgatcctgaggggcaagatatcaaatgttggtgctcctgttgcctattctgcttggaatctaccacctcataggtcatttttcaatttcgtgtccaaccctcctactagtgatggtggtctgggtcttagagtgcgaccctctcccgaggacattgaggctctggttgctccccttcgtgatattcccaatgatgagagacataatcactttgagatgccagcaagtccagatgatgcagaaatagatgctgtactcagtatgttggctggagaatcttctgactcgacccatgctgaaccgatggctatcaaggttggacaag

SEQ ID NO: 11100 - DNA, 518 bp, Zea Mays
attgagatccactaccaccctggaaaggccaatgtagtagaagacgccctcagccgaaaacctttcggggagaaagcaaccaatttcttggaagactggaagagagaatcagctcaactgaatgcttgtttgggagacaatggcagcctagaagtcaagccaatgctagaagacctcatatgcaaggctcagcgcctggacaccgagacggtaagtattgcagagagagctcgcaaagaacaactcccggacctcaagacagatgaagaaggaaccctttggttcaaggatcgtttgtgtataccaaggggagaggcacgagaaatcctgctcgatgaagctcacaactcagcctactctatccacctagggacgaccaagatgtacttagaactcaagaccagatactggtggagagggatgaaaaaggtgatagctcagtatgtggctcggtgtgacacttgccagcgaactaaggcagagcatcagaagcctgcaggtctactacaacccctccc

SEQ ID NO: 11101 - DNA, 660 bp, Zea Mays
gagaagacgactagaatgagcatgcatcatgattgtcgcattataattgtcttttgtgcaccaacatgcttctctcacctttattccaataataaaaacttgtgaataatgtgatgtactgctatgttagaaatgccttacctcgtgtcagattagtaagtcttgttaggtcgtgctatgtgtttctcctaccttgccatctaggtagtattgtaattgttcaaccctttttgcaaaacattttgttgcttgttctgttcataaaaagatccccacccaaacaaccttgagtttagcaagtgaaacctcttaaaaaaatccattcttatgttggtgttttctaacccttgtgtgttttacccttgaatttacacttgcacagtttgtagaaccccgtagctagaccgctagttcgacctaaagcttccttgtgcacttgtttatgtcaaaaaaatggtttactatctattcatgcaaaccatatctagcctcaaattctttttagaaactttgtccaaaatcctcattaaattctcctctgctcaacctagaagccatctgggttgatgatctctcttttcgcctggatctagtaatcttttcctttgcgaatcatgttgccgcttatcatctgaatctctagatcccttaatgattctg

SEQ ID NO: 11102 - DNA, 1227 bp, Zea Mays
ttgcatatgtttgacacacttagagtgcattcactaggcaaaaatttcaagcaagttgtattgttttggtgttttgccaatagaaccctggaataggctacttaatcctaaataaggagtaagggggtaaaacatgacccaaattgagaaaacccaaaagctttagtagaatagtcataaaatgctcccaagaatgaatttgaattacatttgtacccctgggataccaaaaaccgtaattggaaccctggaaaaccataaatccaaaccctaggggtctatgtgcaaaattagtccacttttggactaaagtgcaaaaaccaggttaaataagtatcctaagtcatttggttcacaaatatcatcgccgtggataactccggccataaacaaatccggccaccgtaccgcacacgccgcggtggaaattcggtgggcacgccggtgatccccgcctctcggccttgcgccgcgtgtccgagcctcgccaccgcaccaccgtgattcacattagctccccgttgctcaccggaatagctgtcacggcgttgaacacgtattcattgcgtcggtattcttccttatctccggccgcctgtgttgctcggccaaattgcgcaccaccgtcgaagctctctataaatagatggtcgaacctgctgcgctaggtcatcgcgaagccatagcaaccactcccgtccccgattagcccccccagccggagaatcgctgttcggtccgccgcaccgcaagaaccgagctcgtcgtggccagcaccgtttaggtcagttcatcctcccctttccctcggttgagcactctcataactctatgatgcttgccgaaccaccaatttggactgagagctcaccaatcaccgggaacacgagcaaatgcccataaccttcgttgttctcgtgggcagagtagaataggtcaccattcgtgcaattaagttaggggaatggttcagggagggtccaattcggtgttagccgctcgggtaccctagtcgttgccccattcggccggtccaagagctcaccggagctcggtcgcgttcgccgtcgtcggggaccccattctgcgaagaaatagaagttcgggggcgtttctgcaaactgtcagcgactcatgcaatagtgattgaacccacttcggattgatcagtaagccgagggcttttccgcaaaaccgccagcacgcgcgcggacgcgcgagggcgcg

SEQ ID NO: 11103 - DNA, 701 bp, Zea Mays
attcgtgtcaccggcgttgggattcatgtctgagcggatggatagcatcgcggggtaaggggatcttcgccgccggtgggctggacgccactccggccagccataatccctcccccttgctcaccgcccgtggataaggttctcaccgtcgtcaaaccttcgccgttgcccgtcgcgtgtctctgtccatctaccgcatcaccgtgactcacccttgctctccgttgatcaccggagccatcgccacgacggtagacgcaagttcatgcgtgccagtagttccctgcccctccgaccgccgcgcgtcaccattaaaattcccggccgccgctcttacttcctataaattgagccctccaccagctccgcaaggtcatcatccaccccgccaccaagaatcgttagcaaccgtgcatccgagagctagaattttggtttcgccccaaatcagttctccgccaccgcgaaactaacctcaccgcggccagccccaatccggtcagctcatccctctctctcccttgtttgagcactctcatagctctgtgatgcttaccgagtcaccaattcgaaccgagagaccaccaatcatcgggaacgcgatcaaatgctcttggccttcacggttctcgtgggcaggatagaataggccaccatttgcacaattaagttaggggaaatactctctaggccatggattt

SEQ ID NO: 11104 - DNA, 951 bp, Zea Mays
aaaaactaacatacatagaagatgtaaatggtagatgaacatgtttgccaaggcgacatccctaacaagtatgatgatctgtataattacaagtaaaattgaactcgaaggcacgtaaactctgaagaagacaatcacggtcgggatgtcccagcatcgatcggagtagagacaacatgaaatgcggtggatggttgtagcttcagagggtagagatcgtcatggctgtcacagagcagaatcttcgtcttggtgtgtagctccataatggaaaaaaccgaatggatcaaattccacagagacgagattatcgcaagtcagttggcgaacagatatcaagttttcaaccaaatcaggggaaattaaaatgtaacgcatggaaagattatgaagtttggtgggaatagaagatagagcagtgtgagtaacaggtagacgagatccattgccgacggtgatagtggaagaaaatggatgaggttgaacatgttggagagattgtgttaccagagacatgcgacgaggcgccggagtcgaggaaccagtcaaaagtgggcaatgggtgtgctgcgatgagtcgttcagagccgccatcagagcctgagtgtcgaacgagtactgtccaggaccaattgtgggaggcggtatagattgaaggtcggcacccgatccgaagtagaatgcttgcttctgtggtaggccagggcgtggaccgagaacaccagacgttggcacgaggaacggcatcgaccatgcttgcaccacaccggtccaagggttatagttggggcacgaggtcgcgccggctggaaatggtggtggcacgccagatgtgacccccccccccccgaattggacggggccatagatccagacacgcgaccacgtcggcgatgaatggtgttgtggccgccgcgagtagacgggttggtggagttggcgacgaccaga

SEQ ID NO: 11105 - DNA, 734 bp, Zea Mays
gatgatgcaatcaatgctctctttcaaaacttcgggagcaggagtggcaaccttttcaggcgaaatttgctctgtggctttttcttctgttgccttttcttcaatttccgcaggctttttctcagcgggctctgaaggcccagctttggtaccagcttgaattactgcagtttcaattttggcctgctctgtttcaacttcagtttgcgccttcgaggcttcggcaattttctttgaaggagtcgagttcaaagtctttactgtttctagcacatctagtatatttgccatccttctcctcttgggagttgcggcagaacttttttgtgccttcagcactgttacttctgacgaagggcttaaaatttctaacacttttgttcctccaatttttggctcttcagccttatccttattagtcttcgactcagctagctcagctgagggtaccttcggcattatagccgggtcttcagccttctgtgcgggaggaacgggttctcttggttcagcagctgaagaggcctccccgccaaaatcaggcaccacagccggttcaatgtagcgtggccggtgggtaaggaccttcaactttttgcccatcggcgcaggctcgtctggagtggccgaagcggtagttttcctcttatttccctgaccttgcaatggatagcggtagtcagggtagacgaaaccaatggcatcaaaaactctgttcaatctctttttccccg

SEQ ID NO: 11106 - DNA, 574 bp, Zea Mays
ttttttggagaattgtttaaattaccaaaaatgtgattttaagtgttacacttcttcgagggcctaggtctcggctagtcaacaaggttgggccatctcgccagcggtgatgtagatgtctgtgttgcgaaatagcttttcgaaggttactcacacaaagacctcgtcacgagaccttgatagaagtcctcgatcacgactgcttcgccaatgttagggatgtgattcctcattgactggaaacacttgaggaatgagcatacggactcgttgttcttgcgcctgacggatttgaggtcccatggctgtgtaggcctgtcagagaacgattggaaattagcgacgaactagtcgtagaaattggcccagttgtcaacatactggtgaggaaggtggcaaggccactagagcgcgtcttgccccaacatgattgggagatacactgtcatgatgtcctccgtcaccttggtggcttgggcaaccgtggagtaaatgaccagccagccagccacttgcttagcctcgtacatgtctacgttggagaccttgaagttggacggccactagaccgcat

SEQ ID NO: 11107 - DNA, 528 bp, Zea Mays
caagaagccggagtacgtctggaaagaataccgggagaatagaattgagaaatgctctatggcagtctacctgggagaaagccaaaactacccaaatcaccctcctttccaagtcatcttcactggacaccgcttcccagacacttgccaaaatgttgcccgaaaagccctttgccagctatgccaaaactacagcagggaagtctttgagacaccccttcgttactttccacccaacaacaaaaatacccctacctggaggaaaagacttcatgctctatcaagaagagatcctactgaagatgaccccaccatagtctacatggccggatatctccacacccttgacaaccactatgacgaccttttctcccactgcacgcacctaaactcccgggtggagagcctagagcaacaaatcaagaaattaaaagaggagaaggcgtccctccaagaaagtctcgaaatagcagaaggtgaagaggccaacactcgtgaagcctaccgaaccctgaagatggactacga

SEQ ID NO: 11108 - DNA, 980 bp, Zea Mays
aagaaacactaccttgtctgtgcaaaaggtgcacttctcaaggttagcatataatttttgttctcgaaggacagcaagtacgtatcagatatgttcaacatgatcatcaagggttttattataaattagtatgtcatcaaaatagacaaaaacaaatttgccaatgaaagttctaagaacatgattcattaatctcataaatgtactaggtgcatttgttaacccgaagggcatcaccaaccattcatacaacccaaattttgttttaaaggttgttttccattcatctccctctttcatacgaatctgatgatagccacttcttaagtcaattttagtgaaaataaaagcaccactaagttcatcaagcatatcatctaatctaggaattggatgtctataccttatggtgatgttattaatagctcgacaatccacacacattctccaagatccatctttcttaggaactagaaggacagggacaacacaaggggaaagactttcttgtacgtacccttttttaatcagttcttccacttgttgctgaatctcctttgtttcttctgggttggtgcggtaggcagcgcgatttgggagggaagcaccagacacaaggtctatttgatgttcaatccctctcttgggtggtagccctggtggtacttcatcaggaaacacatcctcatattcgtgtaatgcatcaaagacaatacttggcaaagtagagggtaagtcgttagtaaaaagaaggttgtccttgtacaggagcacaaagaacatggcattaggttcactcaattcttttagatcccccttcctagtcatcatgactagtccctcttttcccggtgtcttggttattggatactgtggagttttatttggctttataaactcttccttactattttgtggatcactctcaagtgcttctcgctctctcgatgtttcttctttagatcatccttcataacttc

SEQ ID NO: 11109 - DNA, 765 bp, Zea Mays
tggagggcttaggatttctggctttattgtcgctttttccacttgtggctcttcggccttatcattttcagcttcggcggtcccgactgtaggcatcttcggcactacagttggctcttcaatgctctatgcaattggagcagcttgtcttgcttcggcagttgaagaggccccttcgccaagttcaggcactatggctggttcaatatatcacggccgatgggtcagaacctttattttcttacttttcggctcaaccggcacagcaatggtggccgaagcggcggcttttcttttcttcccttgccctcgtagcgggtaatggtagtcagggtatacgaggccaatagcatgaaataccctgtttaatcttttcttgccccgacctccaaaggctgcggacagagcattatcttcggccttggagtatgctccaagtagctcatcacttgtagcttcaatacactttagctagtcgtcgtttggctcatcgaagttctccctaaatctgaaggtatacttcagtcggaccagaccattctcactagagtcgacggtggtctccttcggcatatcccagctctccacaagtggccataccttgaaggatatatgctcttgaatcaaatcccttgtgccaatgaaggcacacacagtgctgaaagccctctggcatgcttcgacattgccatcaattttctacctttggccttcggagaccgaagcgagactagatgggtcgctgaatgatttctttgatgtctt

SEQ ID NO: 11110 - DNA, 273 bp, Zea Mays
gcactattcatgtgtctctctgacatttgcacaaaaccccttgcacttctatctcttcatgacttgaatccccgaccacgcacaggttgaacacctggccgaaattgtgcatactcaccggcggggacctgttccactggcgttgaacgtacgggatcaatcactgatgctatccgaacatctctctatacttaatttgactagtccgtcacttattcatgctagtccgcgacgaccgcggaacaaatgctccggtgaacccgttctgggtta

SEQ ID NO: 11111 - DNA, 402 bp, Zea Mays
tgcaggtctcggtaattcgcttctaaaaaagggattagccgccgctggcccggacggtccgcgcccacgtacggacggtccggacatgtgcagatcggcaaatttatcgccgatgtgcgtgggaggctgtcgttgcccagggtacatgtccatcggcatcccatgaaggggttgtgactggtcgtgataacctgtagccgatgaattatgtgtgtattccctcaattcaacctcgtgcgaaggaagatttgccatagtagacttatcaagcacacacactagccttttatgattattttgtatatcccctacgatacgttgcaactgttctcgctgctcgtctatgtaagctttaagagattggagttcgttggtgttacttacattgggggtaatcgtagt

SEQ ID NO: 11112 - DNA, 860 bp, Zea Mays
gtcaaggatagccctcatcacattcatcatctgacgcttcttttgagcgttccctctgccgggtgctgaagggtccttatctgcctcttcttcggcacttctctcaacatttttcttctatggctgtaataagcttgttagatctgatcctagaggacttagcattaggaaaggtaagggtgcagtcattacctctagaatttatgtcacactaatggaaaccgccgaaggtgtcttttctaaatgctttggcggagaaggtctctcttcttctccacggtcagatgacatagcctttcttttctttggtgtcgaaggctctggtgtcagcttcaggttctttgtcaaccttttcttcttgcccgcttcaatagacctctgcgcttgccttgtcaacacacttacaaccctttttcttttcaaccccccggcttcttcgtcaagtgtttcatagtcagggaattcgaagcccagggcatccatcaccctatttagtctccatttctctcacgtgccaaaggcggttgtcatcaatcgatcttccttcttcgtataattccaagaatttcattgcacatcttctctattagttccaaccactcggcacacggcttgccgaaacttttttgaaatttgaagtggtagggatgtcgtacaagttcatatttattcccttcttttctctttgacattccccacccaccagacgttggaaaagttttattggccaggaattcttgcaccaaatcccgagtactaatatgctctgcaacaaccctaaactccactttaactaactggtagggggagccgagcagtgtattgcacaatggtcgtgtcatcccgaagcttaatctcaa

SEQ ID NO: 11113 - DNA, 700 bp, Zea Mays
tgcgaggcaggggaaccgaccaggtccccaccaagcaagtccgtgaggcagggttaccaccaaggtccatgccaagcaagtccgtggggcagggcgcccgatcaggtcttcgtcgagcaagtccatgaggcgaggcaaccgattaggtccccgccgagcaagtccgcgtggtggggcgatggactaggtgcccgccaaaaaaattagtgaggcagaaacccaagtcaaacgtcgtgagtccacgccaactgagacaagacatgtcaccctaggtcgtggttagacatgtgaacgggaggccaagggcgcgttgagtgaccgctattgacatgaccacacctcctcaagtacagcatcaggcacacctctactgcctcaaggggccgaatgaccctattcatggaggaactgagcatcgaagcttctacagtgacccgaataccgcattatgtggagcaattacaccacactggtgtatgcctatgcacgtcgataagtgacgcatgttcgtgatgacgagcaagaccgcacgacgcatagtcgctccatatgactgagctgcaggaccccacgtgcactatcacgaggatgtcagcgggagactagctatagggacccatttgacgagcggacaggatagtacgccatgatgggagtacaactacacacaaccctatggacgacttcagaggaaccacgc

SEQ ID NO: 11114 - DNA, 908 bp, Zea Mays
cagccgtccaaggacggcccctcgcctcgacctagtgagaagaaggtcgacaacggtgaagtggccccgggggaacgagaactcgggtatcaatcacccgagggggacctcaaggacgtcttcactggagattccgactccggggatgacagcgaccgccgcaagaaattgtatgtcatgtacggcgggagctgggagtttacctcccgtaggaacgtcaagtccctatgtcgtgaggtcctatcgatgactccaggggtcccaagggctgcccccatcaacgctagaggagcaccaccatctccttcggggcacccgactgccctgacaacatggcaggggccggcatactgccactcatcaccacccctgtcatcgccaacatgcgactacaccatgtgctgattgacggtggggcaggcctcaacgtcatcagccatgctgcgttcaagcaactgcaaatctcggggtcccgtctagggccctcacgcacattctccggagtaggcccgcagccggtgtatccccttgggagcatcacactcctagttacattcgaaactgaggagaacttccgcacggagaacgtcgtcttcgacgttgcagaagtcaacctccccttcaacgccatcattggcaggccggccctgtaccggttcatggccatttcccattacgggtatttggtcctcaagatgccatccccgactagggtcctcaccgtgcaaggtgaccgtgccaccgcacttgcagccatagagaagatgcacgccctagcggcagagactgctcgcccagacgacggagggaggagtccatcaacctccggtaccaaggcacccctcaaggcgccaaaggtacaaccatccggatctggcggtgtccccgtcaaagccaaccggcttgcg

SEQ ID NO: 11115 - DNA, 378 bp, Zea Mays
atgcaaaaggccaccatcttttctttgaggccccttttctatatagtgtcccctttgatttcactgtttcaaccttagcatgacccagcaacctggaagtatggataatgcaataaaagatgaagagcaacccagatgaagacaaaaacaaccctaggacacattgcagtaacacacctccaaagtattatgaccttcatgtctagaattttctctatctctcgaatttcagaaatgtcaacttttgctgcttgttgcaaaagggtggcatacaattgaacataacggcgtcgaagctggcagaggcgtctagttctctcccatgaaaaccaatagctgaaaacgaaatggcaaataaacatcactagcaagcatttg

SEQ ID NO: 11116 - DNA, 1149 bp, Zea Mays
caagtaaatgacgagtttgacggactcacggtctcctcttcaccggcggtcaagctaagcctagtgctattctgtggatgtaacggtgctgtaaaagggtttataaaccccataggaggtcagccagctgagtatccagtttaaagttcagagttgaaactcacagcaccaagcaaaaaggaagcagatcaagggtagccgagcgagcagaggtaccccggtctctctttctccttccgtacataattatccaattcagtttgttacttgttaagagaattcgatagtaagtttgtagtaagcttggtcactccttgaactcaacgtagtactttctccgtaatacgccgccaagagatcattctttattttttgcaggttgtcaattacgtgccttaatatgagtcattggaagcagccgtcgaaactcgccatgcttgtagtactgctgctgctgctatgtcatgcagtggacaaagtccattgctcgacgcaccataacaacagccaagattttcattccctgcttgagtttcacaagggcatcaccagtgatccgaacgaagccttgagcaattggaaccccagcatccacttctgccattggcatggtgtgaactgcagtttcactcgaccatatcgagtcacggagctcaatctcaccggccaaaacttggctggccaaatcagctcctctcttggaaacctgaccttccttcatacccttgatcttagctacaatagcttcagtggccccctacctcttcttaacaagctccgaaacctggacgtactctttctgggaagcaaccatttgggggatgttattcccgattggcttacaaactcttccaacttagttgatctagatctctctgaaaacaatctcaccggccatattccttcaaacataggcttcctaacgaagctagaaggtatagccctttacaataataatctcaccggtgtcatcccaccaaccttgggaaacatctccacactagaggtagttgatttttcagcgaatcaactaagcggaagcattcctaataaagtttggcaaatctcaaacataacaatgttaaatctaggacaaaataacctatcaggtggaatcccagatactctctctaacttctcttctcttac

SEQ ID NO: 11117 - DNA, 578 bp, Zea Mays
tggagagtcttttggaaaaagacttcgatttttcgcacttattgtgctagtccggctgcacccttaggcgacttttgcacggagagtcttttggaaaaagacttcgatttttccgcacttgttgtgctaatccggttgcacccttaggcgacttttgcgcggagtgtcgcacgcgagggaggcttcgttgctcctcgcggtgactttgatgtggtcgaatgccgaagaccgtcgatgcggtctttttcgacattgctttaattttttgcgggggattttcgcgtgtatattacatggttctgcctcattaaaaacctcaccccctgggaggaaaagagtgtgggccagaataaaactgtttggtgaattacaagggcgtgttagccctgaggatttaaacaataaatttacggagattgtcaatattctaggaatgttccagatcttcgccagattgtgttgttatagcgattctagagattcgtgtctatacgcgctgggagacgacttcgtcttgacgataaatggtccttcccactttggctccagcttacctcgtgactctgtccgggttgtgc

SEQ ID NO: 11118 - DNA, 304 bp, Zea Mays
caggggacttaatagaggctagaacatcaagcaagaatgcttgaactaacatgcaggcgtctggccacgacgaggtgttcacgagtgcggaaaactgatttgggggaagaaagaatttggagctctctggtggttaatcggaagcagtagcggatggtttgccttcgtgatgacttaacggagctaggggtgtgctcaatttatagtatcccagagtggtggctctcaatttggtcatggcgtgctggcggacggagagagggaagaacactggcgcaatagctgtgtgtctttcaccgtggca

SEQ ID NO: 11119 - DNA, 510 bp, Zea Mays
ggtaacttctgcctgggctgcagctttaacatgttcacagccagctttctccaaaactgctgcaaccgctcgggcaccggcgaaggcgcagaaatctccacggtcgctaagtattttgtcaaaagcttcagcttcttcgtcgatccattcaacgactccttcaggatcgcctcgaataaatttttgctccgatgagtatgcacccacctttgcaaaactatctttcagtttctttgcgcaatccaaggatttctcataacatctctctttcgattcacgaagctcatccacattcttttgcaatcttgaactagtccattcgcttatctcttgctttgctttcgccacttcaaaatcttcattcatttcggcaagctttttctttaggcctttgacttcggctttatgagcttcggattgtgcattaagttttgctttgctgctcttcagcctatccactaaggaaagcggtatcttatctttttcatgggcttcattccttagcataat

SEQ ID NO: 11120 - DNA, 620 bp, Zea Mays
gggcggggaaacgagtaccaggggcactcggctgattggtcggggtgagggtaggacgaataaatacaggttgtctgaatggatatgtaggtgggtgaggagaagaacgatttggattgaaaggccggattaccaaccttgtcctctttttaggtccctgagttgatctttcacccgcatatccttttgactttccttgtcccgcatttttgcctcaactgacagtgctatactgacagccctgctgtatgtgaggtccagacacattgccatcttactctggagtctgtcatttagtcccctcataaagcaattcttctttttcaagtctgtatccacttgatcaatgacgtattgggagaggtgattgaatttattgagatactgcatcacagaatctcccccttgcttcagtcggatgaactcttctagtttcatttgtagcactccttccggaacataatgttccctaaatgctagcttgaactcttcccaagtgacttgatgtcccgcaggttggatggcggaaacgtttgcccaccaggtgctggcggggcctcttaactgctgagcggcaaataagggcttgtgtatctcggtgcatcggattagcccaaatt

SEQ ID NO: 11121 - DNA, 627 bp, Zea Mays
ctgctctggcaaaaactgctgctccggccactccagatgagcctgcgccgaagagcaaaaagttgaaggtccttacccaccggccacgctatattgaaccggctgtggtaactgagtttggcggggaagcttcttcagctgctgaaccgaaagatcctgctcttcccacgcagaagattgaagagccggctgtaatgccgaaggcaccttcaactgagctaattgaaacgaaagttgacaaaaataagactaaaagatcaaaaactgaagaagcaaccaagatgcccatgattctaagtccttcaacaaaagcaacagtgttgaaggcataaaagagttctgccctaactcctagaagaaaaaggatggtaaatgtattagatattttggaaacaacggattccaaaagtcccgctcccataaagagggttgccgaagctgaaacaaagtcggccaaaattgaagctgcaaaaatccaagttggtaccgaagctaggcctttagagcccgctgagaaaaaacattcggaaattgaagagaaggcagcagaagaaaaggctacagagcagacttcgcctgaaaaagttgccactcctgcttccgaagctttaaaagaaagcattgaat

SEQ ID NO: 11122 - DNA, 553 bp, Zea Mays
gctggcgtcgaggggtgctcggcggcggcgcacggatccggacaggttcagtttgctgacttgagcaactgcgctgcgggaaggaattgagctcgtgttgagaacttgatatctctatttcgtcagatttaccatattgtccctaaccattttgagtcttctagatctttgccctaggaattcaattttcaagcttgaatttgttttcaagttgcatcctattattggatgtttggttggtggaatgatgtagttgatcattatttacttttgtttatttttaatagaataagttgattcaagacaattatatcctcgcaaattaacaattagcaattgttgaacccactacgtatcaggaagcttctaggattctcgagtggcagctagctatgattgatgaattggctgctcttgaacgcactggtacatgggatatcgttcctttaccctcacatgttgttcctatcacatgtaagtgggtcactgggtcttcaaagttaagacaaaatcagatgattccattgagaggtataaagctcgtcttgtggct

SEQ ID NO: 11123 - DNA, 626 bp, Zea Mays
ggcggcgcggctggggaacgtgcgccagttcgggctgcgggagctgcaggcggccacggacgggttcagcgccaagaacatcctgggcaagggcgggttcgggaacgtgtaccgcggccgcctcgccgacggcaccacggtggccgtgaagcggctcaaggaccccagcgcgtcgggcgaggcccagttccgcacggaggtggagatgatcagcctcgccgtgcaccgccacctgctgcgcctggtcggcttctgcgccgcctcgggcgagcgcctcctcgtctacccctacatgcccaacggcagcgtcgcgtcgcggctgcgaggtacgttcccctcctgaatgcccccctgtcctgtcgtgtcgtgtcatgtcaccccatgcatgtcgttcacgtcgtagtatctctgtcgcggacggggtacgaccgtacatgtctcggccagccagtggcttaattgtgccggcatcaaggttcgtgcggggagattacgcggtcggagcgagtgggaccctccaccacgcgcgcggaagtgcacgcaagagtcatggagggtgtacagtacccagcagtcaggcgtggtcgcgcgtcccctgtactttggcgcggggaccatatggagcg

SEQ ID NO: 11124 - DNA, 573 bp, Zea Mays
gtttatacaatattttgtctatatagattacaatcgcagcagtcttaacagttagtggaaggaatatagttgttcaatcttagattgtctctagcaagggactgtaaacggtccggtacgttaaatatagcgttttcaatcctccagaaatcgtccaacaacgttcgatataccctctccactagaatatagcgttcatccttcgcccgctacatttaccgatatcttgtgcgtcctctatccatcaaatcctccagcccactgtcgaagagaggacgagcgcctcgacgccggtcgttggagttttggattagcaatcgtcggggacattgaacacacacagaatcgccggagacgaggatgagcttgtgtggcggatcaacggggaggagcacgagtacgtgtggccgtggacgtggaggacgacccccacaatcgtcgtggacgtaggcgtaacagtcactgggaggacgacgaacgcgcgaccaccgaggatgtgggcgcgatagctgaacgaggaagaggaagacatatagcaaaataacgaggagttcaacgatatcgagcaccaac

SEQ ID NO: 11125 - DNA, 654 bp, Zea Mays
cgcaaattcgcccatgggcgcagccggaccaacacaggtgtacgaatacggcaaacagaccacattaccatacaaattacaattacatacacacggcgagggcatcacatattacatcggctcaacctttgggaagatacccatctccctgtaattaaacaacattatcctcaattcctcaccctcaaaaagcttccgaagatcccctcgcctatgctcgccccaatcggtgaggacaacaattctcgtttaccaacccggtctacttggagacggcaacgctccatccccatatgacgacgcctgccacttcgcgaaaattcacccacactatgttttcccatcacctttcgccgcctacacccagtactcgcactagggagatcctcgacaccctccacacgcggcgaagtctccgccgcagccacatccaacgcaacaaaataatccaagccttcatccgaggactcctctgtccaaggaaacgaactcccagattcaccatcagactcaaaacactcagacacagaaccaaacaaactatcataggtaggcactacggttgaggtcgccacaaaatcagtattgtcagcagcggttgcctgcacaggcccaaacgtcggaacctgtgcaacaaccgaggttcagtatcac

SEQ ID NO: 11126 - DNA, 381 bp, Zea Mays
gcgacggagaccacgtaccttcaaaccacgaggaccagaaataggtatgtggaaaactaacacgttcaaggccgctagtcagttggtcaaatccagcccaacctttgatcaattattgtttaaatatgtgaaaaagaaggccgaccccagtgatcggccaccaaagcggtctcgcttacccacccaggagcgacagtaggttaggccgattggaccacctcaccaatcggaaaggacgagaggtcataatgtccaactaagacctaacgtacatgcatggacaccgccactcccatacacacctatgtcatatcattatacatacataccaccaccaccatatatcccgaatcagatgtggggtatgccaccatatccttt

SEQ ID NO: 11127 - DNA, 660 bp, Zea Mays
gataaataaaaatcagacaaaaagaggaggtcggcgagcccgagggaggatgccaaccttgacttgtgaccgacagagcgcaacatctcctaaagctcaaagtttgaccgctgactaggttggagacaagttcgaaagacaagttaaggatgaatagcaggggagcgaccacccaaggtttataaagagggtagaagggcgctcgagtcctccctaggacgtggacgatggtacgacaaatttccgagttacgccacaatttctttgggaacaaacagacaagacacatgtccgacccgttatcagcccataatggaagacagtctcccctcgagggcttggggctactgttggggaaatgatccctaatccctgtacccaccggtcattgagtgcgctaaggaaagagccattaattgcaggggcccattagtcagtcggaagaggtaggtgcaccaaccttggatggacccacccccggtcaaacctcgtggaacctagcctggggccgggcatggcgaagcctgacaagggaggacaggcgtgtcagaagggaaccacttgagtggatcctgctcctggcgccagactaacccaccataaatgaccaactgcattaaccacgtctggcaccgagccacagcgtgggcaccggtctgc

SEQ ID NO: 11128 - DNA, 429 bp, Zea Mays
tttagaaataacgaccgagcagttactggcgacttcggcgttttagaggtaacagccgaacgattactagcgacgtcggtgctttagaggtaacagctgagtgataatcagaccgcatcggccactttgaaggtaatagccgagtgaagccagataatgtcagcgtttttagaaacaacagctgagtcaatttgagccgcgtcggccgttttggaaataacgaccgagtgatgacatggcacaccagtttttttaaaaatagcagctgagtgatgactgggcactttttggaaacgacatctggcccgggaaaaccccatatgtactgcactgtagtacgcctccacactccgtgccctaggttttgcttagctttttgcatccaggctttctctgctctcctgcaatatcgcttctgctccgttcacc

SEQ ID NO: 11129 - DNA, 527 bp, Zea Mays
aacaactcaaatttgggcgaatcaaatccaagataataaaatcgcacgactttacgcagtccataactagcgcgcataacaaacgccaccgcctcccacagcacgaaaccttctctcctcttctcgttctccccctctatagtcctccgccgcctccattgccttctcttgggctcctccccgtatcccgggactactagtccaacctcccaattctgcggcactcaccattcgacaagcactgaaccctaccccacccaccagtccccgcagccgcgctccgcaatggcgagcggggcggctagaaagcgccgccgcaagtcgtcgccccctgccgccgccgcggctgcacgggacgggaggaagctcctcgtcggcgaagtcgtcgaggtgagcgccatccgcgccgtcgtttgcgatgaggtccaccgcattgcggctaagggcgatggtccgcgggtgatgggcagggtgcctgggttttcgattttattgcgtttccaatgcttgaggtcaccgcccatgat

SEQ ID NO: 11130 - DNA, 362 bp, Zea Mays
cccaagacaacaacacatatactcttaccctacagttttgcccgtgacttataggttactactggcattagcgtcgatacctccgtctgctgcacccgtctccactaacttcctcgtcccactacgctccatcaggacgccttcccccacctatgttgggctttgttgctagcacttttggaagcgtcataacaactacatcttttggggcaagtctaccactatcaccgccaccctccgcgcatgcctagcagatgcctatctgtgggcatatcatctaaaagatagagactcccaccaagggagctcttggtgtgccaatctcccccttgctatttctcgcatgtaattcaacatgtaac

SEQ ID NO: 11131 - DNA, 447 bp, Zea Mays
aggtgggccaatttgttacctgaagcggtctgggcgctaaacacgactgagtgcagggcgactgggttcacccctttctgccttctatatggatcggaggccatgaccccgcaagaaataaaacatgggtccccgcggacagtttcgtcagctgtccccgatgtggacgaacccacttcgaaggatcttatcgatggagaacgcgtcttcgctctacaggctctaaataaataccaagcccagataaaagcatggcgcgaccacgcagtcatcccgagggaattcagcgaaggggacctcgtactcgtccgaacagtccggacagagtccaggggcaagctggagcccaagtgggagggccctttcattgtcaagacgaagacatcccccagcgcatacaggctcgcaacgccaaacggcgaagacttggagcattcttggaacatc

SEQ ID NO: 11132 - DNA, 437 bp, Zea Mays
atgatggatgtacaataggaacagcaatttgagaaggcggagacggttgggcctgcgacgaattcgaccaatcaagcaattcgacatcccttcgaggccaaaggataaaattcttgatagcttgtccaagtttctcgataccttcgggcccagggatgtctaacatgtcgtcctcggatccttggacaaccgacgtcacttctactttgcaataatcatctggaatatcgtttccatggaacttgcgtcctgggatcgcaaggcctgtggctactttctttgtacgtttattgttaataccatatcttataaccagtgtgcacgcctcaggccttgtgatgtcatcaactggataacggaccttatttcccgttgaagcaacagagcttgggaatgtcgtacaatcggtggaagccggcggttgagctgctggaatt

SEQ ID NO: 11133 - DNA, 589 bp, Zea Mays
caaggaggttattatgtgccccatatggtcccacttcggtctccgaaaaccgaaggttgaaattgatgatgtcgtcgaagcgtgtcagaaggcgtttggtactgtctgcttcttcattggtacaagagattcaattcaagagcatatagcattcagagtatggccgcttgtagagagctgggaaatgccaaaggagaccattaccaagtctagcgaaggtgaactagtccgactgaagtatacattcagatatggggataaattcgatgaaccaaacaataactggataaaatgcatcgaagttacaagtgatgagctgcttggagcttattccaaggcagaagataatgcactatctacagtcttcagaggtcggggaaaaaagagaataaatagagtttttgatgccatcggcttcgtttaccccgactaccactacccgctgtggggacaggggaagaagagaaaagctgctgccttggccaccccagctgaacctgtgccgaaggctatgggcaaaaagatgaaggtacttacccaccggccgcgttacattgaaccggctgtggtgcctgagtttggcggggag

SEQ ID NO: 11134 - DNA, 283 bp, Zea Mays
ccatcctcctcctccagaaatcaatgagtggcaccagcaggcatatggggtgcctttcatgtctccagaagatgaagaagaagatgaagaatactttgatgatcatgagcagtttgccccgcctccccaccagggggatccgggtcaatcctcttctcatcctccgccccaggatccttcaggaagctatccccccagctcattctggggaagaacactttgcaactcacctggcgcatcaattctttggtccgcatcatcctcctcagtggtgatttatggc

SEQ ID NO: 11135 - DNA, 742 bp, Zea Mays
gctagagccactagagcgcgtcctgccccaacacgatcggtaggtaggctgttgtcatgtcctcgcttgctctagtggcgtggggcgatggtgaagtggatagctagctagctactcgggtcctgcttggtttcatacttgtcgatgttggagaccttgaagtttggcggtcattcaaccattcagagtcagttggtggaggcagagacccccaaatacattttgaggggcctgcgcaccgcctcgaacatgtttagggcattctcgatgttgttgcggtggtgatggtgatcgtggactaagcatgagttcctgagactgttcgttgaggctgcgatagaatgatttctagtggtggcgccccgctttgggacgccatggttctggtcgtactcctctcgatgccttagctcttcatcatgtcgttgcgcacgtgaatccttgatgtgatgtcatgcatcacggtggtggttgatgtcgtttcgtgcgtcccctggtgctggagcaatgggggttgtcaacaggagatgctttgttgccttggtgaggatctatcgatatatgtctccatcgagtgagtcggggaggccattcgcgatctaggcaagcatgccaccggcttggcttggagtctgcatgagcctggtgaactccagcagcaggttgcgcgggatgggagataaaccacgcagaggtgcatgatcgtgttgatggcgaggatctcggggaagtggatggatag

SEQ ID NO: 11136 - DNA, 309 bp, Zea Mays
ttcctcatattgtagtctcctactctctattttgatatggattccaggtggagaacaaactttcaaaccttcaccgatttgatcaacaaccaatctccacaacttcatgacaccccttctggtgtagggtaggtattctttgatggcctttctcgtgtacattatcgtcgagaggatgttttggtccaccccatttcctccctccacaacctctatttctatacccatatcctcctcctctatatccctatcgaccttctgtggatgctcctcctactccctaatgatgattctaccatcaacatttcc

SEQ ID NO: 11137 - DNA, 497 bp, Zea Mays
cccgggccagggacgccatcttctactcgtacacccgctacatcaacggcttcgccgcgacgctggaggaggacgaggcggcggaggtctcgagtacgtgcgtgtgggctagctggctcatgtctccgatgtctcttctcttgccgtcgtctcctagctagctatagctctgccgttctctctgctgttgactgtgactagctattctcccgcgttaatggatggcagggcatccgcgcgtcgtgtcggtgttcccgaaccgaggccacccgctgcacacaacgcgatcgtgggagttccttgggatggaggaggaaggtggccgggtgaggcccggctccatctgggccaaggcgaggttcggcgagggcgtcgtcatcggcaacctcgacaccggtaacaacgctcaccttcgtgctcgtggtctcttcttcagctttgtcacctgggtactggactactggcatactgccgcgattagagcctgagccactgag

SEQ ID NO: 11138 - DNA, 469 bp, Zea Mays
gaatgtaagtgtggaaataagggggataacatttcccgctaatctcatagtaatgggtactcagggaatagatgtcatcctagggatgaactggctagataggtatcaggcagttatgagttgtgataagaggacaatcaagttgatgtccccactaggagaggaagtggtgaccgagttagtcccgcctgagccgaagaaaggaagttgttatcaaatggctgttgatagcagtgaagcagatccacttgagattatcaaggttgtgtccgagttcccagatgtgttcccaaaggacttaccaggtatgccacctgagcgaaaagttgagtttgccatagagcttcttcctggcaccacccccatttttaagagagcttacagagtatctggaccagagttagttgaactcaagaagcagatcgatgagctgtcagagaatggttacattcgaccaagcacctcgccc

SEQ ID NO: 11139 - DNA, 493 bp, Zea Mays
gacgctttgggcgagcaccctcaggcttccgagtcttcactgctttgccaggctcttgcccagctgtgatagccatcggctcagcatgggccgagtcggaagattccctagccaacatactaagcacaacatctatctctgcatcgtccgggctggctggcatctcaaaatgaatttgcttctcatcattgggaagattccgaagaggggcaatcagagcctcaatatcctcggaagagggtcccactctaagacccagaccaccattaccagcaggagggttggacacaaactcagaaaatgaccggtgaggtggcaaattctagacagaataggcaacaggagcaccaacatttgacactctgcccctcagaatcatgtccagtcggctcaccaaatcttcagtgggaattttcttgttggtaacccgggtagagtcattgacaccactgtacagataagatgggtatgccctatctttcaaaggttgaat

SEQ ID NO: 11140 - DNA, 356 bp, Zea Mays
gacatgtggggtcgataattagtgggcctcggaaaggtgagagcagagagctgggttgttttgaggtgagcttgtgaaaacaccagccgcggttttacgacggcgtacggttttgatgtcggctaagctccgctgatagctgagtcgagccgagctggcttcggctgattgctgacttgtggaacgggaccggcagtttctgaagcttctgtcagtggagcaaactggagaacgtttcctcctccgctctactggaaataggagtaaaagacagcacagttaagtgctgcaaaataaattaggcgatacttaaattcttctcttattgcatactgtaattactggtttataccccg

SEQ ID NO: 11141 - DNA, 530 bp, Zea Mays
caccgatagggaggcccatgtctccagtctcgtgcgcgcctggtgtcctcgctctgactggggtaccccacttgtcaatcgcgcgtcatgcgccacgcaccacgctcctgcaccgactgctggggcccacgattccatcaccaccacataggggcacttacatctggggcctacctgtcagcctacaccacctcaactaacccgcgcatatgccggtgatgtggagctcaggcgggtccatttcttcctcctcccctctttcctctcaccttacttaaggacctagctgccagggaagaccattgtttccgtcgtcccgtgttccaccagaaggaccgttacgaggtgagggagagaggagtttgtgtgtgatttgggctgccctgggtgattcccatcgctgtgaggtgtctatcctaggtgaagggccgaggaggatcgtcatcatccagggtagcggtgcgtaaccgcaattgggaggtgaagccgcggaaccgaaggcaattcctcaccgttgatcgatttccgcc

SEQ ID NO: 11142 - DNA, 271 bp, Zea Mays
atctgccaccggcgtccactgccagaggtggggacgacgccagggacggtgaagaactttgatggcggcgagcgtagttgtggttgttggccgcaatcgaccgtcggtgccccttgcacactgcggctgcctcttgctctgggtcctccgcgccgacgacgtgcactagagcaaactccgccttctttcgccaaccacgatgccgccttgccttcagtcgcccagactccacgctcgtctgcagtaccaatgtaagggatcgggagttttc

SEQ ID NO: 11143 - DNA, 760 bp, Zea Mays
actccattctccaggtggccatcttcgtccacctctgcgagatgttcgtgggagtgggggcctgtacttccctcttacgccacttcttcatgctggtgaggtctgggaagggcaaggaccaccttggtgcctacttttctagatgaggtcagatccaaccgtggcctacatcgccacccttggtggcgcgaggtgggagaactggcgcaatgactgggtgatcgtcagcgctgaggccaacaaccgccttgccctgccgagcgacggaccaagactcgaccggaagcaatggagggccaaaccgtccctcgcgccggagttcgagcctgtactggacaggatcaaggaactggcgactggaggtctgacctcgatgcacgtggtcggtgattttctgaagcgccgggtcatgccgttgcaggggaggccgcgtctgtgttgctggttcactagccctagcgacattggcaggatccagcgcaagccagggaccgacctgtcctgggaagcgttggaggtcttagtgaaggggatcaccggtgaggcctttatccccgaatccttgatacctccccagggcattccaacgctctgcgatgatccagggctgcggtcggtggtgctgtcctggctgccgaccctcgatgagagtggcatggcgatccgccaaactggcggtcgagacccccaccgggggatccatattcccggtgtaccagtccaaggttcccagcccgctgatgcgagctccagagctccc

SEQ ID NO: 11144 - DNA, 324 bp, Zea Mays
tcgctattcacacctcgcaacaatcaactcgcaggaatcccatcgcgacgacgcgcaggaccaccccgcccaatcgttcttcccatgcaccgcggatgccccgcccatatcccccacgccccaaacacaatccatgcctcgccgccatggaaggaatcaacccaattccctcgtcgccatccagcgcacagaaccaccatcggcccacatcccatcgcgagtgcatgacccccgccatctcattcttcccattctacgtgtcagccccacccatatcttgcgatgctcgagtacttcccattctacgcgccagacccgcctaga

SEQ ID NO: 11145 - DNA, 853 bp, Zea Mays
gtcgagataaggatccaccacaagcaaccgtggagaccgcgccatattccaccgttggagacgacgcagctgccacatagctactcgctcccaaccaccgactagtacccaattggagccacatatcctcgcctgatcgttgggggagtcgctcagacccatttctcagccaatgccctaaggagtgtggaattcctcgctagacatctccctccgccacggagccgctgtgcatcgtggattggccctcagcgctactaaactctggtaagtttgtcccctcacgtgtacgccatggcgtcagtttcctttttatgcatggtagaactcgtggtagagcctagagcctcgattgggcgtcgtcccaatgaagcgccgtcgtagggaggtatccccgttgtgtcggccgagcgagggatagaagatggcccttggccgagcgatctgaattggacggacaagattagaacctaggtatcggtttgatcaaatcaatctggggcattagatccagatcgtacgtgagcgggttgatctggacgattttaaatccgaggcatccgttcatgatctgatggcccctgtcgcacactgaatcattataagctagatctaatctaggccctcggtttttgatcgaacggcctgatgcgaagaatacccccttcggtcgcgtaaacatgcaaataaaccccccctgattccatagaatcaacccgccatccacagcgactgcgccttgagtcctggaatattttacacagaagcccctgcacttctctgttttttgtgcatgcagtccagggagtagtaaactaaataaaagaaatatagaaatgaatttttggtattc

SEQ ID NO: 11146 - DNA, 583 bp, Zea Mays
tcactcaacagggaggtaggggaagaacatggcccgttgatgcgaagatgtacggctgcgattagatatgggcgtgtgaggttttcaaccgttggatcggttgcagaggattaaatctggcaaagtgtagaccctcgaccgtcgatcgtacagtggatggcgtagatttgatcgagccccttttaaaatcagaaccgtcgctttcggatctgatggccaccatttcttaccgattcgtttataggcgcgatttaatcctggccatccgcgcttgatcggacggccgatgtcgcgtgcagtgtcatgtgagtcgtaggtctaattggatccgctggtttctaatccgacggtggggaaacatcagtaccccttcggccgcgacagttttgcacataagaccctctgttttaggaaaactaacccgccgtcctatgcgctgttccctgagccttaggaattttacctcgaggcccctacctttctcagatttagtgcgcccaggccagagttcataataaatggataaataaaatctgaaaatgatttttatgagaaaaagaattgctagaacttataaaattga

SEQ ID NO: 11147 - DNA, 425 bp, Zea Mays
tgaatatgtcttgacgtgcttctagagtcacgacctggccacatccttggagccggtgatcgctgatctagtggccgccactgaagacgccgcccaggagagcgtacaagacgacgtggagctggtggccgagcgcttccaacgcgaccctgctgatgacctgtagagtagtagagacaaagccagggttccactgggaagcgggtgtaataacttttgattttgtgtaatatactttaagaaccatttaatggagttgaaactggaacttatctgtatgttatttgcctttatgatgtgtagcattgtcaacttctctctggtacatggccccctggtaggtaggctcgacgtgtcgaggctggataccagtataccaaagagaatactggtggtccggccctaggaggtagtctctacagttt

SEQ ID NO: 11148 - DNA, 434 bp, Zea Mays
ggttaggagtttagggttctaacctcggaaattaaaattgggaagttacagtgtcgtggaaggtttctgtgcgagcaatttggaaattgcttaccatgcggctctagccacgtgcaccgacgggttgcgggctccagcgacggtgatcacatcgctccggtgaggtagtgccttttgggctcggataagcttcatgggtctcgggtaaggtgaccgggggctcgggataagctgggatgtctagaaacagctggccacggtggtcggtgctcgagcaacgatggagggcggcggtgttctcaggtttcaggtgatcacttgcgattgatctcaggtgaggatgagggggtgcgggggagtgaggtcaaggctagggcatctcttataggccgcaggtgagggcggactagaaggtggccgaccgtaggcgcggg

SEQ ID NO: 11149 - DNA, 274 bp, Zea Mays
cgcagttgtacacacagagatctagggttaataccggctcggcaaagagctccggattaaaagccaatatgaaagaaactatcttcatacttaactaataccagagccatatagcccccacggtagcactgtcaatcctggatttcacttacagataagtccttaagtagaggaatgctagaacaaaagtctagcccccttgaatccaaattgttaaacatcatcttgggatcatcatttcatgttgccatcattcaatgtaactagtatttca

SEQ ID NO: 11150 - DNA, 714 bp, Zea Mays
gcagaccccctcgcaccacgtgcgcaaccgtagagcaccgctgtagtctgtcatccgttccatggccaccgtctagctcctgtcacgtccactgccccagtgagctctgcctcctcgccagcaacacgagacaccctttggtttgcccccatcccctctatttcccttggttcgtgctcaccgaacttatcgcctcacagtcgagtctccgccgccgtcgaccaaggccctcgcggtgtcctctcctttactcaagtgctcatgagccgtctctcgaggtaaccaacccacccaaacccttaatttcctatttactgacatgttgttcgctcaatcgctcgtcggtgttgatgtgcgacgccgtcgggctgctccgccgcggaccacgccctttggtgcctctgctctagtgtcgtgcccacggctgactctgtcatgtcactccgatctcgcctgaggcgttttcggtgaacatctgccacgaaatcgggtggcgccgccacgggcagcccagcaaccccgcccgagcttgccatcatatctcaagcgcccatccgagatttgacggcctagcttcaattaaaaccgacctgatctcggccatccgatggcgatctagccgctcggatccaccccctcatttgcgatcgcacgatcgagatcagccgatacccattcgcgtggaaaacttgttaaaccccctggctttctaag

SEQ ID NO: 11151 - DNA, 1054 bp, Zea Mays
gcgaaggcccataataggggcagaacacccgaggaccccaatgacataatcctgtcatgcgcacgcctatacctgcctgacatagagatgtggtcggcactctagccccacgccaaccatgatataggcacgtcaccaccaaacaccgtcttggcagatgcacgacatggtagaggagtgacgggggggggggtatccgtcaatggaaaagggtgtcatcgcatacaattcctaatgtcccctgactctacctcgtggggccaaccaagctctgccaccaggatcctcagcaccagagactctacaatgacccacatacatgataggacggggcaatctgccatatcgggtgtatgcctatgcatgtaccggaggacgatgttagggagattacatcagaagggctcccgtaaacaacgaaccacaccctgctttagataacaagtccccttgtaagagcctctcccttgaactataaaagggagacaaccaaaacaggtattggagagaggatttctttgactagagtcccctccttccttccatcctcacacttgcaccctttgtaacacattctcaggagcaatacaatgatcaacactacactagacgtagggcatgagcccaaaccaatataaaccttctcaagtcacttgattcaccattcggagtgagattgcgctagcctcccccaccgaacacaaattctattatgtccccgattttcaaaaccacgacatgtttcaacaaaaaagttggagttcaccactaagatcaactatgtggtccaattttttgaagatgtgagtctagcggagagcaaagaagctgccactagagataatctcattggggaagcatatgtcacctttaagggtgatgcctctagctctagcaatgaggatgatggcttaggctatcaaagggtgacattgacatgtgatgttgcccctacctagcacattatctatcaatggtgagagtcattgggttgtttgacgtgggccctacatgtacaccttcatatcttgtgcacctaaaacacacaaagact

SEQ ID NO: 11152 - DNA, 628 bp, Zea Mays
gagcaggatccaatgagaatttgactggggatactataacaaagttaaagctggattataggttaataactttgatacatgaagattagtaagttgtcacatggaaaatggagaacaagactcctcaaatcgcgctgtcagaacgactgaacatgattgccatggtacagtcatcataaagatcttcggtgccgtgcttctcaatgctggtgatccgccaccacaattcacgctcgcctaggagattcgtgccacgggaagagtagataacgtcgggacaaggtgaaaatatccagtgcggggtgaatccgatcgctggccggaccggccgtcgtgtcccaccgtggttaatcgtgctggcatcaccagagtttgccgttatccggccaggctacgtgccttaaagccttaccacgtcgtaatagaccgctttcggtagcttgttcatcgtctaagacactcccccggtgaaagccacgatagcactacgccagtgacttctcctttctccggccaatagcacaacttcttaaaattagccgccaccgctctaggacgctataaattgatggtactgctagctctgttaggttatcacgaagccagagcacccacccttgcctctgat

SEQ ID NO: 11153 - DNA, 671 bp, Zea Mays
tgcctacttttgtgaccaccaccgtagcagagagggattagggagcgaagtagagagagagagaatgccacctcgcggtcgccgtcggtgggatccttgcttcacccgcgccccatccctgatttgctgcctggtagcatcgccgggaccttggggagacgttcgtgccctcgggaaagtgaaggagcccgtggagcatgggtaatcgctcaccagagtttgtgagcgccgcggtgaccccctgcgccgtggaccgtaccactgcgtgtacaaaaccctagtgagtgccctatccactgattcgctaggttctccacatcgcgaattagacttcgtagcgtagaattgcatagtaactcgtcggattggcgaggcgccagcgaactgagcagccacgctagggagggcggtgtcgccatcgcgttgtaggaaggggaaatggccttggaccgtagatctagagataaaaggtttggattaggttacgtcataccggttcagatgggagcaatcctggccgtcgtgtgccgatcggatggtgctgatgggctcaggggttatttaagtccgcgctgttggattttgatcggacgagagacgttaggtacaggttcaggcgatgacaaacctaatccgtgccatccaccgttgatcgagcagtcagatatcac

SEQ ID NO: 11154 - DNA, 446 bp, Zea Mays
cgcccaggattaacctcgttccccgccacgggcctatcgccgacttggctcccatcgagccaacagcagatctcattactctctcccccccatggatgctctcggttagcgcagtacctgggtcgagctcacccacacggttcatgggggaaggcggagctcgagtcacacatatatataggcatggattaacgagtctgattttggtggggggaaacagaaaccgtcggttctagcgccgtctgttgcgatgtgcaaccagagcctgcgccacgtgagggagatgaagatgacaggtagggcccaccacgcttccactacgcactcgcccggccaaatcgcagtgaggcggatggagcccgcggagggtgctgcgtgggagatgggctggcacgcgcagaaggactgacttggccggcaggggacggaagacagagatgcgccgg

SEQ ID NO: 11155 - DNA, 688 bp, Zea Mays
gtttgtgatcgtttaatttattttagttatgctctttggaatgggcatttaggttgatgtctagtgaactcgagttcaagtttgggcttcccaatccttgttgttagtgtaaggctgttgttgtccaactggtattataggataattggagtaacaagagtagttttagcgataaactacttcttctgtcctaaattataagacgttttggcttttgtaggttcatagttttggcaacgactactatgcaatcaagccttaggtgcaaacgtgaagcgagtcttttggtccattaaatcattatccaaccatagatataattgtagtttgttagttttttttataaatctacgtgaattggtggtggaaaggtttaagtgttaaatataatatatggttggatcatgatctaatgtaccagaaggcttgtttgtacgcttgcacctaaatcctgattgtatagtagtcattgcctacgtataagttatgtgtggatacatcatacataatagaagctataaatctagaaatgccaaaacgtcttataatttgggatggagggagtattatataatcttaaatttatatatgatcccattacttgtaccatttctttgctataggtgagtagtttcttagcagcactcccatcagtattgcagtattgctcttataatttttgacgcat

SEQ ID NO: 11156 - DNA, 443 bp, Zea Mays
ccactatgaaaacactctcatgccaacatcagttaccagtaaccacctggaatatatcgggatgccagttttcagccaagtttaaatttcttactgtgccaatagtggaactgttgttactctcggcaacctcccatcgagaccattttcctgacagcaacatctgggccgggctggatacttccttggtgaattgttgtcaactggagtttgtacgcaacctgaccaatgcgttgaaggctaaattcctacacgccatcgaagagggctgggatttgttgtctttggatgaaggtgcacatgtgatgccagaaaccatgaagaaactcatgatggcgctgtcggcagcagcatggtcaggaacagatgctgtcaccacattgcgactgcatggacagatacaccaacacgatattgtggcgctccttgactccggatcttca

SEQ ID NO: 11157 - DNA, 402 bp, Zea Mays
ccagtacatcatcccgtctatttcatcagtgaagttctgggaccctctaaaaagaagtatcctcaagttcaaaaactattgtacacagtacttctaactgatcgtaagctccgtcactactttgacgaccacaaagtcatagtagtcaccgggtttccaataggggatattcttcacaacaaagaagccattggaagaatagccaagtgggcctgcaaattgggagctcacgacattgagtttcggcctcgcactgcaataaagactcaagcactagttgacttcgtattagaatggaccgagcaacaagtaccagacaacccggaggttgtagaagtatggcgaatgtatttcgatggctcgctgaaactacagggagcaggcgcagggatcctcttcatt

SEQ ID NO: 11158 - DNA, 834 bp, Zea Mays
aataccatttttatgttgaaaaagagacacagggtgataaataacattattataaaattataggaactgaaatgggtcaatttggacacaatatgaattttctaaggattaactaagattctgcaattatttgtgtgctaacaaatcattttctaatggaatttctgaatttcctatgattctggactgcgcgcataaaaacagagaagttcaggggtcccggtgtaagttttcctaagactcagtttacccgtgcagtgaaccgcgggtttaatccgcagaaatggaggggctcttatgcaaaagagttggccgaaggggtacgggccaatatgtgccgtccgatctgtgttcagcggatgagattagatcgcgctgggttatgaaccggtatgtaattataaccacacgatcgcgatccgatggcgcatgatcaatagatcgaaagggtacgctcaaactaatctctaccgtccgtctcaaatcctaccatccggagccctcttctagtcctaactgttcatcgcgagatcaatggctctgggctcgtcttcttcccccaaccacagggcgcggcggcgcacaaatctgccgcggcggcgcccatgaacggacccccctatcctaggccctagtgctcgaacccccgatccgaccgacgctaaacgaagagaggatttttgcgaaacagagggaggtgcttaccatcgtcggagggcggagaggaaagctagctgcagcacacggcggcttgaccacgaatccgggctccggtgtgaaattccgggtttattggccgcgtatctcccccaccgtgacgacgaccacttcccc

SEQ ID NO: 11159 - DNA, 514 bp, Zea Mays
agccaggtggggcaagctattggttcgataaactttgcttctaataaacgatgcacctcggctttcactgcttctgttttctcgacggacatttttcttaatcgctgcttgggcgcacagaggggtcgatgcccagactatgttcgatgatagtgcgaccaatctgcctgttgcggttgagacaggagagaagtcttgttctttgtttggtgaaaggtcttcgctgatcaaaatggtttgcttgggaattgcgaggtcaagggagaccgtcttagttccctcattgctctgcagttgtgcgttgactttttgtgtttgttgggcgaggactgttgttatcttcgcactttgttgttaggcaatgaacgttgcactgccctaggacaaagtctctttctatgttccttgctacctgttggtctcgatatacagtcattacgccttgagggcctggtattttcatgcacagataaagtctgtgtattgctgcctcgaacttattgatggatccatg

SEQ ID NO: 11160 - DNA, 504 bp, Zea Mays
gaaattgttttggcttaagtagagaagtggtgacatgccaaagtagtcatcgcttcctctatgtttataagtcgagtcaatgcgcattatgtgtcaagatacacttcacaaatagtgtagggttgtgttcaagacgtcgagtagacactgcaagtaatcaagtaggtttgtaatgcaattgtgtgtaatttgtttataatgacattttatctcaagaagtgttatgttctatgcataaacaagaagtatgcatgttttgtgtagtgaggattgattttcaggcgtatgtcgcacgaaataaattaatgcgcataaaggcgatgaatgggtgtgacaaagtgcggcgccatcgatcttcgatctaatggttaggacggcgtaccagttcgaggtctgatctggtgtgttggatcttgatcgggtggcccacattatgctctgattcacttaaagcccggatctaatctggaccataggattctgatcggatggcttagaattcac

SEQ ID NO: 11161 - DNA, 452 bp, Zea Mays
acttgacctataaatatagagaaagcgatgactactctggcatgtcaccacctctctatttaagccaagacaatttctaccatcgactaagagtcataagcattaaataccttactactttacatgcacaaataaacttcaacttaacacaactgacaccgatggaatttttactaaactcatcatacgcataaccctatctcgcatacaaccatattatggcgtgcactcgagacacttcaatcaatgtggcgcgaccactaatataaatgaactccgacactcatgtcttaacgatacatcctccccgcaaacaagcatttgctaaactactcatcacatcaaccattataactcctatataatcatgaatcccatcacattgcgtagtatttgcacttcaatctcgacttctctgcacgcctcatactcgtttattcaaaaattcttcg

SEQ ID NO: 11162 - DNA, 615 bp, Zea Mays
cagaaggttcggggcaagaagagtttatcttttgcggatatcgttaagctccccctcacctgtgctaatgctattccgattcgcaacaacgttaagttccccggtgttcatgagcgacaggcttgggctagtgcgtctgtgttcagtcatttggggcctgcccctagcaattcggctccggtccgtagcactaggaggctccctgctggtgggcttcatcagtctcactcaagaatctgtgcgttcaatcgtttgggcttgccgtcttcttcctctcaacggggagctgtgtcccctcagtttccgtgctcggttcccaatggcggagcccttggcggtgggattcacgaccgttccagttttcaaaattcgaatttcaaccggtctcggcttcgcaacctccaatggcgtctcgttcgggctcagggggcctgttgggctgctgggcccgtcggccttccgctgtcttttctgtaaggtgcgtgggcacttggatttattttgtccctctaagaaatccatcttcagttttccgttggcctcatttcctgcctttgggagtcgggccattttggtgggaaatcgtaattctccggaccacagtacctggtttcg

SEQ ID NO: 11163 - DNA, 410 bp, Zea Mays
gttagattgcgggtggtataccgaggcgaaggcaagcttagtaccgatggagaagcagaagtccctgaagtcctagctgtcaaactgtttgccattgtcgtctgtgagctcggacgggactccgaatcggcaaacaatgttttgctagaagaatttctgggcagtcttcgacgttattgtggatactgcccttgcctcgatccacttggtaaaatattcgacgacgacgaaggtgaacttgaggttcccttgagccgtgggtagtggcctgacaatatccagcccccagtgttgaagtggccatgtgtgggcaatcagcttggtgagctgcgaagggttgcccgagtggggagaaaacttctggtaggcttcacacgacctcgtgactcgattcgcggcacagattatag

SEQ ID NO: 11164 - DNA, 1316 bp, Zea Mays
cccgagccggcccagccaaggcagaacgtgcccacgcgcgcgcccgcgtgccgactttgcaaagaagaccttgaccttttaaacaacccaaaagagtctgcaacactatttgtttcagtcgctgacgtttgcaaatagacccttgcacttttatctcttcacaacccgaggtccacgacggcgagcggcggcagaccgaactccggtgaacctatactggccaaactacgcaacggctagccctcccctttgctggacaccaaattcaaccttatgtgactatttcccctcaatcaatttcactagcgaagctctaatcatccaggccatggggacagcgcagacatcaagtgaacaagcgtgtttccggtgatctagggcagtctagctcaatcgaatgagtcgagcagcattaggagaacctaaggacactaaaacgaacgatcagagagtatgaacagacctggaacaagctggccacggcgagggctctttcacggtggcgaaaaacatatttggggagaaagagaaattggagagctgtggtggctaatcggaggcaggagcgggtgctctggtttcgtgattatctaacggagctagcgatatgctttatttatagtgttcaagagcggtggcctccaattttggattggcgcgctggcggtcagagaggaagaggggcactggcgcacacgattggtggccataaccgtggcaacctcaccagcgatcactggataggttagtatgattcacggcagcgtggttaaagtgccgaggcacgtggaacaagaccgcgaggtgtctaactccggcgagggaagattcaaagcgaccgaggctgagcggacacggcggccggacggaacagtgcccatggctcaatagcggtgaagatctttctaccccgagtcgttatctgggcctaagtgagcacgaatcacctcaccggcgtgaatccacgtgcggggtcgccggcggctggttcactgaaccaacagatccttctggtcactgtaccaacaggaactccttcagtcggtctgacagatcatgtttggggcgaatttcctctagattttgtatggtgactagatcaatgctctgcatcaaagttgtagcctaacaaaccagctttaactttgttacattgtgcacccccaaaaagtcacaggatcttactcaaaattgagctctaagttcaaccaacttcactgtttctgaaaattcagacctaaggctgactgacagcacaactttgagcttgtttttctccaaactttgtatgaaatcaaagcttagttacttaagca

SEQ ID NO: 11165 - DNA, 618 bp, Zea Mays
ggaggtcagggggagtgcggcgagcacgagcgtgggcacaacactgacgcaaggcaccagagggtggcggctcggtggtgacgctgcctcactctggtgagcaatcgcgcacatcagagagcggggaagttgaaataagagggcgggggaggttggttacctcgaggggagtcttcaggtcctttgaacggtggtagaggcacaacgagggctcgagtcgacggcggcggcgctgtggctgcgtggaggaggaatggtgagcacggatagagggaaccataggggaatggagtaaattgaggcacatcccgagctgtggacgtcgaggcaaaactcactgaggcaacgggcacggtggggcctcaacgtcagcagcggaacgggcgtgcaaccacgacggacagtgatggtccttctctggcgtgcgcatggcgctaggagaggatgggggctctgcggatgcacaaatgtgggagggggagagtgagtggggctctagaagctagaagtggccgagggtggggtagttgcaggctaggagcgcgacgtgggcgcggagaccttggcctgcgcgtggggtgtgtgtgcggatggttgaaggggatgatgctgataggt

SEQ ID NO: 11166 - DNA, 496 bp, Zea Mays
gttgatctcaatgcaattttgacatccacaatgtgaggatagaataggtttgcagtggggtaagaagaagctgacaatgcagtggttactttagctagagaggctagaattggctcaattgcaacaaacaaatctcattcttcagttgtaggttcctacttatagttcaaatctgaatcagcatatgtcttaatagcttctttgtaagctatactagtgtgcaacatcttgtatgttgaaccccacctagttgacacatcaagtctcatcccttctccaatttgcaatgcaagagatctacatatctctacaaacttatgcatgcgagatggagacttcttaaggtacttgactgttaaccttaagttttctatcaaagaagctaatgcagttattccatcattgacaaccaaattgatgtgtgcacaacaatagacatgaaagtattttgcaatgaaagcattcccttgtctagctgcaaatctagccctcaaac

SEQ ID NO: 11167 - DNA, 384 bp, Zea Mays
atattaccctctaacacttttctttggatagtgcaggccataacgtcagaagtttatcacaacagagatctgaagtttgctaaaaatgctgaaactgcacttcaatttctgaatcaaagtccagaaatcacaagtctaacacctccaatttggaccactttttctccaagttccaagtagctttagtggtatgacctttgaccaaacttgcacaccaacatatggtcttcaaacttgctacaggaatttcagtccaaaaccatatagatcaatcacaacatagctccaaactaagcaataaatactgatttcagacttgggctattattcaaaatctgaaaactcagaattcaaacagctcaactttgagccacttttactcca

SEQ ID NO: 11168 - DNA, 535 bp, Zea Mays
gaagaaggtaggacctaggatcagcaaactgacagacagatccacaaggatggtaatgttgggatatgaaccaggaacaaaaggttactgactagttgatccagtttcagaacaagtgcatattagtcgagatgtaatatttgaagaggatggtgtttggaattggagcagtgatgacagcagactacctactgaaacttcgacagaaatgttcagagtcgattttcagaacactgtagaaaatcctgaaatgcaacagccagccatatcaggtgaatgtagtgaaaattcagggggtgtagacctgccaccatcacctccattgccttcagggggtgcagatctaccaccaccatctccactatctcctgcaactcctgctacatcacaaagtcagactcaaaggtctagctcaggtccagcaggtgttggcagctcacagtctcagcacacaggaagtttagggagtgtacctttaagatacagaactctaactgatctgatggagtccacagaagaggtacttgattttgag

SEQ ID NO: 11169 - DNA, 654 bp, Zea Mays
cacaagtgtagcacaatccatttacccttctatactccttcacctgtctctccttactccagtgtccctgctccactactccattcacctcagtcttccctcatgttccccctttattcatctgacctaacttcactaatctaccacctccttttgcccaaacctcctgctgcaccacagcaagtctgattgttctatcaatggtagtaggtatttgagacatcactggcccttgaatctcatgcttcaaacctttcatgaattgagccacaaaaaaaacttcactcaggcttggattatgcactgaaactgcatatctgagttcctcaaactcctgaacatattcctccacacttcccttctgctgtaaatacagtattctgttcatgactcggggaaacacatctatcccaaacttgtcaatcacagtcttcgagaagtgcctccaatttcccaaatcccctttcagtctttgaatttgcatccatctagcagcatttccttccatgtgcatggaacctgaaagcaccgtcatgcactcagacacctggtacatacgaaaatagtcctcacacctgatcacccatagcgcgggatcctccccaccaaactttggaaatagaaacttgggcaggtgcgattgcaactcccttc

SEQ ID NO: 11170 - DNA, 1173 bp, Zea Mays
caggtacagtacagggccttttcgtcttcacggagctggaaagtggaaaccaagagtcggcggcgccgcggcgagcagagagatgctggttagctgacaagaaaaaactatccaatccaagggccaaggctccaagccagaagcgatcaagcgtccaagcctccaaggcacaacatagcttgttgatttgatcggtcttagagttcagactaaagcaagccaagtagcaactagcaacgtgctaacaagtagcaaggtaagtagataactagacattttttaatttatatatggagttcctatacattttacagttagtagtacatggggtttctccgtttctagacattttatactttatttaatcatagttgattctagtctgttccaattatttgtaggctagacatggaaagattttttagacgaaaatcagtgacatcagagcctgataatggcggaagttcaagtggaggtggagctgctgcacctacacctgttcttgcagcgaggccatataaacacaactcttcagtgccagaactaattgatttggatgagctacctagggatccagcaaaaaggaagagaatgtgtgactaccaccccaatcagcaaaatgaaataagaagaaagtatttactatgggggccttatcaacctcgcacttatgattttcctttcaggattattgcgggtaagaggcgtcgattcaatccagattggtttggccagtatgctaattggctggaatatagtgagaaggaggataaagcatactgcttgtgttgttacttgtttagggataaaaatattgacacccatcatggccatgaggcatttgtggtacaaggctggaattattggaagaacagtgatagattagcacttcatgtaggtgatcgcaccagttttcacaacaaggctctcaaggattgtgaggatcttttgaaagaagatcagtcaatcactgctgctatgaaaaaacaaagtcagcttgagaagaatgagcactctattcggttaaatgctgccattgatgtttgtagatttttgttacaccaggggcaagcttttcgaggccatgatgaatccaaggaatctgaaaacaaaggtaattatctagaattgatggaatatacttgcaagcaaaatagtgttattgctaaagca

SEQ ID NO: 11171 - DNA, 407 bp, Zea Mays
gaagaatgcaacgccttagaacaagtagaaacagatcccaacgactagagggagccaattgtcaggtacataaaaactgaggaagaaccggatgaaaaggtcgtggcagagcgcattgcaagacagtcggcccactataccatcatagggggtctgctatatagaagaggtgcatgaggagtcctcatgaaatgtattcatttggctataggaaggcagctattggatgaaatccacgcaggacaatgtggcatacatgcaacatcaaaaacattggtagggaaagccttcaggtccgggttctattggccaacggcaaagaatgatgcggcagagttggttctggaatgtgaagcatgacagttcctatcaaagcaacaacacttgcccacctagaatttgcaaac

SEQ ID NO: 11172 - DNA, 1429 bp, Zea Mays
gctgagattgcctggagagtccccgtgtcgtcctcgtcggtgtcgcggcgcgagagcgcgtcggccactgtgttcgttgctcctgacttgtactcaacggagaagtcaaacccgaggagcttgcccacccaatggtgctgcggaatggtcgccaggcgctgatcgaggaggtacttgaggctgtagtggtctgtcttgacgacgaagcgtcgcccccacaggtacggcctccaatgccgtacgacaagcacaagcccgacgagttcgcgctcataggccgctagggagcgatggtggggcgccaccggtcggctgaagaaggcgatcagatgagcctcctgtatgagcactgccccgaagccataggtggacgcgtcgcactccacgacgaagggcttggtgaagtccggtaatgtcaacgccagtgctgtcgtcactgcccctttgagggcactgaaagcggcggttgcctcgtcggaccacacgaacccctctttcttcaggagtgtcgttaggggtgctgcaatggcgccatagttgtggacgaacttgcggtagtagcctgccaaaccgaggaagccacgcacggctcgcgccgaacgaggttggggccagtcgtggatggcctggacctttgcggggtccatagcgacgccagccactgaaatgacgtggccgatgtaggcggcgaagtcaacaccaaatgagcacatggacctcttgacaaagagtcggtgctggcgcaaggtgttgaggacgacgcggaggtgccggaggtggtccgcccatgaggtgctgtatatcaagatgtcgtcaaagaagacaagcacaaaccgtcggaggtaggttcgcaggacgtcattcatcaaagcctggaatgtggctggggcgttgcacagcccgaacggcatcaccaggaacttgtagaggccgtcgtgggtgcggaacgccgttttatggacgtcctcctgccgcatccgtacttggtgataccccgaccgcatgtctagcttggtgaagaggcgtgcgccatggagctcgtcgacgaccgggatcgggaacgcgtccttgacagtgagcgcgttcaacgcgcggtagtcggcgcagaagcgccatgactcgtccgacttcttgacgaggatgaccggggacgagaacgctgagtcgctgcggcggacaatgccctggtcgatcatggcggcgcactgccgctcaagttcgtccttgtgcgccgcagggtacatgtacggtcgcaccgccaccggggaggagcccggcttgaggactatgtggtgctcgcggccccgtgctggaggtagtctgatcggctcggtgaatacatcggcgaaggcgtgtaacagcccgtcgatgagggtgtcgtcggctgtggcggcgaggagagtcggcacggatggaggtgccacgccgc

SEQ ID NO: 11173 - DNA, 801 bp, Zea Mays
gtaaaactttctgaggtgttctatattccaggagttcccaacttctgtgccgtctatctgagttagacgatatgatcccggtcgagtgatttctgctactatgaatggtccttcccataagggcgacaacttatgtcgtccctcccccgttagaattcggcggaggacgagatctcccactgagaaggatcgttgtcgcacggccttgtcatgatagcgtctcagagtctgctggtaccgcgctgattgaattactgcatttagccgttcttcttcgagtacatcgatgtcctccagtctagtagcttcggcttctgctatgctttcgaagaccaaccttggcgccccgaacttgagatcagcgggtaatactgcctctgacccatagaccatgaagaaaggagtatttccatgtagagctcggcatggctgagttctcaggctccaaacgacgtagggcaattcccttatccacttccctgcgaacttctcattctttttgaagacccttttcctgagtgcctccaatatcatcccgttggctcgctcaacctgcccgttggctctcgggtgcgctaccgaagcatacctgatctgaatgcccttttgctcgcagaaatcgaagaattctgaactcgtgaattggatcccaagtcagttatgatgttgtttggtattccgaatctgaatattatgtcttgtatgaactccacggccttggctgaggttaaggaagcaatgggtttgaattctatccatttggtgaacttgtcgattgctaccagtacatgagtgtaccct

SEQ ID NO: 11174 - DNA, 664 bp, Zea Mays
gtgacagtgagttgacaacgggtaccacggacggtgtagcagcgagcggttaaataaagcagaatctcaaatctacagcccaaggtaccacgtactcctccctctagcatcatgagcaaaccgaaaaggccctaccgcggccgcccatgcgtcttcaaaaaaaaaaaagatggtctttttttttttatgcgagtgaaggcaataactgtccgtgactgtgtggtcttttgtacgctgcgtgagtaaacttgtgcgaacgagtaccggtacttgtagttcaataagtagggccttttgtatccttgcaggtaaatacgaggaagtaaatggcggggcttcatccatgtgacggccacaggacgcaaatgtgacgcctcctcgcgcgccaatgttaaaccggagggcattgactcctcctggagagggagagagaaggggacttttactgcctgagtatctgtgaaggtaaatgtgccctacatgaactggccttactactacgaaaggctaacttgacatttacgacgatgttaattggacagacggcagcacctttaggcctccattgaagcaaacaacaaacacgaggagtatttggcacagtaatactgtaacaggaggagccactcctacggaccgttagtgcgttggggtgcttgcttgt

SEQ ID NO: 11175 - DNA, 877 bp, Zea Mays
aaaccagctagacctgtcagctgtcgactccggttcctcaacgactgcaatgtaccaaaacttaaattaaactaaattctacaaataggctacattaaccagagacaagtaaacattaaagacatacctttgaaagccggagcaccagagacgacaagtcgacaacaaagaggctggattctgggactgggagacagccagatgggaataggaattaggagggcaagtgaggaggttaggaagacaccgaagcaagtgaacagcaacagcaagcgaacatagcaaacataggtactgcaccaaatctagatgaacatagcacaaggtactgcaccaaatctagatgaacatagcacaaccacagcaactgagccactgagcacaaccactgcaccaaaacagcaactgggagacaccgaagcaagcgaacatagcacaaccacagccactgagccaccgcccaccagcaagcgaacaacaacagcaagcgaacaacgaccaacaaagctacaagatctagatgagttctgcacagctacagcaaccgaactgcaccaaatctagatgagttctgcacagctacaactacaagatgtgttctaaacagctacaactacaagcaagcgaacagacatagacggagggagggatgagggaggaggacggagtaccgttgtaccggagtctggagccggtagcgacggccgacgccaaggagcggaggggttagggttagggttagggagtaccagagaacacagacggagggagggacgaggacggagcaccagagcctgtagcgacggccgacggtccgacgtcgaggagtcgcggacgtcgaggaggagcgccgccgccgaatcgcctgggaatcgcc

SEQ ID NO: 11176 - DNA, 707 bp, Zea Mays
cgcttgtagagagctgggaaatgccgaaggagaccatcaccaagtctagcgaaggtgaactggtccagctgaagtatacattcagatatggggataaattcgatgaaccaaacgatgactggctaaaatgcatcgaagttacaagtgatgaactgcttggatcatattccaaggcagaagataatgcattatccacagccttcggaagtcgagaaaagaagagattgaacatagtttttgacgctattggctttgtctaccccgactaccgctacctgctgcgggggcaagggaagaagaggaaagctgctgctctggccgcctcggctgaacctgtgccgaaggatgcgggcaaaaagatgaaggtacttacccaccggccatgttatattgaaccggccatggtgcctgagtttggcggggaggcgtcttcagctgctgaatcaagagaaaccgctcctccgatgcagagggccgaagaaccggctataatgttaaaggcaccttcggttgagctagttgaaacgaaggttgacaaagataaggctgaaaggtcaacaactgaagaggtaacaaagatgctagggactttaagtccttcaacagaagcaacagcgctgagggcacaaaagagttctgccataactcctaggagaaggaggatggtaaatgtattagatgtactggaaacaaccgactccataagt

SEQ ID NO: 11177 - DNA, 498 bp, Zea Mays
cagcttgcttggctcattccaagggcaatcctctaccacctcctggaagtaagctcaagctatgaattgtttctactgttatcaccatcgtcgtcgttgagtacttacttactcccgtgcacaaatctagaggacaccaggccgttgatcatcacccacaacggcgcgagcggcatgttcgccggcagcaccgaccttgcctaccagcaggcgatcaaagatgccgccgacgtcatagactgcacggttcagatgtcaaaagacgggacggccttctgcatgcagtccgctgacatgtccagctccacgaccgcgtccaccgctttcgcgtccaaggcctccactgtccatgagatccagaacaagtccggcatcttctcgttcgacctgtcatggagtgagatcgcgaccttgaagcgtacgtgaagaacatgtgtttgcttaccccccgcacaatgtcatgccagatttgctcatgcactcacaaccgtttatttc

SEQ ID NO: 11178 - DNA, 417 bp, Zea Mays
gccatagaatacaaatacttgttttgtgtgtttgaaatgtatacagaatctggtttgagttgtaggggtaaatgtaacttgctgaagatagatagattcttgtttgcacaacatatagttggtatttagcatgaagttgtcagtatgctatgaatttctaaataaaaaaatctaagtggtcaaagcatggtgggaatcgatcttgagctctatctgggtttaacgactcaatgtgctttttggaactggtagatctacagggagtggatgcgggcagatctgcatacccccacactctctcacctacacacaggggcggatctagaatgttatgccccgggccaaacctactaaatttcttcatcttctcttttatcctaacaaattcagactagattaaatagaattatatggact

SEQ ID NO: 11179 - DNA, 646 bp, Zea Mays
ccccgctgagcaagtctgcaaggcagtgcaaacaatcatgtccacactgagctagtctgggaggcgaggcggccgacttgctcagcgaagcaaacgaccaaacctccatcgagtaagtctccgaggcagggtgaacgaccaagtccccaccgagcaagtctacgaggcgaggcgaccgaataaggccccacctagcaagtctatgaggcaggtcaaacgaccaaatccacaccgagcggatccgcaaaaaaggaacctggggcaacgctgtcgacccacgatggtcgcgctaagacacaatgtcaccaaacatgaccagaacgtacctacagtgccaaaaggcgttagatagacacgatggaacacctccgtatgcacccatgaatatgccctcactaactcacagcgccagtcaactctagtcacggaagcctcaacatcggagtccctacagtgacccatacaccagaaaggacaagataatactccatatcgagtgtatacctacatgtgcttgatagtgatgcgaggggtatgacggaaaatgaagctataccagacacaaccttgaaccttactgtaaaccaactttgtgtgacccaccaggtaccacaatgacggcaccaagcaggatacagggactcgc

SEQ ID NO: 11180 - DNA, 278 bp, Zea Mays
aggatgaggacaaggacctagaggttggcacaaagcttgtcatggattatgatttgatggatgtcgagtgcatcaacagcgacactatggctcatcaaagctcttgatgatgtgagcctctacaagaagccttgacacttctaaggaaggtacactcgtgatgtttctcaaggcaccaacccctcctcccgtgacaccatcactagcatcgatccctcctgccatgactagtatcaatgttgacttctcttgtgtctttattactagtatcaattcac

SEQ ID NO: 11181 - DNA, 618 bp, Zea Mays
catctcgtgtatatgttcgatgtagtcgatcggaattcaatgcagaacgatgttcatattgcagtcccgcgaacagccaccggaaacaagacgaataggttcccgcgaacaaggcgattgtggaggatagatatccctcgggtcctcatgaacaaagaaacatgtcatgggccgcttgatgggcctcccgatggtttgctttgcgggacagaccaatgggccacaatcagattgggcgaacttgatccaagaaaacgaagactgggcgtccgagttatgcgctgaccgaagcgctgatatctcgggtaaggaagttgcacacacctgaagagctatacattcggcgttaactcgactgaggaagtgatcaaaattcggataagtgggactacaggccacgataaagaaggagatatgtagaatagatagtgatcacaacttgtaaagggataactctttggtcgtgtatataaggccaagggaacccctacaaaaaggtatctcatctcatcacatcacacaccagccctcatcacaacacctgagcaccatcacaactcaattttaatcctcgtacccctgagaaattccagtacatagcctccataggaagtaggg

SEQ ID NO: 11182 - DNA, 562 bp, Zea Mays
ccgagaattgactcaagacggaagatctgtcagcgaatatgtgcacaagttcacggaattagcccgctacgcgccagatgacgtccgtaccgagggcaagaagatggctcgtttcctgaagggactcaggccagaactcaagacaattctggctagccaagacttcctcagtttctctcacctgtccaacaaggccatgcaagttgaaagggcaaaggaggagggaaaagggcatctcaaaagaaagttccaagtcctccgggctcagcagcaggaccggcaccagaagactcgatcatttgggtttccacccaaggggccaaacttcagtagaccagctggacccactccatcacgattcagccagcaaagtcagagctctttccattccccctcagtggcaagcaaccaacctccggcaaatgcgtgttggcactgtggtgatcccagtcacttcaagaacaactgtccgcagctgaagccaccaggacccgcctactccaactcggtgaatggccccaagaatacctcagcatccgccccaaggcgccctccgccgtca

SEQ ID NO: 11183 - DNA, 397 bp, Zea Mays
gtgacatttgatgaatctaatggctcgcaagggcatgtttccaatgatattgcaggaaatgaagaaccaccttgtgaggccataaagaagcttgcaataggtgaagtgagaccacaagaaaaggatggtgtagaaggaaccttgtggatgacaaatgaggtctttgatgtgggtgcaaaggtggtgggtgataaatcctccactcaagcaaacccatcaacctcaagtcatccaattcttgaagaagttcatcaaccccaagagctgccaaccatggtggaagatgaacctgaagttgttgttgatgaagtgtctcttgatcaagaggatggtgatgaagagcaaattcaacgacaaccatcattgtctcatcctcgagtccatcataccatccaaa

SEQ ID NO: 11184 - DNA, 528 bp, Zea Mays
caaattgagtgccacgactgtcttccttatagtatgttcctgtctgtgaggaatctccacaacttggagtctctcacaccttataaaatatgatcacaatcatgaacaagcgtgagggagggagtagcaacacacacaagagcacaaatgcagcaagaccacacacacaagtgaagagaagagtgcacgaatgaaaaccaacagtctcaactcaaagcatgctcaattctctctcgaatgaaccaaggcgtgatcggagtttcagagtttgttgtatgctcttgtgtttgttctatccggtgcaagcagaaagggaaggttgcttgcttcccaaattaaaatccaatggctcctcggctccttggggctataaaaggaccccctgtttccttcattggccgagccgaccgttgtgcgcctttagtcgcatggcacactagacacgactagactaaggccaccacacgtctgaggcagcaatgcaaccgtgacagcagctcgcccgaagccacaactcacttgaggcag

SEQ ID NO: 11185 - DNA, 757 bp, Zea Mays
cttaggttgacacaggatgtcccacttagctagtctatatttctttttttgggtatcagcttgccaaaaaaatctagacctcaagtagtccaacttcctgagtattacccgggggatttcaaagaaagacatcatgaacataggaagacttgttagaaccaaattaataagaactaagcgtccgccaaccgaaagatgtttacctttctagctgcttagtttcttctcaattctttccaacaatacattccaatcggcgttctttaattttgtaacttgcataggaatacctagatacttgaaagggtaagacccaaccttacacccaaagagctgcgaatacgtgtgctcaacctcctttgcctctccaaagcagaagatttcactcttatgaaagttgatcttaaggccggaaagttcctcaaacgcacaaagaatgaattttaagtttcgggccttctcaatatcatgctccataaacaaaatcgtgtcatctgcatactggagaatagaaaggccctcctccactaagtgaggtaccaccccaccgatctgaccctccctcttagctctattaacaagcactgctagcatatccactaccatgttaaataacacaggagaaagaggatctccctgtcgcagacctttttttgtttgaaaattattccccaacgtgtcatttattttaatattgacgtgacctttctgagtgaagctgtctctatccaatcacaccatctatcacaaaacccct

SEQ ID NO: 11186 - DNA, 642 bp, Zea Mays
ggttggatagtcgactggctcgataaaattggcctcgagtagccagtggacttcggcttttgcagcttcagtttttttgtccgacattttccgtagcctcttctttttggggtgtattgaggggtcagtgcttagaccatgatcgacgattgtgcgacttacgccaacgaggtatatggctgacaatgcgaagatgtccttattagattcaataggataacagcttgtactcctctgctttgctgaggtctttgctgattaaaatcatctggtttggtatcgaggcatccaaagggattttcctagtctctttgttgctttgaatctaagcttttattggttatgcttttgatggacgaggactgctgggatcttcgccctcaatggtgaggcagtgcacattacgctgcccggggacaaagtctctctctatgttgcagatagtttgctggtctccatatatagttattgcaccatgaggacctagaatttcatgcacaaatagtctgtggatggctacttcaagtttatattaaccctcttcccatgatggtgttgtatgggtagatcatgtcgactatgtcaaaggtcactttctcggtccttgcattgggggttgtgccaagggatagtggtaactct

SEQ ID NO: 11187 - DNA, 419 bp, Zea Mays
aaaaagtcaatggtcttcccaagaacaactaatagcagatgcactatcagacgatgaattgccaggtattccagaaaggaaacatcacaaggatgcccagctacaaaaagaagcacatgagtgttacattgatggatggactatcacctgcacatagtttcagccccgtcgccgcatcaggtccaagaaacaaaaatggaaacatggaaaaagtcaagaaataacttcaagaaagtcttgctatcaatgtggacgtgaaggtcattacttccgtaactgtcctgagaagagttcactaccggatacctccgagataaagctatcttagcctccagacatggatatgaaccataatgcacagaaacttccatcaacatcgtgaagaacaacaaaaggaatagaaaatgtttggatatatg

SEQ ID NO: 11188 - DNA, 370 bp, Zea Mays
aggaaggcgagtcgatctggaggattctcacatgcgtttacactgagtagacccctggccacgacggagatgcggcccgacggtggaggatcgagtccggcgagcaattctgggctgaccagaacgtagtctgcccaagcaaagtcacggtcgtgacccgtgagacttggtgaagccccagacccaaaatcgaggccctgacaatggtgagactgtggatctacgtcggcggcgctctctccctcccacgatggtgtgaggcaggatttacaagggtggagctgtgggtccgaggtcggtaggatcgggcggcgaacgcgtgaccccaacaacccagatatggatccgaatcacctcggatcggcactcg

SEQ ID NO: 11189 - DNA, 677 bp, Zea Mays
gagacactgaagttgacggcgggtcggactcagcgttggagacggtgctcgcgatggcgggtggattccctagggttcgaccaccgcggtggatcaaatgcggcttggtctctgcggtggagaagaacaagggggcagcggctaagtctccgcgatttcgggtccctccccggtgaaaaagaatgaggcgatggcgtctccctctatgcggtggagaaggtgaaggcgacgacggtcggtctctgcgttggagacggtgaaggcgacgacgggtagaatctctagggttcggcagtcgcggtggagaagaagcagacgacggcgataaagctagggttcggccgccgcgagcgttacgggtgaggagagctgaaaaaactgcgtgctcatgggcccgatacacgtaatctgctgagcgaaatcaacgcgaaggcccatggaccgacacgtggattactgtttcgtaaacgaaaacataagacatcgtaatatcaatatttgtgtggggactagtacggctgcccagattgcgggaacacaatcttctcatgggcccggatgcccgaaacatgcgcataccaaaaagtgtgtaaatcgttgcacgaatgagcataacacgtaataatatttgacgtaagcaggtggtacagtgagccaaaaagtctgcgcacctggtc

SEQ ID NO: 11190 - DNA, 593 bp, Zea Mays
atttattttaatagagtttggagagatcagggtgcgttttgtaaatagcaggactgatttgctatactctttctattagatgtgactgtgggttaattcgggaatatcacagggtgtcttttacaaaatgacacggccgaaggggtacgaagcgtttcaagccgctggatcaccaacgtagcgtccagattagatgtccatttacaacgaaccgatatttaacgccacccgtccgatcggagatctatgttgaggatcattagacaacgagatcaactcaggtccgctcattcaccgatcaacggcccaaatacgatggaatgaaaagttatctaggatctaattacagccatccattaagaggtcgacggccagagacccgtcttcctccccactacacaccagggcgcggcggcgctctacccccacggtggttcgcacaccggagcaagccatcctagtgttctagtgcacgaatcttccccggacaggtgctacataatcctaggatcaagtcacagctatttataggtcttaccagagagtgtatcagtggagggagggcttttcacggctaatggcggcttgactgc

SEQ ID NO: 11191 - DNA, 356 bp, Zea Mays
gaagtttttgcttgttccctcgctcagcatgatggtgcgaatcatcgagcaccgcgccgaaacttcagaagatttggcgatggagcaagaagttgcgtcctccgcgtcgcgagtacccgactgccctgagtctggggctgctgttgtacacgccgtgcaacagcacacgcctgcgcaagtgtcccggactccatcgagggcaacacctacggcattatctgtcgccagggagttgctacgccaccccctagctccacggcttcaccaggggccatgaagcagtggcgtgacgatgttgaccggctactcggtatggcgcattctacctcgaccagatctaggccccggtcatcccg

SEQ ID NO: 11192 - DNA, 551 bp, Zea Mays
ttaagattcatcaaatcatcatattccttggccgagccactatagtctttttagtaaatatgcttcgactcaggcacaatattgttgactgtgtgagcttcggactcctccctaaggtcgcgctgttgttgagtatgattgcgcctttctggctgttgattgtggatcagtggtggtggtggtggcaactagggccaagaagttggggaatggcttgccaaagcaacagaagtcgtaggttgttgattgcctacgtattctgggatgtatggggaataacacgaagcagtgtggaggacctgcttcggctgactctgtcgcgcctcagcttcggcaatctccttctgcttctaaattgtgacctatcatgttcttgttgtgtggcccttgtccttgccacagaaaagaaagtacaactttctgggttgattgccaaaccttcctccattgaaacttcttcctcctcttcccctcggagccggtggtctgaaagaagtctgctgcatgctcgaagactgagtactgtgatggcgatgctgaacattgttggc

SEQ ID NO: 11193 - DNA, 510 bp, Zea Mays
catcggtcacttcgctcgtgggggagatagccagagcatgggacgtgccctcgagctctttcttcctggatgtcctctctatccagggaagagtagaggatgctcccatctccaacgatgagcccaatgtacaaggggaggagccttcgcaacatgaggcacgccaacgccggaacagtcatcgtaacattcggcgtcatcatgaaccagagaacatggcccgtgcaacccgcatcccaggacgaggcaactgagacatgagagactcatgatgatagggcgctccacgagcaccacaattcttgacgtcgcgatcgtcgccacgcctaggagcgcgagcgagaatgagcagcgcgtgatgccaggcaccaatgcgagaacccgccccttccttggaacctgctgcccaacttcacccgagccctgaacacactgagcgaggtcggcgaggcgttggctcaaattgccaacgacctaccccgtaccccgaacatggagggctaccgacat

SEQ ID NO: 11194 - DNA, 639 bp, Zea Mays
cttgcgctgccgctggtacgccgttctctgggcaaacaccagcgaactcgagctcgggttgggtcagggacgcgcgagggtgtgtggtcaaggccgtggtggcttttatagtcgcgggcgcgggcgtgggcgcggggttggcacggtgcggggctgcgcacgcgggctgagcaccgagggcgtgctctgtcattggtagggcgcgtcgaacacgtggccgtgttcatctgcccaagttcttgtgcctgcacatgtcacaaccgtgcgaatctcgccaaaggtcttgtgcaagatttcttcctggcacctagggctagctagtttgtgtaagttccaatggaagatcttccctagcttgtgagatatgtgggcgccaagtcttgtctgtctgcactgttcaccagcgacaaaactgatgccaaaccatgtcaaacgaccatggtttgatttcaaattttttaggggtgtgccttgggtaatttggccactttttgttatttggtccaagtgggtttggcgccagcacaagggtgaacacatctgatctttaggctagggttttttttgggacttagagaaaatttggtggctctattgtgctccccacttggtgaattgttttggggtttttgttgggcc

SEQ ID NO: 11195 - DNA, 429 bp, Zea Mays
ctgaaccttggcgatttctcgccggtcgccatggagccgccgtgtcacatgggtggcatcgcggtcaccccgatacgtggtatgatgccttctctgaggtttgcgcttgtatgaatcacgttttgctcgattcctagtcatgattacctcaccaatgcggctctcaaagttttctggtggtcctccgccgcatgctggggcggcgccgctcggcctggctcaaggatggaggaagacgggtccctggccataggattgagatggacggctgggattaaaagtagcatttatcccttcgcgtattgaatccaagcctttggcgtctgatcgtgtggatggggttggagatcgtctggaaccgtggatgccgcatccaaaggttgtgggtgtttcctgttcactttaggggggatctaatcccgtcggttg

SEQ ID NO: 11196 - DNA, 1510 bp, Zea Mays
atactctggactaggcctcaataacagaaaatagcaggggctacggtgaaaatgtttctaagactcagagagtccctggcgtggacggcgggttgattctctaaatttataaggtcttttctgcaaaatggcatggcgaaggggtatcggttgattatggccgttggattaaaagccgagcgctcggattaaatcgtagcccccgcgaaccggtacccaaactcagccgtccgatcttcagcgaccgcacaggatttaaaacaaccagatcgaaccgtgctcggtagatcagaaatagacggcccggattcgccgtccgcgaatcactacgtctaatcgatctgagccgcacagtcaagatccgatggccaggatcccatcgtccccaacacaggccgcgcgcgacgacggcgagttcacaacagggcactccggcgaccacgccgtcgtgcgcggtagagccccacgagccattcccaacgcgcctattcgaagtacagaacaaagtaaaccgcatgggtgaggtcttaccacgcgacagtgagccggtgtcgcagactacggtgagaagcgcctccgccacgcagaggaactccaatgagcaattcaccggcctcctccgcacctccggtcccgatttcccacggtcgcgctcttcgtcaccagggaagtcagcccgaccacttattgcctccggcgcggcagtgcaagcgctcggtcacggcggcggcagattcgctccccacggcgacgagcggacgaggtgactgcggcagcgccatccgagcatcgatgaagaattccaagaagtccggcaaccacccgcggagggcatagagctcccaggtccaattccgccccaaacggcagtagggaaacattccccatggccaagcggcgagatccgcccaacacgacgaggggagagtcggctgcggcggcgcaccgaaattgaggaggggagagaagagaggagattcttatagtgcctagggacgaggccgaggtgaggatttcggtcaatggctccgaggttcgcggcaagctccgccacggccgggattccgttgagggcgatgggcagctgacctacgcggctgacaggtgggtccctgatgtcggcgctcctctgttcgtggctgctagtggggccagcggatcagtgacaggcagccacgcgtgggcggagtgggtgaagggccgcgcggcgtggtttgctgatgggccaaattcgtaggtgccggcccaaacagggtttcttcttcttttccttttatttcctttctatttttctttattcccaacttcaatttgaattcaagttttaaattcaaaccctgttgctccataattacaaattatatttgtgcaattaaaagtactaatttggagatatttttagatactttatttatatctttatatcctctatcttttcttttcttaattccattttcaaattcttatttaaacttgtctcataatttaaagtacaaatgcaacattacaa

SEQ ID NO: 11197 - DNA, 303 bp, Zea Mays
ggataagcatggtttgtgggtggaagctgctaatgtcgcctgctatttgattaatcgctctcccaattcagctattgattttaaaattctagaagaggtatggacaagtaaaccagtagattattctaatcttataatctttagttgtcctgcttatgctcatgtgaacaatgggaagctagtgcctagagctcaaaaattcacttttattggctattgttatggagtcaaaagatatcatttattgtgtgctcaatcaaagaaggtgattatcaatcgtgatgttacttttgatgaaaatac

SEQ ID NO: 11198 - DNA, 552 bp, Zea Mays
ctccagccagctttagtcaggctgagaagtgagtgccatgcatgcaatgcaaacgcaacgaaaagccttcttcacagactccggcctgcttcagtcgggctgaacaggccgtatgctgtatgcagtcaggccagctagtgaaagatttcactgatgggccgaccgtgattgtccccgtccttgtaggtttattgatacatactgacctgacttaaactaacgaagatcacggcgggagcagagcgatacgagtttctttgggggtgattaatcagtcagtatctagtgcaaatcccccgagcctgcaacgtcgtgcaaaatactgactcctttcttttgcccaaatttcaagaaatgaagtagccagatagtggtcagcatgttcagtgccttccaaatgtgtctagcccaaccgcttacaacacgacagaaagaaaagccgacagtgacaaaaaagcacacttcggcattttggcatggttctttgaatttatcttttctttctcccggtctgcacaaaggtcagaccatcacactcggtgaagacgttta

SEQ ID NO: 11199 - DNA, 343 bp, Zea Mays
ctgaggggcgtcggcgtcgggggagatccgacctaggtcggacggtcgcgaggtggcgccagtcgctggggccgaacgccgggaggggagactggtgtggggggcaccggcgtcgaaagagatccgacctggggcgcctgcggagaggagggccagcctgggggcgtcggcggcggagagggccggcctggctgggagccggcggcggcagctggtggtggggaggggagagaaaagtgaaaaagaaacctagctctataccatgtggtaaaccttaaccctaactgggttgggagtgcatatatataaactgagtaattgggccaagcccattacactaagg

SEQ ID NO: 11200 - DNA, 620 bp, Zea Mays
gaacacgtctgatcattggattagggtagttttggggacttagagagaaaatggagggttctagtgtgctctccacttagtgaattgatttggggtttttgtagggcctttttgtaatatttctcttactaagttttgtagctttactaatactcttcatctttaattaaaggttccttttgtggttttgatcatttacccattcttccccctttaatcccattgttagggtttaaggcttaagaaatagttagggttttagaatcttgtttgtgggtgaacattgtatgaagggtagactctccttcttgttatggttaaagcttagcttagccatggctctaaaacttttagtcccctcctttcccttatagcacaaggttggcgtaggacatagtgtgttcctttggccagggctctgggtaacaccaggggtcttacagccaccacccttgggccctataaattgagagtgccatcggctccgctaggtagtcacgcacctaatacaccagcccgtgcctcggatcgtccaccagaacgccccaatttgagatttcccccaaatcggtcaagaacaccgcgtgtgtgagctcgccgtggtcagccctccacaggtc

SEQ ID NO: 11201 - DNA, 341 bp, Zea Mays
gtcgccgtagatattgagatgaccggtagggattagaataagtgtttggcaaaagataactgtgggatcgttgatatgcggtgcagatctaatcggggatacctcctggatgagttaatccgggccgtaggtttaatcggacggttcggaatgcgttaggcttcataaaatctaaagcctagactcctgatccgatgatggcgatcgtgtaccgatttggtcctctctagatctaatcctgggcacacatcccatatccaacaaccgatatcgcgccataccccttcgctgcgcatgttttgcagaagaccccttatggttttagagaataaaacccaccg

SEQ ID NO: 11202 - DNA, 661 bp, Zea Mays
taaaacacagggaacactgctagttgaactgcgggttttaatctataattccagaggggctcttatgcaagttttgcacagcgaaagggtacgggcagtcattggccatccgattagaattcggccgcctagattaaattggttgcgcgcatggaccggtaccgcgcctcagccgtgtgatcgcagataaacgtaccagatttaaaaccctccagatctaacctcgcccgaccatattcagatcaacgctcaagttcaaccttgccgaaccgttacgcgctaactaatcacggtcgcatattaaagatccaatggccacagtgtctcccttccccagctctaatcctggatgcccatcgtcaatcgggcggccctagtacatcgcctaccttcgagtagcagaccaccggagcagagccccccgcggtggtgctccggccggagcaatgtttcccccacgaccgcaatccattccattggctactggctaatgtactcaacgaaccaggttagagaaccataccggtgagcgaggcgacaatggagcttgcccccgggagtatgcggatgtatggcggaggagggatcgcgacacatcgtcccgggtccgccggtcaccaatcccgccaggcggttccacgaaatcttcccagacctcccg

SEQ ID NO: 11203 - DNA, 499 bp, Zea Mays
ctagcacaacaagtgcacaaaatcgaagtcttcttcaaaaagactatccgtgcaaaagtcgcctaagggtgcagccggactagcacaacaagtgcgcaaaatcaaagtcttcttcaaaaagactatccgtgcaaaagtcgcctaagggtgcagccggactagcacaacaagtgcgcaaaatcgaagtcttcttcaaaaagactatccacgcaaaagtcgcctaagggtgcagccggactagctcaacaagcgcaccaaaacgcaaagcgttacatccgtgcaaaagtctacaccaagaaactgtccgcgcacagaccaactacaaggcacagccggaccaacatatgaaatgtgatagaccaagcgcacaatgcccccatggacatagccggatgcgcgaaggcgtacaacctcattatacaaaccatatgtacacacgtacagcgagggcatcaaaccttacattggttcgaccttcggaatgattcccatctcccta

SEQ ID NO: 11204 - DNA, 698 bp, Zea Mays
gggggctataacccgacgcgtcgaacaccaaacctcagcctatccattgccagctgagcttcagtcatcgccgaaggggagcacgcgctttgagggaggagagagcgtgccgctgtcgtcgggggtcaatcccatgattcaccgccatccgtgtcctcggggcaaggattggagcattgtgcaatcaagtggaaccgatactttgtggtgggagtgcacagaagctctctgtgacgccgcaatttctcgtcatcgacctcctttccatcgtggagccgctcgcgccatggccaagccctacgaccatactcccatcggtaagactacccctatctaattcgcattcgtctgagcatcgtattttacaagatggcgggcgaattagagtatcagatcgggggggggtcgcatgcaccagtaagctaagtcaccgtggcggcgaaggtgccatcgctcattgcggtgggttgctaaagacgccctggtgccgttagatttcaaacctgcggccaagattaaaaccagtgacactgattcaagctttgaacacgggccattgatcggcgatcaggcggtccttgtgataatgggtctctggtcgttggtagggcatctaggggctcctatgaaatgtgacctgtgatctaatccaaaccgttcaccctcgattgggcggctaagatctgtccatacccctt

SEQ ID NO: 11205 - DNA, 525 bp, Zea Mays
ctccctgatctaagcgttgcaattttttcgaatatcacgtctataagaagggggaacaaagcgagctcgtatctcctcttttaacacattccatgtttgtggtgtagcacgtgtgttaacaagttcattccaccaaatgatagcaaaatctctaaattcactagtggcttgtctaaccctatgctgctcaggaacaagatgagaattaaatttttgttctaccgtcatctcccagtctaagtaagcttcagcatcataagaacccatgaacggtgaaatagagaacttaatcttagcaaatggatcatggtctggttcaggattatgatgacaacgtctaccattacctcccataccttgtcgcttacgtgtgaggtgttgtcgcagccgtgcataaacatcatcgtcgtccacaggagagtgagctgggcctggagttggtggtgggggacgagcctccagtacgtccatgcgtgtaacaagttcagcaactcgtcgatcaagctgctcataggatgtcgccgc

SEQ ID NO: 11206 - DNA, 1648 bp, Zea Mays
cacatttcctcaacaatggtgctagagttgtgttcattgccccttggaatgtagctggcgccccagaaagaccaaatgccattaccaaaaactcaaactggtcgtggtgagtttgaagtgcagttttaaattcctcgtctgctctcaaacgaacttggtgatatcctgagagtaagtccaatgtagagaaccaactagctccagctaactcgtccatgagttgttcgaagacaggaatagggaatttgctcttaatagtgagggcattcaagtaacgataatcaccacagaattggaacgagccatactttttgcgaaccaacagaaccggggatgagaaagctgacaaactaggccgaatgatacctaatttcagcaacctaattctcaattccatctttgagaggagggtacctataagggcgtatattcactggcctagcacccggcaccaatggaatcacatgatcacaagctcttacaggtggcagaaaagtcggcttagaaaataccagagcaaaatcatctaacagcttggacacctcaggttgtaatgtttgttctgacgtgtctgtaagctgaaatgtgaagcaggatagtagctggctcctcctgactggtgccttgtaacaataccggtgctccttgatactgaattaatacccacttgtgtttccaagccaatccatacccaaaatgaggtcaaaggtaggcagaggcaataccttgaggtccagagaaaactcacggtgctggatagtccaaaccacttgagacaccatcgagacacactgcatggcactgccatcagccaccgttactgaaactgcagcaggtaacaaggtgaggttgctcagtttgtccaccaagttctgactgatgaacgagtgagtattgcctgaatctatcaggatgttgatcatctgttgctgcataactcccaacatttggagagaccttttggctgtcccacctgacactgcttgggaagaaatagccaagaacaactgctcctcaacagcttcatcagagtgaagctcgccttcagtctcctcaatcggcaacaattcaaagacctcttgcatagcatgcagttggactgaagcagcacatgtatgacccttgaaccacttctcagcacaccggtcacacaaccccttggcacggcgatatgctcgcagtgccttaaatttgtcttccattgatcgaggtggaggtactgctgaacaatcctcgacaactcccattgtagtggacttgtcagccaccggggttgatgattgagaagttggccctctagaaacagattaagaccacccacccggatcatatttcagatagccccgtcatctcatcgtctctgccacctcctgcaaaaggacgagagagcacgcagtatccaaatcacaggggtgctgaatgagaacgacaacacgtatatcagcacgtaacccttcaacgaaacgagttgtaaaatacattggatcagacacatgttcataggctgataactgatcgaccaatgtagagaatctatcaatatattcagacaaagcagcagtttgtttgatatggaataattgtcgcaacagagattgatgctgatccctaccaaatcgaccatgcagtagattgcagaaaaggggcc

SEQ ID NO: 11207 - DNA, 498 bp, Zea Mays
gcttaagattcttaactgaactagtcacctaccacttgaagcatactaggaccaaggagacatgagggtagcatggaagtgtatttcatgatttatatatgaaggatcacacttttttttatcgaacactcagcagatgatcacacttaactgtgggtggtaagaaacccagtgcgcgcgcgcgcacgctacagggaactcaatcatctgctagctccaaactggaaacagcagcaggaagcacgcctgcaacacatgcagacacccctacacctaccgaagctaacccggaggactctgggcttgaaggaaatccccttggcaccagccaaagaccacaaaaggcttccgccttggccaacctaacaaccacaaccaaattcggaggagttccttgaaagacaataacatttctgtgtttccacaacatccaagctctcaggacaaccagagtcaaattcttttttgctcagcccactcatacgagcactattgaag

SEQ ID NO: 11208 - DNA, 433 bp, Zea Mays
tgagctgcggatccagggcgagggaaaactccgatgagaaattcccgtccacccacggcatcacgagttccgattcgacttcaattatcatcctcacatgctggtgacgctacttgaccagaatcctgaccccgaacgctatccaccattggattcgccgatggcggcaagctttctctctccctcgatctgtttccctgggttatggtgcttcctatccgatagagaggaaggggggcagcccgatatataagtgcagggatgaggttcctcccgggcggagtccgcacgaacggcgagttcggtagccatgcgcgcggcggggatctagcggagcacgcaacagactgagcaaggagaacgaccagacggcgggtccacgagctagcaatacagcgcggggagcggctggagggatgggcccggattgtct

SEQ ID NO: 11209 - DNA, 553 bp, Zea Mays
ttttgggggaagtatgaaattggagcttgctggtgatcggctgggagcaatactagacgtgggggtgcgcaacgatattgcgaagctagtcacgggctcaatttataggcagcttcgtcggtggtactcaatttgaacgaataatgcggcggccggaggtgaggacgaacgcgggtgcggtgaatacgtgtgcaatgtcgtggcagtaattccgatagtcgacaggaagatagagggagtcacggcgatgcgatggcaaggttgggacacgcggtggccaacggcaagggcacggcggcggtgagcactttacccgcgggcggtgagccaggagagatgaactacgactagccggagtggcttccaggtcacgggcggtgacgatcttttaaccttgcgacgttattcacttacccgagcgtgaatcatgacaccggcgacgtgaatcacggcggaaagccaccagcggtgagatcttttctgctggcgatctgatccacaatggtcactgtaccatgggctgcagtattcagtcaacctgacagtgcaaatt

SEQ ID NO: 11210 - DNA, 644 bp, Zea Mays
ggctgcgtcgttgcaagcgccttgttcgaatcaatccgctatcgtgcacatatcgaagctgacaagtcccgcacattctgttggtaaatcaaaatagaactgtaaatgcatgctcctacgaatcggatcagaaaactgctttggatatatctcgtcgatcgtcacaaaaactccagatggatagctgaaatcaatttttcggttagatcgggacagacaagcagtgactcgtcgttcaagatagcaatcgaaatcagggattacaatgaccaaggccagcgcctcaagattttttcatctacaacctgaatctgaaactaattctcaactccgtactaaaactcatgacggggcaggcggctacccgacacaacacctttgcttattccctagtcacaacacgtactgatcaacctcgaggaaccatgtggcggctaaatttctcattgagtatcaaggacgacgaacacagcggacaagatttggatgtcagcatgccacacatgctcaggattttatcagatctgacggcctagactcgaacctatcggtgatacataaagctaagctcctctaatatttatgcattgatttaattattgtctttacaaaaagttatttcctacgtatcctcttgtttggtc

SEQ ID NO: 11211 - DNA, 855 bp, Zea Mays
gtgggcgcgcttgttcagcaagggggtgagcaacagtgcagtagggctgaccgctgggaagggagaggagggtcgcatgataggtagagagggaggggcgcatagggaccaaccatgggagagagagctcgaccatggggccatggctatgtgcacgcaggtagaagattacccaagaagagagaaaagagaaaggcaaatgagaaattggggaaaattgggatacaatgagttctgaccatggtcaacatgattagaatgttgttcttatgatcctggagagggaggagcggggatttggttactgagtctatgctactgagcagaggatgtcacaacaccgatacagaacagagaaggggcatacgtttctcactgaggggaaaggagggacatgcgacaaagtgtcgtcgacggtgaggaaggcgatgctccgggcgaggacaacgaggaacgatgctccgatggggaaaacgatggtgctcctcctcgattgttgtaggggcgcttcacctggggatgcacacctccgtgtgtagagcgagtggaaactgttgtatgagagggtatagtggacgaggtgattgtgcgatacgtggaggttttatggagcgaatggaggaaccgtcgctcgacgtacggagggaggtgttttaggatgttacatcggggatgctccggagtggtcataatgcaggctccagtgctcgtggatggtagcggcgctggttgcgaggggagagtgctcgggtggctaggggttcgaattggggtgagtatagggtatagggggtctccactaatactcgtgcgctattgattcgagggcggtggctccagtgtgagcaacgaggt

SEQ ID NO: 11212 - DNA, 758 bp, Zea Mays
ctaaaaatcaatttctaatattaattatctagtttctctattatctggactgcgcgcatattaaacagagatgcagggggctcggggtaataattctaagacacagcgcacaacaccaatggatggcgggttggttaataaatatcagaggggctctttagcaattgtggcacggtgaaggggtataggccgatctcggccatccgatcgatagggacggccaggattaaatccagccagccctgaacaggtacgccatgcagaccatcggatttagatccaacgaccacagttttttaaatagagcgactcaccaagcgcccgtccgatcgcaatccaacggaccagatcagatttttgtcttcccgaaccggtatgcactctccaccgcagatgcccgaatctatggtgcggattttatgaagacgcgatccaatctggatcacccgatccataccaagggctcagatttagtcactgatgagaaccttcagcgctcaatcgtggccgtcccccaatagaacgacgaccagggcagtgtcacctacctcccaacgatgccaacggccgtcgcccaggggtcgcggcggcgaccgccggagttgcgctacactgtgccatgatgccccaaaatccgatccaagaggtgctttacaacgacgacacgaaggagaaacgaaggggagggggtctcacctagcatgggcggtgcagagggctccgcccacgtcgcagggcgatattgcggcggtggcttg

SEQ ID NO: 11213 - DNA, 508 bp, Zea Mays
cacctggccacttcagtgatgggggctagacatcgtcaggccattgctcacagcacaagggaacctaaaattcagcttcgtcgccatcgaatatttttaccaaatggatcgagggtagagtagtctccacaataatagcgaagactgcacaaaaattcttctggcaaaacatcgtctaacgattcggagtcccatccgagctaactgtcgacaacggcaaacagtttgacaaccaggacttccgggaattctgcagttccatcggcaccaaggcagtgttcgcctctgtctaccacccacaatccaacggtgtcatcgaacgtgccaacggcaagatcttcagcgctatcaagaaaaggctcatcgacgacaaaaagggtaaatgggcagaccaattacccgaagtcatatgggcgcttaacacaacagaatgccaagcaaccgggttcacacctttccgcctgatgtacggatcctaggcaatgacaccgcaagagttaaagcatgg

SEQ ID NO: 11214 - DNA, 326 bp, Zea Mays
aaattatgtattcttgtattacttcattgcacaacattatgtcacgtgaacgagggcatcacattcttccaaacgcaaatacgattgctttcccttggccgccgccgccgccaaagttggtggtgcctagtcacagtggacatcaagttgctacatttatacattggaaggctgttagctactgattggaggcagacgaggaaggaagaaggagcacggtatggagagggtggaaggaaacagaggcaggaactggagttatgttattttattacttgttcgtcacaatccaagacatcgaggtatatatcactccctcctctcac

SEQ ID NO: 11215 - DNA, 544 bp, Zea Mays
aggacgcaccccggtcaaaccccgcgacattaagcccagggtcgggcgtggcaaaacctgacaagggaggccgatcgtgtcggaagggaaccactcgagtggatcccgctcatggccctagactaactcgccataagtaactgaccgcacttaacccgagccacagtgcgacgccagtccgcttcccactcatgatctacgagcacctcgggccgcatagaactcatgacttacgaagcccttggattgcggttgattaatggcccacacacccctcggtctatggcacacatatggcctatcgggctaggccttagtacgcacacctcccacggggggctacacgatgggctgcgccgaaccctagtctacggaggacaggggtcgacatagccataatgatgacgcctgggaccatcgccgcccccacctcatccgccacagtaaatatgagacaaccagacagccctgggccccacgagtacgcgtggctccacctagggtaaaacattggttttacccttgccttgtgactccttctcag

SEQ ID NO: 11216 - DNA, 780 bp, Zea Mays
ctcaccctcgacctagtactttccttagttgatgtcgcgccgtcgccaattgcgtgcggattggggcgaattcggccttttgggtcaggaatttgcctggcgccacccgtatcgtggtcagtagggttagaccgtgtggtgattggagcagtcattccccatgggttcgccatagtcttagcttcgtggggagcgaacttccttctgagttggggtagccggggctcaccgtcgggcatgcaggccgcggcggtgcggtgttgcgcgcagggcgtgtttcgccgcccagggccggctggaggtagacgacggcgccgtgaccgttgatcccttgcgcagcggtcacgattagagcatagggatactgattggggtaggttgaatctgcgccggtgatctagcatcgggcggttggcgagatttttaaatcgtggccattagtactcgatccgagggctctgggcgcggatcggtttggccgagatcggatctaatccgtgccctcggcatgggatccaacggtccaaacctccactgtaccccttcgcggtaacgttttacataagagaccccagaaaatgtgttaaacaacccgcagtccacctggtgggtcgtttgtgtcttaggaacttttgcacaatagcccctgctgttctctggttttatgcgcccagtccagaacgtatttaaaataagtaaatgaattagtaaatgcaattttaatacaaaaacaattgctagaacttggaaaattcatatctaattcattctaaatccaaa

SEQ ID NO: 11217 - DNA, 476 bp, Zea Mays
gacgaagctccgcacgggaagccgaaatccggcgagctataccggccggagagggcaaagaccgacgctaatctttggttcacacctgattctacccctaaggagtatttcccctaagtcaattgcatgattggtgacctatttcgctctgctcactaggacagcgaaaaccatggacattagttcgtgttcccagtgattggtgggcttctagtttaattggacggtttggtgagcatcaagggcacatgaggatgctagaacaagactaaagacaacaggatcggacctgaggagagcttcccacggtgagcttgagttcgcggtgttcttcaaccgttttgggggaaatcccaaattcgagttctctggtggggggtttgggatgcaggtgggtgcagtagctggtagaatacatggcgaagccgagggggtctcaatttatagatcccatcgacggtggtgtccaatttcgc

SEQ ID NO: 11218 - DNA, 347 bp, Zea Mays
cgcgcctttaaatagccccgccacccacggcgaggtattcacatcttcaccagtgaactcggttgaagcacaaattcgcggaatcctctccacctctctcaaaattggtagtgcatggtgaaaccatagtcctttgcgactgtgtagccccaacctcccctcctaattctgcccggacccgtcgcagcgccgttttccccttttttgtcaccggcgagcgaaaatcctccgcgctccgtggccagctactcctaggtctgctactctttttaatcgtgtttcagcacccatatacgctcatgatactcatcggctccaccctccttgcttggccacgctcaatcacc

SEQ ID NO: 11219 - DNA, 738 bp, Zea Mays
caagatcggacgggggaaggagtccgaaggggttcgagccgttcgatcaagatcagacaggggaaatcagaccggggaaacagacgtgcgcaaagcggtacccgcggtccaagccgttcgatctgaatcggacgaaggggatcaggccgagagggtggaatggctgcaggcggtgctgctcctctctgcggcggtgaggtcaccggagttgaggtaggcgcgggctacattggctctggggtcgctggagttgggcagagaggaagagggtgccacggcgaactctgtggcggggaagaggccatgaatccacaggcagagagggtagaacggcagtgagaaggtcttgggcaggccagagcaactccggtgagcgattccggccacggggaggggacttaaggcgcgctaaggccttggctaacttcagcagaggcaggagcaacacaggaaactactccggtgaactagactaggctaaatcggccggccaccacgcgagcatggtggaccgccacgaccgagcaccggcgaaggtgaaattcgacgaacacagggcgcaataagggaaattgggcatggggacgggtatctcacctcaggacggagctcagggaggcttggagcggtctccggcgagctagatggtcgagaacacgggcgcggatctccggcggcatctggcggcgagagcagagcgcgagagagggcggggtgtgtgaaatgaggcgaggggtg

SEQ ID NO: 11220 - DNA, 298 bp, Zea Mays
gatgccataacactcataccatcttttgcaaccaagttcagaatatgattagcacatctaatatgaaaaaacagtccatcgcagattaaagggctatgcttgttgagctctagaaatatctttcacatcaacttcatttgcagaagcattgtctagtgttaaagaaaacattttcttctctataaaccatttcaataggcatgaactaaggataagggacatattctcaccactgtggcgacctggagcatggaaaaaattgataattctcttttgtatttgccaatcatcatctacc

SEQ ID NO: 11221 - DNA, 509 bp, Zea Mays
ttctttctcaggacgtgcagttgtatccgtggagatttaaagcgcagtttgtttggtttccttttctacgcacacagactgaagagatgcagaaacagaccgtcaaccaggccagtgcgagatgctggagatctacgtacgccggcatgcaggccgagccaatgcagtagctgcatgtagcggcacataaacagaaaattgttttttagattattttccattatatcttacaaataaaagatttaatcaccgaaacaattttctattcttgtctctgagatttttaggaataaaactagacgacaaatgttgtataacatttagagatttatttatacacttttctctagtacacgtctaaggcaaacaaccaaacacgagcggtatctatcctgaatgcatcaatacaagcaaccaaacacaagcatacgcacggatttagcctgtacaccggagacctggctcctcatatacaggtcaggctaccaccatacaacaaccaaacagac

SEQ ID NO: 11222 - DNA, 360 bp, Zea Mays
tcacagtatgccggtcaagactccctccattataaactgtcattcctccgcctataaatattgatgcccttgccgcggaacctcagagtccagccaccatctcattgtcacccccacatccgaacaacgcgtgtcttactcttcaaaccagagaacaagccatcaccatcgatttgagctgtaggtgagcatgccatgatcttcgacctcttcctccatcgaagtcattcttaaactatagaagttatgaccttagcatcgattaagacagctttccccatggccatcacttgcccattgaaaatatgcaaggaaaacttcgcttaaacaattgtcatataataagcataaccaagtttc

SEQ ID NO: 11223 - DNA, 548 bp, Zea Mays
aaacagtgcaacacaattagatgtactagatcttcattctcccaatctatcccttgatgtaagatagattgaaagaagattatcataatcatgggtttaagaaaaacaagataagtagggacgatcaagacaggtcattactgatgcatttcttttcctattccttcttgattacatatgattacaattatacctttggaggttaggacaacaattcagagacaggaaagcaatatagcttcggaggcagagcaattccgatccggatctcctctcttcatgcatgacactgtgcctctattgatagtgacgatttggcgtacaacttcatatgaaattacaatcatgccctcatttcctatatatacaaactacaaaatccactaagggcattgtcgtctttttccttatagacgtgttgaacaagcattctggatttcccttcatctggccagtcaaagcctccatccaaccggtcaatagcttcgtattcgaatcgtaagactgaagtttccaacttcatcttcgtgcccgttgtcaagacgaag

SEQ ID NO: 11224 - DNA, 645 bp, Zea Mays
aaaccacataactgtgaggcagggttgggccacctcgacacccagaatcagccagccaccatcagaagcagacctcaccagacgagggcccaaaggttctcctggcttgtcaaggattggcgccaatccgccgtagcgagcgcaacggacaacccgagtatgagaagcatgggccgagtgaggaagacgaggaacaagggaaccgaaagcaaggtgggaaagacacggagagtggaacaattaaataaaatctgccctgtgacaccttgctgcttagtgccagcggaggcgatccacctaacgagggggggcaggcctgacccaccaacgtgttagaccactggttgcacccaccacctctcaggcagaggcaagttgtttcttcatgcacaataaaatgggaaacacaagagtgaaagccatgcattaggaaggggttttcctcgaatttcatcgtcctttacataaaggaaccctgagtcttctgtcgccataattctaggctcggggctaggcgcaggaccaaacatccaaaagagaagagggaagacctatgattgaggcaatattggaagctcactattcccttcctatcatagtgcttggcatgactatgagggcaaaagcgcacgtcaggaaaccaaa

SEQ ID NO: 11225 - DNA, 602 bp, Zea Mays
cgcatttacattcaagtacttaggtttcaatgtctctattcctagtttagaattgattagattggaacttaggttgcaagactccttttgaggtattcacgggcacccaggaatgaggtgcccaaagaaagcccaagaaacccctcaaagaacgacccaccggccaaagtctctgtcgagcaacctcaagaggcagagcgaacgaccaagtccctgttaagcaaccccgcagcggaacgagcgaccaagttcatgtcgagcaaccccgcgaggcgtagcgagcgaccaaatccctaccgagcaaccttacgaggcagagcagacgaccaagtccctgtcgagcaaccatgcgaggcagagcgaatgaccaagtccctatcgagcaaccacgtgagacgaaacggacgaccaacttcataatgaacaaaccgcgcgaggggcaagcaaccgggtcccgtgccaatctgaccagcataagggaagggtcgacctaatgatacgggcccacgtcagcaaaacaagacgggtcatcaccaaaccacgtccgggcatcgggtatggcgtcgaaaggtcccgacggacatcaaacgatatgtcgtcac

SEQ ID NO: 11226 - DNA, 437 bp, Zea Mays
ggaaaaggtggacgacggtgaggtggccgcggctgaacgagacctcgggtatcagtcgcccgagggcgacctgaaggatatctttgtcggaggctcctactccggtgaagacagctagacggacctcgggggaactccgtgtcccccggtctacgaagctgaagcacgccttcctctggaggctctttcggacctcccacgggtccgagctgcagacaggtacatgcagaagtgatcacagccagagacaagggttcccgtgtcaaatgcggataggaaccctgggtcggtgcttagccctgcggcaagtgccactccaagaggtgctccgcaactctccccaagctgggaaggaccctccaaggtaacgggagtgcaccgacccaggggcaaccatctagctacgactggaggagtaccttaccccgatgccaaat

SEQ ID NO: 11227 - DNA, 490 bp, Zea Mays
cggtcagcgaccaccgcagctcgttccacggtgcctaccgaagcacttcgcgcgcctgtttggctttgtttcactggtggctggggcctgcctgtcgggttcaccgctttgtcatccccaagccgaagcctatgccaacagactccatggattccactgttgtttttcctcaggtcggactccaccgtggcctataaaatccatgctccgtgaccccttcgtcaatcctatcttgcctcagccagcaccatggtgtcgtgagcagaatcgtgcgccctcgcgatgccatagagggtagaagagagagagaagcacggccgtcgcggggttccatctcggtgtgtacttgatgtctggccagggaggattgctgcacatcttgggcaggccccaagcgatgccgagtgcaggggtggccggtgtccggccaaattcctcgccggaattggagtttgcggccaagccaccgatcactctggtcaacacaccg

SEQ ID NO: 11228 - DNA, 306 bp, Zea Mays
gtgacatgcacagagaagcattaggaaaatacgacggtgacgactcacgacacgagcatcaaaacaatctctaccctccccgtgatgagagaacacagaacagtctgtacccgcttgagctcgggccaagagcgccgatacacgatacggcagccgagcacactcttccccttcctgacctccacttcctagctcggccccggctccgcatctatctatctctcgccctgccgtctccggagaccggagctgctctcacatccccacgcgcgcgccctcgaccccgaccacgtcccccgcccgctc

SEQ ID NO: 11229 - DNA, 621 bp, Zea Mays
gtaacctcacaagtgtccatgatgttgttagtatctaggttaagaacacgataagcacgagaatgcaatgcataacccaggaaaacccatcggaagaccaagactcaaatttgtccaaatttccctatttcagcacaaagcatttgcagctaaacaccctaaaatggctaaccttcggtggccatccaaaccgcaactcataggaagttttgttcaagatagctcaaagaaagatgcagtttgacacatggcaagcagtgttgatcgcttctgccaaaaacacctaggactcatatgctcatcgagcattgtcttggccatctcaactagggtctgattcttgcattcaacaatgccattctactgaggcgcatacgaagaggaaaactgactctcaagtaccaaagaagcacaaaatgtctcaaaataagtattcttgaattttgtgccattgtcacttcgaatagctctcatggcattcttagggaactcattttgcaaccgatgaatcaaatctcgagcatgagtaaaagtctcatccttctccttcatgaagaacgtccaagaatagtgagaaaagtcgtcaacaaccacaagcacataccacaacccccaaaagag

SEQ ID NO: 11230 - DNA, 650 bp, Zea Mays
aaggaacatctctagttgagagatagggctcgttggttcgacaagctcgctgacctccaaggacgggtcacatcatcgcgacgaacgagatcagacatgttgagctagctagcatcatgaggatgacgagcgaggcaggggcaccggcaagggttggggttgtgcagtgtcgcgacataaggaatgagacatcgaagcggattgcatcaggcggtgtcgataagaatgggactgggccatagtcaaaatgtttctggatcgattggattgaggagaggggtcatgggttgttggtcgacactttaaaaagggaattatacatctatgggacgagaatattatgaatttgatatgttgagtctaatgggccgatgatctcaggttgattctatgggtcaaggatcgtgttctaaaatttcaataacaacctaacaccagtctaatatcatctcattataaaattgaaactttaggccatctctatcagattccctatcttatcctctattttaagccctactttacaaacagtatcatctacagttatgtaaacagaaaacttcaacggacctaaatttttaatttttctctatactaacactaaatgaatagtagatatataagagagaaaattgaggggtagacatggc

SEQ ID NO: 11231 - DNA, 787 bp, Zea Mays
cagtgagcaacaagagactgtaaggatgctagaacatagactagagggggataaacatacaggaggggctctagccacggggaagcttctcacggcggcgatggtgactaatttcggggaaatccgaagcgtacgagctatggtggacgtgaagggctggctaagggtggactgggtttgtaagagaagggcaaaacacaaaaggcactcaatttaaagaggccggccacctgctttgcgaatttgagatgggattgaactccacgacggtgaaatttttcactgggtaagcttcatggcgcgcagtagtgtaatggctcaaggaggggtaactcgctatctgacacggtcatagtgacgtggtgaattggtccctggcatggcacaaccgaggaagtcagcaaccaccaaggtgacggccgctcggccacatcgctgggcaagtgggcacgacagcgcagagctccaattcaaccctcatgtgatcttttcacccctccgtcgatctttttactcaccatgcctttgccatccttagccatgcgtgaatcacagcgccgagcgtggatcacggcgcaaagcacaccggcggtgaagggatcttcttctgtttactgtacaatgcaatactccctttcggtgtgtctgacagagctactttgagggcatattactcccatttccaagtactaacataccaacttgaatttagcaaatttgttctcctatataacatcttcaactttgtcacagtgaccctagccttaatctaactagatcatccata

SEQ ID NO: 11232 - DNA, 436 bp, Zea Mays
ccccaacagtatgcactggttgcacacacatttccatcatttcagaggctattggataaggctcctgctattgaacacaagcgtgttcaactaggagacttgaagaggaaggctatctcatagggacggggtagaagcagtgtttgtccccgctatgttttgccacagggtacacctactcgtccgggaggaggactacgcccatctcaatatgctccacaggggtctccacggacacctctactcgtcaggctactcccactggcaccccgatgaggcctggaggacagaagactgaccctacatgcttcaagtgcagtcagattgggcactgtgctaatgcttgtccggtggggaattctggtacaccagctaagaacaagcaacagactcctggcaagggatactctattgccagggttaatcaagtgagcat

SEQ ID NO: 11233 - DNA, 591 bp, Zea Mays
ggcggcttctcctccctggcccaccgacccggaccggcgaccaaggttcgtgccttcttcacacgctgacgacgcccacttccccctgttccttttctctgtctgaactgtagccgccgccctgctgctttgggttcttctccctcccccaccatgccttcaccagtaccctcctcgccttctctctccctctctctcctatcagctgttgccttcccgagttttcttttgcccttttccccttttccggttatcgtgagtgcgtgacgaaactgtccctagtggtcagcaaaaaatcctttcccttcgtcgctccaccaccaccaccatcttcgctttccttctctcatctcccaactctttccctctcaaacacacacttccaaacgagccatccgctaacctcgcccctccatttttttctctctcaatgctaagtttgcttgacgcggacgtcaagtcccatctcacgtttcgctttacagatccgcattcacattcctctctcttttttctattaccttcggaatttccaaattttgcgttggattagacatttgataagtacttacaaaggaaaataggttcttc

SEQ ID NO: 11234 - DNA, 449 bp, Zea Mays
ggaaaaataggaaacacaagactgcagctggccataaccaaagagatcatcctacagctggaattggcgcaggaatccaggactctcaccgcccaggagttggatctaaggcgccgcctcaaaattcgtagcacgaggtggctgtcattgagaaatcgagaatgcaacagaggtctaggctcacctacattcgctgtggagacgccaacaccaagctctttcacttgaaagcaaatgctcgtagaaggaaaaactacatccaatgcttacagtcccaggatggcatggtcttctctcagcatgagaaagaaaaggtggacgacgattaatttagtgagcacctgggcactgcagcaactagaaccatgaccattgattggcaggcgctaggttatgagacgagggacctccaacacctagaattacctttctcttaagacaaaatttgg

SEQ ID NO: 11235 - DNA, 646 bp, Zea Mays
taataacacatagatgtggaaatatgagcgacacttacagtgcaaacagagtcacaagttgcacatcgagtttctgaaggttcatcattaaccacatatcatcgaatgcaagaaaggccttttggtccaaaccaataaaagcatggtgttgtatatgcacactgatggcgtcaatgccaactgatgatgcacacatgtaccagtcatgcaaccttttaacaccagcagggaccttcctcagtttctcaagtgttagtagaggtctggccggcacataatgtttaggcacatttttataatctgccttagttgggatctttatctttgttgccattgccttagccttttctacagactcctcgtgctcggccaaatcaacagtacgtgacatgaggtcccgtccaatccctttcaaaaatcgagctgtgccagcagtagtagctttactcttctttttcttgaatgtggacaccaattttggtagagggaatttagatttctttgattgtcgtgaatcccttgatggttgtggagaaggtgatggtgtcctaaatgttgatgcttgtggcggagatggtggattagaaagaggatgaggagcagcatgggaagattgtggaggtgatgatggatgtaaaggtactaa

SEQ ID NO: 11236 - DNA, 632 bp, Zea Mays
gttggacggtgccttaccagagcgagctggccatggagcgcagagctttgggttcgccgaagacagagaaaggggaaaacggtgtcacggtggctctgggtgaaattgggagatggcatcagggctatagggccgtaagaggctatgctttcaccgtgcgtaatcaatttgggagaaggtggagagggtagtgtgaattcgacttcgaattagtcactgtgttcgcgatgatcacacctcgccgtgaacctaatggctatttatagccgtggtggtctggcgatcacctcgcggccaaggatagtatcgcaagcgcatgtcgaccacgtcggtagaaggtacagtgagtgagattatggcatgagcgccatcgcggcaaaagttaccgatcatggtggccgccggtgaggtctccggctggactcagggagtagtgccacgtatgcactgtttaactctgactctatccgtttcttatcgcgcgtgaatccggacggaggcggcgcgaatcttcgtgcagggaggtcaccggcggtgagcacgcagcgctggcaatctgatccacagcagagcactgtaccatggcgaactgcattcagagcgcctgacagtcagcatttaggctcgatttt

SEQ ID NO: 11237 - DNA, 935 bp, Zea Mays
ctagtataagagacagtcacccccttctgctctccgtatcaagtcacaactctcatgtactcctttgaagacctctctcttccccctctatgttctattatttgctttttttgcatctctattgtcatggatttgtatgtatagacttggcaagagtaggccttcgaaatgactagcgttcaagtgttcacctacttggatgaaaaatgttaatcacgttactacgagtgttgtgacatggctactcgcttcatctcttttaactgggacaactaatttgactcgcaatatgtctgtccctggctatgatttctcttttcaatcctataatacagttagattactctcaccgtcctaaaaccacacacgtcctttcataaatgtcactaataacctttgtatatccaacacggtccctgtgcaccattacattgtgaatatcgctcgatctaccgttgtttctgcattcatccagaagcatcggtgaaaatggagcgatcgttgggccgcgtcacagtaccgtacgtggcgcaataactttgacacatatgtcaaatggagcagacagcggcggccggctggagtcggagtcggagtcggagtcggagacatgcatgccttgccagctgatagtggagaatatactagtgctagctagctaggtacctttccatggacgattctgatccgagacgagaacggcgggacgacgaaagcaacggcggggatccttgtcgctacccctcgatctctgtcgctgtaattggagagagagagagagagagagagagctgcgggcacagtactagctaccaatgcaacggcgacgcatgcaggagcaggacgcgcgtggagcggaaagggacggaaggatacgtcgatcggctgtgagtgagaggcaacagttgctgtactgtcacactcaccgcccgtcc

SEQ ID NO: 11238 - DNA, 693 bp, Zea Mays
atcagcagctagtggtcgcacctcagtctcgtcacgctccctgaagcaaggtggtggaatgggcagagcggaaatgggagcgggacggggaacaatggaaactggagtggtggaggtggtgggtatagcggaagtggtggatggctctggagcgacaggagctggtgaagtgggaggtggagtagatattgtggcagaaggtgtggagggagcagtggagcgtggctgagatgcgaggcgacgaactctgtaggcaatcttatcagaggagatctgcaattgtcctccctgctctgcctgctatgttgttgttgtcgcgacaagtgctgcacgagcggctctcttcatacggcgcttcttttggccctcctgctgctcaaggtagaccgtcttccccttgacctgcctgaaggggcaaggagggtcctcgtcgtctcctccccctagcgctgagacattctttgtccgcaccatcctaacatgagtgctgcatgagtgagttaaaagctaagtaggagtagaaagcagctgataagatcataaatgaagtgatagctacctggaaacctcatgaaagagagagaattcaggcaggataggagacgagcacgcaggcagacgaggtcactgaaatgacagaagaggtgagcatgtattaatcacatagtcataagtatatgaaatgtgaataaa

SEQ ID NO: 11239 - DNA, 629 bp, Zea Mays
aaaagagctctctctacaacccctgtcttgcaactcccaaaatttgccaactcattcattgttgactgtgatgcgtccgactcagattttggcgtcgtactgcatcaagatgagggaccaattgcctttttcagccgcccctttgcagcccgacatgtcaagctcgctgcatatgagagagaactcattggactggtacaagtagtacgccattggtgtccatacttgtggggcaggaagtttgtggtacgtacagaccattttagcctcaagtatatgctcgatcaacgactctcaactgtaccccagcatcagtggattagtaagctatttggtttcgacttcaaggtggaatatagggctggccggctaaatacagtagcagacgctctttcgcgcagggaaaccaccagtggatcggtatatacaatctcaacaccaacctttcaactctacaaagacctccagcaagactaagcaagcaaccaagagttttagctcctgcacaatcagatcagtacagggcatcagggtgcgccatggcagatcagggagggactcataatgcatggcaatcagatttttgtaccacaatcctccagcatacttcctactatcctgcacacagg

SEQ ID NO: 11240 - DNA, 420 bp, Zea Mays
aaggaagtcgaatatgatgacttaactgacaggcgtggtaaagatgctcaagggtgcccctagataagaaatgactaaactactatagaacttggacaacacaacagggctgggttggtcgagacgatgatgccaagtactagatgtagtggaagtagtcagggtgtacgactgtgacgaggacgaagacaatgatggagcagaagtaggatgtggggaggtggacgcaggcagctgtaggatgtacaagggtccgagctatcacattgggcgagaagactccgagtagcgagatccttcacagtcaagccaaaaggatcaaactcaatataacataaattatcggtggtaaattggcgaacggaaagaagattttgaatgatgtggggcgacaagaacattgtgaagatgaaggatccg

SEQ ID NO: 11241 - DNA, 749 bp, Zea Mays
ggcttgaagaacaggctacagaggatacctgttccgtgaccagtgcagttcgcatgcggttgctcactgaactatatagtcttgattgattggagaattcggttgaatcgctttggtattagtttgttacaaatttgcagtgtgacggtaattgcaacggcttcagttggtaaagtgctctgatctggtcccaccgtcagtacaaggtactgaggaattaggccggatggactaaacataacataacttgggttcggtttcgatgtgatctttgtgaacatgagtggtttgcacattcacaagtgtctcgtttccctcagcggattatcccggttcatctgactagaactctgccattatccagggcaggaaatagtgatatgcctaacttctttgaaggaaggtgttcacgaagacctaatttttcttccatctggatgcactttaccatgttacgtgttctaatccgagtaggcctcattggtcagccagctgcatttgattgataatcaacacaataaccgaataacatattgtgctcaatgttggagagggtacagatattagttatgctcccttcctttgaaacagatgaatttttagccattttttctttttcagaaaaggaaattaaccctttcttttgtcatcggtaccctcttgtgtatcattttctttgagaatactagtaacatctgtttgatctggtacatagcagcatgtttaaattgtgtcaagactggagaaat

SEQ ID NO: 11242 - DNA, 439 bp, Zea Mays
ctggatggtgtagatgcgaagcggagcgtgtgtgggtggcatgtgggtggcgtagagatgaatccacgggtacacctaggccccaaatcttacaagtgacaggaaaaaagcctagcgcgcgggaaggccggatttcgcatggcgtacggggtaggggagtaataagcgtcgaggatatcacagcgcagtcgcatggagctgcccagtctacaggccggatttcacatggtgtacaggttgcaggcaagaaacgctttgatgggatttaccacttgtgtattgtaatggatttttaataaagaaaaatgagccaattagaattaaaaatcgctctgccatggactacgacaaacttattgtgttattatctctcactctttgttgcaaagagataaatcgtgtagtagttctaaattggtgagtagtccttagaatttct

SEQ ID NO: 11243 - DNA, 424 bp, Zea Mays
caataacataggagacaaatcaatatactagaccatttgataaaaatagtttcatgataataacatgaagattaagtgataatatgatgagtgttctaaaataacatgaataccgaatctttaatttggccaccctaaaggagagttggagagaacaaaggggtggactggcggggactaggcgttaaggcgaagcgagcgcatcagcatgtcggtgtggagagtcagcgactctaccgcaaaatgacgacggtgaggcgacaataggcgtggaatagcgagggcaggcgacgatgcgacggtagatgacgacgatgaggcgaaaggcagtggtagcaagcgacaaccattgtcgcgttgcgacggcatgacgggacccttgtgagatagcgagggcgggtggtgctgtgatgccaaggtagaa

SEQ ID NO: 11244 - DNA, 895 bp, Zea Mays
ggatgataagctaaactaaagtttagcttggtatccatggactcatgtagtattttccaaaagcgcgaggtaaattgggttcctcgatccgatacgatcttctttggtactccatgcagacaaacaattcttgacatgtataactctgctaactgggctcctgagtaagttgtcttcacaggtataaagtgtgccactttagtcaacctttccattataacccatattgaatcatagccatcccgagtatggggttgtccaactatgaaatccatactgattttcttcccatttccattacggtactttaagaggttgtagcaatcctgctggtctttggtgttcggttttaactcgttgacacacgtcacatagtgcaacatgagtagccacatctctttccaaaccataccaccaatacttttccttaaggtcctggtacatcttagtacttccatggtgaatagaataagccgaatcatgagcttctctaaaataagttggccatcaaactcatgaccttctgcagccctttgaaggacacaatgttgtatcatgatatcttcacccattaaacgttttggtggaccctctttaacttttatgcctcttctaaatgacttcatatcatttcaaaacgggtgattggatggaagaaactgtcgatgacaatcaaagaatgggacccttttaccatgctccaatcgatatgcttgtgtgtcccccatgcatatgggacaacacagtcgacagtggacacaccagccagaccaaataccatatgcaggcaaatcatgaattgaccacaaatatacagcatgtaaggtaaattcatgttttcgatgaccatcataagcctttacccctacccatagctctttgaactcttcaatca

SEQ ID NO: 11245 - DNA, 970 bp, Zea Mays
caacacccatgtttcctgggccacaagtagggtcgccctgcccatgtgcccaagtggccaaggatccccgccctgcgcgacggccaactggtcagtggtaaccaacccgggggacactcaccagtctgctgcctgtctgattcggccaagagactactgtttgtggccctagctcagtcagacgggagtaggaggctgcagttggactaaacaagcaattttgccccgtatcatcaggtgcacaaggtcattatcttagaagactgcaatgagagggccaggcataattgagatgagatgagatgtgtgtgacatgccaccaccagtaccgacgtctcctccacagaacagaaacaggcatccggcggccggtagcgagcatatctctgtcgtcgtggactcatcctggacctgggactccggctagctactcgcagttgttttatgctgctctaacctcctagtgtttggtgccggggcattttcctaagctactcgcggatcacgcagctaccggactggctactcttcttggcattgggcgtagactatgggagagggggaggggggtatatgtgagtgctgacagctcagctgcatgattcgtcaggtttcggggcttggaagtcatgacttgctgctgccacatgactgaccggaggtctgcaggccacaaagaaatggaggaatcttgcgtagaaaggtcgattgagatcggagctgacgagctctagacttgtagcgcatgcacgcagcattggcccttgtgatttccagccttccaggctcctatcaacgtcctacattggcacctcatggacatcaccagccacgcatttaaaagtgcccgttaactaaaagattggttctgattaggtgactagtagcaatttctggcaggtgacaggtggcttatttttgtagtttctttactgtaggagattaagtttctgtggatcaaagaatatct

SEQ ID NO: 11246 - DNA, 520 bp, Zea Mays
cccgcggccgatggctataatcacatcccggcgcaaggctaatccgatagggtccccaatttaatgtttgaatgatggtaccaccctgcccacggaggggagcggatccgcggtggcgcttgaaccacggcgggcactacccgctgcggcaatgcccaactaccccgcccagatgatgcgccaacaggagaagaacaaggcaagccagcaggaggtagctattaccgtagttattggggagattcgccaatctccgatggagcgtatgccgcggtagaggaacgtgtcgacgaacaattccagtcgtcggccgagcccttgcatgacgatgccctccaaagcacccacgcgtactaacggagctcccacgtcgctttccctggctcgggtggtggtgcagagggagaattctcgtggcagcgcggagaggcagcgcacgaggtgcgactgggtggctgttagcgaaaagggcagagatatacatgggggttccgtggactcgcatcttatagtatgccgg

SEQ ID NO: 11247 - DNA, 887 bp, Zea Mays
aagtcttccaccttcttcgcgaggtctggcttccatacttcaacgttcgtcttcatcagctccagcgcaatgaggcgctcctcaccacacaaagcggcgacgtcgacctgctgatggatactgtcgcagctatgtgtgaaatgttggtagacctcctcacaccgcgcctccacccactggtcgatgctatcgtagtgcccaaaaatttgttgtgaggcaggtttccatcttatgcatttcatcgagcaccttgcggacggtggtgtccacttattccataatgccagatctggtgcgccacggtacctcactgagtggatctaggctgctagtctgataccagatgttatcaacctcgctgggagaggaaccagcgtagatttattctggcatggagaaggggaaaagggaagaaggagatgtcaggaggtaggcgacaacaataattgcatgttatctgatgtatgatggtttgtttcgttcgcgtacatgcataagaatatgtcacggactcagcctccacagactaagccagatctgacccaatgcttattacacgacccattctggcccattcagttgcacattctcgcgccacacatgcacacagcggtcttcagctgttgttatcttctcggccatctcttgagctccttatgcctcttgcgcacgtgggttgctgacactggatgtgaagcaaggttgtaggggcacatttgttggcgggtggggatgaggatagatggggaggaggctgagcggccttgcacgtaaggcagagcacggaatgtggggggagcaagagcaaacgggcgcatatggcagtgtggggagcgcggtatgcggggagcgggcgagcgcagatggtgggggcgggcgatgggcac

SEQ ID NO: 11248 - DNA, 772 bp, Zea Mays
tagtacatcaagttttagagacactgctctccccatcataatcatcacggtagtgttagggatggaggagcttgagattacgtagcaccaagtactcccttgtctaaatccttaacctatggtagttgcttatgcctttcgaggctaacaccctctctattatatagggggattaggctctatataaccatgcagaaaaccatagaaaaactgaaaccgactcagttacaatctccatgatctattgggctcagtttcaaacttgttatgcaaggcaaagttggaaattggcctgattacgatctccacgatccaatggattcaattctgaacttgttggacaaggcaaagtcagaaattgagtgagccattgatacttactctagaatttattgttaaggaaacttttacgcctgcatctcaaatactactacttaggagacctctctcgttcttcctcaaagtttgcggctattactgagaagagaatctccattgccatgatatctctattgccacaactctgcacgcacagacctagtagagcatgcctctaaaatcttgtttgctgaagatcctacttaggatagtagccaataaggttttggtggagcatctatactatgggactgcttacaaaataactactatgtctacttcccgatgactgttcgatgggctacgcaacatcatttttcaccgctttgatctatacaactgcatcaactaatatcaactaagtacagtggcggacccagaaaataaccaagac

SEQ ID NO: 11249 - DNA, 469 bp, Zea Mays
gttcactacgagcacggggacatggatggataaatcactctctggttaaggatacgagtcatgagaaggcggggagaacactactacaccggcggccacggtaacggaaagggcacggtgaacatgcagtgtttgcccatctcactatgcacacacagagaggctaaaggtttcatgaaactggacacgcgacctcataaccgtagcacacgcaggaccaaaatcacagcagggcagtaactgattgacagagaagcaggcagacagcttagtcaccactaggagataagctgcagacttctctagcctcagatatttgagtgctcaaaacttatccttacccacaaatgccaatgcctgtttcacttacccaaactgaccagaacagcaagggaacacagtggttgagatccttccatttctccacaacctgaactctcattagttacctacaccgagcctttcattt

SEQ ID NO: 11250 - DNA, 573 bp, Zea Mays
gtggcggtggaggacaaggcgggcagcggcgatacagaacacgggcgacagatgaaatgagattttgactctcgggcgcgtacctaacatcagtaactcctgtcgacttggtcaactggccgacggggattaatttattcccgtcagcttgagtgcaaaccgacgagaattaaagtagccaacggggatttgcagtattcctgttctgagtattgtaaccttgatgtcctgttaagggcatgtgcaatgcatattagtgcaccgtgtcttgaggtgtgtgtcggtgtttcgaacctagctctgacaagtaaatttgtgtgcatgttctgggctatggacggtgggaacggtgggcataagattaatactagttcgggtggaatgtccctacatccagtcttcggtggctcgcgctatcaacacctttgttgatcaatgcttgtattaggggttataagcagacgagagatggaggagaagctcccaagtctcttgtacggaggaggtggacctaaaggctacagagttggagtcctaactaagccttggctcagcgttggggctccagtctct

SEQ ID NO: 11251 - DNA, 415 bp, Zea Mays
cttagtattgtaatcaattagatgtcgatgtagcacattcattccctatggagacaaaactctaatatcataaatcaggatatgaggattgaggagtgttaccagaaccacataagccacctaatttactcagctagatctgtccacgtctaattccatcttcattaacaaaaagaaacatatatctgtaatcacaatgaattgatcatcaatcagcgccgtccaaccaacaggccttaccatagttcacttatattgtggttttatttcaaaatcatggatgctttaacaaaagtatgtttacaccaagcttgtttcaccagaaaaccagtatttaatttttcgaactcaaccaccagcaaatcagtattacgttccatataactgaaataattaacacatccctccagcataa

SEQ ID NO: 11252 - DNA, 413 bp, Zea Mays
ctcgaagaccagcgcgccagctgtttgacttgtgggtcgggcccccgtgtcataggatggataccccggtgtgcatcgggggagacttctcgtgatgtttcgaggcgggagcgggggagtctgcctttaaagaggggttcatcccttgagtagcagccatgccttgcttctctcccactcgcggtgccctttcgccttcgagctctctacgcccctttgccttcaaggtttctgctttgtgtcgccatagtttaccatggccttgtaagttcatctcgagcatgcccagactgagtgggtgctcaacatggtgtgccgcctacttggatgggatgctctggcgttcggcggaaggatttgcgccggtgccatcctccctggcgaacttgccgccagagagttcgtgctctttt

SEQ ID NO: 11253 - DNA, 722 bp, Zea Mays
agatgattgagcgccacgaacaagactgcgactagaggagccaaccacttgaccctaaggcgacatgtgcttgtgcaagaggacaagtccatagatggtgagaagagttcatttttcttctaaaattttctccatggtttcgagtctactgattttgtgatgcactcttgtagtaggttgagtatatttgatttagggattgcatctaggtagttgaggcgtcgaggtagggtagggtcatcgtcgtcgcaaatgtcgagtactcgttcttgcacatccatatagttggagattgttaggctgcatgaagtggtaaggcagcaaaatgagtaccagagggcacaaagtaatcaccaaatgcagcaaaatcaatattatgcatatctactcatgtagcagtaggcttttcttgaagtaagttttactactatcttatttaaaacaattagaaacttgtatgtttcataattcctaaatactgatatgcatctcattcatagcaagtggcacaacaaacgaacatccagatgctagcccttgggatgctacctctagcttttggaccactgcctccacctcctccacactttacttggcctcctccataacaggtattatcatacacattcattcgtcctttttaaccctatttaatctacaaaacttgcgcaacaaacaaacatccagatgatagcccttgggatgctacctctagctttcgg

SEQ ID NO: 11254 - DNA, 413 bp, Zea Mays
ggtcaatatagatctctacgtacctttctgccctatgggtggtatgcactggcaagaaatgagctatcttggttagcctatccacaatgacccatatggaatcgtggtgtcgggaggtgttgggcaatcccacaataaagtccatgctaatgtcctcccatttccaagatggtataggaagtggttgtaaggtacctactatcttcaaatgacttgctttgattctttggcaagtgtcgcactcggacacgtacttagcaatttctctcttcatcctggtccaccagtacaaggatctgaggtcatggtacattttgttgcttccagggtgcatggaaaatttggagagatgagcctcgtccaatatcttctttctgagttcgggatccttgggaacaacaagtcggtcttca

SEQ ID NO: 11255 - DNA, 606 bp, Zea Mays
ccgagatgcccttccttttctccatgatctcacccgatcttcccattccttaggcatgaatttctttccccctttgctcaccgtttatggaaaccggtcagagttgatctcctcactaattctcatcgatttggagcctattttgcctcaatcttgcctctataagtgtcacccaaacccccctttgatttcaagcgccactaccccctccccaagcctcgctacctctgtccgcactctctgttgccgccgacccaccatcgtccatggccagggacccctggtgtccctccgtccacgccaaggcctccattgtgatcactagagctcattgttgcttccttggtcttctccaagctctcccaatcctttatcgcgcctagccatgtcaccccgacctcgccggagctcgtcactccaccaccggttgtcatcgatgttatcctctaccccgaccccctcagtgaggcactgactgtgttcaccttcacctcagctcccttctaagccttttccctagcatgttaggccccccggagccccattccggtcaactctagtgagctttacagtcatgcaccacgtacgctgtgtgccacctcgtcg

SEQ ID NO: 11256 - DNA, 642 bp, Zea Mays
gcatcactggcttaaggcgacctaggaacacgcatcaatttgacaagaacacactgagaacggcctgtccacgtgcacggcggaaaccgcggtgtcgatcccgtgttctcaattatccatgctcggatcggctaaacggccactacgaggagcttcacgaacacatagagctgctaaaacaaggcttgaatcggacagggacttaccagagagggctggccacggagcgcagggctttacgttcgtcggagacagagaaagggggaaatcggtgtcgcgacggctcgggttgaaattggggttggggattgaggctacacggccgtaagagactgtagtttcaccgtgcaccatcaatttgggaagagggggcagaggcagcgcgaatttggacttcttctgagcttcactggtggagatgaaaacacctcgtcgtggctccttgctcaatttataggcacgacggcccaacagatgacccccggccacggatagcagcgcaagcgcatgcctaccacgtcggaaagagatacagtgagggagatggaggcatgggcgacaccgtggcaaaattcactggtcacggtggccgctagtgaagactccggctgggctagggcggtggcgccacgtatgggttat

SEQ ID NO: 11257 - DNA, 651 bp, Zea Mays
aagaagcccacttaataggataagtctgcagttaggttgttggatctcctatttgtaaggagatccggttggccttaggcctataaagttaggagtcttgtaatcgagaaagcgggaagtagtaacaaagaagtttattttctgcttcccttacccttttccacatccagcatacttgttcttcaccacgacacccttgggtcaacttcccgtccaggagatcttccccaccagccatctaatcagcatcgctacttcctgcagagcaccaggcacaacaatctggtatcgtaaattacagcgatcgcctccaatggcgccccagccaacaccgcagatccaccacctgctgctcctcaaaccaatgatgtgggggacttgaagatgatgatcgttgacttccaccgacagatggtgtagcagatgtcctcgttgtacacccgcatgacagccttggagagtgcagcatcatcaacaacatcttcctccaataacccgccaagtttcccctttgggctgccaggatacgacgacaacccagcagtgaacaacccaccatcatccgccccatcatcgcacctaactcctccataccaatccaccacatccagttcgcaccatcatgttccccatcaccaacccccatctttt

SEQ ID NO: 11258 - DNA, 302 bp, Zea Mays
ggaatttcaggccttggtctccaacatcacatgtgatcttgttccttgtcctcctggtgctcatatcatcactagcaagtgacacttccgccacaagtttcatgcagatggtactcttgagcgctacaaggcgcggtgggtatgccaaggtttcatttagcgtccgggcgtggactatgatgtgactttcagtcctgtggttaaactcgccacaagttgcacagttctcactttggctctctctcaggactggcctattcaccaacttgatgtgaagaatgcctttcttcatggtacactct

SEQ ID NO: 11259 - DNA, 461 bp, Zea Mays
ctggttaggttttgatccccatcaacaagacatgccacaaaattttttcttttacggtgacgggcgtgaaggtggaataactttgtattagcatctccatctttgagccatgaaatcctcgctctcagccttgcaatagttctcttgcaagatgataaaagtaatgcctgtttcttgagtctgagtttgagccagcattcagcagggctgagcactctaccatcctgcgctatttccagcttatggaggatttctttagcaagggcaagttgggacctcacgtgcccgatctgcttttcgctccaggcctgcaagctttttgcagttccttgaaatttcatttccagggatttaaaaggacatgtagctgtctcaatagagttccatgcagcaaggacaatatcctgaaacccctcaagcttggtccagaaggattcaaagtggaaacgcctttttccgga

SEQ ID NO: 11260 - DNA, 1851 bp, Zea Mays
tggttgcaaagggaaggggggagactgccgggtgcagagcctcctcttttatacacccaggccaggctagagagaggaacaaagcaggttgacgataggttggaacttggagatgattggcgtggagatgggcgagatcagatagtttgcattaataactagcagagtaccaggtcaggacaaacatgatagagtatagatttttgcttagttttctattattgtcatgctgatctatcagctagtgaccttcccttagcttccagctagatcacaggcacatcaagcctgttgtggatgtgtagtgctgtaccagtacagtgtgtaatggttcttgtatatgcttgtttttttttctttgtctgtgtatttagcagccacgatcaacgaggttggttggtcgcagcagaaagtctttatctccaaataattaactagaaacaagaaagaaagctaaacatgcatagagagtctatatgtacgcgttcagggtccatggactattctatacgtctcccaatcagtacagttgtggcatggaatttctacctccgttttccacttgctgcagcagtcggcaatatgaagtgcatgtatgcatcacttgagagttgacacctcaaactctgccaagaagaaagaaaaaagaacccaagactactgcattgttgattgtcagagatgaaaaattaaaacccatgttccatgtaaatggctcacatgcattgcgactagctaaacctcttatgaaattagaacagggcagggaatcggcgggggggtcaatccaaaggatgcctctgtaatgttctcttggcattgtattcacgtggtcagctgtctccctgtggatcattgctccaccccaattcaattttaaatattagacacggccacatcatgataggttcaatctaacccacataaattaaagggtcactaaacattgcatagcagaagacgacagagtattagtgtagcaaagatgaaggagaaagttgacacgtatgtactgtaagcagtaggtgaggaggagtggctggctacccatgccatgcatgaggccatgacaacagcaagattagggatttgtcgcatgcattagcatcacaacagtggacagtggagtatatgttgtccaccatattagcaggcattcgtgtattaactaggaactaaagttgtagcaggagacaagacaagtatgctatacctacatacatcgaccatatgcatgcagcatgcagtagtagtggtgacatgtgtacaagatagaggggtgacacatgtaccagcagtcggatgaggactccacaacaatctcactatattttacccacacttgttcccaatctacatgacagaacaaattcatgcacgtacaatatcagcttacagtgacgtctctacccgtgcattaatcttaactaatttcctgctactatgaaaatggaaaatcaaacggaacagaagtacagaacaaggtctctgcgacgattgatctttcggacaagacgccttaattgactccctgtctcttacagagcatcggctttctaattttctcaccgaacgcatgaatccatccatgagacggaatggcgtacgacaccacatgatcaagtgacctccatagtccagaccaggaggcaggaattctaaacagaggttgcagccatgcgtgagtgcacatgcgactgctgtcaaaagcaaaccttcccgaggtttgattggtccctaatatggacggatgccatgccattcaagtacaactgcggctgccctgcccagcccaggcccctaccactacaacattaagctctgccgacagtgttagtttcacagcctgtg

SEQ ID NO: 11261 - DNA, 478 bp, Zea Mays
caggaattcacctcggcatattagcgatgtgtcaacgtcatgggtggatgcgcgtgcgatgaagccggaagagcaagcttgtaaaccattatggtccaatgaatccaaactgatgattagttgtagctttacaaactcccagtcaccaacagcaaactgctgttcagagcgatgcttatcggtttgctacttgaatgcatgctgctgaagcagacataggagtagcagaggcaatgaggccgataaccctcagtgccgaatgggctaactgatgatggacgtaaagttcatcagcattcaagtaccaaaacttaaaccaaattttgatatcaagagttagaagagaaaacttattttcctcctaatactaagaagcccatttaactttagcaccacgaaaatatcaatacttgagggcttcgtttattagcaggttgaagccgttcctccaacatgttaatgctagttctacgcatcc

SEQ ID NO: 11262 - DNA, 690 bp, Zea Mays
aaacagttttgatacatcacaaccggcgagaatcttccttctcacgtctatatatgtttcaaattaagtgtaaattatttcgatttttctagatgtatagcctgaattagagaaacagtaggaactaccagcataattaactccaacaataggcggtggaatctgaggttcgtctaatctatctactctcttgtactataaaagggaggggcaaagtaacgattagagggatttgatcatattacattacacgagctaatttcgagttcacactttcaagggaagaggcataaaggtgtatttggaccataagtctaggacttccaccacaactaagagaggaggaactagaaggtattgatgctcactggtgtttgggcttgtaatcttctttactttttgtgttcatcaatcaacgagtaacaatagaccgtatggttatacatacactatggccataacctctctaactgtctgtggctaactcccacttatgtccactaacctatgtcccgctctatcctaaagctctgttgttacacgtacgacgatagtgcttctcaactctccccataattacccttaagactaaataaccaagaaagaagagttgtcaataatatactctacctattccaatttatagatcattttggtttttctagatactacatagatcttacaatatac

SEQ ID NO: 11263 - DNA, 391 bp, Zea Mays
tgttgttgttgtcgtcatcttcttttgcctgtaacagaagttggcgaaggctcttggtgtgttcgctggatccatcctgttcatgcgcacctgtggtgatatggtggccatctagggagccttcaaaagttgcctaccgtgaactagagacacccccttttttgttggcattggatgtgttcttacttcggtcagggacagttgaagcgtatctagactctagagactgtttgtcttgctagaatcgcaaccaaaagtattggtccaagattagtgcaatggtgaaattatttcacccaagcgcacgagttgcagtttttttttttcctggaaccatttgaattctggacagtggaatggtactcccttctttggcttccttaaattcatg

SEQ ID NO: 11264 - DNA, 307 bp, Zea Mays
gttattactgcggtgggcaatggaaacagaactttattttggactgatagatggataaatggcggctgcatcaatgattttgctcctgatgtcgtttccaaggttgataaacttattgtctccactagaacagtggcccaggctcttgggggacaacaatggatcagtgacatcttgacacctctttcctggatggggatccaacaatttttgctgatttgggatgctatcaatgttcaaaaaagcgcgcttaagcgtccgcttagtcacgattagatgctaagcggtgccttagcgctgcgcttag

SEQ ID NO: 11265 - DNA, 425 bp, Zea Mays
gtctgagtggatattctccttcagtcggcacaatgccgaagaaaggagtgtctgactcatggagctctttgagtgcgactcccaatcctaggagtgtccgggggaaggtgacgttgatgctgcttcccccgtccactagcaccatctttaccctgctctctcagatcactgggtcgatgaggagcgagtatttgcccggatgatcgaagttgagccactgatccgcccgagtgaaggtgatcgggtgtttggaccatcgatacggggcgggaggactggtggccgccaccagtatctgacggtcgttgagcttctgctgcctcttgctctcttgcgacccatggccgccgaagatgacgttgacttctccgtcgatgcgtgggaatgctctgcctccttccccttcctgctgctggggttgtcga

SEQ ID NO: 11266 - DNA, 587 bp, Zea Mays
tacacgctctcacactcactcaacatgtccagcatagcgcttatctctacatcgcttgggtttatagccatctcaaagtgaacttgcctctcatcattggggagatcaccaagtgaagcaaccagagcctcaacttcttcgggagagggtcgcactctaagacccaagccactgtcactagcaggaggattggacacaaaattgaaaaaagtcttggaaggtggcagattccaggcagaatatgcaataggagcaccaatattcgatactttgcctctaagaatcatctccagtcggcttaccaaatccacagcaggaatcctcttgttggtaacccgggttgaatcagtgacaccactatacaaataagctgggtacgctctgtccttccgtggctgaatattcttaaaaacaaagtctgcaacaacagcttcagcagtcaaacctctctccttcaacaaaccaatttcgacaagcagaatcttggtctctattatctccaagtctgtgggggattcagtccaacttggagcgcgaacatccggctgtctccctgaccgaggagggagggatttgccatgattttc

SEQ ID NO: 11267 - DNA, 1154 bp, Zea Mays
gggatttttctgtcaaattccacctaattactaagggggataattttaaatgggctctggtgtgtgtttatggcccggcgcaggaggaccgcaaagtgcggtttttgacggagctggccaacttgggagctagggaaagattgcccattcttattgggggggattttaatatcctaaggaacccaaaagaaaagaataaacccaactttaatcctagatggccgtttttgtttaatgccgtcattgaaggccggaacctccgtgaactggagataacgggcaggcagtttacctgggcgaatgcactggctaatccgactttcgaaaagttggatcgtattcttatgtccacagattgggagctgcatttcccgcgtgccaccacggtggcgggtaatagagacctttcggaccatacccctctcttgctggacacaggtgatagtgggggctcctcgcggcagcaagagttcaagtttgagcttggatggttgttgagagaaggcttcacggagatggtaacggaggtttgggaaaatgagaatggtggaagtaatgctcttgaaaggtggcaggcccgtgttaggagagtgcgccaattcctgaggggttgggctaaaaatgtggggggccataataagaaggagaaacaagatatcctcgatagattagatgctctggataagaaggcggagcacactcttctatcccagtcggagatggattataagaacgtcttaaaaaaaagactggtggatatgctccgggaggaggaactgaagtggtaccagcgagctaaagcgaaaaatctgcttcagggtgacgcaaatactcaatacttccacctcctggctaatgggagacataggaaaactagaatttttaagcttcaggatggtaacaatgttatcgagggagatgagaatcttaagcgccatatcacttcctattacaaagatctctttggaccaccggaagcctcacatatcactctggatgattctattagaggggatatttctcaggtttcggtggaagaaaaccaaaggctcactagtaggttctctgaagaggaagttaaggccgcactcttccagatggaaaataacaaggccccgggccctgatgggtttccagctgagttttggcaggtg

SEQ ID NO: 11268 - DNA, 704 bp, Zea Mays
cacatatgttgtaaattaggaatctcaagccgtccaagctttaagggtcttgtgactttatcctaggccacgaggcagcgtcctccattcacctcttttgtccctctccacataaatccttttctgactttatcaattgctttaatcacccacttagagacgttcatggcaatgaagagataaactgggatggctaaaagcacaaaacgcacaagggttgtccttccagcaaggttgaggagcctagctttccaattaggtagttatctgcaatcttgtcaacccaattcatcaatatattcctgttaagcttcttatctgaaataggcaaccccaaataagtgcaaggaagaaggggagcattgcagaatgttacacccttcatgcagcaaatcatcttcatatcttattgggatggcacaactcttgtgcaaattagttactaagcctgaagcttccccaaagcagtcaagaatgagcttgacacagtttagctcctctctaggcttgataaacaagactacatcatctgcatacagtgataatctagtcttcacattggcaccttccaaactagacagcaattccatctcttccgccactctaaaaaggctgcttaggacattaccaatagaatgctactaatttgtaattatcgatattgaactaaatgaaaccaaccacattttctaataatattgttt

SEQ ID NO: 11269 - DNA, 893 bp, Zea Mays
catgcgagcaagtattggcagtctagtagcattgtccttccaccaattaagaatgtcaaaaccagtcttatcttcctcattgtcctcagataaatacttatctagttcatacttgacagtaatatttccactcccattattgttcatttgttgagcaactataggcctcatcaaccgtttgctatgtgatggctgctctttagagtcatttggttgtggtgtcttctcagctggagcatacatatctttgtactcatcaaacaagaaacgaaaagaagtgtttactgttgtccataatttctctccaatgtcttcaccaaacattaccatggtagccaactttacataattagaaagctttatcttggatcaattgcaacgcagaaaaaatagccaagttgagtttctctccgtacttctccccccaatatttataatattttgcaatcattctcttgcccatttcagcacataggttgtcttcgctacgacaccactctcgcaataaaaccaaaacatcagcaatctcatggaagtaagaatgtgaggttggtttacttgtgactgaaacacgaagggtaagttcatagaagtgctctaggaattcagccatttttcttgccttttcccaatctgatttctcaggaacaccgaggccattttcaccttctaaatctagcctatagaatggatcttcatcactatacctttcaaattccttttcatattgttgtgcaatatttagcataaggtatgttgaattccacctagtgcaaacatcaagggttaaaaatgctttggtctgtactttttctaattcagcacatttcttaaatttgactagcctagatggtccagccttgacaaacttaacagctacccggacacgacta

SEQ ID NO: 11270 - DNA, 577 bp, Zea Mays
gaacatttcaaaatcatgagatcattggtttgctgatatgattttggtttgagcgctttcttcatatcgattgaagtgaagtgctcaggttcagtttttagcagcaaaatttgattggctcacattcaccccctctggtcgtctcaccggtcgttcatcctatgtcactaaggtaggctcctcagcgctcatggtgtacactctatcaccatcattgtttgttaattcacgttcaaaccaacctgttggttcaactggtccaatgtgttccctaacaaaacataaccatagtggcacatcatcacagtcagcatcaaggttctcccctcccatgggctcaaacaaatgattttgatgctgcgttgctatcctcgatgttcttgagctgctgaccactacatccgaatcctcctcttctgtaacatcccaaaatgtcaacccgaggtttggaaccctaatcttctaaccccccttttttatctctccctaaattccaccccataggtcatctcatcatatgcatacacttgattgttagaagcacctcacatagattattatttttctagcacccaag

SEQ ID NO: 11271 - DNA, 4617 bp, Zea Mays
tctcgtagggcaccgatgcctcatagaagggaacacgcgctaccatgggagaggaatccgctgccaccgttgtttgctctgcgcaatcgctcggactttcacaggagtcctgagatcaccaccggatcaccaggaggatgctcgtgacctcaaccagcggaatcaatgtgttagctgctggctgggaagtaggaacttggaacacggcaagaagaattggacgaacagcacaaggaataggtaggagatagagttcaacttggaggacaagtatggagttcagttattacatttcctactcatccacacacatctgtgatatatttatataaggaaaacacaccactctaattcacccaattgggcccaaacaccttcatactcttcttcctgggcctcttggtctcctgatgcagcccaacatttcccccttctttgaaagctggttgtccccaaacagcagctcgaggaaactgttgacgcaattcagccacatcctcccaagtagctaattctgccggcatgtgagtccatttcaccaaaatttgagcacaagcagtagtacccctcgctactgtacgatgctgcaaaatcatttcaggaacattgaaagcaaaatcaccagtgggaagagtaggtgaagctttcagaccgacacccaacgccttcttcagttgcgaaacatgaaataccggatggaccttggacgtatctggcaacaacaacttgtaggccactgctcccacacgctgcaccacacgaaacggcccaaaaaacttgaaagctagcttctgatgcgcacgtggagccaccgaagactgcacatacggctgcagtttcaggaaaacccaatctcccacagcaaactccctttcagaacgtcgtttatctgcctgccttttcattcgtaatttggcacgttccaaatgttgacgcaccaattctgacattagatgacgctcctgtaaccaaacatccaaatccgtggaactaatcaccgcatcaggagagataccaaactgacgaggctggcacccatacagcagctcaaatggagaacgaccggtggctgaatgaggagatgaattataccaaaattgagctactgataaccattggctccactgatgcggacaggcatgaacaaaacaacgtaaaaacgtttccaaacattggttcacacgttcagtctggccgtctgattgcggatggtaggcagaactcatgcgcaactgcacatcggccagccgaaagagctcttgccacagaagactgagaaatattttgtcgcgatcagatataatagactgaggcaatccatggtgtttgtaaatctgatcatgaaataaccgagccacagacaaggctgtaaaggggtgtttaaggggcagaaaattggcatactttgtgaaagtatccacaattaccaaaatacaagtataggattgtgattgtgggagcgcctcgatgaaatccatggaaataatttgccacaaaccagtagggacaggaaggggctgcagcagacctggcaaacgagctctatctgctttagcctgctgacaaatgacacaatgacgcacaaactcttgaacagtatgcttcatacctttccatgcaaacaactgttttaaccttgcataggtaacaggtatccctgaatggcccccaacagcggattcatgaaaaactgataataaacgctgttgtaaagccggagactggccaacccaaattctgttcttgtaacgcagaatgccattgtgccatgaaaaatgtggtacagcagaaccatcaatggccaacttggcaatcattgctgacgctatttcatccgtacgataagactcagcaatgtcagttatccactgtggagtacaagacgatacagctgaacaggtaaactgcatctgtggatgacgggacaatgcatctgctgcactgttatcaactcctcgtttatagacgatgcgatattgcaatcccaacaaacgagtgaacatcttcttctgccacggcgtatgtaaacgctgctcatccaactgtgccaaactacgatgatctgtatgaatgtgaaattccttcagctgcaaataatgacgccaatggtccacagccatcaatatagccaagtactccttttcgtatgttgacaacccttgagatttaatacccaaagccttgctcaaataagctaccggatgaccagcttgcataagtacagccccaacacccactgcgctagcatccgtttccaaacaaaaaggcaatgaaaaattaggcagtgccaacactggggctgtaatgagagcttccttcaaggcttgaaatgtcgcttcatgctcagaagtccacacaaatagggcccctttcttgagcagagcttgcaagggtcgagcaataagtccaaagtgtttcacaaaacgcctgtaatagcctgccagccccaaaaaactgcgcaattccttcactgtacccggagtagaccattctgccactgcctgtatcttgctgggatctgttgccactccctgagcagaaataagatgacccaaataggacaactgggactgggcaaaagaacacttagacaacttcaactgccactgatcccgggcaagaagctccaataccgaccgaaggtgcagcaagtggtcttcaaaagtggcactatagattaaaatatcatcaaaaaatacaagaacaccacggcgaagcagaggcgccaaggtatcattcatcgcccgctggaatgtggccggtgcaccagttaatccgaatgccattacacggaactcataatgaccagagtgggtctgaaaagccgttttgtgagtatcatccgggtgtagcagaatttgatggtaaccggcagtgagatccaagctagtgaaccaagatgcattgcccaattcatccaatagttcttcaataactggtaccggatagtgcgacttcaatgtgattgcatttaagtgccgaaaatcaacacaaaaacgccatgtattatccttctttttaaccaataaaactgaagaagaaaaaggactcacactaggctgaacaattccagactgtaacatcaccttgatctgtctttcgatctcatccttcactgccgggggataccgatatggacgaaccttgacaggagaggctcccggtatcaatggaatactatgatcacagtaacgagaaggaggaagaccagaaggaggctcgaacactgtgagaaattcagacaacaatgccaacagaggtgaaggtaatttcaagtccgtcacagactgcgagacaggttccaactgatggacagcaaccactgaacctggagaacaaacagcagacaagccttgcaacaacaccgaagattcttgataaggaataatcatccatttttgcaaccaatgcacattcatcggactatggcatgccaaccaatccataccgagaattatatcatatgatgataatggcaagactcgaaaatcagatgtaaatgtgcagtgctgcactgaccatttagcgccgatcaattgctgaaaacaaatttaaacgagcaccatcagcaacctgcacttgcacagaactaggcatcaaggaaataccagacagctttgttgccagtgcggaagacaagaatgagtgcgaactgcccgaatcaactaacaccaaaacttcaaacccctgaatcactccttgaaatttcacagtaagaaaagcctcctcgccagacactgcagctgcagataacatcatgaacacctggtcacccgccacctgatcagcaacagtactgacagatgaaccctctgcatcatccacataaagatccaacacttcctgaagcacatgcaactgcaccgactgtggacattgatgatcacgtgaccacttctcagcacaacgttgacaaagccctcgagcacgacgataggcacgtagtgcagccaatttatcttcaccagtggaatgtcgatgtaattcagtacgacgaccttcaatggttggaacatttctcttctcagtgacaagtggtcgaggtagaggcaaaggattagacgccaatgaacgctcgggcagaaacaactccaaacgacgtccatccacatgcctatgcgatgtcgacacctcttcctgcaacaatgcgaacacacaggcagaatccagagaagaaggacgctgaacaaacacaacagctctaatatcctcacgaaggccatccacaaatcgttgcacaaaataaattgggtccataggacgaccataggctaccagattatcgaccaaagcggaaaaacgttccacatattcagaaacagtagatgtttgacgaatacgaaacagactacgaataaaagcttcatgctcatctttgccaaaccgatctaacagcgattgacaaaaaacaggccaagtagaagcacgacactgctctgctcgagaagaaaaccaacgagcagcaggtcctttcagatgcatcgttgccaccttgatccacaaactcggatccactgaatacatatcaaaatagccttgactaagccggatccacaattttggattctccccctcaaacactggaaagtttaactgtggcaaccgacctctcatagc

SEQ ID NO: 11272 - DNA, 679 bp, Zea Mays
attttcataactctaataaaatttaacaaagttttatgtgtacaaaatctaaagtaacatttattttagaacagactaagtatatctatctaattgggtaaccagcttaagtgtagttaacgttaagcaacacttggatatttttgtagtcacatctacatagcgcattcgttcgacaacatgcgtgcctggaattgttacgtatacgtagaaacatggactgttggtacatgtataaataaacaatgaatatatataagcgtcgacgtgccaaattgacaaatgacaagcgtatccgtacgtactgcaataaacaaacacaacgtgcagtgcacagtttgatctattgacaggctatggctctaacggtacgctagctacttacgtactgaaaagacgcgattgaacaggtaacacgggcccccatttttttttgtaatttagcttttccttaaaaaaacactgtcacctactgatgaaactacacccagttttaaattcttatagttggtttacacatagcctatgacaacaacgttacatatatcaacgccatgatcaatgacatcgaagtatcgcgcaaaatactgtcgatcatagttatgacttgatatcaactcagtctcaatgacttatggtgccaaggtcgacactatgggtcttacatctaggggtggac

SEQ ID NO: 11273 - DNA, 326 bp, Zea Mays
cacaccattgagcacaacacacaatttgaacttgttgctttgagttgcttgtactgacttgcctgtgaaaaaactttgcgttggtctgaagaacactgaaaaaactatgctttggtctgctcttaatctagatgataatttctttgattctgattctgaaatgatggttgagtatgcttgaataaattctttgtatgtactggtcgtactgcttgaacaagcaggcatactagatacacacggggccaaacacaattgtgctaaggattaaccgaatggattcttgagagaaggattaaatccagagagggattaaacccccaagg

SEQ ID NO: 11274 - DNA, 289 bp, Zea Mays
aaacatcagcaatcatcttgttcaaaggaaatcttaaaccagctttaaagaaacttttgaagaccaccacttcatcctttcctggcttcggagtaatctcttccccaccaaaacgaaccagctctttcttcgcttcactgaaatagcccaaatttatcagcttcggcatgtcatctttggagatggtggattttctgaaatccaggtggctgggtttacttggcaccgcgctgtaatcatcttcagactcagtctcctcaacatcagcctgctttgcttcagcggcagg

SEQ ID NO: 11275 - DNA, 831 bp, Zea Mays
cgacaatattgtttcaaacgaccttttgataaccatacagaggtggcgtgcccattgttgtgccatccgttaacccttttcccatcgttccgtcgtagcggctgactgacatgtgaccctcatgcaggatgggtctccaggtcatgtgagcgatgcttcaacaccgctttggtggtcaaaatggttttgactgttgcggtggaaccaagaaagtatttattgcacttgtttctagcatttcttttgcacgactgatagatctggccctcatgtcatagatagggtacctgggtcccgggtgacgtctcctgagattttgcgcggcgatccaggggtgagtgcgggagagtctgcctagaaaaggattcatacagtgtattgcggttacctttccgcatttgcttcatctccaaacatgcgctcttcctcgtcctttgtttgcgccgccaccaacgtcatggcttcccttattcatcctcgccgattccaaacccaatgcgaccttgataaggtgtgtcgtctgctggggtggacttcaccggagcacgccagcagaatccatgcggggatgctaccattgggtgccttgtagccaagggagttcgtcctttttatctccaacatgtctgcttggcttgcactaccaattcctccttctttatgctactgctggatgagtacgacctccaacttcaacaccttaccccccactccatcctctaggtggccatcttcatccacttgtgagagatgttcgtggggcagcacccttgcacttcacttttccaccatttcttcgtgttagtgaagtcagagaagggaagggacgtg

SEQ ID NO: 11276 - DNA, 557 bp, Zea Mays
gatggctattgatagcaaggaggaagatccactcgagactattaaggttgtgtcagagtttccggatgtgttctcgaaagatttactaggtatgccacctgagcgaaaagttgagtttgccatagaacttcttcctagcaccgcccccatttctaaaagagcttaaaggtatctggacccgagttggttcaacttaagaagcagatcgatgagctgtcagagaaaggttacactagaccaagtacctcaccttgggtcgcccctgtcctattcgtggagaagaaagatggcaccaggaggatgtgcatcgattatcgagctctgaatgaggtcataataaaaaacaagtaccccttgcccagaatagaagatctgttcgaccagctgagaggagccagcgtgttctcaaagatagatctgaggtcaggttatcaccagcttaggattcgaccttcagacattccgaagatagcattcattaccaagtatgagctatatgagttcaccgttatgtcatttggcctaacgaatgcaccagacttcttcatgaatctgat

SEQ ID NO: 11277 - DNA, 473 bp, Zea Mays
gtgggccctggcttctgggcccgcctgtcactcgcccaatgatcactcagatacgctcatacccattcggacattgttgactcacgtcagccacgataggacgtgtcgtcaccaaacttcgttcggaccaggggtgagacataacgaaggggcgccaggaagtccctatcaacatgacggtaccccaccgcatacgctctctggcgtatcccgtctctaccttgtaggaccagtcaaccccggtcatggggggtctaagcaccatattctccacagtaacccacataccgggaaggatgggacaatacaccgtaccgagtgtacgcctacgcacgctggagggtgacacgaggttcatgacgaaaggcggtgttgcgccgcgcataaccccaaaacatatcatgactctaccccgtgggatccaccaagtgctactacaaggacatcagcatcggactcgctacatggacccg

SEQ ID NO: 11278 - DNA, 579 bp, Zea Mays
gttcgattactcaagtgacataaaatgccaagttcggggacctaaagtgacacaacatgtcaagtttagggactgcacataccaggtggcgcacgacgcgcatagggggaggttctagcatggcacgcgacgtcgcatccggttgagcaaatccagttttagatgattttgaatgggtcgaccaagtttaggattcgttttcctagttttctgagttcagaaacccaagtgacacatcgtgccaagttcgaggcccattgatgcactttgcttacatatatactcgtttaaagcatgagtttcgtgtattgtgtgtcatacacgaagcacatatatctaattttctctcccaagtttcgtctaacaactagataagataagccttacctcttgcatgagcaaccaaccatacaaccaccacgagtgctttctcctcccccttgttgatgatgtcgtatattaacctcaacaacctaccatctctttcctcgtctgcttcttcctcacccaaattcttctgtaccaccatagatgacatcgagtaggccatcctgctggtctccgactcgctaaccgcag

SEQ ID NO: 11279 - DNA, 627 bp, Zea Mays
ctttcctgatgtcatcattggtgagaccaattccttgccacctaagcacacgtccatgttcaaccaaaccgagattatagaccggagatgggatgaactcaggagcctcaactcgtagctgagttctagtatgttactcattttcagaggatgatgtgttatattccatcaccacttctttccctttgtccctagactgttgatgaacctccttttccaccatggcggcctttcccttattacagaaatgtggatgttgatgttgatctaccaataccacctcttcatttggaccaagtggagttgttattgtcactgtttttgttggtggtgccccaagtatgcttggagcaagtttggatgaccgcacctccagcatcttaggaggtgtcaaagtaggagttgtctcttttggagttgatgtagaggaaacccttagttgtacaaacttggttggaggcgcttgctttatgcagacaggccactccctaagggtagtcttacgaaaccttgcttctgtcttgtggctgacagatttgttggccttcaacctggaaaacccaggaggacctaagctggaggacgcaaccttgtgaaccttgttagggtattcttgggaggctgaca

SEQ ID NO: 11280 - DNA, 601 bp, Zea Mays
ccggactagctcaataagtacgcacaatcgaatactttcccaaaaagaccccgcgcacaagtcgcctacgggcgcggccggatcaacgaaggcacgcaacctcatacaaattacagttacatacatacagcgagggcatcacacattatattggctcaaccttccggatgatacccatatccctgtagttgagcagcattatcctcaattcctcaccctcaaaaagacttcgcagctccccctcacctacactcgccccagtcagcgaggacaacaattcccgtttgccagtctcgtccacacgaagacgaccaccctccatctcaccatgatgacgcctatcactttgcgacaactcactcactctctgtttcgccaccgcccttcgccgcctacgcccagcactcgcacccggaagaccttcagcatccatcacgcgcggagaagtctccgctgtagccacgtccaatgccgcaaaataatccaagtcctcatccaaagactcttttgtccacacaatcgaactcctagaatcatcagactcaaaaaacttagacacagaatcatcagaatcgccttcagcaatcacggtcgaagccgc

SEQ ID NO: 11281 - DNA, 466 bp, Zea Mays
gcagaaggtgcaagtcagacaagggaagctcaacttcactactctggaggaagtacctgagggagcccccatcatgactggtaccatttcagtttttaatcaacctgcattaattctgtttgattctggtgcagcttatagtttcattagccagaagttcagtgctaaatgcaaattgcccttctgtcatgcaaaagggtcattcatgacaaccacacctgggggtaaaactgtaaccaaccaattaatccgaagtgtgcatattcaactgggaagccacattatcaaaaccacccttcttgtgttggtttggaaagcgtggatattattctgggcactaattggatgaacctgcaccaagtagtgcttgatgtggccagccggatcgtggaagtcaattccccgttctatgggaatttcaccttaattctgcccaaccgaggttctactcggtcatgtgttttct

SEQ ID NO: 11282 - DNA, 410 bp, Zea Mays
cttatgaatgttggtcgactcccaatactttccagactcagaaagatgaagatccttggcttcatctctagtgggctgccggaaatcatgaatcttgatcttgtcgccagatatatcatcgtcagaaaagccaagaatgtgagcaaatcgacgatagctcaccttataccaactaccttcaatgaagaagttcagataggggtagttgtaatgactctcctcgtcagctagctttatccatagggtggagtagaattgagcaatcacttcatcattccaatcatattggaatgtcatgatattctccatttgtttcctttcacaggccctcagtgcctgtgacatttctggatccccaatggcttcacaaccttcccagttgatataacgttgatgcaggataggttgat

SEQ ID NO: 11283 - DNA, 513 bp, Zea Mays
ccggagccgacacgtgtccagacctgatctggtgggatccggaccttatcgcatacactcctgctcccctcccagacggagacccgatgctgccacgtggcttactgcatgtggcgtaagccaacgggcggagcctgacataaagcctctgggctacgcgcgtcttggcatttattgcgggtaagatgtgcgtctgtccattccagtgataggcggtgcgcccagtccacgttgcgtgggccgtgcaattactcacacgttaccatagcgagggcaatggttcaccattactcccgcgttaccaggaaaagggttactacctatcaatgctgcatggactacagccatcatgactcccgctgattactcatacgttactctatcagcattagttattcacataatgtatttcttccattatgctcctaggcccacatgtcagggctcagcatccttgtatgtgcctcccttaaactataaaagggaaggcacacagcgttacaagggacacgc

SEQ ID NO: 11284 - DNA, 1348 bp, Zea Mays
atcagtcatgatattacagaacataagaagcaacagctgaagcttcttcacattggcttgtatcttcttatctggggtgaggcttctaatgttcggtttatgcctgaatgcttgtgctacatattccaccatgtaagtatctctcatttaagaaacaacattttgagcttccttctgatttactcagataaacttttgggctttaattatttctctagaatggcttatctgttgcctttccatagaaaaaagaacattgttgacatattctgtttaaacatgatagttttcaagatgtttgtgttggactagcatagtgcagttgctggttggactggtatggtgtagctgctgttttgctgatgcaccatgttagttgtgaggagggagtctggtcttgggctgctgtaagctgcagctgactggtgccttcacctgttatatagctgatgaaagggaggacagataacaaccctagtgctttttacaacctaagaaaaagatttgacttgattcaaacttgcagcctaaggtagagaccttgacctcttgacttgacttaataacagaagactaacatcagcgaggactactctaacaatttgaaatctccaaagtctgactcactcatttgctccaacaaatatatggccagtttcttgatgtttagttcttacaggatgagcttcaatgtttcatcaaaatctatcactttttataaggcattaatatgtgatttgatcatcagaggcgacataatccactgaagaaaaacttgtgttaaatgataggttgagatccttaatacttattagtactcttccagaccctaatagctcaacacaaatcacattggtccttatgctatgtatgaatatcaattgtaaaatgttgaatttgttaatagacaatcatacggttcagaacaatatggatatatgagcctcagttgaatccatcccattggtactgaatatgagttactacaccaaaccacaattcctaacactagagatggaaaaaagatggattaaagctcttgtaactatgggaaacttggcattcactcaagatccagttgtaagcatgattcgctgaatatccattgtaagaaataaatttatcaatagccaatcatgaactatactacctattcaacgaggctgtcattgtgcaacataaagttgaattgtaatatgtgtgtagttgcagatttgttgagtttcttgtatatatatactaatataaaactttgacagccatgcaattttaatttatgtgacagatggcaaaacagttgcatgacatggttgatgaaaacaattttcaaccaccacaagcacctgtg

SEQ ID NO: 11285 - DNA, 598 bp, Zea Mays
tggtgctcctctatccgagactatagtccttggtatgccatgcagacgaattatctagtcaatgtagatttctgcatacttctctgtcatgtgtgtggtgtgcactggcaagaagtgagcagtcttggtcaacctgtccacaataacccaaatggaatcatggtgcctggaggtattgggcaatcctactataaaatccatgcaaatgtcctcccatttccaagatggtatgggaaggggttgtaaggggcctgctgccttcaaatcaaaggctttgattctctggcaggtatcgcactcggatatgtacttggcaatttccctcttcattctggtccaccaatataaagatctaagatcatggtacatcttgttgctaccagggtgcatggagaatttggaaaggtgagcttcatccagtatcttctttctaagctcagggtccttgggaacaaccaatcgatctccaaaccataaaattcccttgttgtcctgtcggaaacacttgtatttttctgccttttgcttgatcatgtctttgataacctgaacacccttatcctcaatctgtgccctcactatttgctcttgcaatgtg

SEQ ID NO: 11286 - DNA, 440 bp, Zea Mays
gggacaccacttgctcaagaggtccaagtggtggtttttggcacagtcttcccaacacacaacctagcagtttttcacaccctactcaatagtcctagtcatccatacttcatacacaacaccatcgccatgtggccctgataggcaccctagcaaggcctgttgcccctactaacccggtaggcaacacttttttcaaatgtggagagattggtcactatgccaacaattgtcccaagaagaatgtgtacaccactcccgcacgaggcagcaacactactaggcagaatcaaacatggggagtgggagtcaggctccaccaagtaaccaagggcagtagaatttcgtacatggtagggtgaaccacgtggagacagagactatccaaagatttgctaggtatgccacccaaccgagacattgagttcgttatcgatctc

SEQ ID NO: 11287 - DNA, 470 bp, Zea Mays
gaatccccgctgagccagatggtctagacggggacgccgtctgctctagatggtcacaccttaggcaccatggcaggtgtcttggtacaggaagttgaggggccctcccctcgtcatccgggcgagtggcttttgccgccagggcgtgcaacttctcgacagctgcaagggtagcggggcggtcgccccgcacggtgaggaccccagcaggggacgacatcttgaggaccaagtagccataatgggcaatggccatgaaccggtacagggccggcctgccaatgatggcattgaaagggaggttatcctccgcaacgtcgaattggacgttctcagtgcgaaagttttcctcagtcccgaatgtaaccgggagtgcgatgctcccaaggggatacaccggttgagggcccactccggagaatgggcgagagggtcccagtcgggatcctgggatctgcagctgcttgaac

SEQ ID NO: 11288 - DNA, 1859 bp, Zea Mays
ccatgaagcatctttcgctgaacgtccagtccatttgacaaggacgtcccagactcccctattgagcctagcatgcggggccctttctagtgtagggattactctgccattgaggtccagtaagagcatgtagggaaatgcccaattcttcggctagtgcatcagcagctccagtatcctctgcatcaagctccaacaggaagattcctcgttctgcgcacttgtgacctgcagtatactgctccgagcaatggtagcattcaccattggcctgtttggcagcaagttcctcaggggaaagacgtcgaaaacgaggtttgttggtggtggaggctggcagctgaggggcagggactgccgacccgctactgggctactgtcttgagaagaagctgaggacgtccagttggtgcggttggcagaagaacacaaacacctttcataagctctggtgagatgcatggcccgttgcagtgctgttgggtcttcaagctcacgtcggtgtggagaggttcccccatgccggctgtgaacaagttagtttgttgtagttggtccaggttgttgcagtgacatatcagcgaggaactggcgctggtagtcctcaaccgatgttcgtcggagatccttcagatcggcgagcccattgttgcgcaggggtggtccaaaccgcatgtggacgaattcggagaagcgtgtccatgtgagaatgacgctagtgtcatgttcgagggtgtagaaccattctgcagcgactccttaaggtgcagggatgcctgccacaccttctcgtcttcccatgttctcatgcctctgaaataggtgtcacatttgttgagccatggcagcggatcagactcaccatcatactgggggaaattgatccttggatgaggggatgtgtcgtcttcaaatcattcccggtggctactggctgggacttctagtgtgggcgccattgaagtccaggttggcaccgcatccatgggggacagatcctgatccctcgtgcggcctggtgtccatatgaaccgacgtcaaggtgtcttgtggcccaggcggtggtgagctgcccaggttgccctccagtagtgctagccgctggtcgtgagaatccatccgggaattgacagtggcgagttgcgccaggattctgtccaacttggcagagtcggtcatattggcaggattgtcgtcgacgccggacatggtggtcggtgcgtcttgtggctccaataccaaattgatatggtgtggccgctttggggatctcaaaggagagtggaggagtagatgtgattgaggaagcgaacgcaggggatatggggttctgctgggtaggttcccagggtcaaaggagttgggctgggagtcagccagatagccacggtgaccagagaagccacccaacaggtatgacttctttgataaaaatccctagtacaatctaccgccctctttatagatcagaggagctggaaactctcaactaactaagatgcaatctaaagtgataaccctgcagggatagggataagcccttctctgttatttgcaacaaacttctggataagccctgcagggataagggataagcccttccctgttatttgcaacagacttctgaatactagcctaactaattaggaaggcgtccataacacctgatgggcagtgcctctgcgctcgcagatgatatccttgcaactcggtggggacggccccaaggatctaggagaggaccccgctatccatctgacgctaggataggatagcgggggatgccgtgtatgcagcactttcacaaggatagcgggttaaggatagcaggggccaatgatctcgcttaagatggagga

SEQ ID NO: 11289 - DNA, 405 bp, Zea Mays
tagtgcgcgcacgccgcctgatgccctccgatgggacgcctaatatgacaagcaaagcggatgagcctttgggcgcaacctctccaccttgcccgaccccaggctcagccctcgggcaatttctctgcctcacccgagctcggcctcagccaccgactgcgtcatgaatcccgcagacaaccactccgcctgactgtagcgcacgtcgagagacagctcgaccaacgccttgggtagacttctgcatcaactaagcaggggctctaatctcgatgagtgctgcgggaatgtcgacgtcatcacgcgccaggacgatgacacgctccgtaggcagcctttggcccataccccgatgctgtttacaaccactatggcatgggcggcctctccctcgggggctcggcc

SEQ ID NO: 11290 - DNA, 517 bp, Zea Mays
gccgtagagggtgtcttcaccttgtcgttgagagtaagctcctcaaggagcagatcattgcagactttgttgaacgtcgggaagggcgtctggcgcttggtgaaggacgccaggtgcgcgaaccgttcgttcaggccacgaagagcagcgaaaacgagggtccgatcgggaacaggttcactgaggctgcccagttggtcggccatggacttgagacggcggcaataatcagagatggagagatcaccttgcgcgaacgtccgaaactcagtgtcgaggaggagggtgcgtgcctccttgttgccaagaaacacgtcctctagaagaagccatacagcgcggctggtgggttggtggttgatgtcgctggaggtcatgacaatctcaaggaggttgggagagacggtgcccaacagccaagagacgacgacgcaatccaggcgatgccaaggagcgaatccggatggacttcgtcggagaggacgtagttggtgagagagtatttgccgagggtgat

SEQ ID NO: 11291 - DNA, 659 bp, Zea Mays
cttggctctgttataggagcggccacctcaattagcttcggcacgacggtcgtttcaatatgcctgggtcggcacgtcaaaactttaaccttttttttaccttgacgcactggaagtcgccgaggtagcagctttcctcttctttccttgctttcgggaaggataatagtagtctggatacacaaacccaatgacatagaataccctattcaacctatttttgccccgacctccaaaggcagttgtcatggcttcatcttcggcctttgaatatgctccaagcagctcatcactagttgcctctatggtatctcgccagtcatcattcggctcattaaactggctcctgtatcaaaaagtatattttagatagaccataccattttggctggagcctgcggcagtctcctttggcatctcccacccgtttgcaagtggccacactctgtaagcaatgtgctcttggactaagtctcttatgccgatgtaagtacacactgtattgaaagctgcttggcacgcctgcacatagtttccaagtgtaatgacatgcctcctactgccgaagtgagaccatataggacgctgaataacccctattatatcttccctttcactcaaatcaacattcacataaaaccattcttgcatccaagagc

SEQ ID NO: 11292 - DNA, 407 bp, Zea Mays
gttaaactgctttagcactgcaactatcgttttatgcaaggaaaacctaataccagcatttaagaaacaccaaaacacaacaactatgtcctccctcggacttggtactagctcatcaccccctaaccgcactagtcaatattgtcaatatagccgaagccattaagtacctcaatgtgtcctttaattttggacttcccaaagtccacatggctgggcttcgtagggtgaataatcatgttatgttcttcaaaaaccattcccacagtgtctttggactggttcaacaagacaacttcaacctagggagcagtggctcccatcgtcggaacaatttcttcagcttgggcctttggcatattcttcggaggtgtcacgacatcttaagcaaccctctaagtggaaaa

SEQ ID NO: 11293 - DNA, 1128 bp, Zea Mays
gatccgcgcactcttcgcctcgcgttcgtcactcccgcggagtccgcgctggcatcgatcgcaggtcgtatccccacctactcccacgactttcccgcgctgcgtggccgtgagtctgcaggtgggcccccatcaacaacctgcggctcgtcgctacttcaaatcgccgtgctcgaccgtgatcgccgccgcagattccggtagccattggaacaaccccctctcctctcggccggaccctgggggggataaatatgggcttacctctccgctctcctctcatctcttttgcgccacacataaacattagagcgccgccgcagggaaaacatcgccgtcgcacctctgtaccggtgccactgccgttcgggcctcgatttggcaggggaaagtactaacgacacgcgtgtgatctagccatagcttcgcgtagtgtgtggtcggccgaacaccgccgcaatttctcgccagtggtgaagttgcaccaccgtccgcctggtgtcgtggataggaggaaccactccaaggattccggtgaggaccatctgcactgctaatccatatcctcaattctgtgttgcgtcgtttaatttgagtatgggggtgtggagcgctggtttgagctccctccggcggggtcgccaccgtggccatcgtggtcccatcgcggtgttgggagggaagagaaccttggcaccgttgatttgcaagggggcggtcacgattagatctgggttgtggctggttggccccttcgatccgcgccgttggttcatgatcctagggatggggccaactcgtgtcgtgggcggatttcagaccactgatccacgatcctgtgatcacaattccttgccgtttcgttttaaataacaatctaatctgagcccttgatttgtaatctaacggccagggtcgcccgatacccctgcagccttggtcgtctttcaaaagagtccctagattttattagattcaacccgcggtccacggcgtgggtaaactgtgtcttggaacaatttacaccgagacccctgcactttataataataatggccgcagcccagagattgattaaatcaagtaattaatataggaaaatgatttttagttttaaaataaatcaag

SEQ ID NO: 11294 - DNA, 591 bp, Zea Mays
ctctgataatcccctgtgtaagcatggcaacacattgtcgtcctagctcatctttttgcagttgtgggtatctatagggcctgacagccaccggttgtgtccctggtcggaggtggatccggtggtcacaatgacgagctgggggaagtccctggggttcgtcaaacataggtgtaaaggatagcagcagctggtccatcatctgtgattctgcgagttgagtagagcatgtggctggttgtgtgatgtcgttgcgtggtgatcccagccccttccaaagaatgtgcctccctcctcgccagaacgccatgtagaggtcgtctaaatcccacaagatagggaccagtgtgcgcagaaattggacccaagatggcatcaaaactgtccaatggaatggcgtagcagggaattgcaaagtgttcttcaccgatgaccactagaatgccgtctgcgaacccggtgcaatccaccttgtccccatttgctatggtcactcttcttcctagactagggcccattacaatgtccaaccgctgcaaggtggtgttgtcaaggaaattatgtgttgatcctaaatccaacaatgttgtt

SEQ ID NO: 11295 - DNA, 653 bp, Zea Mays
attcgggtgcatcctgacttgatgataaccactccggagatccagctttgtgaagaaacttgcacctcggagttcatcaagtagctcgtccaccactagaattggaaatttgtccttgattgttttttcattcaattcacggtaatcaatgcaaaatctccatgtgttatctgccttcttgaccaatagtacaggtgacgagaatgctgatgtgcactctcgaatgatgccttgtgccaacatctgatcgcactggcgctcaatctcgtctttaagcagttgagggtaccggtagggtcgtacagccattggttctgtaccagctagcaaccgtatgtgatggtcttggcgacgtgatggtggcagtccctgaggatcctaaaacaaatcagggaaagaggacaacagttcttccagacattccctgttcttgtccatggatgcaaatcccaacactgagtccccaactcctgtcaagtgtaccaaccttcccttcctccagaatgccattgtgtgtgtcaaagttgcagaccaccgatcctagagatcgcagccactgaactcctaatacgagatcgaacccatcaagaggcaaggaatagcatgttgtggtgaatttctcctgaccgatggtgagggttgttgtgacttga

SEQ ID NO: 11296 - DNA, 463 bp, Zea Mays
cttaaaaagaattcgacctcgaattctgacgcttctatcggaacgacaaaagaaaaggttaaagaatcaacaacactcacacacaacgaaaagttcgagatatttctgccgcatcagctcctcaagttcccagtagcctcgcgctcagactgattagaccataagaccttgacatacttaattgatctcttcctcaaaacacgctccgaggattccaagatgcgcaccggacggcactctagagtcagatcctgctgcacagcaattggttccatttcgatctgatgatccggatcccgcaagaacttcctcaacatagagacatgaaataccgggtgtacccctgccatggaatccggcaattgcaagcgataagccaagttgcccacccgggccaagatagcaaacgatccaatgtatctcgggctaagctttccggagacaccgaaccgaacaactcctg

SEQ ID NO: 11297 - DNA, 620 bp, Zea Mays
tcttgaaaaaggcatatcacagattctccacacatattgcacaataattcaaacccattctactgccacaaaaaaggtgaattggtgtgtgccagttttgccttcgaaaaccaatccaatccgattctatcaaacttgcatagttgcatagagttaaaatttatgggaaaaaaatccttcagtgtgttccgtcaatatattacaaactgaaaaagaaatcaactaattacctctcacaccacatcagtgttattaaaactacgtttaaacggtgtttatacatcaaaacgctaattagagattgaaactctgaaatgttaaacaatatggtctaaaacgatgttttacaacgtttaaactcaatggcttggcatttaagtgttctaaactgtaaaacacgacgttttatgtgttttaatcattagctactttggtcccagtccattagttacttttgggcccagtccagtctagtctctacgtgcttgccctactcccctgacttgaagtccgatggctagcagcacgcgtgctctcctctatgctctctgctgctgtcaccagaaggtgctgatgctgtcaaccgctgcaccatgtgcgccctctccctccttgtcgag

SEQ ID NO: 11298 - DNA, 477 bp, Zea Mays
cggacgcggcacacctcattcctcgcatacccccgctgaccagaccccgtccttagctccgacgagctctacgccgcccacccaagccacccgagcaccagccaccacgaccagccttttccagagacccctagcctcacccaagcctctggacagcttccccgagaagccgtgaagcttctccaagcaaggattgaggccctacctcaccggaatagcgagatcaccgtcgtcggacttcggccgcccgccaccgcacgtagaccgagctatcaggtgaaccattcttcaattcctcgcgcccatgccttccctgacacctaatgaagctcactgactggtttaattgaactctaccaccctggataggccaaagcccttgccaccaacgagctccccgcctacgcacgtggaccggtctactccgaccatccccggcgacgatccgtacatcaacgtgaccgtcatgacctcccc

SEQ ID NO: 11299 - DNA, 311 bp, Zea Mays
cttgggtatagtgctaagcacaagggatatcattgttgggattcaaccgctcaacttatgcgggtgtctcgaggtgtggtttttgatgagtctcgtcctttttaccctcctattgtttccccaacatctcttgttgacccacgtcctcttgtttatatctaatcctgttatgatccgtgtgttgtttcccgcttgacgccttctattgtgctttcttccgtgtcttctttggagtcttcggctgtggtatcagactacactgaagcctcctgtgacacatgtctatacacgatgtcatctcttgaatgttt

SEQ ID NO: 11300 - DNA, 437 bp, Zea Mays
cagcatctagcacgctggccattcttcttttccttggagttgctgcggggatgcttgatggcttcgccagtgctgttgtgcatggtgggctcttcagtttcgactctttagctggttttgcctcagcttcgactggcacagagcgacttggctctgcaataggagcagccccctcaactagctttggcacgtcgaccgtttcaattcgcttgggccgacgtgtcaaaactttaatctttttttatcgcgacgcactagaagtcgcagaggtaacaactttcctctttttcccttgcttccgcgaaggataacagtaatccgggtacacaaacccgatgacatcgaacactctatttaatctcttttttccacgagctccgaaggcagtcgtcatggcttcatcttcggcctttgaatatgctccaagtagctcgtcg

SEQ ID NO: 11301 - DNA, 556 bp, Zea Mays
gggttactgacgggcatcgaagttagaagcccacttgaacgcctatacaatgagggacaggggcccaacctgtcagctctgtcctccccgcaactgtcgctgaacccgcacacgcacgcacgccgagaagcccggccacatcgcgccccacgtccctcagctctttttgagccctgcgtgcacccgccctctctcccctgtctcatttcacccgctcctagcctctctcgcgctcaatcgtcgccgcccgagctcaacggtgatccacgcccgccatgtcgaccacctggagctccaaacgccgcgccaagcctctcgagcatcgtcccgaggtaaggaaccatccccgcactttcttgccctggttttgttccctctgcggtgaattagtgctctccgaagtcgctgcgctccggtccaccgcgcctgctcgacgtccagtcgatttagccctgccccgtgcatgtgttttggccctaggtgtcccacacccctcatcggagcttgcgccggcttcggcacacccgatcacccctccccatggccgagattgctc

SEQ ID NO: 11302 - DNA, 647 bp, Zea Mays
cggggagcgtagggcaaggcctagacacgtgtcagcaccggacccttgctcgcgccggggtcctctccgtcttgggaccttgctaaggcccgaaccttactcggagggacctggggccctcctgagggacccgacatgtcttcttgggagctccggactcgtacgcacaggggtttggtgtccctttacggaggtccagacccaataatgcatcgtgggatgtattatctttcctcgccacgtggtgcccttagacctgcccatgtggtggggtcgggtgccgttctccgtgtgacctggagacattgtacatgtatagcgccttcatactgtagaagagggtacccctgattcagggtaccgacagtggcccccgggcccgcctcaggggaggatgcgagtctgtaggtggggccaaagcttgattagcggttggtccgctgctcctgcgtgcctactggcgtgattactgccggcccgcctatggtcatgccgactgccacgcctattcccacggttgactgacccgtgaccttcgtacttaatgccactgttgggccacgcgcgggatgcctcgagtcgctgcactggttctaaaaacttatcttttcagtcttccgcgacggcctcgagaagacgtggcattg

SEQ ID NO: 11303 - DNA, 412 bp, Zea Mays
taagatttgaaatggtacatttacccaaaggtgaaactcatattcaaattcaaattggattcaaaatacttataaaagaaaacagaaaataaatcataaaagaaaaagtaaaggaagcttacctgggccggcttaccacatttcagcccaccaggaaaccccttccgcgcggcccacttctttcccctccccttttctttggttctggtcacacctacatgtgggccccacctaccagacggattccacgcgacggaatctcctcgcccgcgtaacaaaccttctgcttctccctgcgcagctccgattctcctacgcatataggtgaacgtccgtgaagaccgcatcgtccgcgcaacaaaatcccccacgctcggagttctctggcaccataaagcgcggtgtggccctt

SEQ ID NO: 11304 - DNA, 708 bp, Zea Mays
agataagggggagtatacacagttttacgggtcggggcgattgcagcgagagttttacggtatcggctagcgatttcctcgttctatacgagttaacaattaactctttgacaaacgtatctttgccgttggaaacagttggcggtgtgttctcgaagatccagccattcctgcacttccaaatgcaccacaccatcgttactatgatttccatgcatggagcacagttttgctagttgggtcttgattctttgtaatgccacatgaaggttcgacgttctaggcggcagaggatcccgattatttgccagcattgcttggcgaatccgaatctgaggaacaggtgcgacacatatgtacaaatggaaaaacatgctcatcaaaaacaacgtcgcgtgaaatatagattcgccctgttgaaatatccaggcacttgaatcctttatgcatgttactataccctaaatgcatgttactataccctaagaaagcacaccgggtagacctaaattagagcttatgctggttatatgggcgcaagtttggccagcatgcacacccgaaaatacgaagtgaggagtaatccggagtggcacctgtcaaacttgtgcaagggagtgtcgtgggcaatagttttggatggtgtgcggtttatcaaataaacagcagccaagaaagcatgatcccaatacttgagcggcatagatg

SEQ ID NO: 11305 - DNA, 436 bp, Zea Mays
tgggtgccggacttccctagggccttcctgggcgattgcgcggcgttgtcgggggtggtggtagcccatgcctcggcggaattccttcaatccagtgttcatcaccgagctgctgcaccatggttgagggtctcctcggcatgaaccctggtgagattctggacccctttggttcgcttgctggtccgctctgcgtagcacaaatcataggggaaagtggagctctgctgctcgactggacgggagcaccggtgatggtctccgccgttgggggcggccgccgctggtgcgggatctgctgcgctcagctaccggaggtgggagacatgcggggaccgttgatctcgcgttcagtggccccgatcacgtgtggatgaggagcggtcacgattagatctgggttgtgaccggttggccctttgatccgtgtcgttgg

SEQ ID NO: 11306 - DNA, 365 bp, Zea Mays
cttgtttcaactattgtgcaatgattcctgtatctgttttgtttcatttatcctgacaaactcttccaattgttcttttttcccctttctttcctaatattacaatgccctccttctattggaacatattgtcattatgcatacacttatgagtaaggcatttagctccaatttatctatgcagtatcctttgtattcctaaataacttgttcctagtggaacttctagaatctatttagtaatatataggagttaatgaaatagcgtacattgtagttggatggaacagttcatttttaaccttactatcacgctgatttgatcttcctccagattttttgtttaaccatctattgcatggcag

SEQ ID NO: 11307 - DNA, 601 bp, Zea Mays
atgcgcgggattcctcgagtcgttgcactggttctaaaaacttatcttttcagtctgctgcgacgaccccgagaagacgtggcattggcgcgagcggcggtgcgatttttccgcacccggcaaccggtgcgccggttgtatgacatgtgggcctgggcccccatgttggaccgccagttgcaacgaagctgagggggtgcataaccgcggggcggttgtacgcttcctacgtggtggttctccttttcgaccgttggtttcagcgaagatgagggagcgcttaaccgcggggcggttgcatgctccttatgcggcggttcgccttcctgaccgctggatgctccgaaaatgaaggggcatataactgcggggcagttgcatgctccttatgcggtggttcgccttcttcgtgcttcgggtcagtctgtatgacatgtggggcctggcccccgtgtcatagggtaggaaccctggagtacgtcgagggagactttgcccatgacgcttcggggggcgagtggggagatctgcctttaaaaagggatcgatctcccgggcagtaaccatgccttgctcctctcgcattccttgcgcccttccg

SEQ ID NO: 11308 - DNA, 491 bp, Zea Mays
agcccgggtcaattggtaattctctacgacttgaacttgagattctttggtttcatatggtaatgttctattggcatccccttcacgagtggtcttttgtttcttgtttgaaggtttaggagcagccaaatcatctactttaccaagccatctgggttgtaatctgagcttattccagcagtgcatgaattgaaatcctttttcatgttcatcttcggacttgtacaacgcacatgcctgtgcaacctgggaaaaacatttgcatgtgttaggctcaaatactaaaaatgaaagaaaatgtgatactgcatgatgattaattaccatgtcttgcattgtagtaccactctgtcgtcttaactgaatccttgttaaacaaccacaaaacttgttaacacatttctgaattgtctcccatcgatgcattagagaattaacagtacgttgtgattggcatggtttatgttcattgaagtactcatagatacgag

SEQ ID NO: 11309 - DNA, 434 bp, Zea Mays
ccgggctgaaggagaagtccgacacatcgtcgtccagcggcggccgcaccgacgctcaccgcgaccttgatcgtccaccgaagttccagaaattggacttcccacggtacgatggcaagtcagatcctctcctcttcgtcaaccggtgcgaatcatactttcgccagcaacgtaccatgggggaagaaagggtttggatggcctcgtataatctcgagggcatcgcacaacattggttcatccaactccaggacgacgaagggatgcctccatggggtcgcttcaaggagttgctccaactacggttcggccctgctcttcggtcggcgccgttgttcgaactcgccgagtgccgccgcaccggatccgttgaggactactccaaccggttccaggagctgctctcacgagcgggaaggctggacaagtcccag

SEQ ID NO: 11310 - DNA, 564 bp, Zea Mays
acacttccatctggtttttttgaaccatttagtctccaaggacattggccaccattcccttgacaatacaccctgtatctttctttgtctgactttattgttccaagaagaaattcttcgtttatagcatattgcctcacagctagcctgaattctaccattgaggggtagataatacccaaatgcatctctggacgatctacatcatgtaatatattgaaactttctggaatatcgtcgtcaaccagcccgtcagcatcatagtcattcaaatctgcaccattactctgcggaccaaaacttgattgtgaagcaaattgtgctgttgcaccatgctgtgaatcatcctcatctctaagacccaatgtgatgtatatctcatcctcatcaatacgtccaattccctcatgaatttcatgctcctcaatttgtagcatggaccaatcaaacaatgttccacagtaaaaccaatgtcttctctatcaccagtaccactgccactggattcacttcccttgtcgatgcctgtacttacaatttcatcgtccatgatcgcttcatagt

SEQ ID NO: 11311 - DNA, 847 bp, Zea Mays
taccaaactagagtcttgaaaaatggctgttcgcctagaaaaacgtgtgcaggtcacgggagaccaaaaactgccttaccggctcccgaggccaaaaacgtgggtgcttgatcggagtcatgaaaaatggttgttcggacaaagacagttcgaggtatcatgtattcatcccatttaggactaccgttacagtaatctttaccggctgtttggtttggggagtcaccccgtctggcatcagtgcgtcctgcatgtgttagtccgattatttctagaggaatgagtggatgccgtgaatatactggaggagggtgtaatcttatggcagacaggttggttccctttagcaaaccaaacaatctatcgaggttcggacgcaggattggatgactcctcacggtgccattccgtgaaccaaacacgttgtacattaccatgttttgttactaactcatatacttcatgtgctcaggcggagtacatgaggatcgacaccgacagctacacgatggcctgacatatggaggcgtacctgttgtggctcttcgggtgggtcatgttcactagtactcacggtaactccgtgaggaaggacatgatccactacgcgagggcgatcacgaatgcctcccttagccaggtttcccagtactggggtaatgtcgtgctaggcgcgacgtatcggggcctctatgatggctgcataaagaccgatcctttggccatcttcaccggctgccctttactagtacagctctagtcatatgagaggtttttagattggacagcccgcgatagacctttctgcgtacggccaggtgttgtaccaccgagacgaggtggacag

SEQ ID NO: 11312 - DNA, 449 bp, Zea Mays
ggccacgacgcggtgcctcacggtggcgcagatgacagatttgggggaaaaaaatccaaattcgggcgctacagtggatgatttgaggtgagaagcggtgtgctgggcgcgtaacaagtaggcggagcatggggcgcctccaatttatagaccccggctgagcttatcacgaattttggattgggatcgagttcactgtggcctggatatttttacggtggcctgctcactgtggcgcgcgagagggaaatggttcaaggatggtaaccggttgcttgccatgacctttacgacgtgaaggatgaaccgctgcgtgtcattgtcggggaaacggtgagctccggtgatgccaacatgaccaaccgcggcgggtaagggggaggcacgacggccggaccaaccagcgactagattcacccctccccggatctcccccccggcggttatcc

SEQ ID NO: 11313 - DNA, 509 bp, Zea Mays
cgtaacactgcattcgtgtagcttgcgtccagttggagtctggggccctgaatcgcgaggtcgggttactccggccgtggtgaccgccgcgagcgcgggcggcgctgctgcgttcggcgagggagagaagacgggtcgtgcgccgttggatcgaaaaggaacgacacagattagtttgggcgtatcgattcggccgggtgaacatggcctgtctgatttcgatcctgcgtgccctgattgattttagttgtttaaaatctatgccgtagatcttgcatcctggggttctcgtagcgtatcggttcgcggagggacggatctaatccgggccatccgcgcttgatcggacggccgtcaagacttcatacccgttcggttgcgctatttgcagaaggacccttatagtattagagaatagaacccgccgtcctattgcgactgtgcgctgtgtctgtagattcttacccaggcgcccctgatctttctggtaattgaggcccagtcccgag

SEQ ID NO: 11314 - DNA, 571 bp, Zea Mays
gtctttctgaatctgcactgtctcttcttcgaggtgactttctggtgcttgcaggcatttgcggagttgggatacgtggaacacattgtggatgtcggacatggattctggtagttccagatggtatgctgcgggtcctaccttgccaatgatgggatagggacctacaaaacgtggggctagcttccctttgacttggaacctcctgacaccacgcattggagaaaccttgaggtagacgaagtctccttcctcaaatcagagttccctccgcctgttgtctgcgtaactcttctgccgactttgagcttcaagcaaccttctgcggatcagtgcaactttctcttccgcctctttgacaaaggcaggtccttctagtgcttttccccccacgttggaccacatgagaggggtctggcattttcgtccatacagtgcttcgaatggcgacatcttgatgctggcctgatagctattgttgtatgataactctgcgtagggtagactggattcccaacttctatcaaaagctaacacacatgctcttaacagatcttcaaggactttgttg

SEQ ID NO: 11315 - DNA, 332 bp, Zea Mays
gtcactttgaagataatagtcgagtgatgatgtggcacaccggcgtttttagaagtaaccgctgggtgatgacatggcacgccgatgttttagaagtaaccaccgggtgatgacatgggcgctttttggaaacggtatccgacccgggaaaaccccatatgtaccgcgccttcggccgcctctgctttccgtgccctagttcttgctttcctgcctccagaccctctctgtccttttgcaattcggctcccactctgttcgtcggtggagttgagatggcgcccaagcgaaaggcctcgagttcatccgctgcggtgattccccctatcgac

SEQ ID NO: 11316 - DNA, 491 bp, Zea Mays
caccgtcatcggatgacccggctagctaagttcatggccatcccgcactacacctacatgattctcaagatgccaggcccgcaaagaaaccaagaaggccatcctcgacctccccaattcagatggccctcgcctccaacacctcggtggcacagaagcagctagtgacggaagtgaggacactccggaagcacaacctcgcgatcccagcctcggaggcaatcccggataccgcaacacgatcgactgaagaaaccaagaacgccaacctcggcctccccaatgcccacaagacagcgtccatcagctctagcctcaacgccgaataggaaagcacgttcatccggttcctataggataactaggacgtgtttgcctggtagcctacggacatgctcggtgttccctgggagctgaccgagcacaaattgaaggtctaccatcaagccaagccagtccgacagaagctgcgtcatttcactccggacaag

SEQ ID NO: 11317 - DNA, 413 bp, Zea Mays
cagtgaggtagatagctttttagttgttattatatgtactgaatgtgcatgtcagccatcgtgctattcgtctgttagtgaatgtgtatgtcagtcatcatgttgttcgcttctttgcaggttttagaaacctccccgtttaggggaagtgtcgtcgaatttttttactgagattactatgttacttttttgcagccaggagatccttcgattccaccgccaactgcaaattgactccaccgtgacctcaagtataccccattttcgtatcgtactcatagattacgtaactctgttagacgtggttagttagtagttagtatttagttattagttagtaattagctaataattaattattacttagtacatagtgttagacattagtagatcgatattgagtaatgaatccg

SEQ ID NO: 11318 - DNA, 509 bp, Zea Mays
ataaggaacgattgtcctgcgccacctctaattgatgtaggagctccctagccatctcaagctgcagcttaatcctcccaacttttttgtcattccagctctgcagactcctagccgttgtctttaatttgttggccaaagtgatgagtgggcaagggcctgctggaacagacgcccaagattgagctaccacgtcacgaaatccctccatcctaggccaaaatgcttggaagtgaaacctcccttttcctctgctgaaatcacgaaacccaagcaccaaagggcaatggtcggagtcatccgtggctgagctctggagaagagaatctgtgaattgctcctcccaatctgttgtgcagaaaaccctatccaatttgaccagggtaggattagagtgtccgttcgaccatgtatatttccggccaatcaacgggatttcattaagagcaagtcatttgcccatttcctgaacctgcccatcatggcatggtctaagttattgttattct

SEQ ID NO: 11319 - DNA, 531 bp, Zea Mays
cggagggaaggacccctcgacctctgataccaaggcgtctgccaaggtgccaaaggtgcagccgtccggagcagacgacggacccgtaaagaccatccaggtcgcgcgcggactcctcccagaccacccgcatcgtgggcaatctaggggagaaataggaactcgcgctcgtcgccttcctccgggaaaatgtcgacgttttcgcatgggaaccgtcgcagatgcctaggatccccagggaggtgattgagcaccatctgaagatccaccccgacgccaaaccggtgagtcagaagccttgaagacagtctgttgagcggcaggacttcatccgcaaggaggtccggaagctgctagacgccggcttcatcgaagacgtacatcaccccatatggctagccaacccagtcatcgttccaaaggcaaacgagaagcttcagatgtgcatcgactacaccagccttaataaatcttgtcccaaggacccgtatccacttccacgcatagatcaaatcgtggactctacctccg

SEQ ID NO: 11320 - DNA, 758 bp, Zea Mays
gccatatgggccaaccttagaatagtagggatttcatagaagcacccctctgatcggtgagagcatgcatgcatcataaaattaagaagctaaggaaaaatgcatccaagtatgaatgtaacaaacaagggtaataatgaataatgaaatgagtagatgaatctaatttaacccacctccttttaacaacccgggcacatatttttctttcctctgccatgacacttacatctaaccctctttcatagatgacctcacccacccccatcaatggaggagaaactcgtttcagttttgaccacctttccaacgaggggtttccctccatcttatgggaggtgctctgctctgccggttaccctacaacccctctgcatatggtgcagctatatgaggagcatcgggtgccacgttgtagggtttggctgaccttggagtctcaccctctgcagctaggttggcgttcccttgacttcgagcctatggggttcagggcgaacgacaccactgaggctgcagcgctaaaagccctgacaaccttttgtaggtatcatctcttggagatggtgatgcacccactaggactctttcccgccgagaagagggatgaccccatgtggtgcaacagagtgagccacgtgaaggacgtgtgggctatgcatcccgaccaggttgggaggatcactgttcagtgtatgagcgcactgtatcgcctacaggccctgcagagcaacgccatagcacacctcacggatgtt

SEQ ID NO: 11321 - DNA, 562 bp, Zea Mays
ggcttaggcagctagttgcgcgcacgacgcgtggggcgttgcgcgatgagacaaggcaaaacgaggtggttatggctgcgtccgtgtcattagcacgcgaaacggacgacagttggcgagacgaagctgacacgtgggctcaagctagtaggatatgcaacgatgaggagcacacgtggccagagagcagaagttgcgcggcagagcgaggtaaggcggggttgatgggggtagacgaaggtagtgccgaggggtagacgaggtagatgtcgaggatcaccgtcgcgagcagcatgccgttcgcgagaagaagcggttcggtgatctcgcgaaaaagggcacgggatctaggacaggctctacaagaggaagaaatatatatatatattatcgagtttccaaaattttatggtcctcgcaaatactaaattttaggtattactattagaaaaacataaattcatatttaatactcgaagaaacgtttcgaaggttcccgtaagtttccggatacataaacaaaataatacgatatagtttgaagacctttgcactcataaac

SEQ ID NO: 11322 - DNA, 1276 bp, Zea Mays
attctgacaaatttttcgaaccttctctgaagtctgctgaacccaatcaggaccaaccagggatctctctcccaaggtctcccagcacaaaggggagatacactgcctgccatataaagcctcaaatggtgccatcttgatgctagtctggtagttgttgttataagcaaactctgccaatgcaagatgatcttcccagctacccttccaagacagtacacaagcacgcaacatatcttccaaggtttgcatcgttcgctctgactgaccatcagtctgaggatgaaaagcgacactaagggaaagcttggtgcccaatgcactgtgaagactctcctagaatttggatacaaatttggagtctcgatcagaaacaatggacttaggcaccccgtgaagcctgattacttccttcatatacaaggggaccaattctgaagctgaattggtggtcttcatgggaataaagtgcgcagacttagtcaagcgatccactaccacccaaatagcatccctgccccgaggaaaacgaggtaagcccaccacaaaatccatggtgatatgctcccacttccactccgaaatttccaatggcttcagcatacctgcaggcctcttatgctcggccttcacgcgctgacatacttcacaggcgaccacgtacttagaaacgtcaacattcatccgcttccaccagaagttttgcttcagatctcggtacattttggtttcaccagggtgaacggtgtaaggcgttttatgagcttctctcaagatatccatcttcacctctgatttctgaggcacataaaggcgacccctgaaacgaaccaaatcattctcatcaatggagaactcccggggtttaccatcgccaaccctctttcgagcttcctgcaataaacgatcctgctgctgagccgcacacactctctccatgagggaagattgaataagcatacgagtctcctcactagcggtgccgacatagcaaacagcgatccccaaacggtccagaccagcaatcaactgcaaggccacttttggaaccccagacctgctaagggcatcagcgaccacattgccttcccggggtgataatgaatagacaaatcataatctttaatcaattcgagtcaccgacgctgcctcaaattcagctccttccgagtgaaaatatacttgagacttttatgatcggtgtaaatgtcacaagcctcgccataaagataatgcctccacgactttagagcaaaaaccaccgcggccaattcga

SEQ ID NO: 11323 - DNA, 397 bp, Zea Mays
cacaagacaaagaacgcccaagcgaagaaacacgaagacacaaacaaacatgcacaccgagtgcaccgaatgtatctagtggaacaccagacaaatgttgtgcatgtactaaagatcggactgaagacaaagtgcaccagatattagggtgtgcaacagacaaggtgcaccgaacaaggcatgcagagagccctgcagcgcgtatgtgggcggctacaacacaccatacatgtccagtgtagcaccagatcctgcaccagatacgacactcagtaagggttgcaaaatacacccacgttaggtataacacactaaacatgttcgatgtcaacaacggtggcacattggacatgttcgttgcgcacaaaaatcattgctccctttcaacgactctttt

SEQ ID NO: 11324 - DNA, 399 bp, Zea Mays
accctcgagatcgcgctctaaggtcgacgaggcacgggatgacctcaacccagcatcaagcacgtcagcgcaaacctccatcacaccatcatccactggctccgataacaagtcctctggaaccatatcctcaagagtctgatcaaagttggccagggacagttcgtgcagaccaatgagagcagacaaagtaggagagggaactccactactttcaccgctggcgatgaactgccgactgtttttctgagtcaaaggaacttcatcttcttcctcctcgtcatccacattggcaacacaagcagcacccccattgggatcagcaacagatggagcacccacattgggatcagcagcggattgggtacacccattgggttcagcatcagtaaattcggt

SEQ ID NO: 11325 - DNA, 351 bp, Zea Mays
ggtttggataagtctagagaaaagatttagacgagagaattgaggagagttagttagataagtccaagattagatgagagtttataggaagagttggttagcaacagggctatatgtaagccgcatggtagcaaataataatcaagtaatttgttacctgtttaatcccctcttcccagtttctaacaagcctgcggcagaggtgattaacctccccggagaagacggaccgagactacaatctccgtagtcgagggccagctaccctaggggtcgacgcccttgacaacctggtatcgcgatcccggtgatcctcctccgctcgcacctcctcgccaccaccagccgtcg

SEQ ID NO: 11326 - DNA, 565 bp, Zea Mays
caatgcgaaggatcgacgccgtatggccttatcgtgatagcgcctcagagtttgctgataccgtgctgattgaatcaccgtgtttagtcgttcttcttcgagtatgtcgacatcctccaacctagtagcctcagctcctgctatgttttcaaagatcaaccttggtgctccaaactttagatcagcatgtagcactgccttcgaaccatagaccataaagaaaggagtgtttccatgcaaggctcaactaggttgagttctcaggctccaaacgacgtatggcaattccctgatccacttccctgtgaacttctcatttttgtcgaaaactttcttcctgagcgcctctaatatcatcccgttggctctttctacctgcccgttggctcttgggtgtgccacagaggcatatttgatctgaatgcccttttgctcgcagaagtcaaagaactctgaacttgtgaagttggatcctaggtcggtgatgatgttgtttggtattccaaacctgaatattatgtcttgtatgaattccactgctttagccgaagttaaggaagcgatg

SEQ ID NO: 11327 - DNA, 868 bp, Zea Mays
gcaagatcgatggtgcagtggtgttctcgatggaaggggaaacttcggtgagcaattcacgatttcctatcatgtgaccgggtcagggaatgggcgcatggggtttggtaccttctggtgcacatcatgttgctgtatcgatgtcgagggagcattagggttcaccggtcagtgatggcgggcatggtgggactcgtgtcaccatggttcgatcaactagggacgatagagctctatgaagtttcacaacttcctcacactctagggatcatggtgacaaaggtggggaggacggggcgtctctagtgagggtggaatgcagttctgtcacgtgggaatagtggcggcatcccttgtagtgagtaagaggtgcttgggtggctgggagtgcaatatgagggaagtagttggtgcgggggtgttccttttataagggagcaccattgattaatgggagacaatgacagagagggtggtgcgaccatttaaagctcgaatgccgctaggggtgctcagggttaaatgatcaggcatcagggaggaaaggaagggataaaatttctttactctagttgtggggtgatggggacaagggcagtgctcaagcaagggagggcgagttcagcgcagagatgcctgtcgtgacacgtggggggtgggagtgggaggttgaggttaacaggtggggttatggcgtcagcgagagagagagcgactgagggggagagaagtgccaacaggtggggacgaggtgtcagtgactcacgggcacatgttagtggtaagtgaggtcgggaatggtttgggctgagtggatctaggctggctcggacactgtgctgattcttttatttttctccatttccca

SEQ ID NO: 11328 - DNA, 485 bp, Zea Mays
ctacaactccaccatgcctgggataaacatggagatgtaaaaatcatcccctagctgactcagctgcttggatgcctctttgctgtcccacatgcagaaaaaggagttggccacatcttttgtcttccctgtgctttccccatacgtggtgctcatgcagaaggattgggggacgtattagtgtagttggactcttgttaaactctagtaaagaccccaacagctccagctctctaaactatttaccttggtgagttatggcaccaaattgaacaccctgtgtttctatcggtttcccgcctctctcaccgtgccataccattcccatacacctatgctaagcccttaagcttttcccagttccttggtctcactgcatcagcttgaacacgagtttgccttggagggggtgaccatacagggtgactgcccacctccccgtggtcagccttccctagaaggtaatatgttcgagttgttcgcgt

SEQ ID NO: 11329 - DNA, 682 bp, Zea Mays
ctgacaatatttagagaaataaatacataatgtgttgggtatagctagttaaatggttaggatgacatttcactattaaaaccaacaaccagtgccatgaatttacctgtgaggttccccaactatatagtttcgtggactggcgacatgctcggttgggcgaaccatcgtgctaacattgatgccggaggaattcacaagagcttagctgacagaagagataaagtacaatcccagtcaagcacgcgagtcaactcatcagagaatattttgctgccagtgaggccatcttgaggagcgactggcaaactgaggctactggcacctccggtacgacgctgctagtaaaacttatttcaccctcctataggaacgggaagagacaacattctttcgtataagcagacatagagccaacattctttcgcataaagttctgaaccgatggctatgaactattctaaaaattgagttgctaatttgcatatagatatataattcattatgatgcgaaaacaatttgcaagtatgtgtgatatgttgttttactaaacgacttgaccaatctatattttcggtacaaaacaactaaaaattagttagcgtagttataattgatattaaacacaaagaaaatcatacagagcatcgaggtagcaaactcacgtaaaaagtaacatgg

SEQ ID NO: 11330 - DNA, 460 bp, Zea Mays
ctcagagttgcttctatgaacttaccgggataggaaggggtacttcttcagttatagcaaagttggcgtccctcgggttggcatatttccatcgccttgaggggttcctccctgctgggggagtggttgcggatcccctcttggttcagtactttgccgcaggattaggtcccgaccctgggttccctattatgcacgaaccgtcggccatagttcttgggcgcctggttacgatgtgcatttcgggttacaacttgacacctaagtccgtcgcttgagtccacatccttgtgttgtagtggcccctacacaaacccatcgaaaggttggacccgtgggggagtccagaagagtttctgggggaaggcaggctttggccccgtaggccaggcagcacggggccccctggtggtccgtctagttgccttcaccggaattggagtctccagtgaagacatcc

SEQ ID NO: 11331 - DNA, 381 bp, Zea Mays
cacacccattggggtcaagtcagtaaattcaggcacatgcacttctgcagcagcaggaactgaaggaccaacgtcccgatccaaactagatactcgccgaagacgtctctttttctttttctgctcatcagcagaaggatcaagttgattggctcagcaagggcgttttgggcgaacactgacaggtctctgaatatccaaggttgtatcagtttttgggagaggcgccaccaccaatgtcccagcaggagcagcatcagaagagtcctcagccagcaaatcaagcataacacttatctccgcgtcactaggatccaaaggcacctcaaagtggacctgtcgttcatcatcaggaattcccccgagcgaggcaaccaagag

SEQ ID NO: 11332 - DNA, 932 bp, Zea Mays
ccgcatcgacggtcttcggcattcgaccacatcgaagtcaccgcgaggggcagcaccggcctccctcgcgtgcgacactccacacaaaagtctcctaagggtgcagccggactagcacaacaagtgcgaaaaatcgaagtcttttccaaaagactctctgtgcaaaagtcgcctaagggtgcagctggactagcacaacaagtgcgaaaaatcgaagtcttttccaaaagactcttcatgcaaaagtcgcccaagggtgcagccggactagcacaacaagtgcaaaaaatcgaagtcttttccaaaagactctccatgcaaaagtcgcctacgggtgcagccggaatactagtacgaaaaatcgaagtctttttctaaagaactccgcacagaagcctacgggaacagcctaatcaacgaaagcgcgcagcttcatcacacataattatggttacacacatacagcgagggcatcacacattacatcggctcaaccttcgggatgatacccatctccctatagttgaacaacattatcctcaattcctcactcgcaaacagacttcgcagctccccctcacccacactcgccccagccgacaaggacaacaattcccatttgccagtcccatccgcacgaagacgaccaccctccatctcaccatgatgacgcctttcaccacgcgacaactcacccactctccgtttcgccaccactcttcgccgccgacgcccagcactcgcacccggatgattcttagcacccatcacaagcggaggagtctccatcgcagccacatccactgccgcaaaataatccaagtcctcttccgaagacccctccatccacacaatcgaactcccagaatcatcagactcaaaaaacttagacacagaatcatcagaatcgccttcagcaaccacggtcaaag

SEQ ID NO: 11333 - DNA, 407 bp, Zea Mays
tgcggaaaacggaattgggggaagtttgaaattcgcgagctacgttgactaatcagaggcgagagctagtgttttgagtttgtaataagttggcgaagcaggccggggtatcaatttatagcagctcgaagcggtggctccgaattcgggaggagagcggagcacgactgtgacaagacattgtactggagggtccatcgtggcgctcaacaacatacaaacgcagggatattaattttaagtgtgccacaattatgactacatggtaaaggatctcagcgtggcgcaattgagctcaccagcgacccacgacgacatcggccgttcggccacgtcgcacggtcatgaggtgcatccgataagcccctgcccgcgaccgaatccatcccccgccagatctttacccc

SEQ ID NO: 11334 - DNA, 742 bp, Zea Mays
gttcgtcttccttttaatccttcagtgtctcgagcgtcaaacaactttgatcttatttattgtgacttacgggcatctcccattgttagtatctctggttacaaatattacttagttgttcttgatgactgctcacatcacctatggacgtttcctttacggcttaaatctgacatgttttccaccctgtctaactttttcgcctatgtgtctacccagttcggcgcatgcatcaaggctgtctagagtgacaacggccgggagttcgacaactctagcgcgcacaccttcttcctcacacatggcgttcagtttcgcatgtcgtgtccctacacgtcctcgtagaacggtcgagctgagcggattattcgtaccactaacgatgtcattcgctctcttctgtttcaggcgagcatgccaccttcgcattgggctgaggcgttacacattgcaactctcctcctcaacatcttaccgaccaagacactggatttttcgactctgcactttgctctcttcggcagtgcaccgtcgtacgataatctgtgtgtctttggctgtaagtgttaccccaacctttcgaccactgctccccacaaaattgccctgcgctctaccctctgcatcttccttggttattccgctcaccacaagggataccgatgtcttgatcctacctcaaatagaatcatcatctcccgccatgttctctttgacgagaccgcttttccctttgctgagc

SEQ ID NO: 11335 - DNA, 633 bp, Zea Mays
ctccgccttgctcctggtggagcacgtgggttgcgtgcccatggtgccaggcacgttggggacgacgaggctgagctcgccgatggtggtggcaaagaagccgagagtgttgaatgtgatgcggctccctagagcgaaggtctcacctccggcaaatgttgaggactaggacattggagtggaagcatcacttagtattctagcgctccactacctagcacaccaacggtcgtggttttgaaatcaggggacaataagatttgtgttcggtggggatgctaccacggactcactccgaatggttaatcgctgggactcgaacaagagatctgagacactagggttatactggtttgggttcgcaccctactccagtgtagtgctgatagtagtattgctttgagcatgttacaacaagtgtgcttgtgtgtgaaggaagcgggggacctgccattttatatctcaagggtaggaccttacagaggagtctgtttctacaaatatgagggccatctgccctcttggtttgacatagtgctcctgatgcagttcgtagggtcgtgcgaagccgcactcctggtgcagtgtatcgtcttgctcgtttgtcgtatgcgtccctgtagcgagtattcc

SEQ ID NO: 11336 - DNA, 731 bp, Zea Mays
gtattttctagtctccaaatccatttagccaacaaagcttcattcattttttgcaaatccaaaacaccaagaccacccatatttttgggggagcagactaaattccaagcagccaaatgatattttttctgatcatgacctccctgccataataatcttttcctgaagatatccattttttaacacaactttggggcatttatacagggaaagcatatacaggggaacgttggtgagactgctgttaagcaagactaaccgacctcccaaactaaggaaccgaccttgccaggaacccagtttgttctcaatctttccaactatgggatcccacagagaattgcacagttttttgttatcaataggaacccctaagtatttcataggaagaccactgggaggacaggtgaagattttagcatacagatgttctctgttgtaggcatttcccaaacagataatttcacttttatgaaaattaattttaaggctagaaatctgttcaaagatacaaagaataaacttcaaatttctagcattttccaaatcatcctgaaacagaaaaatggtgtcatctgcatattgaagacaacagcagccaccagggacaatatgaggaataagacctttgataataccttcatccttggctttttggatcagacaagcaagaccatcagcagccacattaaaaaggagaggggagaaaggatcaccctggcgaacacctt

SEQ ID NO: 11337 - DNA, 370 bp, Zea Mays
gatcaatgcttggtagagcaacaaagtttgatggatcgatattatctggctgatgatctaaccattcctcatcaccatgaagtgatcgaattagattatggaagatggcagcagccataggcatctttacttgattttctagtgtgtggaacgtggcaacttttagaatggggaagcgcttcttaagcactcccaaagccctttccacatgattccttagaaatgtgtggcagtggttgaagagttcctttgggttttgtggtcttcgatgtccaaccccaaattctttcaagtggtaccaaactcctcagtatggagcaagaaaagatggagtatttgcataccctccgtcaactagatagaattttcc

SEQ ID NO: 11338 - DNA, 781 bp, Zea Mays
cttatgggtactatagcttgggctataggtctttttagcctggacaaactacagtaacctggtagagctatgtttgatgaataattttggtgcagtaaagtgggcatgtggtgttgggaataaagagaaagggagagctgaacttggggattcagtcgagtaaaacagtggcagccatttcagaaaaatttgatggaaatatcttcatccatcaattgatctagggaattctatggtgtgccataccaaaagagacttatgtgaagggggagtttatctgttacagtttcaccacaccgaggataagtttgagggggtgcaaatcctatctacttggtgactcagctgctaactcttgccttgctgtcatacatgcagtgaaggtgtgttggactttccccctgtgctttcaccttatgtggtaaccatgcagtggatgtgtgaagtatgtgggctctggtttagtgttgttaaatgtcccagtgaagcaccacaagttcatttatgtttgtcttgccatagtgtgttgaacccaacaaactgtgctccattattgtgtcatgtcgattccatagcttctccgtcgtggataacctatcccctacaccttggttaagctctcaacctctccccagttctctggcttcactacaaagtcttcaactcgagttgttctgaagagtggtgaccacgcccacaaaaagagaaaccttcccctcatcgtggctagtatttctcgaagggtttctcggacatgtggtgagtgttccgtgctcatctt

SEQ ID NO: 11339 - DNA, 461 bp, Zea Mays
gtttctttgcgacagatttcgcaccacaaagacttaaagcactccctagcatgatgaccatctaaaccacatttctggcaaaaaaaccctacgcaccaaatcattctcagattttagaatggggggcgggggggttttgagaatacctggcagaccggcatcaccgggagtggagacaggaatatcatctttgacctcagattttccagatccagtcttcaatcgccagctgaggttccgattctttccccacgactgcgaaccctgcggcgcctccttcggaccccatcgatcccagttagggtttcgatttttcgaatccatcggagccgacacgccagagcggcccggaagaggccactcctcaccaagcgaaggcgggcgaaacggagaggagatccaacccccacagaaactttcgcgcgacgaactcggaagcgaccagaggcgagaaagacgcg

SEQ ID NO: 11340 - DNA, 632 bp, Zea Mays
cttttccgggttcagcttcgtgcgcgttgcccgtagcttgtcaaagaccagggttaagtcttccactagggtcgaccctctcttagtcttgaccacgatgtcatcaacgtatacctctatcttgtccctaatcaggtccccaaaggtcttactcattgcccgtacaaatgtcgacaaggcatttttcagattgtaaggcattacaatataacagtaaagcccatccatagttacaaaagcggtatgctccctatcttgcctagacatctggatctgatggaaaccagagtaagcatctaggaaggacaggaggtcgcacctagaggtagaatccacgatttgatctattcgtggaagtggatatgggtccttgggacaggccttattaaggttggtgtagtcgatgcacatttgaagcttcctgttagccttgggaacaatgactagattggccagccatactgggtgatgaacctcttcgatgaagccagcatgcagcagcttccggacctcctcacggatgaaattctgccgctcaatggactgtcttcgaggtttctgactcactggtttggcatcagggtagatcttcaaatggtgctcgatcacctccctagggatcccaggcatct

SEQ ID NO: 11341 - DNA, 986 bp, Zea Mays
cgcatgtgatgaggtagctcatgttccccttgcagccagcgacaatgctagaagagctctggcgcgagaaggttgggttccttacggtaacctaccagacccttatcttccctctgtggttctcgatttgttttgtgctcgctcccgcacttagttttctgcaagctcttgcctccttcctggctccagcactctgtttttgcactttactgcccacacttgctcctgcacgcttgcccgcacttgctaatgttccattagcctcacggagcctaaacaacatgtcagggttctgattgccactaatcgagcctaggcgtacgcttagtaacattttttaaaacactggctgatgtggcagatgaaagggccccggtccaagaggaaggtgttagcacgggtataggttgaagggcctgtaacagggatgagtatgaagcagtgccttggggaagcaggggatagtgtgtgggaacttgggattaccttctgtggatgatagcacttgacatgtggatatggtctaccattaatggtagatcgggaacaacatcaggatagggggctgcatttttcgctagggcatggggatgatgtgaatggaggtgcttgatgccttgatggtctttttaatttgggattgagctttaattggctgattgctcatttatactcatattttccttttctggctgatatttatgtatgtgcttttaaaatacaaatttagtttagttgtgtatggcgccacctccctttgtgccataagtgcctaggtggtataaagtgggttatctccttaccacaccttactgccttaaaaacttcctcaatcctcttcataccttatccctccataatttcctacaccatctctatgctccctacccagtccctgcttaccctcactcgcgaccctgttcctcttacccatatgtgttcttctagccctacatgctcccttcgctgattagagatctgttaca

SEQ ID NO: 11342 - DNA, 950 bp, Zea Mays
gtgaactggtggcgaggcgagtggaagacggcggcctgctgctaggcatacgctggcgagccttcggcttatcggcgagcgtcggcgaccggctgccggtaacgacggcggcgacggcggactgctagttcgtccgcgacctcatgtagatggggccagtgcagttcagatcgcgaaggctcacgctggcccctggctggtcggcaatgctctccggtctggaccttaaggtaagtgagagtgctagagacatcatcaagggcaagggcccctggggcaagttctggatgttgagtacggatgaatcagaggacgattcgtgtggggaggacgacacatcaagcgacgatggcgtctctacacgagcactttcagtctggtcatcgcaagcctcaaattctgttgcaccaggggagtcctcagtggaggcaccattgccggagaaggtagcttctttggaaagatcctcggttacgccggttggtaaatgtgtccggccatggaacggcccattgccaaagcctcgaaggtctcctaagctaacccttggggatgccttgttaatggccaaggcgggcaaattccatggcggccggaagagaaccacggcgacgagatctggtccatcggagaccatgaggcggcaccctccgttgagcagcccgagaatggagaatacgaggcgtgggagacgaacggaacgatccaacgcatcgtcttcttcatcgaaacaggctgctgcagcagcatgcataggtgggcctggcctgagagaaagtaatgcgtcggtgggccagagtggagacgtgctgtggcgttgtgcagtccagaacgaaccatacaagccgcccgtcggtcttgtggttctttttgacagaacacacgcgtcgcttcctctctaccaccgagcgccaaagacgaaacgtctggctttagggtcccaatcctac

SEQ ID NO: 11343 - DNA, 1243 bp, Zea Mays
cgaaggggtatcacatgatctcagccgctcgatctgattcaacggccgagattaaatcttcctaactctgtaccggcacatgagccaaccgttggatcgagatccgatggcccggatccatttaaccaaacagctctcctacagtctaatcatatccgttgaacaccagatggatggcttagatctcggcttcaatgtgacaacatgagatctaatcttcaccgtccagcgagcgatcaacggccggtggtaatccccccttccctcactcttacgcgatcgacacgcggtggcccccgagcatcacacggtggttcttcaccggtgaattcactgccccatgccccagtgctccattcttcaatccaaccagtgcaatgcgaaccaagtagccagataatctatagaacacaagcttaccgtgagtcgtagcacacagtcccctgcccacggtgggtggcggattcacggtgctatcctgcctccgatgaggaattggaggtgactcagtcgatccacgcaccccaagaagctatgccctggttcccagcaatctgaagaacccctccaatcaccaaccgagcgaccaacgttagcgtaccgaggttttcccctgtggcaatcctgctttcttttctctctgcgcatggtgacagagcttggtgatttgttgacgtgaggcggtgctaagtttctgggagaggcgagcacgggcagatatatatgcgccacaggggagaatctggatagaggtggtgagcaaccgatggtgcaggcgaaggactacggcggcgacaatcttcttctctctccctctctttctgtctctcaaccgcggtggatctcggtgagctagggagcgcgagggcgcaaagttttatacaccgacccgaggaggtaacgagcaacaaccggcgacatttatgcagttggatcttcggtcgttccgagctcgacgccgcgcaatggggaggaaggagtccgacgcgagatccgtgaggttgaggattgtgctgacaactggggcccacccaatagagacacaaagtgtgaaacgtgggtgcagagtgcggatggatgaccggccgagcggctgagggtgtgggtccacatgtcggcgcagtggggaggattggctgggctggcaacgcgagtgagatgggccgaggagggtagattcggcccacgaggctggtaggtttgatcttttctgtttttttatttcagagttccttctccaaat

SEQ ID NO: 11344 - DNA, 304 bp, Zea Mays
caaagcgatccccaaatggtccagatcagcaatcaactacaaggccacttttggaaccctggatctgctaagggcatcatccaccacatttgccttccccgggtgataatgaatagacaaatcataatctttaatcaattcgagccaccaacgctgcctcaaattccgctccttctgagtgaaaatatacttgagacttttatgatcggtgtaaatgtcacaagccttgccataaagataatgcctccacgactttagagcaaaaaacaccacggccaattcgagatcatgagttggataattc

SEQ ID NO: 11345 - DNA, 656 bp, Zea Mays
tgccgacggcgccgccttgggcgcctccgcgagcaccaccctcagcttgtcctcgtgccccggcttaggcgcctccgcgcgccttgcacggcttgccgcgtttgcggccctgtgtcgaggaggactccccctttttcttgtcaccttagcaggcctcccactgctcccgagtgagatgtagcttcccgccgatggtgataggccttgagacgaccaatcgcttcttcgatcgtcatcgtggagaggtctagcagagactcgattgagcgagcaatctgcttgtacttctcggggatgcaacggaagagcttctcgacggctctctcctcatcgtaggtgtcgtcgtcgaactgcaccatcttctgcaacagagtgttgaggcgaagagcaaagtcatcaacatcctcacttggcttgaaggccaggttctcccactccttgcgaagtgcctgcagtgtggtcttgcgggcacggtcgctgccgatgcgggtcgcagcgatggcatcgcaggcttccttggcagtccgcttctgggaaagcgaaaactgcatcttgggcgggactgcagcaatgagggcatctagcgttcgtcgatcctcgtagtagtcgacgtcgccgtactgaactgcttcccacatgtggcgaacctggagccg

SEQ ID NO: 11346 - DNA, 306 bp, Zea Mays
cccgaaggttgagccgatgtagtatatggtgccctcgccgtgtgtatgtaactgtaatttgtattgtaatgtggcctgttggccgttttcgcacgcctgtgctgatccggctgcacccgtgggcgacttttgcgcggagtgtagattgatgtacttgttgtgctattctggctgcacccttaggcgatcttggcacgtagtgtttattcggcgagagacttcgatggcgtgttttattgtgcctgtccggctacacccttgggcgtctttcgcacggagcgtctttaatgaaagacttcgattgat

SEQ ID NO: 11347 - DNA, 345 bp, Zea Mays
gccgaagttgctacatctaccgaagctgctcccaccgaagctacaactgtcgaagctacaacagatgaagccacaaatctggagagcacattatctgatattggtagaatactcttggatatggccgcagaagaagctgctgcagctgctgaagaaaccctggccatagtgcctagaaaagggaaggagattgctgaagatatttcggaggaaaaaagacttcaattttcaaaacaaaattggtcaagagttatctaaggctgagaaagaggagctgcgggattatgttatatcctgtggctaccagccaggagcgttactgttcggcggcattaacgaagaaag

SEQ ID NO: 11348 - DNA, 660 bp, Zea Mays
tacaactttggtgcagaaggatgatggagttgtcatgcaaaatttagagaaaatctgccttgaatgtggactgtcaggctatctgcagaaccctcctatggtacagtggctgaatcagatcgcgggttcattccccctcgccgccgatgacccttcgccgcgattgttgactgatcgtcgtgattcgtgcgccgtggcttgcggataaccgtgggcgggtaaagatcttggcgcctggatcaacttgggtccagtcgcggctaggctcaccgtacccccttgctcgtcgatcgattaggataggtctcaccgtcgttggccgattaccgccatgcgccacgtgctaaagcactttaccaggtcacagtagctcgtcttgcgatatttgctcatcgctggtgaattcgccacgacggaagacactaaccgcgcgctagtaactttctgtttccccggccaccgcgcgtcttcgtccaaatccctggccaccgcttagcgatcctataaattgatggccaggtctgttgctccatgctatcacgaagccaacgcacccacgcttgcctcgaatcaccccctagaactcttcaatttctcattctccccaatctctgtttccaagaccgtagaagcacctcaccgtggctggcctgttccagg

SEQ ID NO: 11349 - DNA, 608 bp, Zea Mays
attagactttattaaaaacgaaccgttacgcgatatggaccgttcgatccgcacaacggctcagatttaatggggtgcaatccaatcggtaccgttcggtccgatccagcggcccagatcaatccatcgaaggggtacgctggtgttctaatctaggccgttcactagagatccggcgacccggggacatcttccccaacccgctggcagaccacggcgacgcactggagctgcgacggcgcgccagccggagttggccaaagatgagacggagggccacaccacccaacctgattggtgcaaaacgatgtggggcgatcgcgagacagaaggtaggcttacctccaaggattgtggcgttcggagccctgcccacggtgcggcggcggattcacggcgctataactccggtcacctgatacgccgtccaaaagaaatcacgagctacgattcacggtcctatgcattcaagggaacatagggagtagcgaattggtttctcaccagagcttgtcccgtggcgtggccggtccacgagacgagcgggatccgcggcggagatgggctctgacgagtgattggtcgcacgcgagacgattgcaggcacc

SEQ ID NO: 11350 - DNA, 719 bp, Zea Mays
ttgtctgctggctgaacttgaacattgccttctggcgggaaattgagatcccaccccgcagcaggcataggctgacccagaccaaagaacgcgagagggagctgctgaccatcttccgggaccaccggcaccagatcttcatcttggggctggccccccagcaagggtttgttgaatgatttcacactgcactgtccacgagtcaccgataaaaccatcagcctccgaaaaaacaatgaactgcgggacctcctcgagagacgtgacccgaaccctaagcatagtcctataaacattgtgtctgtcttcctcccacaagattaatctaccaaaggagccaatagcagcctgcaagtactctgaggaacgataatcaagggggaatcccaacaacataagccagcattcgcgattaaaaaaaagcgccctgcggttccaagcatcattatgtcgctgagcagtgaaggtggcatcgaggtattgctgcggaccaagcaagacaagattgtctctttcaagcacactgctaaactgaaccagaacctgacccaggtgcgaccgctggatatcccgcaccccaacccaccggtgctccaccaaatattctctaaccacatccctcaccgtcggaaagtgacctcatgatcaggtaaaggttgaatattgataatagcccaatcctcatgcattggcgggagacgcctagtcactgacctggc

SEQ ID NO: 11351 - DNA, 451 bp, Zea Mays
ttgcactcgtctattccttcgatgtttggctccacgtgcactccctccgagatcaagccctaaggggtacgcgatccagtggtgatggccaccgtcgtggaacgatggtcatgggggtggggtgtacatggggacgctccttggtcctctctctacaacccatggaccagttgcatcatgtggcttggccgattcctaggtggacattcctcatgcttgtctcaacctcagctggcttacttgatgatgcatgaccaaggatatcctcttggaccacttccctctgtgccacaagcacctcaactaccgctaccacccccgccacccactttgtcacttgctagcttgtttagcatggtgaccctaaccccctgttgttactaactgggttgctacttttggtgcttcctatcacaccactctagatgctgatatactttcttcttcccac

SEQ ID NO: 11352 - DNA, 591 bp, Zea Mays
cgcggcctatttcctgtgcttgtccgcgacccactcggcccaacaggaccgccacacacaaaggagagccgacacctggtccccacttgtcatcctcacacgctcgcgctcgcctcgtgactcactatcgcatgggtccccttgttagtcgctgtaacaccacatgaggagctcttcctccagctgtgggacccacctggtcagcgactatcgctccatgccactcacccgcattacatgtggaccccacgtgacagtctcaatgaaccacagaggatcccctttccgtgcgcgcagcgccgatctcaacggcaaccaccgatttcgctggagatggttaacagctcgcccctagccttatctacccgacgtgggggacctctcccagcctttccattttgttcgccagggccgtgccatgaaaaatcgtgaactatgggcgcctccaatgccgacctcgcccaccagagacaaaatcgtacctagtagttgctagggggcattgtggtgctgcgagaagggcgacggtggtcgattagcgcagatacagcagctgtaggcggcggaattcctcggcggtgtccgaattcc

SEQ ID NO: 11353 - DNA, 901 bp, Zea Mays
taagccttggtcacatgaaaaatttggagtaaaatgagctcaaagttgggctgtcagactgccctaagtctgaattcagactgacagtgagattggatgaacttagggctcaattttaagtaagattttgtgactttttgtgggtgcacaatgtagcaaagttagagttggtctattaggctacaactttgctgcagagcattggtctagttgccatataaaattgggaggaaattcgccccaaatatggtctgtcagactgactgaagaagaatctaatggtacagtgacaagaagaatctattggttcagtgaaccggccgtcggcgacccctcgcgtggattcacgccggtgtggtgattcgtgctcaccggcgcccagataacgttccgcggtgaaaagatcttcttccccccggatgagcttaaggcaatgtttgtccggccgccgtgtctgctctacctcgatcgccttgaatcgaccctcgccggagttagacacctcatggtcttatgccacgtgcctcagcactttaaccacgtcgccgtgactcgtactgacctatccagagattgctggtgaggttgccacggttgtagccactaatctcgtgcgctagtgactcctttcttcttcgaccgccaccatgccaaacaaaattcactggccaccgcttagcgccactataaattgatgacatggtctgctgcgttaggtcatcaccaagcctgagctcctgctcctgtctctgattagccaccacagctctccaatttcccatttcccccaattctgttttccgccaccgtggtcagcaaattccaggtctgttcgtgctccctgctctcttgtttcagcatccttaggttctcctgatgctcctcgaccaattcgattgag

SEQ ID NO: 11354 - DNA, 873 bp, Zea Mays
ctaaatcattctagattgaaattttggtgtggaagacaatcctaccattgaagactaaggatcgcaagattggcaagtggtctctaagttgggaagggccttataaggttgtacctataatttctgataatgcatacatgttggaaacattgctaggagacaagttacctaaagcattgaatgagcgtttcctaaaacagtactatcctagtgtatggcaggaggaaaaaaagccaatgttctcacatcaggttacattccagaaaacatatgttgagcaacaaatctggcacctagacgaccaaatggtttgaccttgtggtgcggacggtttggcatgacaaccagacgatccacgatagattaatttaggttggagtctttatcccttgcgtggttatcttaacaactcacgtgaaactattgggattcacctaggaatgggtctagacttccccttatatatatgaagaggtatgatcgattgaatgatccaacaatcgaacccaaacatcaatttatcttatgcagtagccttaagagtagttttagctttagttgtagttcctcaatctccaatcttcgcctctctttgactctacatcgtctaggtgagctttgggtggcctaccgatgccaaagtagtcctaggatcttccctccccaatggggtccctcccgagaggcaagatcttagttttatcggagccctctgtgccatcacggatggtccaccatctacacgcggatgtccgcacacctacagaggagtgcatctctctgcgtagtcacggacggtctggctatccatcgtggacggtccgtgctcccatagagagaaccccaaggtcctgcacaccgcgcatagacctt

SEQ ID NO: 11355 - DNA, 695 bp, Zea Mays
gtcgtgacggactctggtgaaattaggaggtgaggttggggctacatggtcgcaaagtgctactgattcaccgtgcactgctaatttgggaagaggtggaaaggattttgcgaatttgggcttcaaccgagttcactggtgaggtggtgagtacctcgccgtgggtggcggggctatttaaaggcgcgatggtccggctaatgatccatggccgcggattacatcgttcgtgcattgctaccacgtaaaaaagaggcacagtgagggaggagcgaggcatgagtgacaccgacgtggaaatgaccgagccacggcgaccgccggtggaatatctctggccacgctcggctaggttcgcgggacggtgccacatatgaagttatctccccacgatcgatcccttcaccaattcatccgaacacatccgaatctacagtgccccaaatcttagtctttgtttcagatattttcagtgctctagatcttcaatgttcttctgaaccgactcccttccaccctctctttctcttgattcttgttaagaacagggtaagctccattaataaagattgttcactaaacaatagtcttcaaacttactataggatccctggtccaacactgaatggaatcaaagatatggtgccttcaatttggtcccattccactgtgaccattcctgttcttgattcagt

SEQ ID NO: 11356 - DNA, 876 bp, Zea Mays
gtaccatgaagtattttgagataaatgtgcccaaagttgggttgtcagactgcccttggtctgaattcagcataacagtgagattgggcaatctttggattatagttcgaccatgatctagtgggaatttgactagggatgctatagcaaaagtgaacatggattatagatctataactttgatgcagatgaattatgaggttgtcacataaaatttggagaaaacctgccttgaatctgctctgtctggcgtctaaaaggagtctgatggtacagtaactgaaatagattacaagttcaaccccctcgtcgccggtgaccttttcaccgtgatttgcaccgatgccgtgattcgtgctctctggtaagtggataaccacgatggagtaaaaatcttggcaccagatcagctcgggctcgatcgcggatgaggtttaccatacccacttgctcgtcgtgcgaccgggatagaccttgccgccgtaggccgctcaccgctgtgcgccacgtgcactacaccacgtcgcagtgaaacacgtcgtgcatgcccggtgatcgccggagagctgccatggtgaaagccactaaccctgagcgcgagtgaccttcttcctctccggccgccagcacatcttcacgaaattggacgccgccgctcaagcctgctataaattgtcgacccctcctgctccgctaggtagttgtgcaaccagtgaagcaacccgtgcctcgaatcatcccctagagctccccaatttggaattttccccaaatcacttcaaaacaccgagcgatttgacctcaccgtggccagcgcatcctaggtccgttcatgccctctgagtcctcgtttcagtatccttggatgctcctgat

SEQ ID NO: 11357 - DNA, 447 bp, Zea Mays
tcatggaggacaaagcgaaggtgacaggggtctctttacctggatataggaggcccacgcatcccgcccacggtacaggtggatccaaggtgaagaccgtacgccggcgagcaatccaccaaccaccagggcctcaccaagcaagatgccgccaaaaccgagcccaagagatcacggcaaagttcccaaggccgagcttgcacaccgaacggcaaggagtacgcgcacccgtggtggcggacgaagcaacctttgttcttctcccccattcacggtgagcgattccctgcaatccttgcacaatcccgttcggataagctccatgaacgagcgataggtccaagcgaccaccacgacggcccccaacatcctcgccttcttccctcacacccctgcctaatcccacgccggcggctgggtgcggaccgaggaagagagggagcggcg

SEQ ID NO: 11358 - DNA, 516 bp, Zea Mays
agcaaccggacggcggcgccgcccagtgacacggcggatccgcgccggagacaagcgatccagctaccccggatcgtaattctttaatcgcatggtgctacatgttgaggggagcgaggcgatttgattggggaagactttaccggttgattgtgtcgcgcagggggtcgaccacggttgtccgcggagctgcgatggcggaggaaacacgacgagaaaattgcggctgttgagagcatgaacccacccaagcgatgttatgacggtattccgggcggcatgatgaggcccatgggtccaattccgaagagccgcccttgccattagctcaaatcacctgcagcggcatctcacgatttctctctcgtgacggtgaccttctactgagcgatggagttacctagtgccaatcgttccattgagcagaggtggggaaggaggcgctctcgtcacgattttatagcttcagcggaggtcggttcgcggtggttgtaacggaacccggcgactccgcgc

SEQ ID NO: 11359 - DNA, 546 bp, Zea Mays
tttggttggcaaattacttcccatctagccagcctatattttttcttatggccctcaccttgccagaaaaaacgcgatcagaaataatctatcttctttttggtactttaaaggaagacatcatgaacatcgctagactggttaggacaaaattaattactactaactaaacgccctcccactgacatgagctttccttttcaactacttagctttttctcaattttttcttccactgttttccaatcaccattgttcaacctacgatggtgctcggaatcccaagatatctgaaagacatgcttccacttttacagccaaacaaccttgtatacctcccttcatcttcttttgccttcccatagcagaagaattcactcttgtgaaaatttattttaagctacgacatctgctcaaaggcacataatatgagtttcatattcgttgccttctctaggtcgtgatccataaacaagattgtatcatttgcatattgcagtatggacaaccctccatctaccaagtgcagaaccaaaccctctactg

SEQ ID NO: 11360 - DNA, 372 bp, Zea Mays
gtgcccaaattgcatgcctaagcaattcaaagcgatgctgagaactaggaaattcgaaacgtggagggctcaccgttaatcgcacagccgtaagccccggccacgatgcatggcggcaccgccgcgaaccatttgctccgatgagcaattcgccgctactccggacacctcggccaccgttatcgcctccaacggattccaggaacgtagtcagatcacttgcgccggtcactgctggcacgggagctccaccgacgacgattgcttgcagcggcaataggatctacctggcggcgctcacataccctcacggcagtggattaagcggggcttaatggcttggcaccaggcgtggatcatggtggaatagcg

SEQ ID NO: 11361 - DNA, 643 bp, Zea Mays
ctgtttttttagcttcgacgaaggagaaacaggtagaacgcctgaaagggattgcaaaatcttattcatgaattccttagccacaccaccatcgtccgtagcttcctgagtttgcaataggtgctttcttctagtatgaacttgggttactttgcaaggtgtctggggtaaaacaggtggaagctgcacaatagccatagaatctggtacattttcacaactgtgagaaaaccatccatctgttggatcgctgagaccagaacatcattattagcatcctttgcgaagccctccacttgaatcaaagttggagacattattaccagagaagcagcagcagacgaagagacaagatgggacccaggcgcctccagctcaacatcccaagttgggagagcaaggccatcaactggagtaacagtcaccacccttcccgccagattcaaacttggagactttactacggctgacggctcagcagacagaatcctcgcagaatgtgctccgccgtctccatcccccatagatgagcaagaataccctaaagattaatatccagcagcgccaccaccggataccattgcctgacgagaccagcgcttgatgatcaaccgaatggggggcacatacaaagattgtcctc

SEQ ID NO: 11362 - DNA, 419 bp, Zea Mays
gtagtgactggatgaagtccatgccgatgtctgtccagacacccgacagaattggtagcggcggtaggaggccgcctgggtggaggtgcttgatcttgcatcattgacaggtggagcaggatcggacgaagtcctcgacgatgcggcccatgtcggggagtggatgtcgcgccggaggcggtggagggtgcgttgtacgccttcgtggccatcaccatgtacggcggccaagatctcctggaggagaggtgatgacggagggacgtagagcctgctgttgtaggtgagcaggttgtcgacgatggcctagggatcgccgcgggtgccggtcgcgacctcgtctcggaggaccgggatcgtcctcctgctcgtgcctcagacgtgtgatgtagtcgaaccgcggcgccgagacgactagg

SEQ ID NO: 11363 - DNA, 711 bp, Zea Mays
agctcatgcttttgttctgctagaatgacgtgcctttatgaaccagcaatacaattttaacggttttgtggtttacacttgcatatgtcagtgtaagtagattatacaaaattttctcaaagggctataataaataaagatattgttctgattatacttcaaattacagctggcgaacacatgcaatgtcaagcacacaacaggagaacagaacacatcttagatgaaacagaagatattatgcttattaggtgcaacaaataccttagtgccacgccatatatattcattaagtggcacatgcatcatgtgattgagtgcaacaaagccgacgatggtgtaatcttatacgcttgattctatccacagcctctacacaagttctagtgaatggcattcctggtagaactattgatcaccttcgtggcctccggcaaggcgatcccctctctcctttgctttttattctagtcatggatgtgctcaattccctgattcaaatgacttccaggaataacctgatatcctgtcatgttctattgggagttttccttgtgctatattggaatccccctgaccatccataaaccctctagggctgatctagcaccgctgattgataaggttgcaaataagttatcaggttggaaggcctctgttaagcaaggctggaaggttggttcttgtcaaatctgtaatttcagcaactcc

SEQ ID NO: 11364 - DNA, 540 bp, Zea Mays
ctgagggtctatctgcaagattacatgggctcgggtgaaagaagtggggacgacgggttaattcctgagaacctgggtgtctctttagcaaaaacgcgtgggcaaaggggtatcagatcatgtgggccatcaaatctccgatccatggccacgattagatcaggcggagatggctcgtgcccacattggcacgtgcgactaacacacggggcccatgggccagtggctcgggtgagcggtcagcgtgtggtggtgtgccagctcacgtgtggtggctaacagggggtaccagtgcaactaggcctgctggttagcggcacgggatgggtgcggaagcggtgaggcgcgggggccatgttgatgggaagggtccacctgtcagcgacctagagggggagagaaggggttggcgcgaggaaactaccgggtggggaccgggtgtcactagtgcggtggggaaaggagaggggctcagagtgggggctgatagtgggccccttgcattaggcccatcgtccactttgggtgtgggcgtggagc

SEQ ID NO: 11365 - DNA, 602 bp, Zea Mays
gtttaggatggcagggcagagaagcggcggtgcagggaattgagaagaagaggatgagtcagttgttgtttgtctgtgacctccgactgaaggacgtctgccctttatagacgggtcgccataatccgttgattcgatctgctaaattctaggaaccggcccctggaatatctctacatgcaaccgtccggagatctcgcacgttgtccattactcctagttgatgtgacagtctaggtgtgatatttgataaccaaaataaacaaaagacaaaaattaaagtgtcgtttaggatggcagggcagagaagcggcggtgcagggaattgagaagaagaggatgagtcagttgctgtttgcctgtgacctccgactgaaggacgtctgccctttatagacgggtcgccataatccgttgattcgatctgctaaattctaggaaccggcccctggaatatctctacatgcaaccgtccggagatctcgcacgttgtccattactcctagttgatgtgacagtctaggtgtgatatttgataaccaaaataaacaaaagacaaaaattaaagtgtcgtttaggatggcagggcagagaagcggcgg

SEQ ID NO: 11366 - DNA, 416 bp, Zea Mays
ccggtgccctttgagactttgtgtggcatcggtgagccggttgcgtccggagcactgctccaaactactcatcggagcatggcggcatggtggaatcacccctcaacgtggtcaggactcccctcgctgccatacgcggtaagaagaccttcgtcgagttcgctgatatctctactacgcgtagcgctagggaatcgagagctgaacatatgtgcgtgtggttggggagctccggtgatgtcctccgccgcggtatgcccggcgccgccgcctggctagtatggaaaaggagaaaggtgccatgaccgtcgatcctagaatcaagggctgcgattagatctggggaaggaatcactgtgggtcgttgatcgactgatgatcgggccggattaaaccaggggataacgtttcggtcc

SEQ ID NO: 11367 - DNA, 358 bp, Zea Mays
ccttcatgaaaggcactttcacattgtgtaatatttcattcatctttttgtattagaaactgatagtagacagtctaaggccctgtcctattttatccaaagtggggcctaataaaatattactttggctgcagttttcacacgcccctccataatctagagcagcctacagctacacctagttagcagggtgttaggctgcaatagtttagacatgtaagaatcaactacagcctatgcatttttcgtcacaccaacacattagcttcatggttgagatgttcctgtgactattttacatggtgcataaatatttgaacaccaatctaggttgtggtgatttgaagtattaagcaaa

SEQ ID NO: 11368 - DNA, 711 bp, Zea Mays
cagagaggaggcaagggtcccactgggaagtggctctgtaatagtttttggttgtgtaatatactcttaagtactatttatctaacatcgatagaacttatatgtatgttacttgtctttgctgtgtgcggtgttaccaacttctccctggtacttggcccccctaggatgcaggctcgtcgtgtcgaggctggatgccagcatatttaagagagaattggtgacctggccccccgggatgcaggttcgagttgtcgaggctggatgccagtacacttaagagagaattggagacctggcccccaggagatagtctcgactgggaccgggacctgcacacagccttggctaggaagcttcagtagtgcacccataggacccactaactggtatcttttatcctttgattcacgccataggacctgcaggacttagactaggaagccaatccgcgtgtccagaccccttggaccacagctccaaatactagggcacccgttgcagagtggtggagcgtgtaggcttagggtgcatgaccaggctaagcagctacacaactccgcaccaccccaggagacaagcgtccattctttagaaccagaccctaggttaccggacccacatgaccatggttctagatactagggtacccgtcacagaatggtggagcgtgcaggcttagggtgcgggaccaggccaagcggctacgca

SEQ ID NO: 11369 - DNA, 480 bp, Zea Mays
caccactctgcgacaagtgtcctagtatttggaaccacggtccagggggtctggacacacaagttagcttcccagactaaaattggcaggtcatgtgcatgtatcaaaggatggctaatgtcagacgatgggtcctatgggtgtgctactaacgctccctagccgaagctgtgttcaggtccaggtcccagtcaaggctgcctcctgggggccgttgccaactcttttaggtatgctggtatccagcctcgacacgtcaagcctatatcctaggggggccaggtaccagggaggagtcggcagcgccacacacaacaaggacaatagtatgcagataagtgctaatactgctcaataaatagtactcaaaaggtaccttacaaaaacaaagttattacatccgccttcaagcgggaccctagccttgtgtctacaggtatgacctactcgacatcagtagggtcgcgctggaagcgcgcg

SEQ ID NO: 11370 - DNA, 576 bp, Zea Mays
tgcacattgtcttcatcttctttttcagattcccaatcttcttcgtccacctctctagccactcttgcgctcctgcgaggttgtagctcatcctctactcccattgcatctcctaggacagaccatggtatacctgtcccttgcatttctccctcatcctcatccctgatttgaactaatgcttgttcatcccctccctcaaagaaaaatccttgagcttctgaacaatcagaactcaagagcacctcatagttcttgtttcgggaaattctctctttcttggacaacattctattgttgaattggatgaagacaagattgttgaggcgttctgttgttaatctgttctttctcttagtatgagtctgcaaatatgctcacagatcacaatccttgtcataagtgtaaacaattgatactagaaagtcattttaagagttaaggagcaatctgacctgttcaaaaacgctccaagttctttcacaaccggatgagctagtggttaatgaaaggatcctaatggcaattgcttgcaaatcaggtgctccacccccatagagcctccaccaagatgct

SEQ ID NO: 11371 - DNA, 419 bp, Zea Mays
ttgaaggaaggggaaactccttgggctatgaaaggactccttagacatcctccttcagtacaccaagcacacccaagtggcataaacatgtagaattattacgtactccctctcttttgtatttctcgctagatctagtgttggcgtagttataagccaaaatagataggagaagtgttgctgggagatagagcgagcaaaatattgaacaagcaaggtgtgttactctaccggagtgctatcacagagttgtaaacagtcgcgactctactataaccttcatcatcatatagtgtaagactcgatccatcaaccgatgaagaatatgatcaaacagatagttcaaatatacaccaagctaggttggctaactccaacatggttgtaggcaagcattttaggcttggaaaaaccacatg

SEQ ID NO: 11372 - DNA, 678 bp, Zea Mays
gaaaactgggcccaaagttgggctgtcagtctctctacaacctgaattatggtatccagttgcatgggatgaactttgggtgccatttggaagatgatcccatggatgtttgagcatgattaccacagttggtttatagctggatcattagacaacaaatttgctactggccgatcaacaacttgccatgtaaatttaggagaaaatcaatgacaaacttggtctgtcaggctaactgaagaacaatctgatggtacagtgcactaaatatccctgggttcagtccccctcgccgccggtgagccgcgcgtctagatttgcgtcggtcgacgtgattcgtgctcggtgtcattggataacgttgtgggggtgtgaaatatcacccagtggatgaactccggccattgtttactctggtcgtcgtgtccgctctaccccgatcgcctttgatcaatcctcaccggagttagacacttcatggtcttgtgccacgtgcctcagcactttaaccatgccaccgtgactcatactgacctatccagagatcgccggtgaggttgccatggttacagccactaatctcgtgcaccagtaactcctttcttctttgaccgccagcacgccaatacaaaattggagaccaccgctcaagcacactataaattgagcacaccgtcg

SEQ ID NO: 11373 - DNA, 571 bp, Zea Mays
atttttgtagaaccagcagtcgctgcgtttggtcagtcaggcggatgcggaaagtgtctgattcttttgttagcaactggcaggcactcagaatcttgcgataacatatacaaagtccggtcctttgacgcagcaggagcggtgtgtgcctacgcattcttcctgatcagtgttgatggtcttagactatctccaaccgagtagccaatacaatacgcatacacaaattgcctgaccttgtagcactgtagcgcttgggaaatacttccaacgggctatgcaaactaaatacgcatctacggcgctggacccctcggcacctaaaactgagtcctctccacccacgactcaaaccctggcaaaccaactgtcgggaggggaggccgaagagagcagcgagttggtggcgcagacgaccacccgcgacgggcgcacacccccaccggcgacggcgcgcgcggtcaccggcaaccgacgcggacgaccacatctgaggtacgtctctctctcaggttcattggcccttccgcctctctcagatctagctaggcctgctaatggcaaaaaatcc

SEQ ID NO: 11374 - DNA, 387 bp, Zea Mays
agccaaccttgctagaccagattgttatggcccaactcagtgacaagggagtgcaaatcatcaaggagaatcttcatcagaaagtggagaagtataagtgctttcgtcaagaccgcaaggggatactgtggtttgaagacagattggtggttcctaaaaatagagacctcaagaagagaatcttggatgaggctcatctctccaaattctccatgcacccaggaagcaccaagatgtaccatgatctgaagcccctatattggtggaccagaatgaaatgggagatagccaatatgtatcagaatgcgacacgtgtcagaggataaaggcaagccacttaaaatcatatggtaccttgcaaccactatcgataccttcatggaaatg

SEQ ID NO: 11375 - DNA, 716 bp, Zea Mays
ccaggttcacctgggacaatgttggtctggctttctccacgcaggcgctgaggaagatgcctgaacctcgtgttctgcagctgctgccggtaggtgtggctgagcgaccacagggtccgacgggcagcatcgctgacagaggcagcgtaggtggacagcggtatcagggactcgtgagcagacagagtcctgaatcccctgtcacctgcatccattaccctgacatggatgcgagtgatgtaatagcaagcccggggaggctcgctcactcgcctcgtctcatacagggggcggacgtaggtgcctagcgcatgcagcacctcctgcagcaggttggggaagtgcccgtcttgaacattgatgtataatgttcgacaacaggaccaaaccccatgaagttgtcctgctgggcgtagtcatcttcctcattgatgtgtccgtcttctccatcgtcttcgttgtcgtcatcctcgtcatcgccgtctccggagtcgtcggggtcgtcgcctctaggtgcaggtgcttggaaggctggtgacgacgatgctgacgtcgatgacccagctgcgaaggccagagactcagccaacggggtgggggtcggcagctgctcctccgagctgtcctctaggttgattacgttctccactcggacgggagggagattcgctggagcttcctcgactaccactgggtagaccgggatctgccggggc

SEQ ID NO: 11376 - DNA, 740 bp, Zea Mays
gcaagatgcagcacgacgtgcactttcacagtactgctcgttgttgagtggggtagctgttgcccttgacctgaagtactatccatgtcgtttgtccggcagtgctggaggtgtgattgtctcacccgttggtgagggcgatcccaggctgaacaacatggtcaacttggtcgccactatttggatggtggctctcccaccctattgggatttagcacccttgtcgttcaccgcctcatggtcgcttcgattatggtaccccttactacaggacccagatagatttggatccatagatcgatggagtcggagtctgtaataatgtttaattcagtatcttagtcttagtcagtcttagttagagttagtttacttatcatatgttttgatgcttgtcatgatgaacctgtaatgaagttggatctttgtaatgattgtcaccaaggtgtgggtatcccctaccacttggtgtagttattaataaagtcaattatttagttgggtaatccctttatttccacttccttgtttatctgagaagctgtcagtgaagatgatcaattgtttagtgctatgaagatttccatatatcttttcttatgctgaaagactgcagatttagatctgatgtgtgtgtgctttctacagatgtctgagaacaggcgccgaggtgtaaggcgtgctcagccggagcagtaggcactctaggaggaggcagctcagcagcagttgccaccgcc

SEQ ID NO: 11377 - DNA, 359 bp, Zea Mays
cccagacctcctcctccgagacaggcgcatccagggcaacgaggtcaaaagatggcatccctagagcatccagatcaactgtaacatcccttacttctgcagttccaagtaacccttgataaaaattaaagaaggctgctgcatttccttcatgggcagtccagatttgcccatcctctgagtgtattgctgcaatgaaattctttttcttcctgaaccttgtttgtgcatgaaagagagaggtattggcatccccttcattgagccacccaatccgcgatttcaaccttgccacagtacgagagatagaagacagggcaagggagtgcttcttgagcatgttccggagccacaattca

SEQ ID NO: 11378 - DNA, 305 bp, Zea Mays
gcataataccctacctccactgtgtgtatgtagtattgagtatgtgtaaaacctgtgagcttgagagtctatccctgtaacgttgtgtgccttcccttttatagtttaagggaggcacatacaaggatgctgagccccgacatgtgggcccaggaacataatggaaagaatacattatgtgagtaactaatgctagtaacgcctgagcaatcaccgggactcttgatgaccgcagtccatgcagcattgatagctgaaacgtacgagtaatggtgaataacagcatggcccacatatcgtggact

SEQ ID NO: 11379 - DNA, 544 bp, Zea Mays
acgagtagagaaactatattggggaaggagtaagaattagaggcagaggtgggagacgagagccgccggcgtctcgggagtttctcattaatctcatcaaagttgtaaccttattacaaaagagaagtatatatatgtctctctcttcactcgagtcggcccactatgcctacttggcccacatcagcctgctcgacgcgcgcgcttggaaaggccgttgtttccccgccttcgctcacgttctcttccagctggtctggtgttgcgttgctgacccagagcttggattggacattccaaacactccttgtcccttctccaagatcacatacgaaatccttgatagaagaacgaagcttggtacgtatatgcaccgacgatgggataagcctggcatgttgcatgcgtgaagctagcaaatccgcgccccttccctggacacgtgaccacggagatttctgagcccaggacgcatgcggccgatccctgctggattttcacgcctcattttcagcgatgcagatcgagatcgaggtgtctccgc

SEQ ID NO: 11380 - DNA, 508 bp, Zea Mays
aaaattttcggggaagaaggtagtggatctggactcgattttggaggaaggaagttcagggtcgggtatattccaggggctgggtttgggtgacgagttgcaggagggtttgggagaggaggaagttggcagaactaggtcgcagccagaaggtgtgccaggtagtctgctctcagcttatgagatggtaaaaaagaacggtcaggttactccagaggtggcggtttgtgctgctgttccggcagtgtatacaggttcatccgtgtcatatcgtagcaagaggagggctgcaacttcagcgggagacagtttggagagggcttccaggttgaaggcgtctcacaacctcgactccgattcatggaaggtaatgagtcgcttgttttatgcagtctgtcggttcagcaagttgttgataaattacgtcctttgggttttttgtaataactctgagaagtctgtgcataagtttgcaaatttcctagttaagttggaacaaagtaaaaag

SEQ ID NO: 11381 - DNA, 472 bp, Zea Mays
ccctcggcgcgctcgtccacggctgctcgctccccgtcttcctccgcttcttcgccgacctcgtcgactccttcggctcccacgccgacgacccggacaccatggtccgcctcgtcgtcaagtacgccttctacttcctcgtcgtcggagcggcaatctgggcatcctcgtgggcaggtacgctatccctcctcctcctgccgccccagcttgtgtgcgtcgcgaattggcggtcaatttggattggatgacaaatcacgtcggtcagccaatcgccgtggctacaaacgagatgttcaaatcgttcgccccgctcgcagagatctcttgctggatgtggaccggcgagcggcagtcgacgcggatgcggatccggtacctggacgcggcgctgcggcaggacgtgtccttcttcgacaccgacgtgcgggcctcggacgtgatctacgccatcaacgcggacgccgtggtg

SEQ ID NO: 11382 - DNA, 301 bp, Zea Mays
ccgccgcgggagttctccgtctgcaccactgttctagccgagaaaagcaacgtagaagcttcggtatacaccctgggtgcttgggagggcatcgtcaagcaagggctcggtcggcgttagctggaattgctcaccggcgtgtttcctctgccgcggatccgccacacggcgggccagggcattgggcaggggacagagccgctcgcgtcccgcagagatcggcaacagaaacgattcagcgtcaggctgttgaactgcagaggagaagatcaagtttctcggctagattagattgtaacca

SEQ ID NO: 11383 - DNA, 394 bp, Zea Mays
tgaggatcgaggttaggcttcggtaatagggctaggagtgacactcgctttggtaaggttggtgagtgcagtggcttgagctcttcatagaaacatctagcctcccaaagcttgttaaaatcactccacctaaatttgccaccctcattgtgagagatagagtgtatgtggagtctgtgacaaccccaccttagaaacacgtgtggtgtccaaaacctaaccaactcaagaacacacttgacaccctacctaacatctctagtgacccccttcctagagctcctcagccactaaaaaagacccccctcttacaaaggtattccacccaagagagaggtaaggttacattgtgagaattgagagggatgggcatttggctgctttttgctttagg

SEQ ID NO: 11384 - DNA, 1029 bp, Zea Mays
tcttctgaaaaagaaaaaggaaaagacgcaacagtattgggccaattctaacccggcggcccagcaacacagggaacaggggagcgcgccctcgcgcgcccgcgcgcgctctggaagctttgcagaaaggccctcggcttaacggctaaaccgaaataggtccattcactattgcactaagtcactgcactttgcaaaaatgtccttgaacttctatttcttccccacgagtatccctggctacggcgtgcatgcggatcatccctggcacaacccgtactggtcatggctggtattggctgctacggctagcgatcagaaaggcattaccaactaacagagacctcggaacacgcataaatttgacacggacgcaccgagaacggcttgtccacgagcacggcggaaaccgcggtgtcgatcccgtgttcctaatcacctatgcccgaatcggtcaaacggatgctacggtgagctttacgtgcctacatagctgctagaacaacacttgagaggggcagagctttaccagagtggtctggccatggatgagctgttcttggcggcgcggcggaccgaattgggggaaaacggcatcgcggtggctctgtttgaaattggggttggagattgaggctactcggccataagaagctgtgctttcaccgtgcgcaatcaatttgggagaaggtggagagggcagtgcgaatttgacttcaatctagtcactgtgtttgcgatgatcacacctcgccgtgaacccaatggctatttatagccatggcggtccggcaatcaccccgcggctgaggatagtatcgcaatcgcatgtcgaccacgtcggtagaaggtacagtgagggagaactacgacatgagcgccaccgcggtggaattcactaagccacgacagccgccggtgagtaactccggctgggcctgggagatggcgccacgtacgggttatccctccccgacgttatccactccataccacccacgaatcaggacggcgactgcactaattttg

SEQ ID NO: 11385 - DNA, 457 bp, Zea Mays
ctcaatattctattaaacgcacaaaagccaaactgaatctgtcgttcggtgtgtactcctatgtatatggagtttgccagaaatcattgaggagtaaccatattggtctgaatgcttctacctgatgtagatgtggatatactcgggattaatattgtatccacatttgacttattggcatttgatctattctcggggacgcctgtgaatatgatccattggtcttagtcaaagcatatgttctgattgcagattcacgtggtctgtaataactctcctccggtgaactcgccctgctggtgatttgcctcgcgaagaggttcatcttgatgatgaaatttctagcaatgcgcgcaatatcattgtgctaggaatacagaacaatgaatcttttgttttgggaaataacgaagatcgtcattaaatgtgggagacaaatatgtcgacacctatattc

SEQ ID NO: 11386 - DNA, 410 bp, Zea Mays
ctggttactgggtgcagaaaaaccgcactgccgcttgcgccaatgccacgtcttctcggggttgtagcggaagtctaaaaagttaagtttttcagaaccagtgcagcgattcgaggtgccccacgcatggcccaacagtgacattaagtacaatggtcacgggccagtcagccgtgggaataggcgaggcagatggcatgaccataggcgggccgacagtaattacatcaacaggcgcactggtgctgcaagccaaccatcgatcagactctggccccacctgcagactcacatcctcctctgaggcgggcccgggggccactgtcggtaccctgaatcaggggtaccctctcctacagtatgaaggcgctgcacccgtacgacacctcctggtcacacggagagcggca

SEQ ID NO: 11387 - DNA, 1571 bp, Zea Mays
aaagacaccaagatcagccaatagccaacgcagctaaataatttcagcagtggtagtagcaagagtccgaagttcggcttcagcactagaacgagatatggttgcttgcttcttggatttccaggcaataggagaggatccaagaagaatacaataacctacagtagaacaacggtcaacaagatcacttgcccaagtggcatcagaatacgcatgtagctgaagtgggctatcagaagcatagagtaaacatctggatcttgtcccgcgtaaatatcgaagcacacgaagcaaatgaccataatgaactgaggttggtgtggatacaaattggctcaacatatgaacatcatgagcaatattaggtctggtcgaagttttaaatgaatatccattggtgttgcaactgtgcgtgtatcagtaattccagagcgatcaagaagatcttgtatatacttggaccgagacaaataaaagccttttggagtttgatgaacttcaatgcctaagaaataactaagtggacccaaatcagacatctgaaattccttactaagatgctgcttgacatgagaaatatgttctgagttgtcacctgtaatcagcacatcatccacataatagaagtaaagtgcgtccttttggagagacatgaacaaacaatgtaggatcatgttcactagaagaaaaacctgcagccgtgatgacagagatgaatcgctcaaaccaagcacgaggagcttgtttcacccatacaatgcgcgatggagacgacaaacgtgccctgagggagtatcaaccctcagaggagggtgcatataaacttcttcatgtagatcaccattgagaaaaacatttttgacatccatctgggagatagtccaagaagatgaggctgcaactgcaatcaaggttcgaacaatagtcatatgcgcaacaggtgcaaaagtctcatcataatcaagttcttgagtctgttggaaaccacgagccacatgacgagctttatacctcaatggaaccatctgataggaacaacatgcgagggtaaaggaacgatatcccatgtaccagtgcgttcaagagcagccaattcatcaatcatagctagttgccactcaagaattccagaagcttcttgataagtagtgggttcaacaattgccacaccagctcgtggaaaaccatagcgatctggaggttcaatggtaccacgatcacgaagacgatatccctgactaaaaacatcattagactcattgttagtacaataatcgggtacaagattagtatcaggaccagccgtaggaatagagcgagaaccacgaatgtaggtttggatgataggtggtttggaagagtaagaagaagatcacgtggaggtggaaggtggtgttatgggaatgagaacatcagatgtggatgtagaaaatgatggttcagatgcaggaatggaaggaagacacatgaaataagtagattctgtgggataatatgaggagtgagtagactggttgtgaaagaagggacgattttcattgaaactcacatctctagaaattcgaatacgg

SEQ ID NO: 11388 - DNA, 546 bp, Zea Mays
aacgcacttagagaaatgaggactaaactcccgacgggtgacagctgagccacctataaaaaccgagacatctccccgagattctcccacctcgagtagggctccgcctcgccccgaggtcgccgtcgctcactccgcctcgcccgagattgccgccgctcagtccgtctagccagagccagcctcaggcagataagacaagggcgcccaaaaataggtaggggacatgtgcatttaatgcatatgccaacccacgctgcagcagcggagcacagcgatggacaagacagtgatcacgtctggcgcaacagcatgagtacgtctacactacagtatatgcacgtcgcctgccaccctctgatgggacgccaaatacgacaagccgagcggactggccttcgggtgcaatctctccgcctcgcccaaagcaggatccagcccgcgttcacaacctctccgcctcgctcgaccccgagtccagccttcaggcgatttctcctcctcgcccgacgtcaagttcgtccctcgagcgaattctctgcctcg

SEQ ID NO: 11389 - DNA, 392 bp, Zea Mays
aagactggtggtggtggcaggtttaggggtagcgagcgaggcagcaggagacaaccggatggccagagccggcggtgtggagggaggtactcgagcattctcctccagttgggttaggggtgggcagggtggagcggcatgtgtgggcagtgagcagcatggctgggggtgatggaggccagggtgggaacaagctggtgtggttgaacaaaaaacagtaggagaaagagatctgtatgctgttaccgtaattaagggcgtcgtctgaaaagggaagccttgagagtggagacaaaaccagtgtttttcccatatacgttgggagaagaattatagctaattaaataggtgaaggcaatcaatgcagacatgcaggcaaaaaaaattctgaa

SEQ ID NO: 11390 - DNA, 347 bp, Zea Mays
gtccaatcatatccagtccccagcatgcaaacggccaagttactggtatggtctgcaattgctgcgctggtagatgttgttgttttgacaagtactggcaggcttcgcacctctgaactaactcggttgcatcactttttgctgttggccaatagaatcccgacctgaagactttcccgactagcgtcttggatgctgcgtgtattccacattgcctagcatggacctcatccagaagttgcttcccggtagacgagaggatgcacttcatgaggacacccgatgcgcctcttctgtatagtgtttccccaatgagcgtgtagtgagctgattgtctagcgatgcgc

SEQ ID NO: 11391 - DNA, 416 bp, Zea Mays
tcatgtttctcattcccctcttcactggcttctttgccttcaaccggcacctctttcaggttttcgggttctccaggttcagcttctgcttccacatggttgacctatccccgattgacggataaggcccgactcttacttcctgagacctgaccctacttcatcagagctggagtgatataagcaaccctgttgggacagtagttggcataatgaccgacctatccacatttgaagcatgacctgtttgtggatgcattaggagcaacaggtcccttgtaggtgcttgcttagggtatagcttgattttgttgagtttgttgtccgaaactgtcatgagctggcgtgccttgaggtgtagcataatggggacaagtactacttccaacttgtccttggttagtagcccttctttt

SEQ ID NO: 11392 - DNA, 691 bp, Zea Mays
atcaggccctccaagagactgaggcggcgatcctgtgggagtgggaggcgcttggggccgaacaccagcgcctcagtgactggcgtacccagctggaggagcgcaccaaggcagcgtcccaccagtttgcctccgagcggtccgagcttgagcgggatcgcaaggactacaagaaggacctccaaaaggtgtacgcccgagagctggaggtggcccggaaggagaagaggctggccaagaaggaggagcacttggaccagagggaggaggtcgtcacggagctccagaccaagctgagtgccttcaacaaaatcctggaggagcagcgggtctagcagaccgcggctgtggagagcctgcaaaggctgcagcgggagctggatgacaaggccagcagcattgccctggccgaggagaacctcaaggagaaggatgcttccctggataagcgggcgacggatctcgcctggcgggagaaggacctcgccttcagggaggaaatgtttgaaaggcgggagaagctgctggccgatcatgagctcgaggcgaaggagaaggagcggacgctagaggagcgggtccgccagttccaggtggcgcaggcagcataggcagcactgggcccccaggcggtggaggcgatgaagaagacacttgaagatctccaggcggagcagcgcgccggggtcca

SEQ ID NO: 11393 - DNA, 745 bp, Zea Mays
gttgcgtcggttttaagtcgtatccgactcagaccagttgttgatctaaaatttgtatgcagtagaacatagaagctttattgataatgagaccttttgcttacaaagtacaacttgtccaccagagttttgaggtactgctatggatagaatttcctgaggtgctcaatgttccatgaaatcttcacttcggtgccatccatttgggtgagtcggtaggatcctgatcgggtaacttctgcaacgatgtatggtccttcccatgggggtgacagtttgtgccgtccttctcccgttagtactcggtggaggagtaggtctcccattgcgaaggatcgatgtcacactgctttgtcgtggtagcgcctcaaggtttgctggtatctggttgactgaatgaccacattcagccattcttcatctaatatatcaatgtcttccagccgggttgcttatgccttagctatgtttttgaatgttagcctaggcgctccaaagatcaaatctactggtagtattgcctctgatccatataccatgaagaatggggtgtttccatgtaaagcccagcttgactgtgttcgcaggctccagaccacgtacggtagttctctgatccattttcctgtaagcttttcgctcttgtcgaacaccttcttcctgagtgctccaagtatcattctgttggctctttccacctgcccattagctcttgggtgtgccactgatgcatacttgatctgga

SEQ ID NO: 11394 - DNA, 372 bp, Zea Mays
catgcacattccacatttttttcaacgagttactttattcattacaccagttcattacagcacacaactaccataagttcattacacgcgagtgctatctagggtactcccgaactcctctaaagtgtccccaaattccttgagaaggtcatcaaggctggctagggacatttcctcggtgtcggatgagttccctatcctggtaggaggtagggctggaggggcttgttccttctgctcagtctggcttccttggcttctggtcttcttgcggatttttcttgcgggggcgagcttctttagcttcttgtcgtaatccatcttcagggtgcggtaggcctcacgggtgttggtttcctcgccttccgctat

SEQ ID NO: 11395 - DNA, 877 bp, Zea Mays
tgttttctaactcttgtggatggcgggttaaatgcataaaagggtaggggttcttaagcaaatttcccctagccaaaggggtatgagcatagcacaaccgaacaatctagatctaatggctcagattaaatcgtagtttacataaaccagtatgtgaccacgcatgtagggtgagatatctacgctccagattttaaagtatcacaatcagatcatggtcgttcgctcacgatcaaatgacaatggtttaatacacccaaggggtactctacttataatctcaaccgatcatcgcgggatggacggcttgatgcccatcacctacctagaaatccaaacgcggtggcgccgttccccccgtggcggtgacccaccagggcaacaccgagcagtgacccagggcccaaatcccgagggtggatcgtgttttgtgaatagggagacaaggagaacctgataccacccagcccaggtggggttgaccgaggcccaacaaattagggttgctcggagcccaacaattcattatgcacaccaaactcagggaaagggccaattgccccaaaagactagtccaatgggggaagggtgactctcccttaaagtgggttcctcctcccaagttaagcgaggtgggataattctgaggctcacacggtcaccgtccgactacaattgggccaactgggccaattgcgtctttgccaacgggtaatagtggaggatgtcctcatcattcccaccttcttaaaatgggccctagctctgatactagatgatacacccagcccaggtggggttggctgaggcccaacaaattagggttgcctggagcccaacagttcattatccacacccaactcagggaaaggcccaa

SEQ ID NO: 11396 - DNA, 424 bp, Zea Mays
gctatttctaaagcactgatgtggcctagcctaactcggttgttacctctaaagcgccgatgtggcccaatataactcggccgttacttctaaaacgcccacatggtctagagcagctcgacagttatctctaaaaaatgtcggcaatgcataactcagctgttttctccatgtaaacgccagcagaaccaaatgcgactcagcaattaccagtcattactcgggtgttacctctaagaacaacggcaatgctgggaatgaatacaagctatcgattgactataaaagagcgatggaaaaacaaagatgagatactcagaacaagtcgaaattttcttcaatatattgataagggaagtccttccacaaactcaaagaccaactcattatgagtcgacctttcttcctttttatgctacattac

SEQ ID NO: 11397 - DNA, 323 bp, Zea Mays
gcaaaacgtctgacccaaattactccatgccccaatggtgttcattagggctaacacgctctcaaaagagcaaattgcagtgcttatgagcaaaggaaaatagagaaaatgaggtggagaaaacatttaatgatacacatccattgttcccgccaccacaaaaaatatggagaccaaaggtcaatgaaactaacacaaatgaataagcatccataaaaaatcaaaatacaaatacgactgtgcaggttcctacggagacagcagacagtccagccccatcgcttggatcgtccggatctaaggcaaacagtccacgcccagcg

SEQ ID NO: 11398 - DNA, 488 bp, Zea Mays
accttcttaagggatagtagagattgactgccagcgcaacggagatcgtcgtcgtcgtgtttctctcctgttctgcggggccccggcacgcgcgcggatcggagctagctgcacggacgtgttaagctggaaccgccggggcaaccggccgatagcagcgtcgtccaagtgtccaactaccttgttcagttcgacgatctcatgcaagagagccgtgcatgcatcctatcgcctagctagctagtggtgggttgtcaaactaatctatgtgaccagaaacgcttagttaacagtcacggtcgaggagtcaaattgcacctcccctagctaccatgcattgcatgcatcacgttcgtccaactccaataattgtgccatctatcgcagtgtactgtaattaagaaaaaccacgacgacaccggatagagaaagagagctgttcgtctttgactctcaaccaacccctgccgccggccggccggccggcc

SEQ ID NO: 11399 - DNA, 684 bp, Zea Mays
ccaacatttgacaagacttgggagaagagtgcaaggtgatagagcataacatactccttgcagaacaagatccgactgacttgaggacaccatcatcaagtatagcaagaatgaagaggagctggatgacaaagctgctgccgagcacctcgctaggaagtctgcaactacactcttattggcaatgtcttgtacatgcatggagccgcaggtgctttcataagatgcattgacatgtctatgggtaaacacttgttggaggagatccatgctaggcaatgtggtgttcatgcggcctcaaggatgttggttgggaaggcatttagagtagggtcttatgggtcgatagccaagaaagacacaatcgacttagtctagaagtgtgaagcctataagtttaagccaaacaacaacgcttgttggcagaataattgtagactatgctagtcttctggccctttgcatgctgaggactggatatggtcaggccatttaagaagtcttaaggtgggtacatgcatgtattggtggccatcgacaagttcacaaagtggatattgcatcgttaacgacaaccatagcaatagagttcatccaggagattgtattcaggtttggaataccagtggcatcatcacaagcgtagggtccatctttacatgggaaagttctttgattcctgtg

SEQ ID NO: 11400 - DNA, 745 bp, Zea Mays
tcagtttcctccttagccatgtcactagagttgatggccgacttgaggacgtcggcgtacgttttgagaacaggaaatggcggctggtgatagaatggcgagagaacagggttcccaggttttggcgtactaaaaactttctgacggagtaaatgaaggccaggattacggctggcccagcagagagtggctgacgccagaaaacactgcgaacccgtttccttctgcgggctcaattcttgcgctggtgtctggcccacagagtaagaaggctggtacacaacacgcgaacgtgatccctcagtaaagtcgtccagcacacatggcggaattagcggcacatactgtttcctttccaaatgaactggagagatatttgaatttgaacggcatagaggaatcagatcgaaatggctgacttccttcctcaacgtcggcgagcaaatgcgtcgagcagcagccttctttgctgaagccatcacatggccgagagtaacgaccggtgacgaactttgcttcagcaaggaaccttcccagggattgatcacagcagcaagtttttgagtacgtaccttaggcaacgcatggcgcccaacagtccggcgaaaaaaatcctcgcacctccttgaaaacagcttccttgccgcctggtcctcctccagacggattgccgaacgcttaatccgcgcaaggcgatgagcttccgtccaccaaaaccgaggacgaggtcccacaagcctcccac

SEQ ID NO: 11401 - DNA, 1045 bp, Zea Mays
atcacaccattcacatcgaactcctgctcttcagggatttgatatcaagcaagctgaattagcttccatcctgccatcgtctgggtttcatagagaagttgtcacattatgatatgaaggttggtaaggcttatttagttattaaacagactcttcagcagattgttgagaaacaatacaatctatctgatgtttttagcgagttaatagatgaggtcctccgtgccgagtcgggagacaatgaagatgtttatgatgtgcagaaaacaactacaaaatcagatgatattcttccccagtcggcaggttagtcagttttatggtctttacgtcaatataaaaaaattattcaaacatttgtcgatatcgttatgatgccattatttaaaacgatgtttttttgtttaaatgatacgtaaagaaggatgtacgtgttcggccccacaaactgtaacagatatgtctactccagcatttcagcaggatacgtagttgacagacacacagatacatgaattactgttaaggcaacaacatattcgtgtactattagaaagttgccccgatgaagctgacattgatccactggtttatacaaatataacgaaatagaccaaaacacctacaaccccagtggtaatgttttttttattacttgtattttcattgaagggttgtattcatcgttttctttaaaaagcatataaccattacaattttttcagggtaaacatggtgacgttggcaagaacatgccgaccaacacaaacgtcactcctcaagcaacaccacatacggaatcttgctcgccgatatttgatgcgacgccgcaaataaaggtatgagtacatcacctcgttgtttttctatattattattagtagtttactaaacatctaatttatttataccataattgttagtctcccggcggcgtccaacaggcggcagaaacagatctccctgacaatggtccatgctttgatcagactccatctgaacatgtcagctcagtaattttcatttttattatagttgccaaaac

SEQ ID NO: 11402 - DNA, 731 bp, Zea Mays
tacgcgcgcgctcgccatccctcactgccgcgcgggtcccaccgtccagtcgtatctcgcgcgcgctcggtctctctgatccgcgggacccgcatgtcagccgcgtacccacctccccttttcttcgctcgccgttgcgcgatgtccgccgcgagaacgccggcgttgaccgccctcggactttgcccgcgctgaataaaagcacactcgttcctttccctactaccttctcgcacaagcctagctttcccctgaaccaatcgacgccgccattgctacgctcgcggaaggattgtggccgccgccgttgacccggccccggtatcgccggtgggtggccagggtggtgtcgggattgttcatcggcgtgtggggatcgtctgcgtgaagtattgcgctcggtgacctgtccaatcatccagaattgctcgccgttgtcggtaatccgccgtgctctgtgggcagaggtctgtgccgcgcgattcacagtaagtcctccccatttcgtttcgccttactcacagcatcgtgttgatcaccacgggtagagggattagcgcccgatgcgtcacattgggattcaccggtgaggtctccgccgtggaggcctgtgcgccgccgcgcgcgactgctggggttggtgtagctgggggatgaactgggggccgtcggatgaccatcgtacggctgcggtttgagctggaaaacgattggggttgattagatctgaa

SEQ ID NO: 11403 - DNA, 307 bp, Zea Mays
ataattttgaccttgtccactgtaatctatggacctcactagtacctagtgtttcaaggttcaaatattatgttgctattctcgacaattgttcccattatttgtggacctttcccctccatctcaaatctgatacattctctaccattgcccaattttctcctttgttgccacttagtttggcgctaccataaaaagtgtgcaatgcgacaacggttgcaagtttgataactccaactcatgcctcttcttcctcatgcgtagtgttgatctacgcatgtcatgcccctacacctcacaccaaaaa

SEQ ID NO: 11404 - DNA, 559 bp, Zea Mays
gcaaaatggttctgaagttggactgtcagtcgggtcaaacactgaacctcgattgtcagtgaacaatgatgaactttgaggctgaattatacataatccaatgagtattcgatcaagatctttataacaaaatcaaagctagtatgtagagcaacaactttgatacagtcggattggtagctccccacatgaaaatcgaagaatagagctcctcgagttgccctgtcagatggactaaacaaaattgcgatggtacaataactaaacaagattccaggtgcagtgcacccgttgctggtgatctccgcgtcgtgatccgtgtcgccggtaagattcgtgctagtctggtgtggataaccatggtgggtgaaaagatcttgggtgaggtgaacataggcctgagctggatcaccgtcgtgcccacttgcccgcgcggtcagtggaatatcgccgccggtgctcgcgtgttctcggtgaaagacacgtagtcgcctgtttcaccgtgttgtcgtggtcgtggcgtcctctaggtcgtgaccgtcacccggtgaacgcatgc

SEQ ID NO: 11405 - DNA, 394 bp, Zea Mays
gggacttctacataaagttgtctatgacccagagctccagacactggaccgcgggttgttttgctggtttcacgagggttcttttgaaagattgtttggctgaaggggtaacttgtaaccctggtcgtccagatcagatcggatggtcaagattagatcatcccacgctgaatcggtatgcaacgttagccgctggatcaccagtggacgctttagatttaaaacaccttggtcgattgatacgcgtccgatctaaatcgaagggctactatcagacctggacgaaatagtgtgtccgccagatctggaccgtttcccccaagatcaatggcccatatccaattaagtgaatccagccgccaacaggaaaatcaacgaaccacgcttcttcttc

SEQ ID NO: 11406 - DNA, 483 bp, Zea Mays
gattaacttgcattcttacttaactcggggtgaccactatgccctgctaacggagcaatcggcttaagtcggcaacgacttaaaccggtgcaacatgctcgcgcttacttaacttggggtgaccactatgccctgatgaacggagcaatcggcttaagtcggcaacgacttaaaccggtgcaacatgctcgcgcttacttaactcggggtgaccactatgccttgctaacggagcaatcggcttaagtcggcaacgacttaaaccggtgcaacatgctcgcgcttacttaactcggggtgaccactatgccctgctaacggagcaatcggcttaagtcggcaacgacttaaaccggtgcaacatgctcgtgcttacttaactcggggtgaccactatgccctcctaacggagcaatcggcttaagtcagcaatgacttaaaccggtgcaacatgctcgtgcttacttaactcggggtgaccac

SEQ ID NO: 11407 - DNA, 740 bp, Zea Mays
cttgaagtaaacacaatcacatctacttctaaagcaacacaatagataggtaaaatcacacaaccccatcctcaagaacctagaaacaattagcattgaagcaagtagcagaagtctatacccttccagtccctaaaatcaacaaattatggtatgtcaaacctcgaagtgccgatcgatcgctagattgtctagaaaacagccctctcgtactctgtctctttctcgatgaagcaggcacgcaaacgcaccatgggttgagatggtcggctcggctcagggaacataagtgggggagcaggagaggtgatcgaaagggaggaggatgctagctgtcgaggatgtccgcgacggcagccccggatgagggttgggcatgatgcgcgggggatgcagtgggaagggggcaagggagtcgtctccggtgggcgccatggatcccccacagcggatccggtggatcccgcggcgccatggatgacccccgctggtgacgctgcggcggaccgagagggagcgtgccgaagttagccgatccggagcagggcgtggatgctggagcaggtcgggtgtgtacatcgacgacgcgaacacggggtggtggtggtggggagggagtgagggaggcgcgtagtgggggcagagctggagaagaagggcagctcgtgttgacctgcataggatgctagacccgtgcagatggcggcgtggggagagaacggaaggggtgggcatctcgt

SEQ ID NO: 11408 - DNA, 934 bp, Zea Mays
attgattatcacaaacgattaagcttaaccatgagacttcgttttatacaaattggaaggactgatttgatgcctagggatgggtgaataggctctataaaatttctcaataagtatcagcacaaacaaagctaattaataaatctaagtgggaaagtagacctggttgactgtagatctcggcttagctggatttcccttgttagctgaggtacaacccaaacccggcttagctacttggatgtctataaaaagcttcaagcctcctcctcttgcaacattgatacaacttggtgtgtggtgttcttataagtaggtaaatactttcactcacttcctataatcacaaatcaccacatccaagtagcgcaactggtagcacgagtaatatatgcaataaaaacaaatgcaatgcaaacaaaggaggagacctcaaaaatgtgaaaaacatcctaatccaatcaatttgtgcattgtttgccccctacaacgaaaaaagtgaaaaacattgaatccgaaacagtatgtgtatctttatatctatcatttgagaaaatataagacaaatttataactgtaaagcgcatgaaaaaaacatcacatgtgacggagagagcaagggcagatctacaccccagccatcccgtccaaagcccagggcttgatctcattagcttcatatgagtctctatttgttccattaagactagtctggtaactctattttcttaaaggatttatatttttcttgagaaaataaaaattacttgaaaaaatggggttgtcactagtcctaaaggaatgaaattcaataggttaggtctgggtcatacaaaaattctagatctgcccttggcagagagttcctctacctcacgcctcacttgtgtttgattgttgggtcggtcttctattcggtagggtacacgtacaa

SEQ ID NO: 11409 - DNA, 644 bp, Zea Mays
tttttcgacatgttgtgtcttagtttttgcgggggatttttgcgtgtatattacatggctccgcctcattaaaaacctcaccccccgggaggaaaagagtgcgggccgaaatgataatgtttggtgaattaccagggcgcattagccctgaggattcaaacaaaaaatttgcggagattatcgatattccaggaatgctctaggtcctcgccggatggcgttgttagcctgtacgcgctgaggggacgccttcgtcttgacgatgaagggaccctcccactttggctccagcttgccccgtgactctgtccgagttgtccggatgagtacgaggtccccttcgttgagttctcttgggacgactgtgtggtcgcgccatgcctttgtttgagcttggtatttgttgagggcctgcagggcgaagacacggtcttcatcgatgaggtccttggaagttggttcgtctacgtcggggacggctgaagtgcttgtccacggtgacccatgttttatttcttgtggggtcatggcctctgatccatatagcaggcggaaaggagtgaatccggtcgcccggcactcggtcgtgttcagcgcccagactgcttcaggtagcaggtcggcccatttacccttcttgtcgt

SEQ ID NO: 11410 - DNA, 370 bp, Zea Mays
ggggcggcgaacgtggtggccgacttgctctcccgtcgtgacacatcggaggaagggactgtattggtcctgtcgggcctgcgtttcgacttcatcacgcgtcttcggcaagcacagcccaccgacccggccctcaccgccatctacaatgaagtgcgcgcgggctcccgtggggcgccatgggcggtgatcgacgacatggtgcagtacgcaggccgcctctacatcgcgcctgcgtctcccctcctacaagagatcttgcgggcggtgcatgaagagggacatgaaggggtgcaacgaactctccaccgtcttcggtgcgattttcatttccttaacatgaagcaggtggtagaagactttgttcgcg

SEQ ID NO: 11411 - DNA, 552 bp, Zea Mays
ctcaacaacgttccgttgagaaatgtgagggagcatgcgccgatcttccctcgcctcgggcgtcatcctgggtgcatatactcgtccctgattcctctatatgtccatcatttgaagaccccaagccagaccagagagttgagaggagcaaacacgtgcaggcgagcgaagtggaggaaaggagagtcggcggggcaaccgctagcaaatcttgcgcccatagccaaagccgctcgcggttcttgctatgggatactcgccagagccacggagggtgagcggtgaagttttagtggcgtgtgggtggtcgcatcgtcggcgattgcacgttggacttcggtgcaaccgtgaatccgccccccagcgtgggcttgcttccccacctcgacactgctggtgagtcctatacctaactattcgtcgggttctagacagtatatagatcattcatagcagagtttgggggtgtaggatctaggacaccgactaaaggggggtgaatagacggttttgactagaataaaatacaatagacaaatttaatcaaatcga

SEQ ID NO: 11412 - DNA, 593 bp, Zea Mays
cccggctgaaggggatgagcctccaaagtcagccagactcggaaatgtggtacctgatgctccttgtacagctgcaccatgtacaaagggggcgtagggtaaccggcggagttaagcacttcccataagatggaaggaaagccatcgtgagagaggaggtcagagctaaaacgagtgtctcctctattggcgggggtgggtgaattcatctgcggaagggtatcaaaggtaaagattatggtggagggaagaaaataaaagagcctggatggtttgaaaagaagcgggttagctcgaatttttacttctttagttcttaatccttcaaattttataatgcatgcatgctgaaaataacggctcctctctgaaataaagggtgctcctagggcatcctttaaaagctaaggactggcccacagggcctacttacttagccacctatttccccctctattcctaaggccttttgtcctaggtctagcgttcgagtcctgacaattcttatcagtttctaagcaagttttagatttttaaaattggtcttcatggtttattgtccttctctgtggtggtatttgctccgataccaa

SEQ ID NO: 11413 - DNA, 404 bp, Zea Mays
ggtctttctgactgctgaatcaagaatcttcactggtttttcacggtactgaaggtctttctgaatctgtactgtctcttcttcgaggtgactttctggtgcttgcaggcatttgcggagctgggatacgtgaaacacattgtggatgtcggacatggattctggtaattccagacggtatgctgcgtgtcctaccctgccaatgatgggatagggacctacgaaacgtggggctagcttcccttttacttggaacttcctgacaccacgcattggagaaaccttgaggtagacgaagtctccttcctcaaatcggagttccctccgcctgttgtctgcataactcttctgtcgactctgagcttcgagtaaccttctgcggatcagtgcaactttctctttcg

SEQ ID NO: 11414 - DNA, 512 bp, Zea Mays
aacgacgaatattttccacccttcttcaaccaaatgaaactaagagcttccttgcaaactgggcatgggaacttccataaacacactaggcgcagaatagcccatacgccggtaagtcatgcatgaagtactgataccaaacatgcattttgaagtttgtcttcgtagctcggtcatacgtccatacctcgtcctccaaagcatggaccaattcatcaatcaaaggctccatgtacacacacattttattccccgggtgtccgagaattaccaatgacatgaatatgttttgtctttgaaatcatacaccgaggggagatttatggggataacaaacacgggccaacatgtgtacggggcagcgctcattccatagggattgaaccatctgtggccagcgcaacacgtatactacgagcctctttggctttctcacggtgaatgtcatcaaagtgtttccatgcttcaccattagaagtgtgcaccatcttgtaaggattgtatcgtttgcc

SEQ ID NO: 11415 - DNA, 742 bp, Zea Mays
gcggcggaggcctctccgcgtgttacggatgctgaagttttgcctggtccgagtgctgggcgcaggcggcgaagggcggtggcgaagcgtagggtgagtgaggtggatggcggtcagcttcgtgtgggcagggctagcaagcgggaattgctgtcctcgccggttggggcgagtgtaggtgagggggagttgtgaagcctttttgagggtgaggagcttaggataatgctatttaactatagggagatgggaaccattctgaaggttgaaccaatgtaaggtgtgatgccctcgctgtacgtgtgtaaatatggtttgtataatgaggctgtacgccttcgcgcatccggctatgtccatgggggcattgtgcgcttggtctatcacatttcatacgttggtccggctgcgccttgtagttggtctatgcgcggacagtttcttggtgtagacttttgcacggatgtaacgctttgcgttttggcgcgcttgttgacctagtccggctgcacccttaggcgacttttgcgcggatagtctttttaggaagacttcgattttgcgcgcttgttgtgctagtccggctgcacccttaggcgacttttgcacggatggtctttttgaagaagacttcgattttgcgcacttgttgtgctagtccggctgcacccttaggcgacttttgcgcggatagtctttttagtaagacttcaattttgcgcacttgttgtgctagtccggc

SEQ ID NO: 11416 - DNA, 756 bp, Zea Mays
agccaatgatctttatatttctgagaatgatgagtattggaagtcaactaatatgcaccaatattatagatatctcaatgctcttttcaggacgactctcatcccaaaaggtggaaatcagatgaatattttgggtgagagtaaagttcttctatcattcatgaaaccagatagcagtggaagactgaatgtttttttatatgatctgccaggagatcattcatgcctcatgctctcccctcaaaggttatctgcatgctcctttcatcatgaaattgattgaagttgttactcaaatcagatatgagaagggcaccagacatcttccttacacccctttttggatagatcccaataatcccgcaggcaggatgaaaaaggctcttgccagttctcgtgagcagacttctgctggtcccacccatcctttttccgctcatggcactcccacaccacgtggtcgtggtcgtggtcgaggtcatggtcgcggtctgggagctcgattggctcatgggattgcagcctttttctccatgtgctgggatatctctgctgatgtgcatgagctggctaggcaccagcgggagacggatgacaatctacatcaccagtcagtctccatgggtcacccatttgctccccgctctcctgatgtgccccttcatgcaccacctcctgatataaatgaatggcaccagcaggcctacggtgtcccattcatgtttgctgatgatgaagaagttaaggaagaatttt

SEQ ID NO: 11417 - DNA, 748 bp, Zea Mays
tctctttcccttctgacccgttgctaccactagctcttcatcgtgcctctgcctttctttctttctcttattgggccacccccgaggaccccatcgggctccttgtcgcgtttggccttcttccggcgatgactaaaaaccgctcccactgcatcttctcctaacgcgtgagtggttgcgatgtccagaagctccttcgtggttcatgggctattatgtcccagattatgcaccagagtttcgctcgtggttctcgaaatgaacgtgttgataacgtcgatgttggcaaggtttgccagtttgttgcactgcgatgagaagagctagatgtagttccttaaggtctcatcgaggttttgtcgatagtttttgaggtcccatgggttgcagggcggatgtacgtgccttggaagttccccacaaaaatctctttgatgttggcccagtttcaaatgcagtctggcctcaagttttccaaccatgcttgcaccgagtcagccaggtatggggggagattatagattatgaagtcgtcatgatacacccctcctgcatggcaccccagtcggtaatcccctaaccagaggttggggttcgactcttctgaatatttcgtgatattggtggctgcctgtattgttgtggcaccggtgctcgaaggatacgacgactgaagtcctgaggccccgatggcggtgggcttaggcttcggctcccatcccaggtcgaaacggcctccgcggcgctg

SEQ ID NO: 11418 - DNA, 719 bp, Zea Mays
tgaattttagttcagcctaccatccccagactgatggacagacagagagaacaaatcaagtgctggaagatatgttaagagcttgtgctctcaagcatggtggcagttgggagaagagtctaccctatgttgagttttcctataataatagttatcaagccagtttgaagatgtctccgtttgaggctctgtatggcagaaagtgcaggactccactatattgggatcaaactggagaaagacaattctttggacctgaacttatacaagaggcagaagaacaagttcgaatgataagggagaatttgagaattgcacaatctaggcaaaagagctatgctgataataggagaagactactggagtttaaggagggtgatcatgtctatttgaaggtgtcaccactccggggtatgaggagatttaaagttaaaggaaagttgtcccctcgcttcattggacccttcttgatcttaaagcgagtgggagaagttgcatatcaactggagttacccgatcatctgtcagacgtacatgaagtattccatgtatctcagctgaagaagtgccttaggttacctgaggagcagctaccactggaggaccttagtgttcaagatgacctgacttatgctgagtaccccatcaagattcttgatgcattgactcgagttacaaggaataaggttataaagatgtgcaaagttcagtggagccac

SEQ ID NO: 11419 - DNA, 830 bp, Zea Mays
acggagggtgcctgatgggagctttgactctgctgactgtagcgcgatggagagggtccagattgcttattgaagcttggacccctgggtggaagcccaaagggtcgagctctttggtgacgttcttgccgttgcgctcggaggacctggaatttcctcttgatgtgccctttttcctcctcttttgctctttccacttgaatagctttgttggaaaggtgagagaagctgtggaagtcttggctggcgaggatggtcttaagctcgggtcttaaccctctcagaaaacgggccatttttctggcctcggtgctgacatcctcgggcgcgtagcgggccagctctgtgaacttgtgcacatattcagtgactgttctcccgccttgagttagctcccggaactcatcctccttgagttgaactatcccctggggtacgtggtgctcacggaaggctgcttcgaattctgcccatgtagcatctctgacggcttcactgaaagtgtcccaccatgctaaagccattcctgaaagctgatgagctgccagctgaacacgctgattctcaggacaagcgatggcttccaacttcctcttgatcgtgcgaagccagtcatctgcatcgaggggattgctggaccccgcgaacgtgggcggcttgagtctcaagaattctcccatcctgtcctggggccttccgccgcctgggcgctggttttccagacttcgagtgaggacttcaatgagtctggtttgattggtcagaacttgggctaggtctagtggtagttctggaggtgcggggtggtgggtctcacccccttctccgcc

SEQ ID NO: 11420 - DNA, 1348 bp, Zea Mays
gttgaagcgtctgtagctatgatgtagctcgaagcttttaaacttctcttctaccctttgtacctcaacgtaatatgcacacatccatgggctgcgcggctccatcgccttcatgacttggtcgacgactaacttggagtctcccactcactaggagtcgcctgacccccacttcgaccgtgatccagagcctgatgacaagggccttgtattctacgacattattggtggcatcgaaagtggaagtggattgcgtagcggagtaggagtttgtgtccgtgaggcaatgcgaggacgatgcccgcgccgcttctggtcttgaggcaggacccgtcaaagtacatagtccagtactcccggtccttgactgggggtggcttctgggcttccatccaatctgcgacaaagtcggtgagtgtctgagacttgatcgtgatcctggggacataactgatgtcgagcccgttgagttcaagggaccatttcatgacgcatctggacgcatcacgatttcgccgagcagcaccgtggatactactatcacggtgtgtcagtagaagtagtggaccagctttcgcttggcgatgaatatcgcatacaacaacttctagatatgcaggtatcgcatcttagactcggtcagcacttcactaacgaagtatatgggcctctgtaccttgagtacatggcccatagtttttctttccaccaccagggtcgagctgaccacttgggtagtggttgccacgtagaggaggagggtctcacctggatcaagcatggccaagatcagtggtgaggttagaaacaccttaatccgatcaagggcttcttaggcctccgctgtctaggtgaaatggtcactctttcgcaggagcttgtagagaggcatccccttttccctgagtctggaaacaaaacggctgagcgcggccacacatccgaccaattgctacactcccttaaagttctggatggggcccatgcgttggatggcttctatcttctcttggttagcttcaattccacggtctaagaccatgaatcctaggagttttcccttaggaaccccgaagacgcactttttggggttcagctcgatccgaaatctttggaggttgtcgaacgtttcttttaggtcagtgatgaagtcatcggatcttttcgtctttacaacgatgtcatcgatgtagacttctatgttgtgcctgacttggttggtgaagcactagagcatacaccgttggtacgttgtctcgatgttcttcagcccgaatggcatggagacgtagtagaatgtcccgaagggggtgatgaaggtagttgtgtgttggtcggcttcattcat

SEQ ID NO: 11421 - DNA, 1001 bp, Zea Mays
gaaagctttacaaaggtggacaaacacagcaactttaagcacagaatttggattcagatgcgtaagattcagagagtaaaaatcaagaagaccacgaaaaagggagaaactggcaaggccagtccccggatgagaaaagacacaaaaataaccacctcgtaggtatcctctgtcgggacagtaactctttgctagatccgccaggaacatacttccttagcgcgacaggacaccgatttcaacaagatgcaaaaggtcatctttagaaacgacaaaaacgtggttaccagcaaaagggagttggctattaggatcaatcggagggatgaccggcgtagctgcactctaatttctcttcccggggccatcacgatttttcaaacatcgtggttcaagaacaaaacacgaaaagacgtgggaactcagaaagctagaaagcggcggaggaaaaacaggaactagggttcaggggccaagaggacgtcgacaaaagtacaggttggcacactgagtcgggcatagaaggacaagctggtggctcgggagagttttggtcgcagcagagtaacgagacttggtcagtacctctagaaagctaaggctcgacaggaaggttacttgggatcagaccgttagacaaaagaacagaatacacataagtgaagtggcatgaaacaagcttcattcatccttccataagtcgggatcattacaaaaggaagactgactcattatgagtcgtccaattgcccctctatccaacactacattacattacatattaaactacattacactactaactaactacattatactactactaaactactaccactactacaactatactatactaatacttaagccggtagcactctgccacaagcgtcatccccgccgccgcccctgctgctgcctttgtcgcagtcaccgtcgccgctgccctcgccgccgtcgctgccttcaccgccactgctgctgccatcgcagcgatcgct

SEQ ID NO: 11422 - DNA, 1024 bp, Zea Mays
gccgcgtgccccacgctcacgccaccgactggtgggcccatggcaccagggtcgtcttcctcgccagaatcgcggatgtggcaatggattctgcacctcccggctacctcctcggcacggacctcccaccgcatccatagcgattcagttgcgacccgaatggtccctgcctattcccttgagctctgcgctatatattcctggaactcgccccttcccccatcatgctcggcaacgcgccgccgtgatccatgaaactaccacttgccaaatccgattacactaccatctgcgcctctactttctgctcgagttcgggtgaagattgatatcgccatccgcgcgtgttggcgacagtctcggacgattggagtcattcggtgcctattgattcctcgctggagttggcgctcggccgcatacccgccctgtgccgtgaccagccctcgatgtccgcacaagccgtaggcatgacacgctgtacactttcgcccagtcctatttaccgcgttgtgccagtccaatccatggattggtcaccagggagggagacgccaatcaccggtgagcgcgcctccgcgagcgacctgggccttttgccgctcggcctcggtcggggaagaagttccctagccgcagattcaaggatgagcggtggggattaggcgacacgcgtcccttttcgctaaattcatctcggcagtaggatcgtgatcggagggttagggtcggatctcgggatcgtaggatgttggccattggatctagatccaatagctctcgctgtgtaccgtttcgttaaagacctagatctaatcccgcgcgtccgtttggatcgggcggctcacgggagccgataccgcttcacgtggccaacttgcataagcgccccctgtgcttctagggaatcaacccgccatccactgcggggttgcgtctatgtcttgggttgttttacactgagatccctgcgttttccagaaaatgaggcctagtccagagaacagaaaaaccagagaaatga

SEQ ID NO: 11423 - DNA, 438 bp, Zea Mays
gccagcattgctcgctcgtcgccggtgacctccctacgcaaggattcatgctgccgccgcccggattcatgctggagactaacggataacgtcgcggggagggaatcttcgccgccggtgagctggactccacttcggtgatcccccctcacttcccctctaccctgcggcttgagccgataagctcaccggtgaaccgccgttctccggccttgctccgcgtgtcccaaccttgccatcgcatcgccgtgactccctctagcttcccgtcgaccatcggaattactgccacgacattgcacacgtattcaccgcactcgcgtttgtcttcacctccggccgccgcgcgtcagtgcccaaattcacggtcactgctcgctgaacctataaattaagcccactattagcttcgcaatatcatcacgcactacatcagcc

SEQ ID NO: 11424 - DNA, 524 bp, Zea Mays
tcacgttttatgcaagcgtactgatatagcgtaaacgtaaaccctttttagcgtaaacagagtaaacagtcgtgggccctcgttccagaaatagcggcttaggcccactttccaggtgatcagccatatcttccttagtcagcacatgtttacactattccattcgtccgtttatacacaatagagaattagcgtaaatacttcagccgacccaggttcccgaaatttaggaattggcccactaccccacttcccactcggtcaaacatttctataccctaacccccgcgcagtcaaccttcctggccgactcgccgcgattattcaggcgacgccagggcgattccccttgctgccctcccgccagggcgattcgccgtcctccgccgccactcgccctcaaccctaatcggtgccgccgttgtcagtgtcttggagccgcccgccgctgacaatcctccgcgcacgcgtcacattgttcttctacacgctcggcgaccgttgtcctgcttcccaaggtgctc

SEQ ID NO: 11425 - DNA, 438 bp, Zea Mays
gccagtggggaagaggttgtgtgcgccgtccgtctcttgatgaacggcgtagattagagaagatcgtaccccttcgcgggatagaatctgggttgtcgatcttactgcagatggttgagattagggattggcgtgggctggcgctgatcgttggatctaggtctgaaggtcggtgttgcgtaccaggttggattgaagaaggatttaatccaagcgctctattttagatccaacggccagtagtattccatacaccttcgtccagtcctttttgctaaagagtcctcagactttctggactttgaacccgccgtccgtggtagctgtgcactgagtctgggtgaatttgcgagtgagcccctgatctttttagtaattgacgcgcaaaccaggaaaatagagaaaacagggaaatcaatttagaaaatgaattttaat

SEQ ID NO: 11426 - DNA, 427 bp, Zea Mays
caactttcctctgaagaatttgatttcaggaggactcttaaaagcaagattcttgatattacctccgctcagagggcaagtgcaagacaacactctagactcacctggatgcggctgggcgatgctaacactaaattctttcacctaacagccaataatagaaggcggaaaaatttaatcagatcgttaattaaagatgacactttgttaacgagtcaggaagacaaattgaatgaggtacagcttcacttcgatcagatgctaggcacgacaggtaggaggagcagtgctgttcactgggaccacctggggtatgccccctttgagttatctgagctggacaactcgattgaggacaatgaaattaaggatgttgtgatgggtcttcactcggaaaaggcccccggtccggacgggttcattgggc

SEQ ID NO: 11427 - DNA, 350 bp, Zea Mays
cgagagcgtgccggtggagcagtcccccgcgcccgaggaggacgtggacgtctcggtgacgtcgccgtccatcggcatcaccacggacgacggagatggtcgcctcagctactagctgctgcccgctgtactgcccagcttctgttcctttttcttgtgtgtgatcttgacatggatcttccatgtatggctgattggttgacttgaacacattcgtctcatccggtttttgcacgtctgagtctgagaatggacccatgctcactgttgaagctgcggctgtagtttacctgcttgtttggcgtgatcttgagtcttgactgatatgcatggttctctacttctctggc

SEQ ID NO: 11428 - DNA, 559 bp, Zea Mays
gtggcatcatcatagtttacatatacacaacgaagggcccgtcagccacatcgcataaataatacaaatcacatcttgttgccctccctctctattgcgagccgggggagggcagcgttttcactcactaccgcaacacgagagcgatgacaacaaacatgctacatcggcttagccttcggaataaggcctgcctctcagaagttaaacaacatcatcttcaactcctcgccctaaaaaagattctgcagatccccctcctcaatacacgtcccggacgttgaggatagcaaatctcgttggccgcccagatctagtcgaagacgggatcgttcccatccccatccgtcgatgcctcccacttcgtgacaactcaccaacatagtgcttcgacaccacccttcaccggcgatgctcttcggctatcgccccagccgggggagtaaacccttcgcgcacttcaggctgcggcaaagcctccactgcggccacatccaacgcagcaaaataatctaaatcttcatctgaagactcctcaatccataaaaatgggctccca

SEQ ID NO: 11429 - DNA, 289 bp, Zea Mays
cgtctattttaatggacatgcatcctgtagcgtctgcgatcaccggttacacaaagggtgtatctgttactccccccgcggcattgagggcacctggacatattgatgagcacacaaaaacggcagacgtggtcggcgcagataagcacatccccatgagacatattgggccgcatgaacaggacacacctcatattcttcaaagccatgtaagttctcccaattatgatactattattttcttacatacttttttgtaatgttgtacctatattacgttagatttagt

SEQ ID NO: 11430 - DNA, 568 bp, Zea Mays
gatttttttgtttccttgtaacttccctcggtaatgaatttttacttcaactctttcgttacccttgattgctttctccacttcgccacttcacgagacttgccttaactctatccttggttatgtttttcacggttttcatccttacccttgtcacatctatatcttaccctgaagcttatattatacatgtcgtctaaaacattctctcttccatctcaactttaaagttatatcttacccatttcccttggtcgtatcctcttcctcgttgtttgcgagtttccaactccatcctttgtggtgcttctgtttagtgttgcttttacctttcccatttctagatcataccttggtgattatgttatgtatgttatctaaaaatctccaatcccctagcccaattggagggcgatgttttacttatctcacccttgtcaatatcctcttcttcaccgtgtgtaagcattgacgtaactccattctttgttgtatttataccacaggatcttctatgccttcatctgttccctcatacccttgtctgttatcgcctttgacccttgtg

SEQ ID NO: 11431 - DNA, 541 bp, Zea Mays
agtccggatccccatgggaaagtgtcggacccctgtatatacagaccggacctccgggtaaggtccaggacctccacgggcgcaaatcggacccctaggatgggttccggacccctctatgtggggtctggaccactcacagcagggtcccaggattctgggacagagagtacccaggccttaatcaaggccaggcgggggtccggagccggcacatgtctggaccttaccatatacgcttctgctccccgctcaggtggagccccgatgctgccacatggcgtggtgcgtgtgacgtaagccaacaggcagagcctgacataagacctctgggctgcgcagcctctgcatttattgcgaataagccgcgccgtctgtccattccactgacaggcgatgtcccacctcgatatttattgagccatgtccattccactggcaggcgatgtgtcgcctccgcatttattgagacttgtccattccacgggcaggcgacgaccagtccattccgcaagcgacatgtctgtccattccattggca

SEQ ID NO: 11432 - DNA, 783 bp, Zea Mays
tgtgcaggatagggaattcttggtgacagtcactgtaaaaaagattggtgataggtggtggtacaatgcatgcaaaaaatgcacccgcacaactgtggctcatggggattcctacaagtgcagcgatcaagtttgcgctaccattggcacgcccaaccaaaggttaggagacatctcttcacttcaattgccaccattatacctttgcctcccaacaactctcgctattttgactcccactcacatctaatatgcagaagctacttccctatgcatcaccctgattgaacgtttccatttcctatacacacggcctacccattttcaccgtgttgactcggtatcgccatgtgtttcaggtacaaactgcttctcactgcaggggatgagatgggtgacacagacttcatcctctttggtcggatggtgcaacacatcatcaagaagtcatgcgatatgctcatagccaacaatccgaccagctttattcctgatccaatcacagatctgctcgagaagacgtatgtatggaatgtgagtttctctgaccacacaatcaatactataaatatttgtttccaagtcaacgcagtcgtggcagagataggtactgcaatggactccatccaagcatcttcatcgaggccaaaacagtcacaacatgtgctattgcaaggcgcacccagtggcattgaagacactcctaacaaagcctctaacttggtcatgcctttgaccccgctcacaccacaaagttccacaaccagtgtgcaagataaggtg

SEQ ID NO: 11433 - DNA, 615 bp, Zea Mays
gttacatcaagtgttgcgctaggtggatggaagtgttccgaataaatgccgcaatatggttgtattcgtgacaaggaggtgtaggttttactcgactagaagtttggttgatgtggctaggcattgctttggcttgtgtggtgaggtgatgacatgccaaagtagtcatcgcttcctctatgtttataagtcgagtcgtgacgatacacattatgcgttcgttaaattatgctttgcatatagggtatggctatgctcacaatttcgattagacacatcgggtggtcaagtaggttcgtgatacaagttgtgtaatggagttagtttgttttagaatgattattgaaatgctcagttcatattataaacatgtatgtgttcacgatttgggaagtaagtgcatggtggttgcgagttggagattagtggtttacagttcatatgatttggtcaaagtgcgaatatacgcgtaaatacgtatgtttataaaaaatgttgtagtgtatgttgtgtctcggattgtgataataatgggctagtcgacgtgtatgttatttagcgggctatgtcgttgctctagttagccgaattgttagacggctttggttaagctcg

SEQ ID NO: 11434 - DNA, 338 bp, Zea Mays
gtccaccgttggatcgcatagggttggtccagattagatgttggagtggtgcgccaggagtcgtaggttttggatctgatggcgggggatgcagttcaataccggttcgatacattatatccagatcattgatcgaccaatggatggatcggatctgatcgtagtatggtgtcccgtgggccgtaggatagtaatccaaaggcatatataacttaccggatcgactcgtgcacgatttaatcttgccccatggtttgggatccaacggccacgattcaacgataccccttcgccatggctatcttacaaaagagcccctcacgtttgttgcattcaac

SEQ ID NO: 11435 - DNA, 367 bp, Zea Mays
gccgcctctgcctgtctcgccggcgactgctctgtctctcttcctcgccggcgactgctctgtctctcttccttcgtcctttctcgccggcgactgctctgtctctcttccttcgtcctttctcgccggcgactgctctgtctctcttcctcctccccgttgagctatcgcacacagtcctcggtggccgcgtgagctgctccgtttgtccgacgattcgtgtgttcaacgtccccgacgagtgtcaatcccagacgacggcgacgctcttcctctcttcggcagtgggctggaggattcgatggatagaggacgcacaggaaatcggtaaatgtagcgggcgaaggacgagcgctatattttagcg

SEQ ID NO: 11436 - DNA, 946 bp, Zea Mays
ctaccgacttaaggacatcaacgacaaccacttgactaacgcatgaaacatcgaaaacttaaggaagttctacccttaagtgtcatttctattcatgtactttcatactatagcaaacagaacatgtcgaccaagtcaccacattctgcttgggggcaagaaaatggcggccatatccacgctcttctatcttaaggaactctagcgtactcacctgtcctaagatacatctacgcccagaaggacccagtggccacgactacgataactcggaatgaccaatcacaaggactcactagcaaaataacattaaaataaaagcacaacattcattcagctccatcgtctaagttcatttacaaaagaactgaagatgactagggctcgcctaatgcttcatggatttggaggccgggtcagaatgaacttcgtgtcaataaggctcgcgatcgaccaggcatgagggcgtacttgttcttcaatgtcatccaactcctcatcgctacggccagcagcaaagccctccacgatcacagtggcatcaatctcatcgaagttggagaccatctgcccaatggccatgctgctccagtggaacgcaccttcgacgacgacgcgctccacgtggcagggcatcgcatgcagccaattgatcagacgaaccatgatcggtgtcagaggagagaggtgggcacacaccgtgcccatagctagccgaagagcctaacgctccgtgcttcactctaagagcgagttctctccctggacctgtgtggcgacaacatcatcatcggcaagcgcgggcttgcacatctcgtcctccgtcgccttcttcagctcctccaccactttcccggtgtcttgggcattagagaacattttctggagctctgtggaaggaaaggcttgagcaacctagagtgtcagttgacagaaacacacaacc

SEQ ID NO: 11437 - DNA, 503 bp, Zea Mays
tcgcatcgtcaacctcattatgactgaagattggcaggccccaataacactgtttctgcaaggatactaccacccgagtgacgtcaatgaggccaagcgcctcaagcaccgaagcagggacttcgtactagtcggggaccagctatacaagaaggagatcagtcaaaccatgctaaaatgcgtcaccgaaaccgaaggcattcagatcctacgtgaagtccacagtggaacttgcggctcccactcagggcccagggccctcgctgccaaggtgatccgtcaaggattttataggcccgctataatctgcgccgcgaatcgagtcacgaggtcgtgcgaagcttgccagaagttttctctccgctcgggcaacccttcgcagttcaccaagctgattgcccacacatggccacttcaacactgggggctggatattgtcgggccactacctacggctcaagggaacctcaagttcaccttcgtcaccgtcgaatactttacca

SEQ ID NO: 11438 - DNA, 1116 bp, Zea Mays
atttcctctcgcgccagcccaagtcccaccgcgggcgctcacttacgcgtgggccctactcgtcggtctccaccgcactcgctcctccctcccttcctctggatcgcgggaccacgctgtcaggtcgtctccccaacggcctccgtggattgcgctcgcgctagaaccgggcgggagcctatcccagctgccctctcgccaggtattccgcgcctaatccccccctctcgtgggcatataaattggacgacaacctacctccaccccatctacccttggctccttggaagcaccattaccgacgggggaaaagcgtgatgcgtccgccgcggggagaaaatgtccgattcaccattgtcgggccctcaggtccggggtaggaagcgtcgccagggcatgtggaccttgcggcatgcacgattgagcttggagttgcaccatggggcgaattattgctcgccggagcaactttggcatcccagatccgtccaacgccgtggggagcttgtttctgccgccactgccggtaagaatactctctagtatactcgcgttgatgtcagctacgtgtaggattagttggcgatggtgtctgggcgccgggccaatggatggtcgtgggcggcaatggcaccgccggctgtgcaggacatgccagcggccaacgtaggagggggaaagaagacggagcgggagcccttgatccgtggataaacggtcctgttttgaccaggctgatacctcgttcgtccctttagtctggccattggattacgtgtagacggcttagattggtcgcgcgaatcgtttaggcaagggttaatccgggccgtaggatcgaatcggatggatccagggtgatctcgacttctttaaatccctacccttgatctttgatccaagggttcctgctgcataccggttcacgcgggtgtataatctaatctgagtcattcactctagatcgaacggctcagatggtcccgtaacccttcgaccgagcaaggtttcaaataagtccctgaacttcacagaatcaaactcgcggtccattgtgactattcactgagtcttgggaatcttgcgatttagcccctgccttctctggtaatagat

SEQ ID NO: 11439 - DNA, 964 bp, Zea Mays
ggttgaagtcttcaccaagaattattgcctccattgatagaagaaggttgctagcagaaatattatgcaatttggctcgtgcatgttcaccccgaggactgtgaagacttcgggtgaagttgtggaacttgttccgtgcacgaagaacaaatggggaattggtgggatttctggttttatgtgaccttgaaagatgccaaaggtgtaccagggttgtttctgtccatactatgctcgcactgctacattgcatttccatggtttaaactgaagaaaggagatgtgaacgaagacgcccttcgtcgcgcttccaagatgagcagcggtcgtgatttagtggaggaatttgttgcatgcgtagtgtagccacttgcacatggttgggaagtgggcaaagtgaagctgcgcccgatgcctttcttgaagggtcagtaggtgttgagtcctgccttcaacattgaacttcaaggtcgagatgctgcagctcttatctgggaggtggaagcagaggctgtgaggattgtagggaaatattcgatgaagacggagatgccaaggagatgggatatacacggtttgaacatcagtttgaaccatatatttgagtttaatggtctttagtatagttcgtaccctgaggaggactctgttaaagcggcaacgcgggtagatgaaggatgctctaaagggaaggctacgattacatcaacgagaaaaaaagaaaaaggttaaagttatggtgaagggcgcgacaaaagcatccgaggctacaagggcgtcagacgagtttgttgaggaattagcggagacgtgtgtcgagctggaggaggtcatgacttcgcccgacctccggaaaacatcattgcagatgttgagggtgactagggaagattattttatgtcttgttgtaaaagctatgatggataaggactgccaggagtccacgtggaaaaagcggaaggt

SEQ ID NO: 11440 - DNA, 636 bp, Zea Mays
cgctcatgaaaacagagaagtccggggtctgattcataacaatccctaagagtcaggcttccctcgggtggacggcgggtttattttataacaacagaggctcttatgtgcaaaacgtggccagcgaagggggtatcggccgcctctgtccgttggattagttctggacagcatagattaactcgttcttcatctgaatcggtacgcggctcgcagcggttggattagggataaacggtggagcaccccaaagcgacagcgccatccatccctcaatcgacgtccaggattcatcccacaaaatgtgatgtggttcgtttaatcccgatttccattcctagatccaccgttcgcgtctgcccaaacccggcggcgcagcaccgccgcagcgccattgccggcgctcccgactcctcacccccgcacgccattcaccaaacgattcagcgctactctacgaggggaaaaccacgattcaacttagacggatactacacggagaagatgatctgggcgaggcggccacggcggcccgcggaagtgctcgaagaaagaactccagtgaggaattcgtcgtgctcagaccaccaattccgcccgtgaaggtctcgattacacacggcgcacccaggcgag

SEQ ID NO: 11441 - DNA, 356 bp, Zea Mays
gcaatgcaccaggagggtgcagatctgatgggaacacaataacctgtcaggtttgtgacagaactggacattctgcccgcaagtgctggtaccgatatgatgaagacaactattccaactcaaattccaagagtgcagcagcagcaatgcacagctatggtgtcgatacaaataggtataccgacacagctgcaacggatcatctcacgtctgagctggacaaactgaccactcatgagaagtacaaggggacagattagattcacaccgcaaatggtgcaggtatgaacatctgcaatgttggtaatgctgtaattgacacccctactaaacccttgtttctcaataatatcttg

SEQ ID NO: 11442 - DNA, 1025 bp, Zea Mays
tactatgttcaatcgttcttcctccagcacatcgatatcttctagcctggtagcttctgctttggctatgctttcgaaagtcaacctcggcgccccgaatattaggtcggcgggcagcactgcctctgacccatagaccatgaagaatggggtatttccatgtagagctcgactgggttgagttctcaggctccaaaccacgtatggcagctctctgatccattttcctgcaagcttttcactcttgtcaaatactttcttcctgagtgcttccagtatcattccgttggctctttctacttggccattggctcttgggtgcgctactgatgcatacttaatctggatgctccgctactcgcagaaatcgaagaattcagagctggtgaagttggatcccaggtcggtaatgatgctatttggtatcccaaacctgaatattatgtcttgtatgaattccactgccttggctgaggtcaaagaggcaatggacttgtactctatccattttgtgaatttgtcaatggcaaccagtacgtgagtatagcctccctgagctttcttgaaaggtctgatcatgtccagcccccaacatgcaaatgaccatgttacaggatggtctgcagctgctgtgcgggtaaatgttgttgctttgataagaattagcaagcttcacatctctggactaactcggcagcatcactcttcgctgttggtcaatagaaaccagatctaaaagccttcctgaccagagttctggacgctgcatgtactccgcactgcccggcatggatttcatctaacagttgcttcccaatagccaagtgaatgcacttcatgaggactcttgtcgcacctcttctgtacagtatgcccctctatgagggtgtagttggctgactgccttgtgatgcgttccgctgccaccttgtcatctggttcttcttcattttttatgtacttgatgataggctctttccagtcattggggtccgacactggttggctcaaggtgctgcactctt

SEQ ID NO: 11443 - DNA, 852 bp, Zea Mays
ccctcccttccttttccctttttccgcgtgagaatgacaggtgggccccagcgaacggtgactcactgggaactcctctcacggtcgcgcgtcgtgtcgctggcgggtgggccccttatgccagatcattcgttcccaacagatcgcgaaccaggcgggcgaaacagaagccgcgcggtcctcacggtgctccctcaaccgaatcccaatagaacaccgatggccgcgtgaatcctcccaggctcgttctcattcggactctcggccatggtaatataaaatccaggtcctctccccctattggccatcctattgagctggccgcatcatattcatcaatcggagagagaaaagcgaggaggcggaggcagggaatcacggggtctcgtctccgttgccgtcgggcgcccgggtgctagtcggggacctgcgcagggtggttgcgaattcgtctgtggcgctagccggtggaaacaacgggcggtgcgaacttaatcgctcgccagagtttagattgggagctgcgccgccgcgtaccgtgtacagggacattgcctccgagaatcgaggtaaattcgcctcccaatcgattcaccatgctctcgtagggatttttcggtagtcaatgcgtacttagggcactgggtgcgtgatttgggtgttccccagcaagaccgccgccgcgcggtgtgcgcgcgccgccgccctgagcaactatggcatcagggtcatagcaaggggtagatgacgaagtgcgggtcgtctgatcgtcgttatgcggtggtgattgaatcactcatatcctgccatttcaatgatctgtggccgtaggattagtttccagcggcgggg

SEQ ID NO: 11444 - DNA, 464 bp, Zea Mays
gtggatttggtcgcggggtgaagcttatcaactgcgcctgtagccgtgcgacatggccggaccgtcggtgtcgccgtggtactccggtgacctcaattatgtcacgccgtagctctttaccacgtagtagtaaccgtggcacgcctaggcttgccattttagaaccgttgcaccggcgggcgccatgactgagccgccagtgactcttccctccctccggtcgccagcacgccattccaaaattaggagccacctcccttggacactataaattgagcataccactagctccgttaggtaatcacaaagccagagcacccgctcctgcctccgattagccaccatagctctctaattctatcttcccccaaatcgggtttccgcaccaccgtgaacgccgcgttgtggccagctctctgcaggtccgttcacgccctcctcgctcttgtttcagcacccttgtg

SEQ ID NO: 11445 - DNA, 378 bp, Zea Mays
aagcaatgttgactctaggtcgttaaattagttagaaatggaaagactagactgttcaaaacatgctaattttgttattacaaaattattttattaaccttacatctttaaacatcaactaagttgacattttctcttatagatggtccgtaccattcaaaccactcggatcaacaccaacttcatccctccgccacgacaagttcctgtctacctagtggtagttgaggaaattcctgtggatctccctcgcattcgggtggagaacggagtcattctggaggacagctcggaggagtttctgcctacgcccaccccgttggtagaatcactagccttcgcagctagatcgtcagcttcagcactggtagcaccagc

SEQ ID NO: 11446 - DNA, 1064 bp, Zea Mays
ttatgattttccatagtaaaccactcgaagtgccatcccttaatactgtatttcaagggatgtcgatatactcagctttcctgcctcggcgaagttccaagctagcacctccaacaagctgatgctgccctccagccatcccgggccaacaatggtaaaggtacttccaaagcccaaagtgtggaataattccaaggaaagcttcgcaaagatgaacaaacacagcaatttgaagcacagaattgggatttagatgagtgaggttcagagagtaaaaatcaagaagaccgcgaaagaagggagaaactggcagggcagtccccggatgagaataagcatgaagataaccgcctcatgagtatcctcagttgggacagtaactccgcgctagatccgccaagaacataattccttcggcggtagaacaccaatctcaacaagatgcagaaggtcagccttagaaacaacagaaacatggttaccagcgaaagggagttagctgttgggatcgattgcagggatgtataggatagtggcactctgttttcttttcctcgccatcgtgatttttcaaacgacgcgaacggaatcaggaactcaaaaagctagagagcggtggaggaaaaaacaagaactagggttcagagctcaagaagacgtcaacagaagtgtgggttggcatgttaagtcgggcgcaaagtggcaggacgatagctcgggagaagtcttggtcgcagcaaagcaagcatcactcgggcattacctctaaaatgctagtgaaccgtcagatacaagagcacaatacgtagcaacagattggcacaaaagcagggttttcattcacaggggggagatcattacaaaattgagaccgactcatcattagtcggcctcccacccctcgatcattgcattacattacattactacttagactacactacactactagctaaactacattattctactactaactacaactacgctatactaatatttaagctggcagcattatgccaccagccttgccgtcgtcgccgtcgtcgcctttgccgtcgtcg

SEQ ID NO: 11447 - DNA, 304 bp, Zea Mays
gcaagttggcggcgaggatcacgcgcggacttctcccggttgttacggcggagaagaacggtctgacggagtggtcccaccagcagagggcgatccgcgaatctggacatgcgcgcgcagactggttggccgacgagggaggctgaccacaagggtccacccgacggtgacacggggagatgagtccgcgagcgcacgcctgagtgtctgaccggatgggcacacaagtcagcgaattcacccccatacgcaggttgggccaagcgcgggacaagtgttgatgggccgaccaggcataatcggc

SEQ ID NO: 11448 - DNA, 559 bp, Zea Mays
atcggtacgcgcctgcgactgtcggatcagaaatcaactgcccagatctaatactgcccacggtgaatcctatgcgcccgattagagatggacggactggattgctccctccgaaccggtaccctaacatctaatcgtgaccgaacacaagcagatcgacggttcacggtcgttcttcttccttcgccgaccggacaccgccagccggactccttgcggcggcgcagccaccggcgtaaggcgaatccacgaaagaacgacaccaatctcagagccctatttcccaaacgatgcggagtccatgtcgagcatgataagggtacccacatgggcccccgtgcagggacacgccccagccacggcgaggagggttgaggggaacaaattctactttcgccgagcgattggtaagctaccagagccctacacgatccccgcacggtcgcaatagaagagaagcacaggacaaagcaagggggagttatctcaccaagtgtagaggcgtaatttgcgcagggcacgacgggcgacggaatgtaccccggaactccgatgagga

SEQ ID NO: 11449 - DNA, 406 bp, Zea Mays
gttcaatggcttccagtatattcatcatatatcgcttcttctgcccctcgttttcccctcggtagccgaagagatttcccttgtctgcaagaggctagtcagttcaaaccttaaaggacttagcagtgcaaatgggaaagacttagtcattaccttcaaaatatccgagacttcagcatcagaagatgaagaaggtctcgtagtctgcttcggcacatcttgcatgttcgtcttctcagaggatatctcagcaagcttccattttttgggagccaatactttcggctctgatatagtttttcgcttcttcaaagcctcttggtcttctttaaccgatcggatagcctgcctacttagaacactgacaatcctcttcctcttgactcctctagccccttcatcaagc

SEQ ID NO: 11450 - DNA, 277 bp, Zea Mays
attggaaggtagatgacagattggtgaccgtcagatccgtggggaagggcagtgattagacgacgtgcataccccttcgctaaatccatcctggacgccggatcatgattggagggtggaaatcagatcgcgtagacttaaaacccaagccttatatctcagatccaagggccctggctgcgcaacggttcgagatctaatccgattcgtggatgcgcgatccaacggtccgaatctctccttaccgctttggctatgtcattttgctattgagccc

SEQ ID NO: 11451 - DNA, 477 bp, Zea Mays
ggcttttgtagaaaagttatttcgtaatcctacaaacattagctttataattaaatatgatgtgatagtggtcgaagttgtatctctaatacctaatgagaatataatggagggaatatgtgtttttatttcttcatccagagactagcacctaacggtgtgtttatgcaatatagtttcataatttcacatttcaattagtatttaccttattggtcgaccttcttcataactctgtaggtattactgtcaacaacacagctcgtgcaattcgtaactttgaaggtattcatccaaagcaggtatgtgtattgtcgatgttccacgtatttcaaattctctctcccataaacctgtggttccatgtatgtacaaatatgcaatgaggctgcatgctcaccactaccactgcaattatattttctctgttctgtattgtaaaatcatactgatctggttggtgttggtgtagaccct

SEQ ID NO: 11452 - DNA, 725 bp, Zea Mays
ccgtgcggatttctcggcacaatcccaacagcttgtgcctagtttctctatcgcagtgtataaatacataccctcgccccgcccctatataacccagccgctcccgctcccttatccatctagccgagaacccggccaccaccaacgggaaccgtagacggaaagagagttagagaccgccggtgcggatcttcttcgcgcgcgtggtattgggatggacggcgactccgggggccagttcgtggggtcttcaggcttggtgattcggcgtgtgaatggttaattgcggatcggagttctcactcaccgccatgtcgtcgtacaccatggtcgggcgctgctgtcactctgcttgcccaggtgagagttctccttgtttcgtaatgctcctagcaacttgtattagcttccagatcgtatattggggcagtggggtggaaaatggctgttgcgtcggcgtactcgtcgccatgggagcacggtgccgccgcagattaggtacgaccgcctggtttggaacctaatctccagtagaatcatgccccgtggacttgacccaaaacccgcggtgtggtcgccgttgtcctgttggggaagacgagggtcttcggaccgttcgatctttcatggacggttaggaatagatctggacgacccccttgatcggatgaacttgcgccttaggatttcgaatgggcggtcgatcggaacctggcatcctcccg

SEQ ID NO: 11453 - DNA, 1687 bp, Zea Mays
gtccatgaaatgtgacccatagtatgggggtaacatggggatgatcaccaacttgagggttcatattatcctaagcctactcattaactacttgttcaacttattgcatgtctccaacttgatcttgtacattggcctcaagattgacttttggaggaacatcaggtaatgccagaacagtagggacttgaatgacctagtcccctagcatattaatatcctcatccatgacaattattaggtctggtgggtgaaaaggcatgaatatctgaaaaccctaccccacagagctatcagagggcaaaaggtcttctatccctgaaagttagaaatttagtggctcatcagggtcttcctgaccaactagttgctattgtacacatctactgcattttccataatgccatccctaacgggaggggcattgagatcaaatcctacacgagctactggctaaccaagaccaaagaaatcaaaaggcagctcctgctcattcggggcgtaaggtggcacttattcttcatcttcaggttgtgatcctaacatgtcatactaaattatttcacattgcatagtctatgatacaccatgaaaactctcagcaacactaaacacaatgaattaaggcacttcttctaaggatgtcactcttgccctcaaaagaagccttgtaatgttggaccgatcaacatcccacataatgagagccaaaagaagcaatagcatcctaaatatgctcctaggcccaaaaattcaagggggaaccgagaagcatgagccaacattctcagttgaaatttaaagcctgaaagttccaagcttcattgtgccttataacagtgatgaaagtaaagcctagagcctgctgcgggtctagattaaccaagttatctctttcaatcacaaaactgaagtgggttattgcttgacctagatgagagcattgaatcttctgaatgtgcacatgacactgacccacattatattctataatgaagtcggttgtgtcttcaaagtttagatctcgctcgagcaaatgatgaatcgagacaatcctctagtcctcatgaatgggaggttgagaacgtgcgactgcatgtaccatgatttcacgatgctgaacttgctcccggacgaagccatgtggaatgattggtgcaggatcaacccgatgatatgccattgttgtttggggaactggggttgaaagcaatgatcgtgaagcactcgacgatgggtgctagtattgagattgctcaacgacgcttctcgccaagggggttttgttgaacattggagtttgctttgtgactattgaagacgaaggggccttcctagagttgatcgcccagagtaattcttaaaggtagagaatgccagtggcccaccagctagagaggcgtgcaaaactataaatttggagatgaaacccatttgacattcttgaatttatttgtaaatgaatcaagtgttgaattttaaacatggaaaccaatctttaaatgatgccatttgcaggtcgattgatagtggccatattgtttacataataagcatcgaatcagttgattgcacgaagaaatatcatgcctcacatccacgtgtgtaggccacacactaacttgggctcaaaggcctcttgggcctccaaataaaacgagaattctgagccaatttcagagaaagc

SEQ ID NO: 11454 - DNA, 391 bp, Zea Mays
cacaaagaatggcttctgggtctccgtgcatcggatgagtccaaatttctgctcaatgacccgtacccattcgtcagcttcgagaggatcttcggctttgacgaaaagtgggggacgggtttccgagaaatccaagtacgaagtttcacggggtccctgcggataagccctcccgccttgctgctgaaattgatttcccgccatttcacgtagaaagcaggtgttgtcagcagtcgtagtgaccaaggcagcgatagcctcggccaacgtgggcggtaccggcggtggattgggtgtgtcttcttgaccacgggacgttcccgcgccgtcatgtgcacgagttctggatggcatctgaagcaaagaaatatttggaaaaaatataacatcc

SEQ ID NO: 11455 - DNA, 412 bp, Zea Mays
cgagggggttgaccctccttcgtcacagagtgcagaaaggcttgtgtatgatgagaagaaggcccacagatgatcgtatgatgggtcgggtcccatgtggaccatgatctgtcgccttatcttgtcacccatggagggcaaggtcaagtcttgctccttgtcttgcctctttgggacgaggtagaggttgccaatggcctccatgatagtttcaagattcctgggcagaaggggtcggacttctaggtcccagaccatctccccctcaccgttgaggatgaagttgaggtttccaaaatgcatggtcgttctgggggtccaaacggtgttgcgaccagccatccaaatcttgaagaagaagacgtcgagaacacgcaaggtccctacatggcgcgccaactatcggtttttc

SEQ ID NO: 11456 - DNA, 408 bp, Zea Mays
ctggtatccagtaaaggtatcagcaaatgcagcaacacaagatgagaccggtcctggttactgactctatatttaaaaattaaaataggattggttgatgtatcggctcttgatttggaacttcaaaagtttggatatagtccttccattgcaccgatttcctagaatagtgaactcaatattttgctagctaatatgaatgaacattttttgcttccgcctgtccaaacaggccataaatctttcgctcagcatttgtccatttgccaactctactgcaagccccatttccaaattgctgggacgcttcacaaggggggaacacctctaccagtattgagtcttcaaattccaacccagccttgccatacaacattcaatgaactaaaaaaacatatcccattcagt

SEQ ID NO: 11457 - DNA, 380 bp, Zea Mays
gaaaaagagagcagtccacagcgaccacggtggcgggtactcagtgttccctgatctatgagcgcttcatctatggtctgtgtggtacggaccagacatcgttgtctccgtcaggttggcacactgtcgatgtcggtgaccatatgattgtgtttgcagccatccctcaatgtcatctgcttcgtcgcgtgtattattgttctctccgattaccataataggtcgttggaggccgacgtatagacatgtctagcaaaacagcctgcccacatcgaggctatcgtggtcatggtggtcggagccatgcagagcactgtagtcgacgggcacctaggcacacttacgcccgccaacacggccaattcttcgcacaatcattt

SEQ ID NO: 11458 - DNA, 512 bp, Zea Mays
aaagcgtgcagcttcatcacacaaaagtatggttacatacatacagcgagggcatcacacattacattggctcaaccttcgggatgatacccatctccctatagttgaacaacattatcctcaattcctcacccgcaaatagacttcgtagctccccctcacccacactcgccccagccagcgaggacaacaattcccgtttgccagtccctttcacacgaagacaaccaccctccatctcaccacgatgacgcctatcacttcacgacaactcacccactctccgtttcgtcaccgcccttcgccgcctacgtccagcactcgcacctggaagatcctcagcacccatcacatgcggagaagtctccgccatagccacatccaatgctgcaaaataattcaagtcctcttccgaagactcctctgtccacacaatcgaactcccagaatcatcagactcaaaacacttagacacagaatcatcagaatcgtcttcagcaaccacgatcgaa

SEQ ID NO: 11459 - DNA, 568 bp, Zea Mays
cgacaggttcgctgattctgaaccgttcgatctaccgcaacgaccaggactacatccgaaccagtacgcgccgagggtcgtcgatcaaacaatctacggtcacgatttaaagcgcaaatgggtacgcgctggatctaatcacgtttgtaggttaggatcctacgaccaagattagtctccccccccccccccccgacgacacaagatggcggcaaccacgccggcgcgcgacgacctcgcgtaaccgcgccccattcaagactccgaacggctctaggcatagaggaagggactgcggatgtgatagaaggtcgctcaccggctgtcaagttgtgaaggagcccgcccacggtgtgatgcgccacagaggagaaggaagaagaccagcgagcaattcttctagcccggagcgcctgcgtttcctccaatctgcacccctaggttctatgtcacctggcggaccaacccgacccatcgccgatcctaaaccacagcgcacacgtgggacggagccgacggtaatttcctctctactagcttcagagctcagatcttctctccccccccc

SEQ ID NO: 11460 - DNA, 670 bp, Zea Mays
atccgggctggaggcctgattgcttcaattgccctaatcttctctaggtttgcttcaatgccccggtgtgaaaccaggaatcctagcaactttcctgcggagacaccaaagacacacttgtcttggttcagcttcgtgcgtgttgctcgcagcttgttaaagaccagggtcaagtcttccactagagtcgaccctctcttagtcttgaccaagatgtcatcgacatatatctctatcctgtccctaatcaggtcctcaaaggtcttactcgtcgcccgtacaaatgttggcaaggcgttcttcagaccgtagggcattacaacatagcagtaaagcccatccactattacaaaagcggtatgcttcctatcttccctaggcatctggatctaatggaaaccagagtaagcatctaagaatgacaagaggtcgcacccggaggtagaatccatgacttgatctatgcgtggaagtggatacgggtccttaggacaagcattattaaggctggtgtagtcgatacacatccgaagcttcccgttcgcctttggcacgatgactgggttggccagccatatagggtaatggacctcttcgatgaagccagcgtttagcagcttccagacctcctcacggatgaagtcctgccgctcaacagactgcctccaag

SEQ ID NO: 11461 - DNA, 376 bp, Zea Mays
aaaacagggaacccgggggcctaactcataaaatttcctaagcctcagttaacatcctcacaggacggcgggttgatactatgataacagaggggtttatttgcaagttgcgcaaccgaaggggtatgcacgcgttctggccgctgaatcaaatatgaacgtctcagattagaccttccgattactgacccggtatgcgcttctgatccttggatctgaattcgatgtcccagatcccatcacgccagcgcccgatcgtgccatcaaatggacaatccacgacacatatttaatgtgcggaaggggtacctctcaagtctaatcccagccgtctacccccaaatctatggcacgcgcgatatcacctacctccgac

SEQ ID NO: 11462 - DNA, 619 bp, Zea Mays
catcaacgacccagatcttatttacgcgaaccagtgtcctgattctaatctgagccgtcgctggtggatccaacggccgcggactcatcctcctcccacagcactgctacaaggcggcgcgttcatccgcggcggacgccatcgccggtgacagccaaatccggcaccccgacccacattaccccacgtgactagggaattacagagaggaagtgatgatgatctaaatcgaacacgccataccaggtattgtcgtctcgacggtgtaggtcacattgtatggcagagccgcggcgaacctcgatcacagcgagaaattgactcccgatatctccgtcaaacacgtccctgagctcaagcaccgtcggcggcttcaccccgatgacccaggcaacacccagaagggagtacggcggtatgggcggtgtttgccgcaatggcgcgattctttgaccgcacaagaagccagaggtgatggggaggagagaaatgacagggaactcacgacgcaactatatggtcttcgcacgtagagtacggggtcgcgattgggttagtccctgatcgcacgcgcagagttcgccgcggacccgacggatgcgcgtgttgttgcgacggc

SEQ ID NO: 11463 - DNA, 437 bp, Zea Mays
aaatcgtgtgccatgtcgcatcttgaagcgaaccattgagctacagttgatgttgctgactcacaaaagcatcacatggtacaccctgtggtgcattgccagtacgaaacaccgatagttggcgcgccagatagaggaggcgacatcgacatcaggctacctccatggagatcatcttcaatattaagatcgagtttaagatggaatagatccaatctactgctcagccaaacccctgccacgcatctcgtctcatcgttgtggcctcacctcgggaccactgcagcgtcgacgctgcgcccttgcttctgcgcctctccttcgttgcaccgtcgccgccgcctttggtctcgtgcgtctgcagtggctccagaagaagcttgtccggcacaaaaacagggtcgatcacatatgtcatctactaccatctacagcac

SEQ ID NO: 11464 - DNA, 620 bp, Zea Mays
gatgaagatggtttgtagggctacaactttgctgcagagcattggttgtgttaccatggaaaattgggaggaaattggactcaaagttgatatgttaggagctctgaatcgcagttccgatggtacagtgtcccgatcaggtcgccagctctgtccctcgccgccgacgtgccgcacgcggattcgtgctttcaccgccgtgattcatgctcggatcggttggatagcgcttggggttgagtaaatatcatcgccgtggatatactccggccactaaactactccgaccactgtaccgagctagtcatagatgcttcggatgtgttcgccggagatagccgcttcacggccttgcgccacgtgcgtgggcacatttaccgcatcgccgtgactcgcttaagtcatccgatcatcgccggggagcccgccacggtattctccacgaatccactacgccagtgacctcccattcctccgatcgccacgcatctcaatccaatttcaccggccaccgctcttgcctgctataaattgagcctgtcgtgagctctacagggtaatcacgcatctaagccgccaagtcttgtcttcaattgtccactaacgcccgtgaattgctc

SEQ ID NO: 11465 - DNA, 671 bp, Zea Mays
gttttagattgggcgagacgtggtttccggcgaccgggcgcgggtttagggcaggcagattaatgactgatgacacgtatctggacaagtgacagcatggccgatggcccacagcccacatgaggcagtgaattattaggggggcgtcaccacgtcaggtcaggtttgcatgcattgcaacgtggcgtctctgcagggggtgggacatgcatgcattgcatgatgttcatgaatcatatgaaccatgcatgattcgactgactccaaccgtatcagcatcttcttctgttttggtctctgttaagaaaaaaaataaaatgactactgattctgcgtgtcatggtgttctttgaaaagttgctggcgcgaacacaaacacgctaaagtccatccatccgtgcgtccattccatgcacacgacatggcttcaatttcgcgtaacgcatgcatgactagggccgttggaatacctgcctcgtgagcgtgcatgcgctgccaaatgtggcggtaacctgctgctagctgctttcgtgtctacaaacagcctactccgtgtgcagcgacatacgtgcggccgggcagatgagtggggcattggcagcctgcaaactggatcgggaagagacaaaaaaaagttaggctcgggatgcatgatgcatgcccgacttgat

SEQ ID NO: 11466 - DNA, 745 bp, Zea Mays
gaaattttgtgatgggtgactgagcgagaagttttctcaggagcacacgagtgagaaaaagtgtgtatgaaagattcgtgttggtttatgaggatggtctatgatcctagagagttgccaaagactcgtgttggtctgtgtgtctagagtatgattttagaggcatgttatgatgaggacatcactcctatagatacgaacaataatcctccactgaatgtccaaggtccaatcactagagctcgagcacgacaattgaatctagaggtgagctcattcctaaactcctcttaatatgattatgagaatagacaactaccaaatgattatattgtgattaggaaccatggagaaggccaaggaatacttggagaagggattggagggtggagggccagcaaggacaaacgagtcaagagggaggcccaaaccaaccgacctcaggtctgtttctgggctccaggagcagtctgtgctaaaatggccgtccaggtcacatacagactcggatttgggtgatctttatatggatggaaagctaagaagataaacattcaaatagagctggtaccaggtccaaattcatgaggagtcgacgaaaaaatattccacaagttggtgtccagaatctgtctcagtgctgcgccactgtctttggccctttgggtcgtgtatcttgtcttggcccactagggttgcgacgagggggtcatagacgccccaaactcctttatccaaccaccac

SEQ ID NO: 11467 - DNA, 656 bp, Zea Mays
ggggtatgcacctattgaatcaagagcgtctatcggaaatccgacggtctgaaggcttcgtcttcatccggttagccacccgcggcggcgcacaggccctcacggcagagctcccaccggcggcagccgtcccagcacaccggtgccctaatccccaatccagagcgacccacgcgcactagagacaaagcgtacgagatgggagggcgtaccgggtatagggaagacgccagagaagctacccacggtacgtggcgaaggtgcagcagggctcccactccggcgaagaatcccggagatctggagcacgattctgcctaggcgaagccgtgacgagcatccttgtgcgctagactccctcccgggtcgatcaccaagggctggacgcaggtggtggagcccgaccatggagcgcagtggcccagcggcggaggatctccaacggcgaggaatttgtagcgcataagtggctccctctcacaaatatggtggtgccccggttcctagtgccgaagcgaaggtctacgagtcactcccgtaccctgtatgatggtcgagtagaggggtgattgcggcagccaattcctcagccccaactatgacagtgttcgtcgacggtgcccatcaaggcacggccggatggaatgggtatgcga

SEQ ID NO: 11468 - DNA, 610 bp, Zea Mays
gcaacccaactgctgtggatcccaatgggtgtgacctagatgacattgaacccaatgggtgtgatctggccaaaactgaccccaatgggtgtactgcccgcgttgttgatgaagatgaggaagaggaggatgaaatccctctaattcggaaaaacagccggtgttatttagccagcggggaaagcagtggtgttccttctccagcgttatctgccctcattggtttgcaagaattatctcttgcgaattttgatcagactcttgaagacatggttccagaagatctgttgtcagagccagcagaaggtggcttgatggatgtttgcactgatgtgcctaatgctgggctggagttatcccaggcggcgtcccgtgcctcatcgaccttggagcacggtcttgagggccaggaggttggtctggattgttctgctcccatggaagtgggtgaaggtccttcagccttagaggtggctgttgcagagaactcggccctcaaggatggtgctggcgcttacccagcccccgagggtgttgccggagatgatccggctcggatgggtagcgcaagctatgacccagcccctgagggtgtccgagtgggttctcc

SEQ ID NO: 11469 - DNA, 667 bp, Zea Mays
caagtcggagacgacttaagacggtgcaacatgctcacccttactcgacttagggtgaccactataccctactaacggagcaattgacttgagtcggcaatgacttaagacggtgcaacatgctcgcgcttactcgacatagggtgaccactataccctactaacggagcaatcggctcaagtcggagacgacttaatacggtgcaacatgctcgcgcttactcgacttagggtgaccactataccctactaacggagcaatcgtcttgagtcggcaatgacttaagacagtgcaacatgctcgtgcttactcgacaaagggtgaccactataccctactaacggagcaatcggcttaagtcggcaatgacttaagatggtgcaatatgctcgtgtttactcgacatagggtgaccactataccctactaacggagcaatcggcttaagtcggcgacgacttaagacggtgcaacatgctcgcgcttactcgacttagggtgaccactataccctactaatggagcagtcgacttaagtcggcaatgacttaagacggcgtaacatgctcacaactactcgtcatagggcgatctctatgccttaccagctagtcaattggcataaattaggaaaagattccaaaaaccagcatgccacacttactt

SEQ ID NO: 11470 - DNA, 527 bp, Zea Mays
tgaccttaaaagtttgccttaaaagaaaatacctcttaccccaagaaaaatcttctctcctttcccccgatattaacagacccctcttttcctattccagatggaagactctctggtcattaggacatcctactgctcaaaggtggaagggttcccacatctgttgcgaagttgtgcgcttcacatggggatccgcaagaagccagaatatgtcaggaaggaatatctcgagaatggaatggagaagtgctctatggcagtctacctgggagaaagccgaagctacccaaaccacccttctttccaagtcactttcaccagacaccgcttcccagacacttgccaaaatgttgcccgaaaagccctccggcggctatgccagaactacagcagaaaggtcgttgaaacaccccttcgctactttccacccaacaacaaaaatacccctgcctggaggaaaagacttcaggctctatcaggaagagatcctaccgaggacgaccccaccatcgtctacatggccggat

SEQ ID NO: 11471 - DNA, 387 bp, Zea Mays
gcctaactgagaagctgaagtatctaacaatctccccctacttctgcttcccataatctggaatcctaaacgactccaatcttcctgcgaatctcctggaaacgcagcctgcttaaagctttggtgaacgtatctgcaagctgttcatcagtcccaacctgcaccaattcaatatcaccacgttccacacattctctggtaaaatgatatttcacatcaatgtgtttgcttcgatcatggtgaaccgggttctttgccaacgcaatagcagccgtgttatccatgagaataattgttggcttagcagggatgccaacgacctcctcaagtagcttctgcagccacactgcttgagctgccgcggctgcgctcgccatgtattctgct

SEQ ID NO: 11472 - DNA, 652 bp, Zea Mays
cggagacgcccgccgagccgtcgcctgccgtgactcccttggaactggaagcggaggagcctgtcctgttggagtccgacgctgcaggccagaatggacaggacgtcgcgacgtcgcaggaggctgccagcactgacatcacgactgtggcggtgaggtgtcaagaggagcaggtcggcgcagggcagccgaaggaaaaagcggaggcggagatgtcggatttgcaagaggagaggccgcagagcagcgaggtcgtggagacagaaacgggggcccatgagcgcacggacgatggctcaccggccgtcgttggagaagcagcagcaacacctgagggagaagatgagcttgcaaccagcgcggcagaagagaagatcgtcgaggagatccagcgagcagaggcgactgagaactcgaaggcgaacgcgaaccctgaggaaccagaccaagaaaccggcgtgatctccgaagaacccaaggagggaacgagcgtggtctctgaagaaccaaaaccaaaggaggcagctgatcctaccactgcgcagaagcgcgaggaggcgtccgacgagccaaaaacggctgccggatcgaacgcgtcagctccgacgacgccactgacagaagcggccaactacgacggcaacgacgacgt

SEQ ID NO: 11473 - DNA, 872 bp, Zea Mays
gggagaccccgctcggacaccctcgggggctgggctatagtttgcgctacccacttgagccggatcatcttcggcagtaccctcgggggctgggcagtggcttgcgtttcccacccgagccgagtcatccccggcaacatcctcgggggctgggcaagtgtcaacaccatccttgaagaccaagttctctgcagtagccgcctctaaggctgagggtccttcaattacttccatgggagcaagacgatccaagtcagtttcctgaccctcaagaccgcgctctaaggtcgacgaggcgcgggacgctgcccgggatgatcccaccccggcgtcaagcacatcggcacaaacctccatcacaccatcatccgctggctctgacagcaggtcttctggaaccatatcttcaagagtctgatcatagtttgccagggacaactcttgtagaccaatgagggcagacagagtaggagaaggaactccactactttccccactggcgacatactgctaactgttcttccgagtcaaagggacctcatcttcttcctccccgtcgttttcatcagcaacacagacaacacacccattggggttagcagcaggtggagcactcccattggggtcagcagtaggtggagcacccccattgaggtcagcgttagtaaattcaggaacaggcacttcttcagcagcaggaaccaaaggaccaacatcccgatccaaactagatactcgccggagacgtctctttttctttttctgctcgtcagcaggaggatcaagttgattggctcgggaagggcgtcttgggcgagcactgacaggcttctgaatatccaaggttgtatcagtttctgggggaggcgcca

SEQ ID NO: 11474 - DNA, 725 bp, Zea Mays
aaagcgtgtttcattaggatttcaaggacaacaaaaacatagggtgttaaaaaataaggggctaaaaagattcttttggtatagaagtccacccgcaaagaaatgtcatattgaatatttattttctttttttactgtcaaccgggggagagaattccacatgaatttcattgtttcaatgacctcatttttaagggaaacgaggtaaacctttacataactttgtggcataccgcagattacagctgcaagcacaacgcagcaagtacttcgccaacaaggaggaaaagaaagcaaaaacaacacgaacgtacttgacacaagcggaataataactaaccgagttcctgaggacctgatcatcaaacagcatactcgtcggctagccgaaaccaatgtaaaccacaccacccgccgtagcaacgccgcacaattgtctccctccattgcgcacaacaaggccacccgccgtagcaacgccgcacaattgtctccctccattgcgcacaacaaggggaggaatgcttgaagggatgaaggaccgcccaactgagaggcgactagtgagggaggacgcccattgaagcttgccgaagaacaaccatctcccttaaggttatagcaccccatagacagcacatccacgcaccataaactaccatccaacgcccttaaaggggaggaagcctctacggagggagagtgagatcatgggtccacctggc

SEQ ID NO: 11475 - DNA, 300 bp, Zea Mays
tgtaagccactggttcgtcgccggtgaggccgccacggtgaaggccacgaatcaccacaccagtgactcattccttctccgaccgccaccgtgcccaatccaaattcactggccaccgctcatgcctgctataaattgagcatgtcgtgagctccgtaggataattatgcatccaaagcaccagtaattgcctccaatcgttcaccagagaccgcgaattgctcatctcccccaattctgtttccgccgccgtggtagaaccctcaccgtggtcagcaaatcccaggtctgttcatcctc

SEQ ID NO: 11476 - DNA, 1371 bp, Zea Mays
cagttcttccttaaaaggactaaatgtgattttggcaaaactgaactctcttatttgggccatattatttcacagaagggtgttgctgcagatccttctaaaactgaggtgatgagcaagtggcttactcctacatctgtcactgaggtgagaagttttttgggactcacggggtattatagaaggtttgtgaagaattatggagtgatagccaaacctttgactaagctgctgcagcacaaatcttttgtgtgggacacgacaactgatatggattttcaagcattgaagcaggctaaggtgaccacacctgttttagctttaccttagttcaaggaaccttttgaagtggaaactgatgcatgtgctactggaattggggcagttttgatgcaacatcataggcctattgcatatctcagtaaagccttaagttccaagaatcagttgctttccatttatgagaaagagtttttggctctattgttggcagtcactaaatggaggcagtatttgtagcatactgaatttattattagaactgatcataaggctctaagttttttggaggatcaagtactccattcagagtggcagaaaaatgctatgaccaacttatggggttgcagtttcgaatggtgtatagagaagggaaggagaatgttgctgctgatgcactttctcaggtaggccatgcgatggtgatgcatgctgtgacagaagtgcaacctgtttggctacatgatgtgttgaactcttatatcacttatatggaggctcaagacttattggctcagctggctgttcatagtcctagtgagtaggggttttctttgcaaaatggtctcattcgaaaggatggtttaatatggattgcaaataatttagccttaaggacaaagctcatttcagctctgcatgatggggctgtgggtagtcattcggacagtttagccacttatcatcgtgtcaggcgtttgttttggtggaagggcttgaaagctgatgtggtggagtatgtgaaacaatgtgacatttgtcaaagggctaaagctgaaaggatacattctcctggtttgctgcaacctatgcccattccatagggagcttggcaagatcttgcaatggattttatagaaggtcttccaaagtccgaagggtatgacacaattttggtggtggttgatcagtacactaagtatgcccatttttttcactaaagcatcctttttcagcttctatggttgccaaagtgtttttggataatgtgattcgtcttcatgggactccaagatctgtggtctcggatagagataagatatttactagccatttttggaagtctgtttcaggttttaaacaccaagctag

SEQ ID NO: 11477 - DNA, 469 bp, Zea Mays
gcacaacaaatgtgaagtcctcgagtttgtatttgttgctagcaaccatgtaccactcatgcattctaatctccagagtcgacaacttagaaagttgcaccgtcgtcacgaacggcctcccattcacaaatttaggaggaacatcctccttcttgtatatcgggatattgattttaagacgtaatgattctcgagtatgaatcattccatcttcttcccatacttcgaaattgtctatttgggaccgtgtgcgtactccacgagatgttgattccgcttttgattgatctgtcataactctcttcaatttttgcaggtagcgtgtcactgattctgacggtttcttgacattgttagtggcgattcgctgatgaattttctttgaagtagttggcccttcaacattggtgtcaacctttgcttcctttttgatgtttgcgtcgacattctgaggaacaatttgtctacg

SEQ ID NO: 11478 - DNA, 517 bp, Zea Mays
tctggctgtcaggcactctgaattgggttccaatggtatagtacactgaaatatcccaggattcagtccccctcgccgccggtgatccgtgcgcccggattcgcgccggtcgccgtgattcatgcttggcacgccatggatattctcggggaggtagctttggacgtgtcgcgatctcgtggacctagcccaagcctagtcggagataattcaccggcggccaccgtggctcgatcatttccggcgccatgtcacccatgcctcgctcctccctcactatgtcccttctttacgtcgaccatgcacgaacgatgtaatccatgaccgtggatcgctagccggaccaccgcgcctttaaatagccccgccacccacggcgaggtattcacatcttcaccagtgagctcggctgaagcccaaattcacggaatcctctccacctctcccaaaattggcagtgcacggtgaaaccatagtcctttgcgaccgtgtagccccaacctcacctcctaattcc

SEQ ID NO: 11479 - DNA, 481 bp, Zea Mays
gagaaacgtcacaaaatacaatttgtgacccccattccatgacgttatcaaaatccatcacaatcttggctttgtgacgttttttcgctaatccatgatagaatttgtctgtcattgattaagtgatttcttgtagtggagagagagagaatccatgcgtcgctgcctgcttgtgaagccgcaaggccttagctggtcgctcaggagggatctcaccaaacgacgctagaggtgtggacatcggtgtcggtggccagggatgactggtgtcgcaggatgtggatctcgccggacttgggtcgttgggcattgccgcgatggggcattgctacatggatgtaggtaaggaagggtaccgttgcattctcctaggagtcctctgcgtgtagctcgtttgaatctgagtaatgaggttggggtttgaattttggtggtccgacaatggctccgccactggggggcatgtgcaccgccgcgtccg

SEQ ID NO: 11480 - DNA, 362 bp, Zea Mays
gtgcaattgtatgagcatggatgcaaaagtcaccacgctgtgtgatgagttgtgcaagttgaaccttgaagttgtttcttcaggtgctttaaattatatctcggtggagcccacattacaagagcaaatagtcagggcacagattgaagacaagggtgttcaggtaattaaggaaatgatcaagcagagagcagaaaaatacaaatgcttccggcaggacagcaaagggatcctatggtttggagatcgattggttgttcctaaggaccctgagctcagaaataagatattggatgaggctcacctttcaaaattctccatgcacccgggcagcaataagatgtatcatgatctcagatcct

SEQ ID NO: 11481 - DNA, 730 bp, Zea Mays
gtgatttacttggtcttttcactgagtttctctttggtgcactaatgtaccaaaaaggggaattctagggttgtaacacttcaccctcttccctaagcttgatctggttaaggtatgatttctagggtgacaaggcttgttaaggcttggctcctcaagtttggtgccttaagctcaagctaaaccacatgtgataacatgccacaaatgtaggtactgaggggaaaccctaagtaacacctggggtgttacaccatcacggcggaccccaactccctcgcccccccgcgctttcgggtactgctcctagctgttttacagtcaggacagagcggctacggtgtccacataaataccccgcaacgatgagaagatgagcatgcaccggtcggatcaagcaggaggacccgcccaattcgcgcgttcggttcaacggacttcgattggtaggagatcaagctaacaggcgggacccactcgacagacagggtccccaagtgcatatgtggactttggttctggcaaggcggccctagtggtcaatgagtgagcgtgggccatgtgaagggatgctgggccgaggagagaaaaagcgaattgggccgacagcgcaggtttgagttttgcttttctttttcttttatattttctgctttcttttctatttgttttgttttcagttttcaaatcctcataaaagtccaaactccaaatttatgttcaaatgcaa

SEQ ID NO: 11482 - DNA, 448 bp, Zea Mays
tcatgacgcagatcatgtcctacgcgtcgcttgttacctacgaaggggcagcgaatgccttgtcccgcgagggctgtaggcatttcgaagccttcggccgaagctacaaggacttcgacctgggagttttccaggccaaagatgacttgctgaagcgctcggtcgaagcactttacaataggatgtggggctctcatggtcgcgaagtcgttcgagagagggtcgactgggcgctagcacaggaatgcgtctacccttggtgggggtgtgctttttgtttgcttatctaatgcactggtttgttgccttcgaagcgatgagggacgaggaggtcgaagacctcgccggcctagagagctcggtgacccgacaagatgccaatgcagaggtgggcaccgaggagtagtcttctctcgtgagggtcaacggtagtgaccctagagcggcg

SEQ ID NO: 11483 - DNA, 467 bp, Zea Mays
cgccgcggcggcgcagccccaatcccacggccgagccattgccagggaaccccgccgccctgttctagcctcaagctctcaattcggccggcgctatacgaagtggataaccaggcgagcgaaatggtgggtgtaataccgggaatcgcacagctctaagtccagaccacggcgcatgcatgggcgcggtggcgccctgccggtgagggccgcgcccgaacgccggagcaccacacccaaattactttaacttcaatgcacagcgagataaggcgaaccaaacggagaagacctatccgataatggtgtggccgaaatgcttgaccacggcacgaatgacttcacggcggaatctctacggcggcgagaaattggcccacccaaacctccgattccgtcgggtgaggaggaacacatcattccttgcgacactgcgaaactactcggccccattaccgaccccgaac

SEQ ID NO: 11484 - DNA, 399 bp, Zea Mays
gtttagcgtcaccggagttggtgctcgtcgtgtcggtgttggggaaccgagggctgggggaagatgaggacacgattgccgtccaatccttctcggatggctgagattagaagatggcgtcgggtcgacagggtcgacatgtgaccatggaatgagagatcaacgacttaggtttagtcgcgcgtaccgattgagggcgagagcggttgatcatccgattgggatccggcgacgtggattagatcgcgcggcattgggtacttgtcgtggatcttcgatccaacgaacagcgtagcgcaccggttcgcaaggaatgtagatttaatcagaggcgctgaaaatagatctagcggtccagatccgtggataccccttcgccatggcagaatagcataagag

SEQ ID NO: 11485 - DNA, 1115 bp, Zea Mays
ggcatggtatggtatgcattaagttgatcgattaactgagcaaactcctccacataagatgacacggtgcccatctgttggatatgaaatagtcgtctgagcaatgattggtgttgatttttggcaaagctatcctgaatcaggtggcaaaattccccccaagaaatgtgcgaaagcctgaactctatagactgtaaccacctcgcagctggaccggtaaactgcatataagcaacctgaacccacacactaggatccactgtgtacatgtgaaaataggcctcacatcgagactgccacagcttagggttctctccatcaaacatcggaaagttcaacttcggaagattgcccaacgaacccaaacttggcggaccctgaccataaccccccgagaaatcccggtacgtgtgatgcatcgcaggcacatattcctcatggtactgaaatggtacatggtgatggaagggagcctgatcatgcgtaccattgttcgggagttgggtttggaatgactccccaaaaccaaactcccgatgatgtggaacatagccttgctgtcccgggtcgtcaacgcgtggcatggccgcaggtgaccgctgcgccgtcgacttgaactgacccgtggttgctcgattgtctgattcgtcccgctccagattgtgagaaactctggcgagttccgagcgcactgcctctacagacgtctgaatcgtctcaatcaagccctccatccttgggcgccaagactcgaacaccttggtgacattctccaacaccgccagacgggtggaggtatgcgccacgatttcgtcgacgcgctcctgctgggctgcctgcatctccgtaatctgggtatcgatcatctgacccagtttatcgtgcagcttggcgatgttctccgtgttggcatggaccaccttctccaatccaccccatcgatggtcctgggactccaaacgatcgcagagttgctgcaggatcttggactgggcggccaaggtcttggactgcgtctcaatggacttgggctgcgctgcaagcgccgtggccaggttgggatctgacgccccctccatattcgcgcccctggtgaagtggaggaagtctgccag

SEQ ID NO: 11486 - DNA, 746 bp, Zea Mays
ccaaggcagccataatatcatcttttatagtgctccagcagaccttatagaaccgtctagtgaacccatctggaccaggggccttatctgaagggagctcactgatggtttcccaaacctcatgctcagagaaaggagagtcaaggtctgaaagcgcatgtcttggcagaccaagggcttcaagatcgattgtcctttctctgatcccattctgaccaatgagagtggagtagaagtcatccaccgccgaagctttgtcagtatggtttacaaggatgcgatctccatccaccaatttagtgaccagattcttccttttgcgatgccttgcgtgcacgtggaaaaactgagttagcatctccttctttaagccatgtgattcttgatctcagtcttgccatagttcgcttgaaagaagcaagcagcagggtctgttttttcagtttatttttgagccagacctcagccggggagagggttctaatatcctgcgccatctcaagcctgtgtaacaactcctttgccaaagccaactgagatcaaacatgacccacccgcttctcactccagccctgcaaccgtttagctgtcaccttaagtttcttgtcaagtgtcaggaaagaagaattgtcattttccaccgagtcccatgctgcctggacagtttcctggaatccttcgattttggtccaaaaggactcgaaatgaaatctacgtttcccaaacatgttatctttaagtcccaa

SEQ ID NO: 11487 - DNA, 735 bp, Zea Mays
catcttcgtgctttagaccccgtcgttgccggatccaacgccagcgtggaacaggaccgacttagcgcccgatccattctggcctctgccttctccacccagccagcggcctccgcctcctcccgatgtggccactgcgtcgaccgactttagaccccggattctccgccttccatgaaatctccgcccagcatggggaacacacatcagcctctactattattgttttgcagtttcattcttttaggcccaatgacacttctaccttctatcgtatgtgtattcatccctcggccgtcgcagctgattctagggtcgtcattggtggtgtgaaagcacatccttcgagaagattgggctagagttccaagtcatggtgggttgtgctgctccttcacgtgcccccaccaatgtccgctctgattctaagggtgaaatggaatattcatgggatttgtttgtctttctgtggtttcagactaccgccatcgacaagaagatcatcaggaggaaaggaggaataatgcagacaacctcgtaatgatcctcgcggaggccaaggtaggcacgagattctctccccagtcccctttggtgagcctgcattgcgctatactatagcttagaccttcggtcttacaaactcgggaattaattgcattcagttgtcggcgtgaaaatctatatggttcaattgcaaatgtgttgctggatgctgcaaatttttgctataat

SEQ ID NO: 11488 - DNA, 809 bp, Zea Mays
tatcacttgggaagacatgaaaagggaaatgagacgtcgttttgttcctgcatattattcacgtgacttacatttgcggctcaaatgccttgtgcaaggtactcgcagtgttgatgaatattttcaagaaatggagatgtgcctactccgtacgggaattactgaggatgaggaatctacaatggctcgattcttggttggccttaataaacccatcgctgataaagtggacatgacgaactacacaaatctaacagaattggttcattttgctaaaagagcagaacgacaacttgctggatcttataaaagccatatttctttttcagcacaaaatagttctactccatggcgcaattcacagcagcaaggctcgagggcacacacaccttcatctcatgcagcttctacaccatctcgtgcaacccctcactcagtttcagcttctggaaagcaatctgatgggaaaggcaaagctgtgagttctaatcagtacaactcctctactgcagcagcccaaaataagacaagtaatattgagtgttttaagtgtggtggtcatgggcataagcaagctgaatgccccaatcggtgtgttattctagcacttgcagatggttcgtatgattcacaaagtgaggaggaggatgtaaaccatgacaccaatatacatgatgaaaatttggaaacttttgagtacgaagcagaggatggtgaatgcgaattgggcctgaattgtttagcactgaaacaagttcattgtattgctgagaagcacatgactcaagctattgttcctagctctctag

SEQ ID NO: 11489 - DNA, 744 bp, Zea Mays
tgtgcgaaaactggaggacaaattcgaaggattagagttccatcacgtggaaagagaccacaacatagcagcagatgcgttgttgaagctgagatctagtcaggcctaggctccacctgggatcttcgttcaataaatatcacaaccaagcatcatctcgaatcaggtggaagagtgcaataccttgagccaaccggagtcggaccccaatgactggagagagcctatcattagatatataaaaaatgaagaagagccagatgacaaggctgcagcggaacacatcgcaaggcagtcggcccactacaccatcataggggatttattgtacaggagaggtgcagcaggaatcctcatgaaatgtattcactcgactactggaaacaattattggatgaaatccacgttgggcagtgtggaatacatgcagcgtcaaggactctggtcgggaaggctttcagatccggtttctattagccaacagcaaagagcgatgctgccgagttagtccagaagtgtgaagcatgccaattcctatcaaagcaatagcacttacctgcgcagcagctgcagagcattcctgtaacgtggccgttcgcatgctgggggctggacatgattggaccttttaagaaggcttagggaggctatactcatgtacaggttgccatcgacaaattcacaaaatggatagagtacaagccaattgcttctttgacctcagccaaagcagtaaaatttata

SEQ ID NO: 11490 - DNA, 684 bp, Zea Mays
ccacctgcctaaatgcgatctgattggttgtttctttctctaactggtcatgggactgggtgccacattagctagccattgggtggctagcgcgcctgtgaagtagatgttacaggacggttcggtgctccactggacccgtactgttcatggtccgatgagttattaaaaataattcccgaagtatgtttgttccttcatataggtggtttggtgcaccaagctacctgaagccttaggttgaggcttctgtagaactggtccgatgcgcacagacctagtactgtagctagtccggtgtgccaagacatgctgcagtcggcctttcttctccatctctttccccatttgagttgaactttttggaggattttcttgtgacttagacacacataattagagtatgacccaattgactaagtcacaaaatcttacctctttctcattctctcctcaacttctctgtttcttctcaaaaattgggccccaaatgacactttttctataaatcaagttctgtttcttctcaaaaattgggccccaaatgacactttctctataaaccaagttagagagcaaacaaaagtgccaaatgcgtagagtaaggtgtatgcaacatattcacatactcaaaccttccatcttaacctttttcactgttttcccctttttggcatgtttgtg

SEQ ID NO: 11491 - DNA, 386 bp, Zea Mays
agtttttctcctagagtgaatatggtgccaaagcatcagggacgttcagatggatgaagatttataaactttcttaccccttgaaagcataaggtagtttgtttggcccctgttgcattgtagcttggcaacagttcagtatgaacccatagtgtgcatcttattaattttattatttaatctacctccttattgctacattagtatatcgatgaatgtgcgatgttattttcaacactggacaacatccagcaggcaagtaattttagaactggacatgaatttcaataaacaatatatgcacctatgtgtgttttggattcttcatagatttgtatgagctctaaatctaacggaaacattaatcaattgcctggattagagaa

SEQ ID NO: 11492 - DNA, 306 bp, Zea Mays
tgttcatatgaaaaatctacttcccctagttttctttcgtatgaacctaatatggaaccacccacagctaacacatcgactgcaaatggatcaccttgtacctagccattgtatgatatgccgatgaatacgtttgtagaaccaccacatccaccgccgcctagcacgcgactgactctgaacatgggcgaatcgtctgaggatcatcacagattgtctagctacatcacagaccatccaacacattttgtcggaccgtctgacgcatttcaccggactttccaatcatacacaggcccatgcgca

SEQ ID NO: 11493 - DNA, 309 bp, Zea Mays
agcgcgaatcttacaattcccccaaatcggttcaaacatgccgcaagaacacttcaccgtggtcagcccgattcaggtccaatatcgccctcggtttccttgtttcaacatccttgcttgctcttgatgctcaccgacccgttaaatcgaactagaccacccccaatccgcgggaacgtgtgctcccacgctcggtttccgccgtgaacgtggaccggccgttctcggggtgttcgggtcaaattggtgtgtgttccgaggccgtcgtaggtcagtgaagcctcataaatagttagcttgagcagtctt

SEQ ID NO: 11494 - DNA, 496 bp, Zea Mays
gccctaaaccttggctgtcaggcgcactgaagaagaatgcgatggtacagtgcaccgggtggataagcttcagcctcgccgccgacgacctatccgcgccgcgatttgcatcggggtcgggatagtcgctcggcgagcatctccgcgcgaagatctttttgatttgggtaagatcgccgcggtggagagcaataatcccggctgccacgtgaccactcctcattcaggccatgtccagtcatcgacgccgcttccctccgttcatccacgccgcaccgatgttaccgtgttactatcgtggcggggacgtggcaagcccgtaagaatggatgtcgcttgacgccgccgttgatcgccatcaaagacctgcgatggttatcaccatagccatggttgcggctcggtgcacctataaattcaccgcgtccccaccccttccgttcaaatcaaccgagctccgcccttcgtctctaaattgcgaagccgtagcacccgc

SEQ ID NO: 11495 - DNA, 350 bp, Zea Mays
gtggcgatctagagggggcctaccacggcgaggtggcggagcttcgcgatgggggtgttaaccagcgaggttctagtggtggtcgggggcaggggagtggtgctctatatttgtggtgatgtagtgaagcttctatgctgactggattgccttctatgcggctagagagggatagcgagagctcaccagagagggggagagacagcggcgccgacttgattgggctcaggggagggacgagagtggccgagggctggtgcgggggatgaaggagttcggggtggcccttttataggtgcccgaggaggtgagcggtagaggcacgctgacagtgaggagcacaacggcgg

SEQ ID NO: 11496 - DNA, 463 bp, Zea Mays
atgctctttctcgattagacgaggcaagggcacagcggaccaagagatttacatgaagaccagaggaagatctgttacccgtgcgcgtctggccgatgcaatcacgtgcgcccgagaggccgatgaactcacacccggttcttgacgaaccatcgcaagaaagggtcctccccttacactacataaacctccaacaaatccacatggattactcgaggctgaaggatttacgtctagcagatgtgctcacacgcgcctgagagatcgatggactcatgcccggcgtgtggcgaaccatcacaagaaaggttcttccccttacactgcataaaccccgagcaatccacatagattgctcgagggctcaggggttacatcttacagatacgcttgtgcgcacccagaaaaggaaccactcaagaaaagcctctgtgcaactccaaggagttacacaaaggctcgg

SEQ ID NO: 11497 - DNA, 508 bp, Zea Mays
accatccggatatgcgtacgcagagccgagaactgcgcaatatgcacagtttccacattcatcgcagcaacattatggtgccccaccagcaacacattataatcataccataccacctcatggacatagggctgaatactgttcggccacaagagagcctgagaggtatatggtaggagctggtgacattaataggacacctaacacacacctcaaacatccctgtgaggaaagccgacagagtgatgttaggcaacctgagatttccacccacaaactcaatggatggtcgccatacatggcggagaggatcagagacgaagtagctggggtgttcagggacaaactcggtgttagtgtgtcaggtacagggcaatcgtatcggaagccttatagccaccgattcgacaccgtgccatatccacagggaactagaataccagtcttctctaagttttctggtgaaggtgggaaaagcacacacgaacatgtaagccaattcatagca

SEQ ID NO: 11498 - DNA, 517 bp, Zea Mays
ggcccaggccagaagttctgccatggatctccctcccacgacaagtactggtaggtttacattattccgggagcaagatggcggatctacgaagagagcacaggggataggtgatcctggcggacatgcgacatcgcacaacacacactattgctccagtgaaccctcgcctaacgcaaggtaatccccctactaatggagagagaactcactatgggttcgtacctcaaggcagaagacacgacgtcgatggcgaatgatccaattggctaagccaacgagctcgagtccagcaatgatggcgtatatatgaggtggttctctcggtttctctctccctccgcgagaagcttttgcttggatgtccatggataggctgttgaggctaatctctagggatgtgtctggttttatagagatgagcacgagattgaggtggtagatttagccgaatcaacgaagctcatggtgcttggttccgttttgtactctgttgatcggtaaatacggctggtgc

SEQ ID NO: 11499 - DNA, 505 bp, Zea Mays
gtaatggtggacggtgggttggtttctgtatttcgcagggactcttatacaaagtgtgcatggcgaagaggtatcgggaagatctaaccgtccgatccatacccgatgcaccagattagatcgtcgtgatatataatgtgtatcatataacagggtcgccccgatcatccgatcccgcatcaatagcagagaggcagccacactctgaccggaccagaaccgcacatcaccgaatcaacgtctccgatcaaatctcgtgaaggggtatgcggcacaacatctctaccgtcggttatcgatccaacgacttcgtgctatcgctctcccccgaagtggcctgacgatggcgccaccaacccaggcggtggcgagttcgctggtgcgagtgaatctggtgcccgagccacaatcccgagcccccgcaacttccacacgatgcccaaacccaccagaacgcactggtctaacaattaccgggattcgcacaacaccggcgcacacccgc

SEQ ID NO: 11500 - DNA, 374 bp, Zea Mays
cgactaaacagatacgataagttgtaccttgagaaagtatggtcgacgacggctatgaggacggtgtagttggaagcatgttgccaccatccatttctgcgtttatagcattcacttggaaggaaacactgccataaataattgtgctttcggtgaagctaacattccactcgaaagacttttccagtagatctgtaatttctcttggaatgaaaccgggtggattagtcgagacgagggtgtccacatttttttaatgaggcgctgcgccattcgtccaaagaagataaactcggcagtgtcagtgtcatcttcagcggtgagggatatcttgtacctgcacagagtggttcgattgctagacaccacaaatc

SEQ ID NO: 11501 - DNA, 346 bp, Zea Mays
cacgtacgtagcaagcaggagtgtaatgtatgggcgtggagtatgtacgtacgtactcctacggtagtgcacgcgtcggcgtcgtacgtccggcctgttggacgggatactagtgcagcagacggccacgggcccacgactaccacatgttcgccaggttcgaatccgaatccctgccggtaccccgtaccccccgtacgtgatggatcgacgtcggcccccggaaggaatggatggatcgacgtcgtcctacccgagcagatccacatccacccacgcctgcctggccactgaccaactgacgactccctccctctccgtccccatacaagactagtcccatccc

SEQ ID NO: 11502 - DNA, 299 bp, Zea Mays
tcttaccttggtgattatggtatgttcattatctaaaacctccaatctcccaccttagttcaagcgtggtctcttacttatctcacctgcggttatatcctatactttaccacttgcaagacttatcttatctctattcttgattgtacctagattcctggttttttatgcacatttacctcttcctttatatccttgccaattatcacctttgacccttgacctctctccatatttaccatgatgtttacctatttttttagcctcacttattccatttcaatccgagattgttgttt

SEQ ID NO: 11503 - DNA, 1574 bp, Zea Mays
ctctgatcaacctgcaaaacaagcataccaaggtgcacagaattcatgctgaaagaacaaatgcatcctggtagattcttctattccagtctaactgctttgcaaggaaaatgttccatgtggtcacggtgaaggggtgaaaaggaagaaaatcaatctggatttgcctgctttctacaagctgtcgagttgcttcagttgttcgatctgactcttgcccgggctgaacttgtcagctttcatcctctctctgaacccatagggtgtaacctgggcactggcataagctgcaagtaacaaattatagggcagagttcttgcagggaagttggtctgctttaccctatcaaatatcttctccgcgttatggatatcgcccttttctgcgtatgcctttagtaagattacatatgagctgaaaaggggatgtctgtcaggattatcttctgtgacattcatcagaaacgagtcggcctttgacaactcgcctaaattcacataaagcttgacaactgcatcccaggtaagagggccgattgtacacccatccaaacacatcctttctataaactttttgcttttgtccagaagtttattttccgcatacacctccaacatagcattaaagtacttggaagtgagtttcggaaacgtctttaccaacacgtcaaagatctcttccgctctttcgatatgtccaagtttactccatgccttaattgcagccaaaaagtcctccaactttggttcagcgcacaagttccatactctctctacatcaactggccttccaagaatagcatagaggtcaagaagagacctgacggcatgacgattagcctttacatgtacctccatagcattgataacctcttctgctttctctgtaaagcacccagatatgtagaatttagcaaccatagtctggatggtaaaatttggctcaagaccattttctttcatagaatttaagacttgttccatgcctaatatgtcatttgatcgcacttttaagtcaatcatgagcttgtaggtgaatatagaatactttatattttccttttccatcaatgtgagaatgtcaaccaccttatttcgagaaaccctcttgtacagcaataacatttggttgcaagcagagatagttaaaggcaaagagagttcccttatttcattgaagacttgctctgccttctgggcatcatcacggcatacacagttaacaagcagagtttcataaagcacctcactcctgaaggcttctgggaccctctcgatgtacttttgggcagcttcaacaccatagttccgtgctatcaaatccagatggctagcataatcacgttcttcaaaatttaatagttttcttctttcgatccactccacaaactgcagaaattcagaaataattaccaaaaaaatatgtgcatttgtgctacccagttctatggatttaaggtgtcatagcacatgcggatggaggtggaatgtgccaaaagaatgtctacgagataaaatacaccaaaattattaattgacaatttcatgtccctcagctttctgtccactcgttg

SEQ ID NO: 11504 - DNA, 541 bp, Zea Mays
ccgtctgtgtgtgccaaagggagaggcacgaggaatcctgctcgatgaagctcacaactcagcctactctatccacccagggacaaccaagatgtacctagacctcaaaaccagatactggtggagagggatgaaaaatgagatagctcagtatgtggcccggtgtgacacttgccagcgaactaaggcagagcatcagaaacctgcaggtctactacaacccctcccagtgcccaaatggaagtgagaagaaataggcatggatttcgtaatcggactgcatcggacccaaaaagggaacgattctatttgggttataatcgaccgtcttaccaaggtagctcacttcattccagtaaaaactaccttcggaggagccacccttgcccggatatatcttaaagaaatagttagactccacgacattccacggaagatagtatcgaacaggggaacgcagttcacctcaaaattctggatgagtcttcagcaagctatgggcaccaagctagacttcagcaccgcctatcaccctcagtca

SEQ ID NO: 11505 - DNA, 358 bp, Zea Mays
ctaagatgagcttcatccaagatttgttggtggacctcagcatctttaggcacaactatgcgatcattgaaccatagtattcctcggtcatcttttctgaagcaattagctttgccggcttctattttctcatgaatgtgtttcatacccttgtcagttctttgagcatcaataattctctatagaagaactgactcaagctttaattgtgtcaaagtttcgtgttgtatcatacccaggtttaagttttccatttgttgacatagtgtggtgttaggggcccttgcggtaagacaatgacaagaaactttgcgactcagtgcatctgccaccacattggcttttcctgggtgatagt

SEQ ID NO: 11506 - DNA, 775 bp, Zea Mays
gggcgcaaaatcgaagtcctcttcaaaagactatccgcgcaaaagccacctaagggtgcagccggaccctccgtgcaaaaactgactactggtgcagccagaccaacacaacaaacacgctagatcaagtgcacaagtcctctacaggcacggccggatcagcgaaggcacacaacctcatcatacaaactatggttacatacatacagcgagggcatcacaccttacattggctcaaccttcgggatgatacccatctccctgtagttaaacagcattatcctcagctcctcaccctcaaaaagatttcacaactccccctcacctacactcgccccaaccggcgaggacaacaattcccgcttgccagccccatccacacgaagacgaccaccctccacctcactcactctacgcttcgccgctgcccttcgccgcctacgcccagcactcggaccaggaacgacttcagcatccatcacacgtggagaagcctccgccgcagccacatccaaagtcgcaaaataatccaaatcctcatccgaagactcctccatccacacaaccgaactcccagaatcatcagactcaaaaaacttagacacggaatcatccgaatcatttccagcaaccacggtcgaagccgccacaaaattagcattgtcagtagcggttgtgtgcgcaggcccaaaaccctgaacctgcgtagcaaccgagtttcagtaacatgtaggcaaaatttacaaactcccctgcacctatttcactacttagc

SEQ ID NO: 11507 - DNA, 320 bp, Zea Mays
atctggctccggctacggatccgctggagctaccaacactcctggtgggccatatgggaccggtagctccatggctagtgtagacggtggcgggagcggcggcggcgataatggtgggtctggagctggttccgggtcttcggcaagtcgtagctacactgttggcttctatggtggagggtactcagatgcacaaggcagtggtggtggtggtggccgtggaggaggtccacaaaacgggagtggttccggctctggttctggaagagggatctcttctagctacgttgctggtccaaacggtggaagttctgccaatg

SEQ ID NO: 11508 - DNA, 433 bp, Zea Mays
gtctagaagcttacggggtcattagccgcccttagtcgcttcatttcgaggctggctgagagggcgctgcccttcttcaagttgctgcggaagtccgggcccttctcttggaccgaagaggcggaacaaaccttccgggagttgaaacagcacctggtgtccctaccaatactggtagctccagaaccagcggagtcgctatatttatacatcgtggcggccgcggaagcggtgagcatggtgctggtcgtcgaaaggacggcaccagaaggccaggagcctgaggactcgggaccggctataggggtccagaccgttcagaggccggtctactatgtcagcgaggtccttcatgaggcgaaaaccaggtatcttgagacgcacaaactcctctatgttgtgctgatcgcgtccaggaagctgcgccattatt

SEQ ID NO: 11509 - DNA, 544 bp, Zea Mays
ttattgttgagaaccatggaaattccctacctccacggtcgggaagacaaccggatgttcgcactccgagttggactaaatctcccacggatcaggaagtagctgaagcgagggctttgctagctgaagttggtctgctgaaagaaaggggcctgactgctgaagctgtggttgctgattttgttttcaagaatgttcagccgttgaaggacagagcatacccggcttatctgtacagaggcctagctggcccgactcgggttaccaacaggagaattccctctgtagacttgatgaaccgacttgagatgatccttagaggcaaagtatcaaatattggcgccccagtggcatattcagcatggaacctgccttctcccaagaccttcactctttttgtgtcgaatccacctgtcactgagggcggtttgggccttagagtgcggccctctgctgaagaggtaaacgctttggttgcttcgctcggggaaattcctgacgacgaacggcaagtccactttgaggtgcctttggatcctagtga

SEQ ID NO: 11510 - DNA, 413 bp, Zea Mays
tgtaaacaatgtgatactctagttgccctaaaatcccgctcaagtctttctctcaatttgtgctcaaagaaatacttttggatcagaaagatgatttggatatcatgctctgaaatctataaagttcaaaagatctttgttaaggaatataacacctgtaaactcttgaaatatgaggaagctagaaaccatccttgttccttgactaatcttatattggaaatcaaaaagttatgttcactcttcatcttaatgtcatacaagcctcttatgcagtctgtctcactaactcttttatcctctgactagatgatgaaccccaatggaaatgaagtaaatggtgccaatgacaatacccctaccttaacaactatgaacgagaaaaatgagtcaccgagatattcgatgaatgg

SEQ ID NO: 11511 - DNA, 591 bp, Zea Mays
aattatccaaaacttccccaatcatctcgttcaagggaaaccacaatcccgctctgaaaaaactcttgaaaactaccacctcatcatttttcggtgtcggagtggtttcttccccggcaaaacgaataagcttcttctcagtttctccgaagtagcccagctttatcatcatgggcatatcagcttcagaaatggtagatttaccaaaatctatgtggctaggtttcgacgggatcagaatgctataatcttcttcttcttcttcatcagcgatttcttcctcaacatcttgttcagttttggcagcaggtgcaccttgttcaatggcttcctctgtcacaaccagtcccgattgtctcatcacttcggagatcggggcagtctcggtagcttcggcctcctctccgtcatgggtcactctcgcagttgaacatactctggccatctgatgttgaatctcttacagttcttacgaagttgatgatttttacagttttgacgaagctccctcttatgccgaagctaaatcaaaacgatgttttgctcgagaatgcgatgaaaaagcttcagctatggttaaatttttcagca

SEQ ID NO: 11512 - DNA, 349 bp, Zea Mays
cagctgccattggaggcggatggatccctccactccatatatatgttgcgggttgcacagtgtcgacgtccattcctgacagcagtcgatgaaataagactcctattaattattggtatctccctcttcaagtcgtggtgtgtggttggttccctccgcttcaactacgttgttcttctgcctttctctgcatccacatcaccaccaccagtttattgtctacgcttgtgtgtgttgtttcatcgctgagcaacattaaatatgtgttttatgtgttgtgtttatctatttggtaccctggttgctatataattatgtgtgttttatatgttgtatttatctatttggt

SEQ ID NO: 11513 - DNA, 737 bp, Zea Mays
aggggtctcggagtaagtcgtcccagacacagagaacggctcccgaggatggcgggttgattccccggaaacaggaggtctcctttgcaaaagatacccacgaaggggtaagttctaatctggaccactcagatctgatccgagggccacaaatagatttaatctctactgaacgggtacgcgcccagagccgttggattcgtcttttatggtgacgattttattatcctagatctaaccctagccgttcaaatccgatcgacggaccagatcgaatcccccaattgcccagccagaaccaatccgcggcgcacgatttggatccaacggctggaggtcatcacctacctcccgacggagccgcgccgagacgccaccgcggtgaggtctcacgccggcggagcgattctccgaattacgtgcacgacaccacaattaaattggtacatgcgtattgggtatgaaggcgggtctgggcgaggtgcacataccggtgattgtctgcgctagcgagccggccacggggaggtgatgatcccgcccagatttgcactccgtcgtggaattccccccggttcagggtcgcccagctcgtcccgcgggcacggaaggattccccgggcgttgacgcacccacacgaccgcgtgcagggaacggaacgccgccgtggagggctttcacccgcggcgcggcacggcaatacacccggcggtgcttctctctaagaactcgacgg

SEQ ID NO: 11514 - DNA, 665 bp, Zea Mays
gacgaaatcggccttaggccttctccatgtctttccaccacttggcggcttcatctcttggtttggtctatcacataacgctgctagatccactcttgccttttcattatcctttgacttatcaggaatgtccataattgttgcccatagtgcctcggcaacattcttttcagtgtgcatcacgtcaatgttgtgtggaaggagcaggtcgtcataataggggagccgagtcaagccagacttatatgtccacatatgctgcacaccatatcccacaaaaccaccttctgtattggccacgagcccatctatctgttgacgaatctcggcaccagtcatcattgtaggtgggcggtctgtcactacgacacctttcataaagttcttgatgtctaggcggaatggatagtcaggagggagaaattgtcaatgtttatcgaaggacgaatatttgccaccctttttcaaccaaatgaacctgagagcttccttgcaaactgggcatgggaacttaccgtgaacacaccaggcgcagaatagcccatacgccggtaagtcatgcatggagtactggtatcaaacatgcattttgaagtttgtcttcgtagctcggtcatacgtccataccccttcctcccaggcacgtaccaattcatcgatcaaag

SEQ ID NO: 11515 - DNA, 337 bp, Zea Mays
tcatgccagccaaattcgccagctatttggatttcacaagtcatcgactcgtcttcacagcttatgctatggcacctctgaccctcctcgtcgccctcacgacggtgttgctcctggtacagcccacgtcgtggttctgttccgaccgcccttctcagatgggtcgcgacgctctccggcagacttcaccacagcagcaaagtttctatatcagcttatgagacagacacttctgccgcggatttggtacagggaggctaccacacatatccagctttggctccttggtgccctagtctctcactcagagtttgacgttgttgatttccttattttg

SEQ ID NO: 11516 - DNA, 697 bp, Zea Mays
gaatcgcacgatgattcaacgagttctggtgaggttgtaggccgggactgccgccgctctgcaaactcgctcgcgccatcgttctgtgcacgcggtcgggccggggagcatcgttggtgggtggtggtgtcgaccgtgggctcggtggtatggatcgagtatcggggaggcgaattgttcatcggttcttgggcaccaccatcgggccgcactccgccatgggcggtggtctccatgcgataagatcgggtaaggacccttcccgtggattagctttgaacgcagtatcttgtagatgcagttgatgtggggaatcgagcactggaccgccgggtagcgcttctcaggcgagctctgccgtgtgaagtgagcgcgccgccacggctggggagcgtggtgggggaaaatgcatcgtcggctgttgattcggaggagtaagggaagaagaacatgccctcgccgtttggatcgagatggatggtcgagattaaaacagccataccctttcccttcaagaaaccgtgttcgtggatgacgaaatcgacagtgtagattaggtccggatttaccccttcgcgcgatctgatctggaccttcaaaatctgatcgggtggctcaagagtagccatacccccttcgggcaaggtattttgctaaagagaccctggggatttctggaatcaacccgccatccccg

SEQ ID NO: 11517 - DNA, 936 bp, Zea Mays
gcaaaagtagcacacctataaggatgtagaagcatatggatccaagtttataacaccataaaatggttgttcatgtgttggattgggtgctagatgcgagtatgcatatgcgggtggaggtggtgataatacatacccttacatgactgatggtggtgcccatgcatacgaggtcaagttttagtcacatcgaggtggatagttataactagagctaactaagttgtggctaccatcatcaataggaaggcaaaccgaatgatgtcggtcgcttctcgtctcgtgttgcgaatgaggtgctccatgatctggatcttggaagcatgggtgaactgactctctctggtgaatcgccaatcctccataccactctctcctgcatgactaccctagcaccatatgttctagcatcacctccatatccccatggctgccaccaccatcatctccatcgtccccatggctacaatcatcatcgtcaccactatcaccttcactagggccagttgtgctttcatcagtcccaacctcttcttactattcgctttcaccagcgaattttaccttttttcctttgcgttttggagaatcaacttttgttttcctctttctaaggtgggtgtcaccaactgttgtatcagcccattcatgatcatcctttgtgtccccatgttcatgggcaattgatgtaacaaggtgctaggtacatgtgcattagatctccctctctccatccactctcatatggctttattatgcctatgtaatgagagatccataagggctatggtaggataaaactcactaggtccaagcgtagctaatgcatgttgagttgtagttcacgaacaccaactcatgtaacttccggtaccctagtttgttgtggagcttgtatgaatgaatgcaaatgtactcctattgcgctcacaccca

SEQ ID NO: 11518 - DNA, 392 bp, Zea Mays
tgggctgttaaggaccctgatcgccttctccttgtgcatgccccgtgggcctctgcttcctttggtactgcacgcctgtcataacagtacaacaatgcatactagagacacctggctgggattagcatgatgtctacctatgttagggaaaaaataaggttgctgttttgtataatattggacccatgttgcatacatttaggaagcattcaaattcaatcttttccttgattggcttatgatgtaagcaagattggtatgcagaactaatagagttattgtaggggaacacaatacatgtttatgtataggcatggacagaaccaaccaccgatatccattcctaatataagtcaatctacaggtgcgccagacttgggagtccaaggctg

SEQ ID NO: 11519 - DNA, 516 bp, Zea Mays
ctttaccacgtcgtagtaagccactttaggtagctagttcatcgccggtaatcttgccacagtgaaagccacgcatctcttgcgccagtgacctcccctctctctggcggccagcgcgccattccaaaattgggagccaccatccttggacactataaattggtgccccagcctactccgctaagtaattgtgcacccagtgaaccagccctcacctccaatcatcccccacagctcccaatttgggatttcccccaattctattctctgcgccaccgtgagcgagctcgccgtggccagccttctgcaggtccgttcacgtcctcctcgctctcattactgcacgctggtgtgctcaatcatcccccacagctccccaatttgggatttcccccaattctgttctctccgccgccgtgagcgagctcgccatggccatccttctacaggtctgttcacgtcctcctcgctctcgttactgcaccctggtgtgctcaggatgctcatcgacctagc

SEQ ID NO: 11520 - DNA, 437 bp, Zea Mays
agagcaatgcctttgtgtaaggtagctcccagataaacgagatgtgtgtccaattttgttctttaccatacccttcaaacgacctcctacacccagttttaggtcacgatgttgtctcatgatattttcaccagtttgtcgctttggtgtcccatctctaaccctcttgccttttcgaaatcactttgtatcctttctaaaaggatgattatagggaaggaggcatcagtgaacatcaaaaaatgtttccttcttaccatgttctaacctatatgcttgtgagtcacccatacatatcggacaacgcagtatgccatggacacaccaaccagaaaaaatgccatatgctagcagatcatgaattgaccatagatatgctgcgcgtagagtaaaacgacatttcagatgactatcatatgtttcaaccccctgccaca

SEQ ID NO: 11521 - DNA, 494 bp, Zea Mays
atggctggaattgattaaggattatgacattgagatccactaccaccctagaaaggccaatgtagtagcagacgccctcagccggaaacccttcggggaaaaagcaaccaactttttggaagactagaaaagagaattagctcagctgaatgcttgtttgggagacagtggcagcatagaagttaaaccgatgctggaagatctcatacgcaaagctcaacgcttggacatcgagactgcaagacttgcagaaaaagcttgcaaggaacaacttccggaccttaggacagatgaagaagggactctggttcacaatttagcctactcgatccacccagggaccaccaagatgtacctagacctcaagaccagatattggtggagaggattgaaaaaggagatagctcagtatgtggcccggtgtgatacttgccagcgaactaaggcagagcatcagaggcctgcaggtctactgcaacccctcccagtgccca

SEQ ID NO: 11522 - DNA, 419 bp, Zea Mays
tgttggaacaggaggcggcaccggcgcggagtagaaggtgggactcggaggtggtgggcgccatgccggaacaggacgcggctgtagcgccggcgaggctcaggaggtggaactcagagtcgctggatagcatactggagcaggaggcgagagtggcggcggcgaggagcacgaggtggggctcggaggtgatggacgccatgccggaacaggaggcagcggtagcgccggcgaggctcaggaggtggaactcggagtcgttggatagcatactggagcaggaggcgagagtggcgccggcgaggagcacgaggtggggttcggaggtgatggacgccatgccggaacaggaggcagcggtagcgccagcgaggctcaggaggtggaactcagagtcgttggatagcatactggagcag

SEQ ID NO: 11523 - DNA, 300 bp, Zea Mays
tggccacagacgcggagaaagctaggcctcttcgacggaaccgaaattttagttaaatcgagctgagccgtgacccaggagtccgtgtactacggtgtaccggcgccctcctccgctaccttttcttcaccttctccacgccacaaccagacggggtacgtgctgcctcgtcgccaccaccatcgctcctcctccccgccgccagaggctaggacgaggcaggagacggaccgacagccggcgatgtcgccgccgacctgtcagacatggagacggggcccgagcaggaggcgtcggcgg

SEQ ID NO: 11524 - DNA, 712 bp, Zea Mays
ttgatctacctgccaatccacacaaccagagggtacttagacaacaacaacaagcagatatgaatcctccaaatcctccaccagccggaactgatccagtggttgcagatgcaaatgctgcaacaaattgctgatactatggcaaatatacatgcgcaaatgcggtaggaacgccaagagatgcgccaggaaaggcaagatatgcaggaggagatgcgtcaagaaagaatggggcgatagcagcaacctccattgccaccaccgccaccaccacttccaccctgggacaagcactgggaatttatgagccacaagccgcctacctttgccagctctccagatcctctacacgccgatgactggttgatgtcagtagagaagatgctaaacattgcccaatgctccgaccgggagaaggttctctatgcttctggtcgtctgactggtcctgctgctgattggtgggattcttatactgctgcccatgacgctgctgatactatcacttgggttgaattcaccacacagttcagaaattaccacatacctgctggactgatgaagattaaaaagaaggaatttctatcaataaattagggcagcatttcagttagtgagtaccgtgacaaattcattcagctatcatggtatgctcctgatgaggtggctgatgatgagagaaagcaagagcacttcattgaaggactcaatg

SEQ ID NO: 11525 - DNA, 684 bp, Zea Mays
ccgagggtgtgctcaatttattggacccttgagcggtggctcatgaatttgaaggagacgcgcggcggccggagagggggaagagcactggtgcaagcgattggtggcatttaccgtggtgggctcaccggcgatgaccggatgttctagagcgagtcactacgacgaagtactgcatctaggcacgtgtcattcgagcggcgggtggctaactctggtgaacttatctgaattcggtcgtgagccaagcggacacggcggccgggcggaacagtgccttaagctcaatagcggtgaagatctttccaccccgaggagttatccgggcaccagtgagcacgaatcacctcggtggcgtgaatccacgcgcgggggtcgccggcggcaagttcactgaaccagccgatctttttggttactgtaccatcaagaacttcttcagtcagcctgacagagcgaatggcagggagatttgctccaaatttcatgcagtgactcgatcatctcactatatcaaagttgtagcctaacaaaccagctttaactttgttacaatgttcaccatcaaatagtcacaggatcttactcaaaatcaagctctaagttcatccaacttcactgttactgaaaattcagacttaaggctggctgacagcacaactttgagcttatttttctccaaac

SEQ ID NO: 11526 - DNA, 812 bp, Zea Mays
ctgcgggttagttgtgtaagaggtcagggactctttagcaaaactgctatggctgaaggggtatcgatccatgtggaccgcacgatcacctttggatggcccggattaggttttgttaaaaatgaattagtatgctacgccagccattagatcagagatcgacagcccgagattgcccacgcagagatccgatcttacacgcccaatctgagatctacgacacccattttatgaacaaaagggtatatgtttggtctaatcccgatcgttggccagagatccaacggccatgcagcatcaccctgcctcccgccatgccggccggcggtggcgccatgactgggctcccctatcgccgcacccaatctcttaaacctcaatccaagagttgccaaacatagaggagaccacatggagtaaggttaggggcaaactaccaagacatggagtgcggagactcgagtccgcggtggcctacagttttgcggtagaggcgaggcgcccacgagaaatccccacacaaagggggatcagtcctgaactcggttgaatcctatgtgttcccaaagtaaagatggggacgggactggtcaccttaccggcgatggagcaacacagaggcccgacgacggcgttcggcggctccgcgatggctctcgggctccagcgagcaatcccggcaaccttgctatcacacgcacccatgcgatgctacggaaccggtccttggaatcgggcgaagacccctggctcgaaccggaaggcacaacgatggtgaatcagagtctcccccgcaccggatcaccctccca

SEQ ID NO: 11527 - DNA, 403 bp, Zea Mays
gcctagaaggccggaaagaaacgatcaaacctatgagccatatagggcaaatggaaatgcaccacgtagctcaaaccaatgggggaaagacaacatactaacatccaaccaaccccacctatgtttgaccagagagccggtggtcttgcaccggctgccattgttatagtgagggaagaaatagccggggcgttccgagataagctcagagtcagcatagtccctggggggcaatcatatcggaaatcttatgacaactgatttgatcaccacccatacccacagggaactaggatacccgaattcgcaaaattttcgggtgatcaaggaaaaaacacgcgcgaacatataggccagttcttagcacaattgggagaattggccgacacagaggcatttcgcg

SEQ ID NO: 11528 - DNA, 409 bp, Zea Mays
ggacaagcatcattagagacagaaggtagcaatgcaaatgaatcggtgggtttaagaaatagcaatatcaatagtgtcgatcaagttatagccgatcctggtcttcgcatgccaattgagcaaattgatgcaaacattagggatgctgtcagaagagcatatattgcgaagggtccatgccaaccaaaaggtcataagtatcctaaaagaatgataggcaatcgcaataggtcttttcatgatgaatggtatgtaaataatccatggttggagtatagcattgctaaggatgcggccttttgtttttattgctacctttttaaacaaccaagagctgaaaattatggtgttgatgccttcacggttgttgggtttcgtcgatggaaagatggacgtgaaactattggag

SEQ ID NO: 11529 - DNA, 420 bp, Zea Mays
agagttttgaatccggccggcccgagcaccattcatcaattaactcgcgccacgcaaagctgatgcttccctaaactcaatcccccaaccaattttggccgacctcgagtgcacgactcggtacacggcacgtcgcggtggcaccatggccggacagcggaaccggggacctagctacacccacttacaattcgctagcgcatagcctagaggaagggaggacggatacggtggggactcaccaacggtcggccgaggtcagacgacgcccgtccacggagcttgggcggaacccgcctgcagcagtcacggcggcgagcaattcgaccaccacaccaacgcatgactccaatcgcaggcgcggccggcttccttggaagattacgaccccgcttggccacacgccaaggcagaaccacc

SEQ ID NO: 11530 - DNA, 371 bp, Zea Mays
gagctctagtgctatggtgcttggtgtggagggcaagtcggcatggggcgggaggctagctggcgtacgaggcacctgcgtggaggagggcggcaaccaacatgggaaaggcacgaggagggcagcatatagagaggatagggcagcatgcgacatagggagggaaggcacatgcatggagggcaggctagcatgagatgcgcagctaattggcattggaggtgcctgtgtggaagagggcgacaagtgtcatggggaggggtggtgcctgcatggagggcaactggtattggagaaggcatagggatggcgatgacatcaaaggtggggagggtggagtccgacatggggagggcagtggccaatgtggg

SEQ ID NO: 11531 - DNA, 627 bp, Zea Mays
agaggacaacaccattctgagcccaatgaaacctagccatattgaatttggtaaatctactgtgacggcagacgacatggttatgatgaaaaaattgggctactttggcgaagccgagagcaagctcgtccggtttgccagggaggaggtagttccgcagccaagggaggatgaaattgtggtttttaagagcttcttcagggcagggcttcgattccctcttcatgagatgattggagaggttttcaaagaatttttagatatactttcatcacttgacatccaatgcaatcgttagacttagtgtctacatatgggctctccgaagtcagggtatgagtcctaatgccgaagctttctactgggtgcacgagctgcactatcaaacgaaggccagagcggatggtcttcataagaacttcggctgctacaacttcgcatatcagaaagatacgaaggccccggtaattggctatcgtaccaagtggccgaccggttggacaagcgaatggttttacagaaaagcagacgagaagaaaagggagaagctaattactatggtcatgagtccattgaagttaagcttcgagatgacaaggccctgtgccacatgcagcttggtccccc

SEQ ID NO: 11532 - DNA, 633 bp, Zea Mays
atctactgcgagacacgttccctgaggtcaattaagtatgagccatgaatcgcccgagcccccgctcggtagtcgcctaaaactctgcctcgcccgagcctgccctcgggccaaggcgacactcggggaaatccccgtcctgcccgaggtcctctcttctcggaacaacagtttccgcctcggccaagcccatctcaggcaaggaggacaaccccgagcccggcctcagtcaaaggttgcgggaaccgcggggacataagcattcaatgtaaatacctgcccacgtgacatcgcaggcgaacaagagtgataggaccacggtcccatccactttcaccaactatgatgacgcatgcccggtaataacggctactgctcccccacgctgtctgccaactccggatggggcgcgcgtatggcacatcatggtctggccctcgggaagaaactacgcctcgcccaaagccgacctcagccttggaacaaactctgcctcgcccgagcccggcatcgcccacctgcaccctgcgaatcccacagaaggccagtctttcaactattccctacacgactgcgaaccccagagcaggctcggccatggcctcgggaagacttctgcctcgaccaagcgtg

SEQ ID NO: 11533 - DNA, 883 bp, Zea Mays
tgactgttgggatcgataggaggaatgattgcgacggacgaactctgggttttccgcttgggcgccatctcaaccttgttggcgagcggagtggaggcaatattgcaagagagaagagaaggcctggatgcagaaaagcaaaactagggcacagaatgcagaggcgtgcgacagtgcagtacatatggggttttcccgggccagacgccatttctaaaaagcgcccagtcatcacccagctgttatttctaaaacgctggtgtgccatgtcatcactcgtccgttatttccaaaacggccgacgcagcccaatataactcagctgctatttctaaaaacgctgacgttaccagacttcactcgaccactatttccaaagcggccgacgtggcccgttatcactcggctgttacttctaaaacgcaggcattgccagtagtcactcggctgttattcctaaagccgtgacgtggctccaaaggattcggctgttacctctaaaacgccgacatcaccagtaatcgctcggtcgttatttctaaaacaccgacgtggcccgttatcactcggctgttacttctaaaagcgccgacatcgccggtaatcactcggctgttattcctaaagcgacaacgtgactccaaaggacttggccgctaccactaaagcgctgacatcgcgaagaaggcagtctaaaatgcaacacgacgattctaagtccctactcaagcgttacatccaaaaacaacatctgcagtaagcataaatacggtcgacgattgacagaaaggcaaaatggtgcacacagaattggacgaaatccttcttcattataaaagggaagcattaccgaacatacaaatcaactcattatgagttgatg

SEQ ID NO: 11534 - DNA, 595 bp, Zea Mays
gttaggcgccacgagagcacgagtatgtcgggcgtgacggttgtgcccacccgacaggttgagcctccagcgataactcgggcggatgagcgcaggaatttcccaagatgtaggaggacggttcactacaaaccgggagataggcgaatggattacttttgtcatctgtgcggggatagatatcattggtcgtgtatataaggccaagaggtacccctaccattttcatctcaccttagcccaccattctcaaagtccacaacttgtaatctcatcccaataccaaaaccatcacaggacgtagggtgttacgcctctcgcgcggcccgaacctgaacaagcttgtgtgtttctcctgtcgtgccaccgcacgaaccatcgagtcatgatcgacgacgccgtcctgccctaaaagcatcacgagggttaccccatggtgtgcggtcgggtaacaaacaccgacacgggtcagccctttccttttgcgggtttggtcgtcagagacgcaggcgtccgttccgtctcgctgggttgctcggcggggacttgaccatccgtcccgcttcgttgggttgctcgacaggtcttggtcgtc

SEQ ID NO: 11535 - DNA, 980 bp, Zea Mays
ggacttggtgcatctgctgtccttaactcgatcgctgaacaccctcctccgtctgttagaaacaaatttcagaatattatacacattgattgctcaagatggagaaaccggagaacagtccagagaatgatggcacagaaactaaggcttcctcaacatgtaatggctatctttgataaacatgatgaagatgatgatttagctggtatagatgaatgctctagggttgagataaaagtggtcaggaaagagatctcccgagctctacaaggacagaactccttagtagtcttccacaatgggagccatagcatggttaacttcaatgaccttggcattactctagatgctgcagatccttcatcaaatattcttcggaaggtactgtggacattccaaggaaggcttcgtgccatcaatgcacgtaaggaaatacagggaactgaggcagtggacacttcatatctgtaccttggttcaattttttctaaggaaaactctgatttatcccacagggttgaaatactgcgtgaagaagctacaaaaatagcacaatacacgaataagcttatggtcactagggaaatagctgaagtgtgttgtaagtacttgttatcattgcattccaacactaccacctctctggacttcaactgggccattcatgcatcaaattattgggtttgtgatgggattctacaagacctccagcaagaggaagcatgggaggttgccactgcgttgcatgaagagttgcaactggaggaccactcaacttatataacgcccttttccggtggtgatacaacatcttggattgtggccacaaaaggtgttgtaccaacagtacaacctgaaacgtcatcattctttttggcaattaaggaaaaaaaatcgctagtgtcattacccaagggcatgttccaaagatcagagcaacttcatgtattgaaactctgccactgcaccttcaacttttc

SEQ ID NO: 11536 - DNA, 1257 bp, Zea Mays
gtggcagtagattcatcttgagtaccatcaacctcgatgtcctcgtcggtctcatcatctaatatatttttttggaaaacaacgattaagacaagtgtagttatataagtcgtggtatcataataaaaattgaggtacgcacattgcccagcgaataggtatccatcgttctcatcatcatcctcatcctcttcgaatatgacaccctcatcatcatcacctaaatcgtgaaaatatgagccacgtaaaaggcaagggcatctagggcgggggaaaaatgtaatgtgaacaaagatttttaacaagtaccattggaaatgaactttggcttcgtatgtgtatggtccactccttgttcaaccatgcctgcactcacacgtttagtcggactacatgctatcgtcatcgtgcaatattcatttaaaattggttgtaattaccattggtgtggatctctgcagttggatggggctgtgtccaatcgtctccttccatagcatcacaaatagtatcctcggtcattgtagccacattccttccaatgtcgtcttcaaattgttggtttcgatggcctaaggtagctggtcttgtcccagatagcacatgatgtctacgtcttagtggctcagtagacatatcgagtgaaccaacatccttagtctgtgttgaagttggcaggaaaggtgtcacgatgaattcagggataacccagtcgcaagtggtaactgaggatccatatggttcaattccatatgttgtaggacgtacaacctcaggggtatatactgggtcctccatggtgatggactcctgattcaaagtgtcaccctgtagtgctctacgttttctgttgcactctttgttagcatctttccgtcttggtgtcttattatacaacctaaggcgtacacgtctagactccctctcgacgggggtcatgtttttgtaccgctcaactaaaagtaggcggcccttttcatagtatgcttaggtatgttatcaaacagtttcatgcacacaacctggaataaggcatgtctacgtttaacgatttgaaacctgttgttttttttgcatatttagccaagcgaacaatcatgtacctggtgtcagaaggtcttcacttgtgacaatgttgtttgcctggaatgtctcattcctatgcaaccaatcgttgtcatcatatgcatccagatttacttgttcgtctccacctacatttagcattttagcataagtaaagagttaacataatag

SEQ ID NO: 11537 - DNA, 531 bp, Zea Mays
atggattactttaggaatacgtagacaaaataatctaggcaggcggaacataagcacctttaagcaactcgacatatgatcgttgaagaggcggtgaggctgcatccgtgctaactataagcagcaagttggccataaattcataggatttttgaacgcccatcagatatgaaagcaaaagatgtttttcaaaaaggtaggcggtagggaacagccattgctggcaccttgttcagcagacgcaagcgtacaacacatcttttgtctgcgatgttgtctgttagcggtggcaagcggcgcaggaaagtcgagtaaggatttgtcgcctgcaatcgacgtgcgcacacgtcttagtatgcgcatagagatgtagcagataaaggcagcagcaaaagcccgagaggcactaacctggccgctttcgacgtactggctgtgagtggaatggaactacataacgcgatgcatgtgctggcgccgaagtggatggccgatcaagtgtgttcatgtgttcgatagtagctgttcaaa

SEQ ID NO: 11538 - DNA, 561 bp, Zea Mays
gcttggtaagatacattagagcgtgttcctgtgttccacctgagaggagcgtgtagtgaaattattagggataaccttcactgtttgtttcctatttttgtgtttcgatggcaggcgacgaagaagaagcaaggatccctacagacttcgatgaatgtgttagccaccaagatcttgaggcaaacaacaagctcctgaaggagcaaatggaggagacggtccacaagtcagtgcatgatgccttcattgacatggaccttggcaagacttacgagaggctagatcgacgattgtccgagatcgtcgacaaacttgctgtgttggagatgcaacaacaagcactgccaccaccacctcctcgtccacgtcttcctgatgatgtggtgtttcatgcagaaggtaattatgatgaagcggccaccagagatttatgcctatgtcaccgtcttcatcaaaacacagaaggtatgccacaccgccagcaaggtaataacaatcgtgctcccgacgacccttacgctaagattaaatttactataccatctttttcgggtcattatg

SEQ ID NO: 11539 - DNA, 347 bp, Zea Mays
cggatcgacgaggagcgggtacctgcccggatgatcgaagttgagccattgatccgcccgagtaaaggtgatcgggtgttctgaccaccgatagggggtgggagcattggtggtcgccaccagtatctgtcgatcgttgagcttctactgccttttgttctcttgcaacccgtgccctccgaagatgacattgacctctccgtcgacgcgtgacaatgctccgcctcctcccccttcctgctactaaggttgtcgaggttctccgggtcctcctcgtggtgggggaggtggtagaggttggaagggtcggccattcccgatggagtgcttgaagtctctgtagttcc

SEQ ID NO: 11540 - DNA, 795 bp, Zea Mays
atctagaccaacctcttgacaccgaagaccgccttccaaggtcgacgatgcgtgagatgctgcccaggatacctctaaacccacatctggaatgtcagagaaaacatccatcatatcaccatcggtcggctctgacagcatatcctcaggaacgacatcctcaagggcctgatcagaatctgttatggataattcttgcaggccaacaagagcagacagagctggagaaggaatatcactatctcctctactacctctgtaacatcgactattcttgtgaattagtggaacttcttcttcttcttcgtcctcatcgaaaatgtggacaaaggatggggtaggatcacacccattgggctcagctgcaacaggatcacacccattgggctcagctgcaataggatcacacccattgggctcagctgcaataggattacacccattggggtcagtcggtgcatggtcacacccattggggacaaattcagcaggtacaccaccagtgtgatcaactccagtaaagacctctgctggtacttcttcacaagtaggagcagaaggtccagcatcctggtccaaacatgacaaccgccggagccgtctctttttcttcttcttcccttcagaaggtgcagttgggcgactgacctggcgaagacgctttgggcgagtaccctcaagctttcgggtgtccactattctgtcaagctctggtataactgcaatagccattgattcagcaggggccgaatcagaagattctccagccaacatatcgagcacaacattcatctc

SEQ ID NO: 11541 - DNA, 419 bp, Zea Mays
gtcaagactggaaatagcctctgatctcatgcagttaaatagaagcaagaactaagcaaggaaatgcacaaccaattcactgtcaccacaaagcttcatacctttagcccctaggtcgaaggatgcacagaactcctccctgccgccgaacaaggatgacgctaacggatcggtgacgactctcgcacttccaggcacacacggacagaaagctactccacctccacgcaaggtacctccgccgtcgaggtcgagttctccgctgtcattcacctgcatttgggggaatctgccgccgagggagttcgccggctcattcggaggagcagatccagcaggctgcgtctccaactgccagtactcgccgccgcatcggccgcctcctccaccgccgctcaatcctccctcgacggtaccgc

SEQ ID NO: 11542 - DNA, 329 bp, Zea Mays
gtatctgcaaggtctaataaaatcagcttctagcagccggtggatttcgtccttgatccgtgggagaaggtctggacgaaatgttctagctttctgcttgaaaggtctgaaaccggacttaataggcagccgatgctctatgatctctcggcttaatccaggcatctcagtataattccaagcaaagcaatctgaatattccttcaatagaccgatcatctcatttctaggatcggtcttcagggttttgtttacaaaagtcagccttgaagttttaccatctcctctaaaggatcagccgatgtaaacccctgtcctagattatcaag

SEQ ID NO: 11543 - DNA, 505 bp, Zea Mays
gccggtgatctgccaccacaattcgcgcccgcctgggagatttgtgccatgggaagagtagataacgtcagggcgaggtgaaaatatccagtgtggggtgaatccggtcgctggccggaccggccatcgtgtcccaccgtggtcaatcgcgctggcatcaccggagttcgctattatctagctagggtacatgcctcaaagccttaccacgtcacaatagaccgttctaggtagcttgttcatcgcctaagacactgcccccgtaaaagccacgatagcacttgcgctagtgacttcccctctttcgggacgccaccacccttccttcaaattggatgccaccaccgtagaactctataaattgctgccccgtgagttccgctaggtatttacacatccaacgcaccagcccttgcctcggatcatccaccagaacccctcaatttctcattttccccaaatcggtcagaacgccgccgtgagagagctcgctgtggctagacgt

SEQ ID NO: 11544 - DNA, 702 bp, Zea Mays
gtgcatctctgttacgttggcaacttgggaccactggtcggtcaccctgggatcggtaacagcttgcacgagatccatggcggggagcgcgcaccgatcatgcgaagctcgggccacgtccaaccacccaagccctcggtccaaccccggtccaccacataaagcacctcctcctacccgtttgtgcaactctacgcgcataccgtgagccaccattaccgtgagtagagagaaaaggaagaagaggggcggccgcacgaccatctgggcgtctgggccgcgggtgagctgtagattgggtcagtgatcgtcgctggttcacggcggtgctgtccgcgggcgtgccagggagaggcggacggagaagcggcccgaattgctcaccaaaatctcgacttcgccccaatccaccgtgcggcgcgattggcctccactgtcgtccatctctggtaaggaaaccctgcattgtactcacccggatcttgcggtagtgtagaacctaacgaattagggttttgggtgttggtgcgctggattggcttcctccggcgacgtctccgccgtggttggcactcgcgtcgccagactcggctccctgggaggaagaagagacgatctctgtcgatctgttgatggagggcggagattagatgatagcgtacctattcgcgcgattgaatcatgagcgtagatctgggatcc

SEQ ID NO: 11545 - DNA, 1134 bp, Zea Mays
acggaagatgcgcatgatgccttcttccctccctcattctcgctcgcccccattccaccttcgacgacccctttctccttctccctcctcaatcacctgcagcgaaaaggaaaaggtacacacaatattgagtccatatgcatgcattcgtgatttcaaatggttcttcgttctaacttgtttgagatccgtttggagttttgcgcagcagatctttgacatgcatagggcgtgctacacccactttgtggtttaatttctttcttgaatattaattttctcattaagagcgtattagtgatttccttatctgatctgatctctctttgttcatgtcctttacttgtttgagatccgagagtatttatgattgtaatatttgcctatgacaacacgtacggccgaggcattacaaattgttatttgaacgacgaattgtaggttgtgtgtatttacctaatagtcagtttcatgagtgcacatgcatgtacactccataaagaaaaaacgaatgcaaccacatgcatttctccttgtaatatatattgcagcaattaattcctttcattaccttttcttcttcggttggaacaaatttgagatatgcaaaacaatccaaaaaacattgtacgttgcaccttgtgccattttattgacctgcaacattttctctcaattttatgttgtagggtgtcagaccgtaactaagagctatttagcaataatacatacatagctataccctctttaggtcaagagggtggagttctccttattcggaggaagagctccatcctcattctacaagaccaaaccaataaatggcctctagcccacagtcctcgccatcatcctccaagaagtcgccgccaccacaagaagcatcagctttggcgccaaaatcatcttcaaagtcaccctcgccaccaaagggtgaatcaaattcatctcccagtcccccatcgaaatcgtccctgtcaccaccgccacgaccaaagaaaagtgctagtacatctagctctaaagatgggaagacgaagaagtcgtcttcatcgtcttcatcgtcggataatacagccgctgtgatcaccggcgtggtgcttggggtggtgggcttcgctctgctcttgtcca

SEQ ID NO: 11546 - DNA, 320 bp, Zea Mays
atcttgaggagaagtattctcgaggtcaagccgacctggcctgagtttctgcttctctggatgatgcgcactctttgaactcttctctcaatgctcagcttaacccagaaaggacagcatatgaggtaaactcccttagttgattttgccatgcttattgttgactgggtgctgaatgttgattcttgtttgtaggaggaaagatgagctcttgtggcttctcgtgataatctggacaagttataccgtgacgctagcacttccttgactattttggaaagaagccaccgcttcactatgtcggacctggatcatcatcg

SEQ ID NO: 11547 - DNA, 664 bp, Zea Mays
gtgaggatgggtgcattaatagtgttcggtatggttcctcatacttgttattacgagaaagcataaccatgccatctagtcatggctatagggatttttccatcccctggcagccggtgtgattgcttgaccagatatcatctcaaatgtaagagcacacctttatagtggcattgattacacctatcccctgagtgcatgtcagggtgaaaatatgattgtaatgtcatttatcacatttaatacgacacataggcccggatgcagtcatctcttctcgagacaactgtcataacgtctacaggggcgagtacgataacctaaccttatgtacgccagaccatggggcacctggcttaatataattgatagttaatgtagcctcttatacttatattatatttcttggtacactccttgtgtgcatgtgcagctacatgatcgatagacatactgtattacggtctcgatagctctataatctaagtagtatatattgaacaagtatttgtagtacttttgaattatggtgtgaacatgagcttttaaattttcttgttgatttttagtattttagtatataatgaacaagtagccataatacttttgttgtattgatggatttgggcttgaaagtgattggactaattgtattgcacattaa

SEQ ID NO: 11548 - DNA, 394 bp, Zea Mays
ggggagcaaaaagaaaagatttgtcagcattttgagcaggcaagctgcccggactgtgaaggaagaccaagaggctttgaagaagatgaaaacagcgacggagccgaaggccctgactcctaagaaacggaagcttgctgtggaatccttagagaagacgaagacacaagatgtgctgaaaccaattgcaagtccttcgtcttctgccgctgaggtctcagaaatattgaaggtagtgactgagtccttcccattcacaccactaagtcctctaggcttggaactgaccagcctcttacagaaaaaggaggtatcttcggctgcagaaggaagagacgggggtcagaagaaatgacgcattgtgaacatattagaagaaattgaacaaaccccc

SEQ ID NO: 11549 - DNA, 609 bp, Zea Mays
ctcggggtaaaattcctaagacccagtgcacactacccctggacggcgggttgattcaaatgtttgccagggtctctttagcataaacgccaaggcgaagaggtatcggggacccagagccatccgatcaggaatctagggcacatattaaatctgccccccctgaaccggtagcaatacgagccctcggatccaatgtctacgcctatgatttaatgtgaccgcgatctaatccggtccgttcattacgatcacgcggtccagattcagtgaagacacgatttgatcgtagccgttcacagacaatcccacggccacctctaatcttcaagcttctgacgccgagtcctgctaaccaaacagagctccgcggcggcgccagggaccagccaacccccaccatgccaccccaatgtcccaaactcaacgccatcgggtgctaacttacacgaaacctatggtgatcaaccaatcttccacccagacgcgacccgagtggcgccagaagcgcatggcggcgcaaacctggcagcggacaacatggccggagtttgtcatctccgcgcacaagcacccaggcgtcgattccctagcgctacacgtaaagag

SEQ ID NO: 11550 - DNA, 479 bp, Zea Mays
tgattgcgacagacgaactctgagtcttccacttgggcgccatctcaatcttactggcgaacgaagcggaagcaatattgcaagagagtagagaaggcctggatgcagaaaagcaaaactagggcacagaatgcagaggcatgcgacagtgtagtacatatggggttttcccgggccagacgccatttctaaaaagcgcccagtcatcacccaactgttatttctaaaacgatggtgtgccatgtcatcactcggccgttatttccaatacggccgacgcggcccaatttaactcagctgttatttctaaaaacgctgacgttaccagacttcactcgaccattgttcccaaagcggccgacgtggcccgttatcactcggctgttacttctaaaacgccgatgtcgtcagcagtcactcgactgttatttctaaagcagtgacgtggctccaaaggattcagctattacctctaaaac

SEQ ID NO: 11551 - DNA, 598 bp, Zea Mays
gtgaaatgtagctatcatatgtagacttcggagactgaatgtcggtctgtgaaggttcatttgcaccagcatatttgtgactcctctgtttcctatttctttttttggtaccgtttagtgggcacttataacttgtttgtctgtgaccaagctctccacattttttgcatcgtatagggcctcttttcatttgcctaccaccttctttattggttgtcttaggtttactcccaccttacagacaacctttcattcgtaatttcctttgcctaccaacacctcgttttgctaaaggtccttttacaacaaggtccatatcaacttgaggccactgtgaacgatcccttataggatagatgactctacaatatgcttttctaaacttttgtactgaataaaattcatgcacatagttttcgatcctttcacttttaaaactagtgatgacaactatggcatggtcacaaggcttcccagtgtgctgacactccagacatgagcactcttgcgctcctagatcaacaatatgtctttcttgtttggggctattatcaaacacctcagcatgaccatttccagcatttacaacttttaaatg

SEQ ID NO: 11552 - DNA, 479 bp, Zea Mays
acaggaggcaaatcattattggacaggaaatgctacatgtaacaatttctagagaggggcaaatgataaagaaaacacccaattgtccttccagccaaaaaggttataacatcgtatataaacttggcaaaggagcaaacagctgtggcaatatgataggacatcagcaaccccggctattcgtctcagttgagctaattagcagagccatgtaaagcctacacgtgtacatgcattcttgcgcgccactccataatccacttcctgtttattgcaacgtccctagcaggtaaaggaacaaagctaccccattaaggtctaaagggcaccacgggctaccagcatatgacattatgtatattttaagagctatagataaagagtctcaattcagatctaagtggtcgcaatgatgtagccataattatactggtgtgaggaaattctcaatatggcccagaactggtgtgaggaaattc

SEQ ID NO: 11553 - DNA, 1035 bp, Zea Mays
caacggcagcctcagcgtggacccgagcaggaggaacggcttcgtgctcagcaccgacgggcatcccagcagcctggggaccttcccggactggatggtgacgtcacaggacaacggcacctcgctggtgctgaaccctcctccggacagctctaacctgaccgagttcttgcagttcagcctggggcaagtgagcctgatgcggtggtctgcagcggcgaacacgaacagcagtggctgggtggctcgctggaccttcccgtcggattgcaaatccagtggcttcttctgcggtagctttggtgcttgcaggagcaatggagaatgcagctgtgtccgcggatttgagccttcctatccagcggagtggagcctcggatacttcgcaaccggttgctcgagaccgagatctcttccgctgagctgccagacgaacggccagactgaacaagacgactcctttatcctgctagacaagctgcaggggctcccgtataatccccaggatggtttagcagcaactgatgaagactgcaaacaagcctgtctcagcagatgctactgcgtcgcgtatgcgtatcactccggatgcaagctgtggtactacaacctgtacaacctgagcttcgcttccagaggacctcctccatacagcaaggtttatgttcgttggggctccaagctcaggcccaagagtggtctgcgcacagggctgattgtatccatggtggtcgggtcagtagcgttggctgccgtgatagtgatactggcgctcctatggcgatcccggacctggagaggtgtatttacttgcagtcgcagagagtttgaagcaggaggttctctcgcgttctactcttacgcgcagatgaagaaggctacaaggaacttctccgacaaactcggcgagggagggtttggaagcgttttcaggggaacaatggcaggaccaaccgccgtcgccgtgaagaggctcaaacgcagcgggcaggcggacaagcagttcagagccgaggtgcagacgctcggggtgat

SEQ ID NO: 11554 - DNA, 668 bp, Zea Mays
ctggaacctaaggatgcagctcaccccagtgctctagtctccagttctacacctatggatcctttgggccccgagtgttaggttgacaatgagtcgatccgtcagcttgaggatcagggtatggttgatgacacttctttagattctgatgatgaggacttagggattccacaaccaccacatcatgtgccaccttgctcacacgatcacgaggccggtggttccaatgttgttcctccctctacacctcctgctattgatccagccctggcagccatccttaagtcttccacccagcagcaggctcacttggcagctgagcaggcatatcaggtagccatcctgcagtagatgtctgagcggatgtttttgatgtttcagactattcaagactgctaggacactcttcagcagcatctcttggcagatagggtggagcatcgagcgttcatgactcaaattcttcagcacaccaatgttcatgtgcctcaagtgcagtaagctccaccaccacctcttcagacttctatggtgtcagccattcagttcggacaccagttgcacacctttggtctgatgttctcgcctctcctgccagtcactctggacttctctacttggggcattggaattgtcagtgctcagccactagtgccaccagtttctac

SEQ ID NO: 11555 - DNA, 764 bp, Zea Mays
gctgggacaggcacgcctgtgtttaacgtggggctgagaggcggcatgcaggacagacggcgccgttacgcggttgtttgaatggcaaggcggtaaacataagggaatggcgcagaattaaagggaatagtttccacatgcaaacgttattactatgatatgtggacgcgtaatttatggatcttgcatgggaagtaatgcgcggaaggtaaaaaaatgtagcataagatggtgaaagctatggcataaaaccgaaacgacataatagttgcataaatagtatataccgtttggcgtaaaacgttgagtcattgtgcgtaaatattttattatggattttagtttgacattgacatcgccataatatcgggacggtttcggaaataattgggagaccctgtaaacgtggatgcagttacttttatagtatccgagattaactttcattcgaaaaaaaagaccactaagcctgcataactaatcggagttggagatggccggctctggagagtcgtcggtgatggaaggatatggcgttcgtcttgatccagagacagagggaggagttggtggttactcactggtgacaccacctcctgctctactgggtcctgagatcgccgagatgagcataggggaagaaggagaacaaagggttcgacctcctatgtccaatattagctccagggagatggatacgccacaaatactgcattcacatgtaagtccaatcgctgtatttgattattgattgaatatattgt

SEQ ID NO: 11556 - DNA, 380 bp, Zea Mays
aaagctcatgtaaacttgtggcaatcaagggtacatccatacatgtgaataacacagaaaactaacacataagttaagttgtgagcacattcagaatgaatgactgcatggtaaacaaaaacagtattatgatttgtgagcaaccaaaaaatccagcaaacaagggtacatccgtacatgtgcataacacaagctttcttgcttgtcataggcaagcacatgcctatcaacatgggaagattatgaaaacaccaggaaggatccagaaactgaaacaaaacaaggtgaagtcatcaccacgacatatctgtaaacgttaaaacgctaattagaaactgaaactctgaaacgttaaacaatttggcctaaaacaacgtttt

SEQ ID NO: 11557 - DNA, 483 bp, Zea Mays
aattttgtgtgctcagtgtagcttaatttactgcaccgttgctgcctggtagtactagatgactcttttcgtgctagttgcattgctttgccgctagtggttctgtgcattggatctctaatgcttggtcacttgtcgaatgatttaaactttcaccgcaatgttttgtaatcctatataatgattgtgaaaggtcacacactgacacacatgacacagatgacatttctataatataggtactgaatcatgtatgctctatgtactatagtttctcctggttgttttgttaattactctttccagtccatttcataaggcatatgtgagttttgaaaaaaaagtctactatataaggcacatgtgtcatctgaagtcattaagcgtatgaatagggttgggcaaaatattcaaacaaagatcacacttgtgttggatgaactaataagtgatgaacttcgtttgtttggtgttggattgtca

SEQ ID NO: 11558 - DNA, 510 bp, Zea Mays
gttatggatgctcttaactttgagtatcctgactatgaaaggcttgacgaaggggtcggaggggtcaaaagaaaaagggttgttagtattctgagtaaggaagctacccgatctgtcaaggaggaccagaaagctttgaagaaatagaagactctatcagagccaaaggattcggctcccaagaaacgtaacctcgtgaggatatattctgggatacgaaggtacaagatgtgctagagaagactatgggtcctccttcaccctctaccactgaagtttcgtaaattctgaaggtaatgactgaatccatcccatttgcactgctaagtcctctaaggttagatctaactagcctctcgcaatcaaaggaaaccgctccatctacggaggggaaggccgggggcagaagaaacaacgaatgatgaatgtgatgcaagctattgagtagacatcgcccctagcttcggccgcaaaagcagctatgtatgtcgatgccgaagatgccgccgg

SEQ ID NO: 11559 - DNA, 1292 bp, Zea Mays
gtttatacactaatgttaactctttcactctcaatgtttacaggtcagacgatcagctggtcggtccagggaaccgaccaggtgactaatcgtgattaggttggcccgggtcgccctgtatatttcaggagctatatataacaacaacaacaacctaataatatataattatataggtactacactgctatgaaggcaaatgggtagtactactgtgataggcaaatctgaaacttaatattgatgcaaagttcatactaaaactgaaagtagataaatttcttatgacctattgacctcatctaaagttctaaacattcaaacaagcaaactcacagttattagagtgtagagacctagagcagaagatcattgtccaactgaaaaggcatcagcagcagctccccctccaactgattcagattcatcctggtccacatttgttgctgtttctgttggtggttgttgttcagctggttctgtagcatcttcatgctgatcattgtcatcttcttcaccaagatcttgagctgctgcatttctggaacgtttccttgtcctaacttatgttctttgaggttgaaaagataaaccagcactgacagcgtcagccctaggaaaatttctgccccagagtccttgacttgcacctaatgcaccattcacagcaccccataggctgttatcaccatcagcttcatcagtctattgtacccattcatagtgccaccaaacctaccggcaaggtgctgtttaaatcttttaattccagaaggtagaatcttcaaacagaaaatacactgaacaaagtcctttgcagtgtgatagtgtctggccacctcccaaacttccatccagggtcctgtgaccttgcctgctcttcggatcagttgcttgtgcacgaagctcaggagacagcgctgcaatggccttctcagtaagtgctgaagaatctgcagcggccaacgatgtcgacgcaggctcggtgctgtcagcaacagaggatgcagaggctccaccaaccacatgagactcaggaaagatgacctcaacgttatcagcaccccggcggctaccatggatctctgtacagatcaaaggaagggcaaaacgaccactttttggcaccacttaactcatacagagttacagaccatcggcagtcggcactcagcaccacttaagtacttaactcattaagatgaagagcagaccagaaaacaggagagaaaagagggaaacttggggcggaggaccttcacttgaggagctcatgttataacaattagaga

SEQ ID NO: 11560 - DNA, 1011 bp, Zea Mays
caccagacggctcccgtgcggcccaacccgacctgggcgcggcgcgccgacgggaggaccccaccggtcagtctcacacgcgcggccgcgttctcctcccctcactgctccgcgggggacccaccggccggtctctttcctctacgcgccctccccctcaaaccttgctcactgctgtgtgggacggacttgtcagtatcgtcctcaacaaatccacgcgaacccgtcgcaaccggagcgccaaatccgccgtagtggaggtgtatattccggagtcttggactgcacctgccagggtccttccctcgagaacatatacgcggtcctcctgccctcatcgcccaaccaccttttagccaattaggggccgtatttgcctagggtccattaccgcgggtgggggatgtccgccgcggagggagctttgattcaccggcattgaggctccggtgcttgcctggggatacgctctgggagtcggggaacactctggtgtgggtcactaggcaggcgaccatctcgtggctgtgaatttctcaccggagcttcgggaatcgacgtggaatcgcctcaccgcgcgagcaggggaatcttcaccgcgaatccaggtaaacggagcaccattcatttcgagattcactgggcgtcgtgtagagagactcggattaaggttttggtgaccaacgtgcggaatggtgcgcagtccggtcgtgcgccgccatgcttcaggcggcgccgccgtgggtgttccgcgcgcaggaagaaatgcgatccgatgggtgtctcggccctcagatcatgatcgggtggtcctggttggatcacgtttcattaaaacccaaccgttagatgtcgatcgggtggcccatgtggcgtaaccgttcgggtgggagtggatctaatccgtgcctttggattttgatccaacggcccagatatcgcgataccctttcgccctggcgttttgcttaagagaccctaggttcctttgaaatagaacccgccatccac

SEQ ID NO: 11561 - DNA, 299 bp, Zea Mays
aaaaaattgagattgaagaccttcggaagcaactagccgaagctaaagagaagtgcgcagtcgcagaagctaaacgaggaattagcgaacagtggacaaatcatctaaagaaaaacgttgaagaacttcgcatatccaaggaaagatgctttgaaaaatctatggactgtgtgaaaaatataaaaactagcttcgccaacgttggcgcatattcaagcatggacaacttcataagaggcgatcctgagggcccaattgagtggatcagcagcgaagccgaagcttttgaggaaattttg

SEQ ID NO: 11562 - DNA, 574 bp, Zea Mays
gggatttagtggatgtttgagcaaggtctttgtaacaaagttgtagctggtacattcgacaataactttgatacaggcaggtgagtgagttgccacacaaaaattggagaacaaagcgcttcaattcgctctatcagaacaactaatgaagaacacgatggtacaatatctgcaaaagatcacagatgcagtgaacgttgccgccggtgaactccgcgccgcgatccttgccagcgttgcgattcgtgcgatctggcatgcggataacggtcgacggtgaaaagatcttgcgtgaggatgaccttggggtactgttttgccctgtcgccatacccacttgcaccggcgacgtggctgcacgaccgtcaccgtcgtgccaccgtctagctcgattgtgacacgccttatgtcatctcaccacttgtcgcaagccgtgaagactcggtagtgaccaccgtagaccgtaaactagtgggcgccacgttagcaactccggtgactcttccccctttctcaccgcgagcacttccccatccaaattcgccctcctcgaggtcgtcctatataaattgat

SEQ ID NO: 11563 - DNA, 586 bp, Zea Mays
gtctttagagcggatggcacttgttggacaatttcttcagtttatggcccacagacagagcaagacaaaataaacttcctcgctgagctctcctcgcttaaaactacagtaaaaccggcttggttgttacttggtgattttaatctaatttgctcggcgcaagacaaaaacaacaatagaattagcatgaacatgatccagcggttcaatagaactttagacgacctgcaagttatggagatcgctctcaacggcaaacgattcacttggagcaatgggcaagattcacctacgttgtccagaatagatcatttctttgctacaacagagtggcttgatctcttcccaaattcagaccgtcaagtgatagcgtccatgggctcagaccattctccattattcctacagggtaatgttaattataacttttataaaggttttcgctttgaagcattctgatctacccttcccggtttcttagagatggtgcaagcatcttggagccagtcagtagatacgagagacgcaatcctaaggctacatattaagatgcgacgtttggccacatcaataaaaatttggaaag

SEQ ID NO: 11564 - DNA, 725 bp, Zea Mays
acacgattgtagggtgcttcccgcgtacatgttgatcatacttttcctgcttatctcctaattaatagcaaacaaccttcactatcccgaggaaaacccagcgcctccgctccaagctatctccagcatttgaggacgtcgggcgcgggaaaaacgaacgacctcaacatggtcatgcccaaaccgtgaatagctcgggctcgggcccatcgcgctcctgggtcggccagcttccatcgttaccatttgccaggcccacgacgggatgtcagagaggggcgactgccatgtggccccgggtgaagttttcgcgcccgagtggacccagggatatccatcccccacaccggtcacctagcttgtggctcactaggagcttgctcaacccaccctctgcgtggggatttcaaatgagtttaattttttcctggttggcatctagtaattaccgcaatggcatggtgagcgagatggtcataattattttgctcggcgtggacggcctgatgggacgtggaatgacccgcttgtcgtgctattcctaggtagcgtgctggcctggctaacaatcttgcttgttactggtgaacctttaccgcgcatcttttcagcgccctaccctaggcggcagggtcttgccaaaaaccacaagtttctctttgtccaaggtgacccttggcctaaaggggatcctagatccttcacgctatttttgtgagggtccc

SEQ ID NO: 11565 - DNA, 1225 bp, Zea Mays
atctctgcaaactttgatgtttatttctatctttggagaaacgggagcccaaattggagaaaagaatatgctctttggtgcagagaggaagatgagaagtggatagttgttaaacgcagaagttgtcgttctttaaaattagtctcttttgctaagaatttggtgcaagactcaccaagcaagaaacatggtccatctagtcgaatcagcaatggatttctcaggtcggccataaagacgaagatgaagctctttctccagggtactcctaatgatcagtgtcagctggatttcgtgcaaatagggaattttaaatgtccattgtcaatctaaaattcaaatatgagatctcgttttagctcgactttgaacaacgaccctcaggagacttctttggttcctgtttcagccatcttttctcggatttctcatgatctcgacagggcggtgtctcatggggcttcgtgcaaaacccgcctcttgtcggatgggcatttacgcacatcacaagcgcactcagcgcatgttgggccccaccatccttcagggtaaacttagctatcggtgtctctcgaacacccatttcatcaggacttgttctagctcggtcaggtgtcgccagtgttttctgctcggtcactttgaaaaatattgcaacagtaggcatgctcaacctatagcacgtctgctctagaggcctaaggcgcactgcattaaaggattggtggtaggttgcaatgatgctcatgtcgcattggaagttgctcccggagccttagctaaggcacctttgccttcggtcaccgggcctactcaatcttctgttaaaggtgccttttcgcattctgacgaggtcaactattcggctcccatccctgaaagcgtttcgcccagccttccactggctatagttactaggtcgtttgctatacccggttgcaggcgccttttcgattctaacgctggctactcctctcttaatgttgttgagaaaactctttcgtcttcattctctcgctctcaacaatgttgcggtttctccctgctgccctcacctctcttgctaatggccaacttcccggcggaccctcgtcctttcctccaaccggagttcatcaccgtggatggggacgccaaccggcacactcgcgcccgtcttcattctctcgctctcaacaatgttgcggtttctccttgctgccctcacctctcttgctaatggcca

SEQ ID NO: 11566 - DNA, 623 bp, Zea Mays
tagtggtgcttaggttcattcaaacacattatccttcaattcacaagtcctctcgtagctttccactctccgtttcaatatgaactccacgtggagtcccaattttgatacattcatcgacttgctcaacaagcaatctctgcaatgtcccaacacccttgtcggtacagagcaagtcttctttgacggtctttctctcacccatcatcgacaagaggacatttctactcgtcctcgttccctaactctacaacctctctttccctatagctttccactctccgtttcaatatgaactccaggtggagtcccaattttgatacattcatggacttgctcaacaagcaatctccgcaatgtcccaacacccttgtcggtacagagcaagtcttctttgacggtctttctctcatccatcatcgacgagaggacatttctactcgtcctcgttccctaactctacaacctctctttccctatatgtatcgtccacctccgtatccataccgaccaaatgatgatgctcctcctcccactactaagcttctaacaatcgacactcctaccactgaagccccttccaccgacactcatcctcctcatccttttgcttatatgtatcc

SEQ ID NO: 11567 - DNA, 514 bp, Zea Mays
atcattttgaataagtaacttggctaatgattcatgaagtgttttgttgctatttaacatgagaatgcttaaaatccatagatataactgaattattgttgatatttaatccttatctggtgcacactagacacgccgatgatataccaattctaaacaagaatgacccatgtcaggtggcacatatcctatgcacactagacatatctggtgcctctattgcactatcaactcccttgtttcaaacactttttgagttgggttttatctcaaacttctcatgggttttcatggacaattattgcactgtcgtctcgctctaacatcgtcattagtcactcttcatgtgtgaattcaacatctccatgacatgtcatttgtactttcctccttggcctcttgaattattaaaaaatcaacccttccatttgaattcctcaattctgcaaatttctttattcataatcctcttatatttcattctttttcaacatttcttctacctcaaacacca

SEQ ID NO: 11568 - DNA, 696 bp, Zea Mays
cgtgggacgactttaccagtttgttcagcgtttacgactgcataagaacatgaaacgtaacatcataaaccatgcaatatcgagacgtcagaccatatatgctattgtatatacgtgaccggtgtatgcgtaaatccgtgttggtttgatattaggaaagtagtgttgtacaatcgcgataaatgtgggacagttaccgctttattctcaacgttacggtttgaggagcattaaaataaggaaccaaatattcttttgagacttcggcgtaactttgtagtagcctttcttgtacgatagtagaaggaccatattcttgtgctcttgacggtggttagtggcggcaggaggacatacagaggacatagatcaaccaggtacatctactgccatggacatcgtagttgtacctgatgctgtgaccggagacgcagacggtgtagctgttactccaccggcggcgttgagggcacctgaaaatattgatgacaacacaagatcgacggagatggtaggagcatatcaacgcatccccatgagacatattgggtgcatgatcaggacacaccacacattctgcaaagccatgtaagttctgataaaatcataatatcagttacgtacatacttttgtagtgttgtagcagtaccacaataaatttggggcgtcattgatttataaatgttaaatttctg

SEQ ID NO: 11569 - DNA, 872 bp, Zea Mays
ttgagagcaagatcaggttcagcgtatctcaccgccggtgatctctacgccacgatcctcgccgacgtcgcgattcatgcgccttggcgtgtggataacggtcgacggtgaaaagatcgtgcgcctggatgaacttggggcactgttggccctgtcgtcgtaaccacttgcatcggcaacgtggccgcgtgaccgtcgccgctgtgtcgccgtttcttgcggttacgccacgctctcggtcatttcaccacgatgtcgcaagtcgtgaaggttagccagtgatagtcataggttcgtgtcctgtaaatgccacaataacgctcgccggtgactcacccctccctccggccgccagctttcttctccaaaattcggagccaccgctctcggaggctataaattcagtgcaccgttagctccgctaggttgttacgaagctagagcactagccctcgcctccgattagccaccgtagcgccccaattccgttcttcccccaaatcggccaaaatcgccgccgttagcatcacgccgtggccagccatccacaggttgattcataattctctgctccatgttctagcttcctttgagtcttgtgttgcttgtaggcccgattgattgaactagaccatgctgaatcatcgaaaacacctcggttttctctcgggtgtcgccatcgtcgtgggcaaaagaacttgggccggactagttcaattgaaggatggattaggatcgccagggttggaattaggtgtagaccgacttaaggcatcaatggttaggtattgcggccggtgcaagctcgccggagcgcgcaggccgctgttcaccgtgggggacttgatcttgtgacgaaatagaaatcgagg

SEQ ID NO: 11570 - DNA, 497 bp, Zea Mays
gaaggtgatcgggtgctctgaccatcggtacggagcgggaggaccagtggtcgccaccagtatttggtgatcgttgagcttttgttgtcttttgttctcctgtgatccgtgtccgccgaagatgacgttgacctctctgtcgacgcgcggtaaggctccacctcctccctcctcctgttgctggggttgccgtggttcttctggtcctccccgcggaggaggaggaggtagaggttggaagggtcggccgtgcccgatggagtgcttgaagtctctgcagttccaaagggtgtggcgcatgtctttgtggtacgggcactgagcgtcgaggatgtcgtccagcgtgcgttcgcctcctcgaggtcctccccgggcgcgagaggcgggtggtccggcggcgtgaacttcttcgcgaggcctcttctcccagcatttgtcgggctgctggttcgtatcgcgtcgtggtgctgctggtgcaggcttcgctcctccgatga

SEQ ID NO: 11571 - DNA, 518 bp, Zea Mays
ccgagtcgatccctgcgatgaggcgcggtagcgttcgaattctaagtatggggagcatcgtcacaccaaaaggaagctagaacatatcgtaattgggctaaaactaccttaggcgacgctggccacagaagagctctcctcggcagcgagtttggctgatttggggcaaaaccaaaatttgcagtgtacagtggctaattggaggcgagagttggtgttcgggttttgtaataagctaacagagctagctgtgcactcaatttatagcatctgcaagcggtggctccgaatttggaaaagggaagcttgcggccggagaggtgggtgagtcaccgaagcgaaactactgtggcgttcaccatggcaatgaatcaggcgatagacgaggtatctacagcggtctactgcgatgtgttatcgctcccaaatacatggcgtccaggcggcaagcgtcgaactccggcgatggtcatctcgactggtcgcagggaaagtgggtacgacggctagctcacggc

SEQ ID NO: 11572 - DNA, 631 bp, Zea Mays
ggtgaatgtgcataaacagtactgaagatatgcatatatattacatacaaaaaacatatatgtgttccttgggttgtataagagtactctctgctaactcatcagtaaatacctaatccacagtctttgtctaaatctatgaatgtcgggcgatagtgggaatatagaataaatacacatgccctaatatcggggctcctaaacaaaaaagagatgcaatgcgcgatgcaatgacccgattatagtgatgtctaagaggatacaaatcacacatttagctggagaataagggttacaatcaaatccacttcaatcgaccgataggcttcaaaaaatcgacggcaaactcggtgtatttcaatgttggattacctggaacttcttgaatcgcgctccaatgctaggagattgaaggatgtaaggtggaatggaagggcgctggattggagcggcggtggattggcgttgcgctggcgcggaaatcgcctggggagtcgcctgacgaaaggaaaatctgcgcggctggggttttcttcaaatcggcgctggtttgtctccgttgaatgcgcgactacggttttagaaacaggaaacgtgggagaggtggctggctgacggaggtaacggtgtc

SEQ ID NO: 11573 - DNA, 297 bp, Zea Mays
tgagaaatgaggggggaggcttgcttgcaagtcaacaaccgaggcttcgttcccctggcagtttgtttaatcgacgctcccgtgagaagccccgccaattgagcagaagggctggagaaaacacagacgacctcgaccggttcagagaggcggcagcacagcacggcgcgctactacgtaccgccaaacgagggtttccgtgccagccacggatccaccggcggacacaaacaaataccacgcacgagcctggatcttggattgcacaagatcagccatttattaataaaaattggc

SEQ ID NO: 11574 - DNA, 379 bp, Zea Mays
cactcattagcttggatccggggccacatatacatcgacaccatgtgacggtgagccgctactcaccaatgttaaccacctccatgatgtcactatcatcgaggacccctatggtgagttcattgagatctcctacatcatttctaccactccttgttgatcattgaccaccaaagaatgaatcgagtgaaggactgatgagctgtcgccattatagctcctagcgtagtggtgtggggaaggagaaacccctgcgctatctaatagccatcatgtcatcagggctgaggtggagagagacactagaaatagccatcatgtcgggtgtaggagcgtcggtgtcctggagttctccttctccttcacctcctacttgaag

SEQ ID NO: 11575 - DNA, 845 bp, Zea Mays
gcacgatgaggattctatgacctagattagatctagccttatgcgaatcggtacgaagttatggccgtcggattggagatccatggctcccattaaaatactcgatcatcccatcaggtccatccgtagttaatccaacggcacagatttgatcaccaaagggtatgcacgctatctaatctggatcatttgttccggaatcaacgaccaccacctcatctcctccctcccgctagtgactagtggtggcgcccaattctaccgtggcgccctccccgacgatcccaatctgcatgctctggtgatcattccccaattcgacatagccacacagagcggaggagacgaggaatacgagggtaagcttattaccatggatcgtgcagtgtgttgacccggccccgcagcatgtgccccctgtaaacccgcaacccaacgtcgtcgagggattctggctaccgcactcacctggtgaaaccttgagcacacgtagagcctcctagacagtccctcatgagccgcctgaaggtagcatggacctagccccagatcgacgatggctgcgctccaacttttctgttcgctcaacgaggtgctctgatctcccttccttctagcgtcgatggggggtcaggtgcacaatttggtccaggaggagctcggggctcaaccgcgaggatttgggatgaagatcttgtccctgaaacgcggttgaggttgttgcacggtcgcggacccagctattccatcggacttgagctagcagagacccctgaagaactggcctgcacgacagccacaccgggaaaaaggaaaagagagagaggagtgaatgggtcggtgca

SEQ ID NO: 11576 - DNA, 591 bp, Zea Mays
tagatgcgtaactaccctacggacccatcggggtgctcaatttatagcgtgcttgggcagtggtgtccaatttggacgaattgtgctggcggtcgagaggggagctaagtcactggcacggtgattcgtggccttcaccgtggcaaacccaccggcgacgagccaaggccgaggagcggtttatgatgactcaccgcgacgtggtaaagtgttgaggcacatagcccgactggataacagcgaacgccggtgatgccaacgcgattgaccacggcgggacacgacggcggtgagaacagtggccggagtttatctccagcgcgatatttctttccgaggagcgcttatctgagttcggtcgggcgtgaatcgcgacgccggcgtggatctgagcgcaagatcaccaacggtgaggggggtgaatctggtgatctgtttcagttactgtaccatcagatccctcttcagtcagtctgacagtcatgtgtagggcaaatttcctcccaattttccatggcaactagaccaatgctctgcagcaaagttgtagcctaatagaccagctccaactttgctacattgtgcacccac

SEQ ID NO: 11577 - DNA, 1133 bp, Zea Mays
gtgatgtagatgttcgctttccagaagagctgctccgaggtggtcggagctttctagaggatagcttggacgaaggttgagttgatggatctgcggtagaagttctcgataacagctagctcggcgatgtcgagaatgcgattcctcatggtctagaaacgctcaaggaacaagcggagggagtcatcactttggtgcttgatggatttgaggtcccaaggttgtgtcggtttgtcagaaagggattggaaattcacgacaaaccggtggcagaagtcagcccaatcattgatgtagtggcagggaaggtgttggagccactgcagtgcatcctgcccaagcgtgatcggtaggtacgctgtcatgatgccctccattgccccggtggcctaggcggccatagtgtagacggccaaccagtcgtccgggtcttgcttgggctcgtacttgtcgacgttcgagaccttgaagttgggaagccattggatcgcctagatccgggggtagagggcttagactccatacatcccccgggcctcccggcagtcttccggggcacggtcgttaaggtggtccctaggcggtgactggtgtcgtgggtcacgtagcctctctcaaaccgatcggtctggtgtcaggctatttgtcgaggccgctgcggattctgtcctcgttgtgcggttgcatgttggtgcaccatgatcccgatcatattcttcccacagccttatctcgctttcgtgttgacgatcgtgggaagcattgatgttgcaccgcatgtctcgtcgactgttgatgacgtcgcacatgttcagacccggatgagcgaggggaagaagatggtttgccgcctgggtaaggatttattggtagccctccgcatctagagtgcgaggtaggccattggcgatctaggccagaacttcgctgacttcacttgacgtgtgctcggctcaagcaaagtcgggtagcaggctccggggaaggagtggattgttgcgttggtgcctggcatcgtgttctgctcctttttaggcacgacggcgatcacatcgtcatgagtttcggtcttcatggagcgccctgtcgtcaggagtttctcctgcttcggatgccccatctcgagatacggg

SEQ ID NO: 11578 - DNA, 624 bp, Zea Mays
gttcgtagcatttgtcggatttcatgaatactctgttacgtagttgctggtgaggtgggtgtggaacacattgaggaagaactttttaaaatcttgaagaaaagggtcatgtctgcgaccagagcaagtacttattgctaatctgggtgatgtttcaaaagatggtcccttggagctggagcaaggaatcgtggaggtgtaacgaaatcggagccgcattggtgcagtagctagctcaccggcagatcaaaagtcagcagtccatcgatgatccatgcatataatgggcagtttactactactattgtggcgtcgtgtaccagtgaggctgtggcgaaaatcctgcggaaacggaataaagggtgggcacgtgatcgacggcccatcgcctttccttgtcgcgtaccactcgaataaaatcaatcaatcctgtactcaaatcgccaaccgtgcgtagtataccattcaaaaaatatatccctcctgccttcccccaaccaaccctgactcgctgagcgcgtggctgcgaatgccaccaaaaatatgctctgccctcggtctccctcgcggtcgcgaagtacagccagtgaggcagtgaccatctcgcgccaacgctccctgtcg

SEQ ID NO: 11579 - DNA, 584 bp, Zea Mays
taaaatttagtttcccatatggtttagggaccaaaggttttgtcccaagttctttaaagttagtagatgattgggaaaacatggacatagtatgccgagccatattattaggtcagatgaggtacggttatagcaagtatggtcgtgggaaggaagagtataataaggaaagacttcatcctgaactgtggatcttgattcctcttggagttggatttgactcatctccttccttgtcggggttgagctgttcttttcagaccttggtgtcttcattcttggggttgccaccagagttagggacctatggttaagatagatttgtgggtgacaagtaggtagagcagctagtttagtgggtggcttagaagttaaatgagattggtcaaaatttggtttggttgtttgcctctagattggttggataggtcatgtaacctattatgtaggtcaagttggtctatcgttcttaatttagtgcagagtgaactaagttaaaacatgttctataggagtagggtctcatttatttcatcagtattaactaatttggtaattatcttatttagattagatcaggtccc

SEQ ID NO: 11580 - DNA, 594 bp, Zea Mays
cgcccacacccgctcgtagaaccggctagtcagccactcgcccactcccacgcacacacacctttctctcttcgatgtgcagagcccatgtgtcatccccgacctctcgcccatgttcactgttaaacggcacctccactgtcgatctcgcctctgcgaggccataacgccgcccctacactcgtcactcaacaacgaataaagtgggcattcactctagcctttcctccctggatgcccacaccattaccctaagtgagtctgtcgacattcaatcggtgaacgaccaatctgctcatgccgatgtcctctcccctccaaccaatggtgtgcccctatacaacccaaccccagcacgctctgctcaccccatgtcgagctctcagccaccagatccctctcccctcgccactcgtgtcctcaccaccattcaggagcttcaaaggatgttccacccacaccggagcatccacgacctccccaccggctcgctagagctcgaggagtccacgataaccctccatcggagctctaccaccgtataagacccataccatggcaactcgaacttgtcgtaccctcgccatcgtcgac

SEQ ID NO: 11581 - DNA, 569 bp, Zea Mays
gatgagtagtggtgtttaaggtctctgcccaataggtggcaagaagagacacttgaaaaagaagacaacgaatcatgttagtggtgcaaataatgtgtttggcctgactattgtcagggtaactatagggacacaagagttgcaacttaatgtcatgggagagaaagaaggtatgagaggcagagttgttgaattcgttaccattgtcacactggtcactgaagggcatggaccgagcaacagaatagggtggagacataggtgaagaagtgagcgagcgccacgtgtaaagggcacacgcgacgcacgcaaacgacgtgtgacaacgcgtgcgaacagtacgcgcgacacacgcaaacgacgtgtgacaacacacgaataacgcatgaaccagacgcatgaacaacatgacgatgacgagagccacacgtgcgaacggcgcgcgacccacgcgaataacgcgtgacgacacgcgacactgtgcgaaacagcaagcggacggcacgcgaaacaacgtgcacgacagcgcgtgacacgcgcgaatcaacgcgacgactatgcgcgcgaac

SEQ ID NO: 11582 - DNA, 1178 bp, Zea Mays
aaatattgtttggcccatccattgtgataatggtctggttgcaagaccagctggaaatgcacaagttccactggtacagtagagcccctactccatcagagttctggataccacttgctgcttggttcactgttggcctagtcggtctttggacattttttcatttcttttcagtgtggcggcgaaagatcagtttaagctggatgaaaataattgccagatcgaagaggaagaattttgaaagaaaccatgaggttcctactgctgaacatgtttggaacacagaatcattgattcgtgcaaaaggaatgatgtgctgtgtatgcttggaatctatctcacctgctcagccccttgggcagatgatgacatcagaaaatatggttcaccgctgcaatgtttgcggtgcagctgcgcacataatatgctcttcaaattctcagaaagactgcaaatgcatctcaatgtttgggttcaaacatgtggtccatcaatggactgtactctggacagacatagctgaccaatccgaagaaggccagtactgtagttactgtgaggagttatgcagtgagtcttttctgggaggtcctcccatatactgctgcatgtggtgccaacgattggtgcatgctgattgccagtctgccatggctactgaaaccggtgaaatttgcgaccttggtcccttcaagcgccttattctgtcgccactttttgtccgggccattagcaaacctggtagcatcttgagttctataactcatggagcaaatgagtttgcaaccactgtgcgggggcgtttaaaccgaactaaaaaggagaagcatcagaacagattttcatctgacagcaacgatgattcatcaagtgataccacgttgaactcaaaccagagggctggagaattaaaaacaattggcgacagtgctcaaaggagtcctgagaatgagcatgatagcagtgagagtgatggtagagaactcatatcggagtccagaaggctcggtaatgatgagaccggtgaagttaaacttaagtacgcattgtctgaattgcctgctgattccagaccccttctaatttttatcaacaagaaaagtggggctcagcgcggagatcttctcaagcacaagctacattttcttttgaatccggtgcaggtcatgatacttctc

SEQ ID NO: 11583 - DNA, 558 bp, Zea Mays
ccgacttcatcacgggcgacagaaacgatctccgcgcaattgcagccggactctgcgcacgccatcaccagtacttgggccccacggccgagatctcctcccagttccggatcgaagcgagcttcaacaaacgccaccgtattccgtggtgatccatcggggattgcttcgattgaaacctccctggatcggctacacccgttactatataagttgaacccgcggtcaccccccttcccctcaaacaagctgtcgcaagccgcaccacgagtcagaatcgaggagtttccacatcggtgtttttctgttgggtttggaggagagagaagctgccgctcagacatttcactggtgtcgcggtctcgagcttggcatgagggcggataggtcacttggacctcctgcaacgggtcaggccatcccgtgtggagtcatcggccagggcatgacggaatcgctcgtcgggcgtacccaccaccgtgtggccgccggtaccaatcaccatgcatggatgccgcgcctcgacgaaattggacatcccggtggaaaaatccatgg

SEQ ID NO: 11584 - DNA, 2492 bp, Zea Mays
aaccccgaaaggaggagggaaaagggtgagagaaaaccacgcagtcgcttgtccagacaaaacaagaacaagaacccaccagtacgcacttcctcctcctcctcctcctctctgcctctctctcctccctccctccgccagtccgctcccccctggcccatcagatccaattccttcccccgacccccgtcccggatccgccgcaattccttcctgcgtcgagctcgactgctccctctccctgcccgcaagaatcccgccgtggccggcggcttagtgggactcccaagtcgaagccaaggctggtggggggcgcgctcctgccgggcgtagcgggccatgggcgcgctgttgccgttcgtgcgtcgggtaaccagggccgtcaggctcagtccgctgcagcgcagcgccgaggatcggtgaggtgagattttttacttactccggtggcggtggttcccttctggcttctgctagcgttcttactagcagctcggtagttgtgaaaaaagacacagcttttctgcctttttcctcctcctcctcctcttcttctttgagccgtccaaggtcccgttttttttcctttttcttttctgctgtaattacttcatgtgtcaaatttgggttcgattgacggcacgaagctgatgattgcatctagccttcgcagcctttcggtttccgcgtttggtcggcttcttgggatttattattattattattatcaagtgcgttgaaccgtcgggtgctgacttgtcttctcccctccagttccttcctgtctcgcgagttgacatccgaacggcttcacaggaatatatttgagccttctgtcctgtttcttttgatcttctgtatgtttgcttcattatggaaaggggtcgtgtgtttccatgttgcgttttgtgtgtggtacgtacaacgcattgggccgtcttggttcctagatcttttaccttactcacttcagtgtctcaatcatttaacgggcaggtaatttctcgtgaacgcattccgctattgactgctcgccctgtcgagcagattgagctatccaatatccatttagctcgacacagtgaagaactgaagatacacattgggcttgcttgtgttccgtctctctcaaacatcctgttggtgtgctgtgaaggtctgaaggtcacataatccacttggctatatgccggggtgggtaatgtgagtcgggcttgataaatgcagacttgttaacttggtaattagtcaaatgaaactcaaattctttaatgacttcttttggccatttttagcctcagcttcatataatgtagctggacatttgtgcttccttccaaaagttccatatttctttgtttatttaaatcaacgtttttagatgggaatatatagctgaacatcttcaaactgtttacataatatatctgcattgttgttgtgctgatgccagtagaattaacacttaacaagtagtatctgttcattactgagttcatgttttagtgccctttgtaattggcaattgaattgcaattggagttaggcatgtgtaactgaaatgtgcaaactgccacaataaagttgtgacatccagctgacggaaagtttgtcttttcgtgcatatactctcagtaatcatcactaaatttatcaggacttaggagttggtgttctcttgtaagctgccaatttatttgtttcttatgtcaacctatgaataatgcacacttgtcttcttccacaattaggccattattgcagaatcttttctgtgatctattgtatttattattccattgagggtttgattcactggtctcttgcacagttttgcaacaagaatgggggcaaaagtagaacgggaaagttatatgcctggatattatgccacgggggatctcaatttggaaccaaatggtagatggtctccatactatgaggagatgacatcaaatgatcagttatgcaatggcttcacaacaaaaccaacaaatgactattcagaatttgacaaagaaatactcaagcatcaaatacttgaacatgaagctgtgtttagacaacaggtgagtttacccaaattctaaacaacacagcatatcatatcataattaatttttcttatcatctgttttttttccctgtcaagcctcacaacccactcgctatccaggtgtatgaactgcaccgagtttacaaaatacagaaggatatgatgaaacaacatcaaagcaaagaggtatattcatacccaactttggcagttgcatcacatacaaattcaccatcacaagtgccacaaaacggtgcaaagatgatgtggcagatgccagttcctccaatgtccacaacatacaggaaagctattggagagcataatgatacaaaccagtcctccatgaagttccttagagaaggcagtgtgcagtcctcaccaaatggatttatatcaagtgatgttggtccaagaagcagacaaggcacttttg

SEQ ID NO: 11585 - DNA, 482 bp, Zea Mays
cggatgtcctgcacccgcaaggcagcctcaccctccaccaccgtggagtaaagaattcccgacttccttgaccgacgatccagaagcaattgcgacatcaaggataacgtgaactttggagaacttcccaaaaatatcacctccctacccgacggcgcctgcaataacactatcttccaaaaataggatataactgcgatactgagataaccaatccatacccaagataacatcgaatgcccccaaggaaatcacaacaagattggccgaaaatacctcatcagcaagaatggcggaacacccctgacaaattgaacagctactaatggagccattagcagaactaaccaaaattgggtgacccaacctctgcaccgaaagaccagcccacgacacaaaaatctccgaaataaacgaatagctagcgccagagtcaaaaagagcatgggccacaaacgaatcaactgagatcgtacctgtca

SEQ ID NO: 11586 - DNA, 412 bp, Zea Mays
catatagcctacaggatatggccacttatagatagctgggaaatgccgaaagaaaccatcactaaccctagcgaaggcggcctggttcgattgaaatacacctttaggtacggagataaatttgatgaaccgaatgatgactgactgaaaagtatcgaagctataagtgatgaactgcttggggcgtattccaaagcagaagataatgcattatctgcatcctttggtggccggggaaaaaagagattgaatagagttttcgatgccattggttttgtttaccccgactactgctacccactgcggggatggggaaagaagaggaagactgctgcttcggccactccagatgagcctgcgtcgaagagcaagaagttgaaggttctcacccattggccatgctatattgagc

SEQ ID NO: 11587 - DNA, 524 bp, Zea Mays
gaagaaaaaccaccaagagagctcgtcgccgagggttaggagagagaaagaatgagggatctccatcgtcgtgtggatagatcatggtcgtcgttgttcgggccccggagagtgatcgagggggtccacgggggcaccttgcacgtagtcgttgccttcttggacggtgagatccaccagagcgcctccaattgctcaccgaagcaacccagctgcggtcgagacgcatctcttcatcagcatgtacttcaacgcgtgcgattcatggtaaggatccttccacctagtttgccatgttcttcttaacatatagcatacttcggattgttgtttcatgcaacgaattcggaaggggctttgcgccgacaacatcgccggagcataggcggcaccgccgaccgggggtgccagaggaagggagcgtccaggaaccaggaccgttgatcgtagatggacgactacgattagcgtagcgtaccggtcattcaatggcactggtcactcggatcaagatctgacggtca

SEQ ID NO: 11588 - DNA, 386 bp, Zea Mays
cgcggggctgtgatggtcctaggcaccatcattttggctataccgacctctggcatctgtagactggggctcgacgcggcccgtcgtgtagtgtcctgctagaggtccgcacaattaggcctaggctgatagtccatgagtacgccataggccgatggatgtgcgggtcattaatgcgtcgtagtctgggagactcgtagatcatgaatgctacgcgacccgagggccattaatgcgatgtggctcagtgccaagcgtggttaaatgcgaccagctatttatggtgggtcagtctagagtcggacgcaggatccactcgagtggttcccttctgacacccccttcccccgtaaggtagggtcccacggaccgggcatcatttcgcg

SEQ ID NO: 11589 - DNA, 583 bp, Zea Mays
agatgatagaagttgtgaaagtcttggctggctagattagacttgaggttagtccttaaccctctaaggaaacgtaccatcttcttgactttcatactcacatcttccggtgcatagcgggcgagctcggtgaacttgtgaatgtattcactgatagatcgccctccttgagtcaggtcacagaactcctcttccttgagctagacgatccctatgggcacatgatgctcgtggaaagcaacttcaaactctgcccatatggcatttcccacagccgcgtcgaaggtgacccaccaggatagggccatcctagagaattggtgagcacccagctgaacacgctgatcttcgagacatccggtagcttctagcttccttttggctatgcatagccaatcatcagcattgagcgggttgcttgatccagcaaacgtgggaggcttgagccttagaaactctcccaacctgtcctggggtcttcctccatttggacgctaattctctaggtttctagtgaggacttcaatgagtcgggtctggttggctagaacttgggctagatctagtcgcatttctggaggtg

SEQ ID NO: 11590 - DNA, 916 bp, Zea Mays
cttcagtagaccgttcgccacacgacacttgaagctcgctgcttatgaacgtgagctcatcggtctggtgcaggcagtacgtcattggaggtcgtacttatggggccgtcgttttctggttcgaacagaccatttcgccctcaagttcatgctggaccaacacctctcaactgttccgcaacaccactggattagtaaactgttcgggtttgatttttccgttgaatatcgacccagacgttttaacacagtggcggatgctctctcccgcagggacgctgaagcaatggagtccctagccatatctgtaccatcgttccagctatatgatgaaatacgcagtgatggcagcagcagaccggaatggaaacaactacatgaacaaatcctcaatggcacccaatcggcgccatgacacatccaagagggcctaatactacatgggtccagggtatttgtaccacctacatcacccacaataattcatattctacagctagcacatggcgcgagacatgggggttccaaaagacattacacaggcttcgcgcagacttctacattccaaatgacagaactctggttcgtgactttgtcaaatcatgtacagtctgcgagaaaaacaaaactgaggccttatacccatcagggttgctgcaacccttagaagttccctcacaagtttgggcagacatagcgatggacttcgtggaaggcctcccaaaggtgcacggcaaatcagtcatactaactgtggtggatcggttctccaaatatgcccatttcattgccctgggacatccttatactgcagcctcagtggcacgagccttctttgacaacatagtccgtcttcatggatttccactttccattgccagcgatcgtgatccagtctttacaggcagcttctggc

SEQ ID NO: 11591 - DNA, 683 bp, Zea Mays
ccgcggtggcgtacaccatcgacgaggtcccgagacccccctcaaccatcgatggcccagcgaacgccatgaatggcgctctgctctccgacgttcgactgccaaaacacacggccgcatgacccacagtagagattttcccccatacagttctccctatttggcttctctacgtacatcacttgctctgcatgatcgggtgttgggggcgtcggaatttcgccttctggcgatggagccgccgttgggttcctgagcgccgctgtgtggttcgtcggggagagagaaaatgagagtgaaggttgccgtgaccgttggatcgattgcggatggccaggattagatcgtcaccctatagtaggtctgaacgccgtggatcgttgattcgtgaatctagggctcggattagattagggatacccttcggtgggatcatctcggatcgtccgatcgggatcgcgtggcacagactcgatctcgactgttttaaatcggatccgttgtttcctgatcgtgtggctcctgttgattgatacccattcgttgtagtgtattaatatatgaacccttgggcttttgggaaataaacccgcagtactactcggggttgttgtgtctagggaatctttcgagttagccctcggcctttcatatattcatgcgcgcaatccaggaaatgggaa

SEQ ID NO: 11592 - DNA, 449 bp, Zea Mays
gacgggtagaatctctagggttcggccgccgcggtggagaagaacaagcagacggcggcgataatgctagggttcggctgccgcgtgcgttacgggtgaggtgagctgaataactgcgtgctcgtgggtggattcatgggcccgatacacgtactctgctgggcgaaatctacgcgaaggcccatggaccgacacgtggattactgtttcgtaaacggaaacataagacatcgtaataccaatatttgtgtggggactagtacgactgcccagattgcgggaacacaatcttctcgtgggcccggatgcccgaaacatgcgcatacagaagtgtataaactgatacacaaattagcataacacgtaataatatttgacgtaagcaggtaggtacagtaagccaaaaagtgtacggtgcggtctgcgcacctggtcggtgggtggtcggg

SEQ ID NO: 11593 - DNA, 677 bp, Zea Mays
gttggtgtgagacaatttcgggtactatggtggtggcgtagtaaaataggatcatgacgctgcttggcgtgggcggcttgaaaggacgtgaaacgtcctatcctctgtatcatgtgtgggtggcgtgacggggtggataaccatctcgcccgttgctggcacatcccgtgcggcatgccctcctggcactctgcctgcagtagtgtgaaacctgtaggacgcacagtttccccgctcgaggctcgaggcagctgagagctagagcgacagattctcccatgaagcagtaccgttcacgggtggcccacccgtcagttgcagaacgattgaggtctcgttcgaagaccaaggcggctagaagcggaggcgacatattatgctgcactattcatggagggcttactttctgggcatcggattgtctccctgtgcctgcatataaatagaaaggggaggttccaggggttggttacacttaccgctttctcgcgctccagcctctgcttcctcctttactcagaatcttttctgccgccatgctcttttctcaccctagcaattcgcctctgcactcatggatgccttcccttagcgctcaatctctcagagccatctcaaggcattagagaggctaaagcgacttccggttggcggctggaggagcaaggcgatgttcc

SEQ ID NO: 11594 - DNA, 575 bp, Zea Mays
ttggtcttgtgttttaggcttgatgctttgtgtcctgcatgcatactgcaagtcgctaactgaactagaaattccaggcacgctaaattttcagtgggctttgttgaggcccaaccaatagtaggaactaggaagacacattatgtgaggtgtctgagtgcaatatgcacaggcagcatggaatggataatcattagcaatcacttgtagccttgggttaatcaatccgaaaaggagtacatatttctgatgggctcgtgttggatgcccaaccattagtagggagatgcactatatggtggtgcttgagtgcactaacctgagttatggagacaaccagaaggcaggaaatatgttcaggacagtgtggtatggataatcattagacagtgtacctttggttttaccaaaccaaaaaggactacatgttcacccacctatctaattagctgaagtaccttcagtgttgagtctctgttactctaccaatggttttccccacatcaactccaaaagttcacctaagaaattaaaaaccatcttgacccttccccatccagaataaccacagctcc

SEQ ID NO: 11595 - DNA, 470 bp, Zea Mays
tggccacactctgtaggctatgtgctcttgaattatgtctcatgtgccaatgaaagcacaaacattgctgaaatccttttgacacgcttcgacatcactttcaatcgccacctttggccttcgaaggccgaagcgagacccgatggggcgctggataatttccttaatgtcctccctctcaatcagatcattcttgacataaaaccattcctccatccaggccccaggtcatcttttccgaaatgttggaaccgggtagcttgcattgggacgagcaataaatccataacaactgatgttgttgtgatactgttctttgccagtatccttcgtctcgtacaatagttcgtgcatattgcagaaacactttgcgctcggttccagcccttggtttcttacagcccaaacaaatattcccatcctaattataggctcgggagtaatttgatgaagaaagatctggaatatct

SEQ ID NO: 11596 - DNA, 836 bp, Zea Mays
gtaaacaccacacttcgcactcgcctttcgtcccttcatcatcgatgcgtgcatggaccgaagtagaaattaatgctagctcggtgagaccgggcgcggcaccaccgtagtatcgtctctagccacgacgcggtggctggggcaagcaggggtgagggtcagctggtggcgcttcctgccgtcgtcgggacctgcgcgagttctaggggcgtgatgtcgatgttcagtgcgttggggaagaaggcctttgcgccattgattttgatatgtgcggctgtgatgtaggggctgccctggccattggattcgtggtggagggcttagatgagggcgcggttggcacttgttataccaaatctgggcccttcgactacgatccaatggtctccatagctcactagtttatattagggcgaatttaatcgtggccctcggttgtgatccgacggctggaaatccaccataccccttcgttggaccttttacgtatgagccctcggagaaaatggaattcaacccgcggtccgggcagctaaagctctgtgtctggggatttattgcacctgggcccctggactttcttgtaatggtgcgctcggtccagataattagaaaatcggataaattcattaggaaaatacattttagtgtaaaaataaatgctagaacttgtttaatttatataaaatgcatacttggtccaaattgacccatttcagtctctataattttgtaacaatgttgtttgttatctattgcctctgtttttacatgaaaataataataaaattgatctcttaatcaatcccatatcaaatacataaaaatatttggaa

SEQ ID NO: 11597 - DNA, 709 bp, Zea Mays
accttgtgaggccataaagaagcttgcaataggtgaagtgagacctcaagaaaaggatgatgaggaaggaaccttgtggatgaccaatgaggtttttgatgtgggcgcaaaggtggtgggtgataaatcctcccacccaagcaaacccatcaacctcaagtcatccaagtcttgaagaaggtcatcaaccccaaaggatgccaaccgtggtagaagatgaacatgaaagtgttgatggtgaagtacctcttgatcaagtggatgatgaggaggagtaaattcaaagacaaccatcagtgtcccatcctcgagtccatcataccattcaaagagatcatccggtggacaacatcctgggtagcatcaggagaggggtaacaactcgatccggtttagcaaatttttgtgaattttactcatttgtctcctctcttgagccacttaaggttgaagaagcgctgggtgatccggattggataattgccatgcaagaggagttgaacaacttcacccgaaatgaagtctggtccttggttcaaagacccaagcaaaatgtgattgggacaaaatgggtctttaggaacaaacaagatgaacatggcattgttacaagaaacaaagcacggttggttgcccaaggctacactcaagtggagggacttgattttggtgaaacatatgcgccggtagcaaggttagagtcaattag

SEQ ID NO: 11598 - DNA, 540 bp, Zea Mays
tagcagcagttcaggaggtttttagactgcgcataaaggggcctgctaaagcagcttcctccgtatgccgctacagcatgctcccgccgctgccgcatcttctcctgcgctctgcctcggcctcggcctgtccaccacaaatagcagaacagaatcctagatcactcctccctgtctccatcgccagcacctacttgtggagtgaaatccaacgtcgcaggaagcgttgcccgatgttgtctctccactcaaaaccctaagtcccagccccatggatcatgttcgtagccgcctctctccacaactgctgccacgatgtcgccgcctccggagtcccactcagtatagtgaggcactgccgctgcccacgtcgacaacgatgccatgaccatataccctggagcaaagagatctgcaatacgatgcagttcattgggactgtaggcaccggtgtcaacctgcggcaactgccaacttcccagtcgctcctctgttgtggggagttgctttgccgtatggaagtcgagagtcgatactaca

SEQ ID NO: 11599 - DNA, 519 bp, Zea Mays
cgctgggccggtaggatctcctggcgtcggatcctaacagaaggatctccctaggttatgaagccgtagggatgcctatatatgcgagtgcggcaacctcccccgacatcgtctgctccctagtttccaagtccataggatcgccgtcgctaccaagtgaatcatcgggtcgcctgaagctaacccaagctcacaccatcgacaatccttggagtcgggtttggggagctcgggaggtcggtggtgttcgtgggacgactagatacggcctcggaccgagcagcgtttcgccccgccgtcaccgtcggtgagccattcctcttcttcgtacccttcttctctgctcatagatgcttccggggttgggcgcgtagcaataggagtggaacagactcggtcagggctgctaccgtgatggccacactgccgccgagatgtgagagagaggagtcatgccctggatgaagagccaccgcgccagtgctgggcatggtgatcggagtgaccggtgagggagag

SEQ ID NO: 11600 - DNA, 458 bp, Zea Mays
cgccatcggccctaggctccatcgcacctcgccgttctccaagcatcccggagttcgcactcaaagtgagcacccttcccatgcctttatttagccaagtatcgccccagagcctgcgcaattgctcaccggagttagttgcgccaccgcgggacttttcccacagaggtctgcgttctctggcgcccccgtgccggttctgcgcccactgtcgtgttcgtcgtgtcaccctgaacgtgcatgaccctttccctaagcccctagagcctcgtcgtggccacccccctcgtctccggtgagcccttgccgcgggacgagcggcgccatcgcgctcatgtcggccctcggccgttggatcccgagcgtctgtctgagatctaacggtttaggtttaatcagtgcggatctaatcttagccctccgatccagatccgactgctctcctctcttcctctcac

SEQ ID NO: 11601 - DNA, 274 bp, Zea Mays
cgcccctgtggcaccctctcctccatagtgtcccatgcagggcgccccgccttcgacacttttgcgggtcatcaccattcaccaggtccatgatatcttaaggcgcttgtctacaacttcagtgctacaaatcttctgcctccctggtgctataaagctaccatagtgcgcctgactgctcaccgacccacatttgtgggctgctatgactgatgagtaccgagcgatgatcgacaacgacacgtggcgtcttgtcccttggtctcctgacgcc

SEQ ID NO: 11602 - DNA, 323 bp, Zea Mays
tagctagaaggtcgaaagaaagagaagctgcatggtagtgctggtgcatgcatgagatcaatcggtaatggcgcgggtacgaattggatttggagttggaatcgtcggaagcgaatggtccaaggtctcgatgggattctttgatcgatcttggtacgcgcatgttactcagctcggagggaatcagattctctctgctttgcgctgcttgcctttgggggttgctttgctttgccttcgctttctcgaaggccaagggagccctactaacccacgacgaccctctcctcttcttccctggccctcccctgctcatctctctc

SEQ ID NO: 11603 - DNA, 474 bp, Zea Mays
gttgagttttagactcaaatgcaaaaaggaccccaattgagatttctctaaatctgaatttcagtttagttggttcaactttggagccctgtatcttttaaaatataggaattttgcccaaggtgaccacaacaagtttgtagaccaattaagggagaacaactttgcttaagaatgtgagctcagttattaagaagaatttagagataattaagcctgaagtttggctgtcaggctgattaagtctgaaaatcagactgacagtggtattggatcatctttggcaacagtttatgactaatctagtaagaatttgcccatggatgttgtaacaaagatgaagatggtataatggacaacaactttgctgcagaactttaagtatgttaccatagagaattgtgagcaaattgggcctaaatactggctgtcagacactctgaataggtattctccatggtacagtgcacagat

SEQ ID NO: 11604 - DNA, 1353 bp, Zea Mays
ccggtcagtttcttccctgccgcgcatgtagcatccagtgactgacttgtgggccagcttctgtctggtggacaccgtgtgctgtggctcccttgcgtacacaaccacctgggtcgctgcgtccgtgggaccggatgtcaggcttatcccctccgcgccataccgaactggagccaccgcattatcagctgggttcgttgcgatcccatctctggagattgggtttggttgttgatatcccggataatccggctctgtttcaagatataagtgccctcctaccacaacaccgaagcatcggggatcgcaggaagaaagggctacaccgtgcgtcaaacgacatcgccgccgccaccgtcgagggctcgtcaccggttgtgtgtcgccgcgggtgaatcaccggcgctgggtccctgaaaaccggttggggagcttcgccatgttgctagaaagctgctagtatccccctctggtggtagccggctctggtgacatgccaattgctcgccgatgtgcgaatgcaatcgtgtaatccgcactctgccgtgggcaactcgcttgcgtctgcgtcggggccctggcgcgtggtctggtggtactgggccctcgggacatgcgggtggaagtcgtgccctgctattagagtttggtggtcggcgctctcagatctccccgtcaacacctgtctccaccgcagctccatgttccgtggatctgggccatgtgactcttgattcacaggtatagacctacaaactgtttctgcatagtctctgcctcgcttagctacattttacggttgggttggtctcttggttgttggggaggggcgtgtgatggcaatggcgccaccgccttgtgcctacgccgagggagccggtaccagggaagaagaaacagtcctgaccgttggatcatgatctggcgcgcatacttggatgatgggtcgcggaccgcccattcatcgctggacgtctgagattaaaggagagggtgggcgcacctgggccgttgatcttttaagaaacggtcgcgattagatagagcgataccccttcgatggattggatctgggccatcaatccagatcggacggccttgtgcgctcgcgggttcataatggacgagatccaatcctggccctcggatctgatctgaacggtccgaatcttcccataccccttcacccgagaacacttgcaatagaacccctctgttttatagtaatcaacccgcggtccgcacaactgttttctgtgtcttaggaaaacttaccccgagacccctgagcttaccagaaaatgaggcgcagtccagagagtagtaaaattagagaattaattttggaaattg

SEQ ID NO: 11605 - DNA, 310 bp, Zea Mays
cgacaaaaaaatcccaaaccctattgtagtcgcaccatagcagagccaccagatgcgccagccaccaagtcgtggtcacatcttgtagccccacgtgccatagagacaccagcacctccgttgagacatcgtggctctgcggcgtagctaggtgcttagacttgaccgactaactgtcattatgtgtccgtcatccgaggcttcaatccaccggacgtcaccgtgtgccaggacagacaaccaggggcaaggtcccatcgtgccaatgtccaagcctacctagctagtggccacccgacctagcctcccc

SEQ ID NO: 11606 - DNA, 617 bp, Zea Mays
ccgggatcggatcagaacgccagcgtcagaaagatctcgccgccgacgactccccgccgtgattcgtgtcactggcgtcgggattcgtgtctgcgcggatggatagcagcacggggtaaggggatcctcgccgccggtgacctggaagccactccggctagccgtaatcccttccccttgctcaccgcccgtggataaagcttttcaccgccgtcaagccttcgccattgcccgtcgcgtggctctgcctttacaccacgtcgtcgtgactctctggggccgtcccatcgtcgccggtgaggtcgccacgacgttagccacgggttcatgcacactagaacctccctgcccctttccgaccaccgcgcatcgtcatccaaattcctggccaccgtctaagccgcctataaattgagccctctcctagctccgcagcatcatcacccaccccgtcaccaagaatcgttagcaaccgtgcatccgagagcttgaattttggtttctccccaattcgggtttccgctaccgcgaactaacctcaccgcggccagtcccctttccggtcagctcatcctcctctcttccttgtttgagctttctcataactccacgatgct

SEQ ID NO: 11607 - DNA, 559 bp, Zea Mays
gttttattaattaactggactaggcgtcattttctgggaagtgcaggggcacatctatgaaaactccccagactcagccatccaccaaaacggagtgcgggttactttcactagaacacagggtcttttacgcaatttgcgtcagtgaaagggtatgcgcgtactacagccatccgatcaacatcttacgcccccgattaaaaccgtgcgcgccttacgacacatcgcgaggatagccctcggatgggagatctagggttcagatttggtgtggtctacaactcgtttccatcccacccttggagcccaatccaacggttctgactctagctgagtgaaagagtgtgcgcgccataatctgagccatccatgagccgatctacggccaggagcacccgcaatctcatcttctaatcctaaccgttcatcgcaagatcgatggctctgcgcacttcatcaaccttaccgattctctctctcttttctttcccagctaactcgccgcagccgagcgccaaggacgcggcagcaactgcccgagctcgctacggcgcaaacc

SEQ ID NO: 11608 - DNA, 506 bp, Zea Mays
gtgaggggttcttttacaatttcggctaggcgaaagggtacggtgcgatctgaaccgttggatcgcaagccgagcgcccagattagattgacaagtcaatgaaccggtataatccgccatacgttggattgaagatctacggtcagtattacccggacgcgcgctctaatccaagccgctagatctcgatcaaacgctcctctgctcttccacccaatcggtatgctatgctctaatctgtaccgtcgtccacggatccgacggtcacggacccatcgtcctccttcatgcccaggtagcggcggcgcactcgcgccccgcggcggagcatggccgaagacacccggcccgattatcctgtacctcgcgcgcctaacccagcgatcctacgcaatgccggggccgaagcaaaccaacggagggaagactcaccgagaattgtgaagctgaatcttgtgaccgcagtgcacgacggaagtcatccccggcgagcaattgaccgacac

SEQ ID NO: 11609 - DNA, 852 bp, Zea Mays
ggttttttgagaaaaggggcgcgacgaaggggtatgctcgatcctggaccgcacgatagaaaacagatggcccagattagcccctgcttaatccgaaccggtacgcgccggccaccgtaagatcacagatctacggacagaaggcactctccccagcattaaccgcgctagccattagatcacagatccacggcccggatcttcacacgcaaaggggtacgccggatcgattctccaccacacatccccggatgaacggttcagaacgaatcggtcacgatctaatcacaggcgtccattacggatccaacggccctgcgcccttcttcctcccttcgactccggacggcaccacaccacactaggatggcgcaatccctggtgagtcggcgagcaacagcctcagcgtgtggatcaaagcgggaacagagactgcgcatagcggagatgatagcgaactataggaacgtgctcttacttccgattgaggcgtaggccggtcgttcggcgttaagttgcctatggcccaggcatcccagcgattcctggtggaaacacggccacaatgacccccagacccagcgaagtccgcaccacgggcaccttggctgcagggccctcctcacttccccggtcggcaccgacgcacggtgttgtccagcgccggcagcactccatcctctatctattctgttcctgatggtggggaaaacagggttcacgccatggttttatagccagggatgggtacgccaatggtcggcccgactctgagatcagcgcgggattggaggtggtctgttgcggacttgcgatgaactcggtggaggacagctccgggcgaagttttcg

SEQ ID NO: 11610 - DNA, 875 bp, Zea Mays
tgacgacaaggtgagaaaatgaatgtcagtgtttgtgacctgaccgcgcaccataggttcccagtgaagcttttggataggacagcgtcgttaatcgtgacgcgatggttcgtgcaagggcacgccggaatcactcacagagttatataggttcgggccgcttagaattacgtaataccatacttccttcagttgtggtttgctattgatatctagagtaaaggattataatgtgagggttgtggatgaggacggccagagtggtccgtgatgagatgagatggtagggggtctccctcggccttatatacacgaccagagagagttatcccattacaagttgtgattactatctacttgtttatctccttctttgtcgcagattgtatccctgcatattcagagtcttcatcgcctagctgcccgagttatcgctgaatgcatagcccttcggttgcttgtaactgcatcacctgacacattcgtgcttcgacgacacttaactcgaacgtcggtcttcatcagcttggatcacactcgcctgagttggctacatcctgctgacccatcccataggacgactcagtaggaagcccgtcatgcgacctatgatatgtttcagtgtccatgaggacccatgagacatctatcccccacaagccacctaggctcaagccaacttttgagagtagttgcctcgagactctgaaaaagaattatgtcctttgtttcttataagcttttcgaaggtcattttgtttcgttactttatccattgggtgcacccaatgggtgtagctcccgagctttgaattgattcgagtactaatcaactcaaaggtcttcattgcctgcttttgagttcaacatttttc

SEQ ID NO: 11611 - DNA, 892 bp, Zea Mays
gttcaggaagcatgaggggaattatccaactcatgatcttgaattggttgcggtggtttttgctctaaagtcgtggaggcattatctttatggcgaggcttgtgacatttacaccgatcataaaagtctcaagtatattttcactcagaaggagctgaatttgaggcagcatcggtgtctcgagttgattaaagattatgatttgtccattcattatcacccggggaaggcaaatgtggtggctgatgcccttagcaggtccggggttccaaaagtggccttgtcgttgatcgctgatctagaccgtttgggggtcgctttgtgctatgtcggcaacgctattgaggagactcgtatgcttattcaatcttccctcatggagagagtgtgtgcgactcagcagcaggatcatttattgcaggaagctcgaaagagggttggcccaggagttctccattgatgagaatgatttggttcgtttcaggggccacctttgtgtgcctcagaaatcagaggtgaagatggatatcttgagagaagctcataaaacgccttacaccgttcaccctagcgaaaccaaaatgtaccgagatctgaagcaaaacttctggtggaagcggatgaaggttgacgtttctaagtacgtggccgcctgtgaagtatgtcagcgcgtgaaggccgagcataagaggcctgtaggtttgctaaagccattggaaattctggagtggaagtgggagcatatcaccatggattttgtggtgggcttacctcgttctcctcagggcagggatgctatttgggtggtagtggatcgcttgactaagtctgcgcactttattcccatgaagaccaccaattcagcttcagaattggttcccttgtatatgaa

SEQ ID NO: 11612 - DNA, 637 bp, Zea Mays
gaagcccaagctgctgcgaggctgcatagtgcatagaactccgcctttggcctcccgctcctaaccctagccgcaccacataggcgcaagtactccacactctaatcctattctaatatcgatccacttcccttcccatcgccaccccgcgctccctctagcgtgctccgcacttacgtagactgaggaccgcaacaatagctatctcttctttgaatcctcggtagacgatgatagtgcatcccgtgaggccgtgtacctaggtcgttgatgtggatcgcacgataaccagggagccaggaacatgaggccacaccccatgaagaagtcaggggcctacgatgtcaaggagcagggaggcgtgcgacttccgtggggagctggggacccaacggatgcaggggtctagggacgattaatgcctggtggtgagcgtttgctgcctgagcatcactaaggtctccttccattacaacgacaaccacaacaaagtgctcctcccatgtatgtctataatcttctcgacttgtcttctactcatgagttacatgctttctaattatgtaaagatggctactatggtaatgcaataggagagaaattgtaagtaacaatcacctctttttctttattgttt

SEQ ID NO: 11613 - DNA, 1028 bp, Zea Mays
gggcccgccgcctcggcattgatggccgcaccaacgacagtggggcatcgtagaggtggatgcggcgtggcccagaagttcgaagagtgcccacgtcgtggggttcgccatgggtaaccctggcatcgccgcgagggggaacctaggccgtcgccatagaccttcatatgtggagccattcgtgacacaagagcttgttgggggcttcgcttggttccagcgactgtaaccgtggcctctccggtggtgattatccactagaaccaccggaattgctcacctatgctcctgttccgccatgagtcccctatacaccgggggcggggacgtcgcggcacaatcacatgtaatgttacttccatggcattcacccttttctccacaccgcgtagtaccttttcgaagtccgattagggcagctaggcgctgggtcgatggacgccggtgaacctctatcacggttcaggggtggcgccgctttggttgactgggtatgggggaggatgtgccatcaccatggatctgtatgtgggcggcacagattaaacgagatacatcccttcgctcggaattaattccccccgctggatcggatgcagatcgggatcgggtggttttggttagggtgggatccgtgccgttggatctctaatctaatggtcatcattgtgtaccggttcggatgagtacaaaccttatactgaccgtaggatggcgaaccaatggttgtgatctagggataccacttcagcgtgaatattttctttaagagaccccgaaaaacttgctattcaacctacagtccacctgtgttgtaaaaacattacaaaatggccctaggatttacgcagccaaccctggatttccatgaagttatggccgccgcccaacgaccggaagaaattaataaataagataaacaaatgaattccagcatataaataaaccaataaacttagataattcacattttgttcattttaactccgatttagtccgttcaaattgtgttagcttcattataaaat

SEQ ID NO: 11614 - DNA, 759 bp, Zea Mays
cacgtacgtccgactaggaaactcctaggatctccaaagctatcgacagaagcatgatgaaagccttcgtgagtacatttgttggtttttgaagccgcacactgagatccccaacgtcactgactctgacgtcatcggggcattccttgccgaaacctcttgtcaagacatggtcagcaagctaggtcgcaagaccccgaacaaggccaacgagttgatggacatcaccacgaagtttgctttgaggcaggaggtggtcgaagccctcttccacaaggacaagggcgacgagaagcgaaaggagggcacccccgagacatccacccaatgcaacccaaagaagggtaagaagaagaagatacagcagggctcacccaaggccctcgccaccaaacttgtcgccacggccaagaaacgcaacccttgagcccctcaaggggggccgggtgtcttcgacaaaatgttgaaggagtcatgcccttaccactagggcccagttaaacattccccttagcaaatgtgacatgctacaacgcttttacaacaagcctgacccctcggcgcaaggaggcaacaagaaggctcatggtgacggagagaacgacaagggcgacagcttccccgacgtgcacaaccgctacatgattttcaggggtgacaccatcaacctttcttcgaggcagcgaaaacaagagcacctggaggttttcttggttgaggtggcgaccccaatctacctagattggtcggaccgcgcca

SEQ ID NO: 11615 - DNA, 536 bp, Zea Mays
ccggaagcacgttagcacgtaatccaccaccacccagcagagcgtgctgtcctctgcctccaagcgggcaccgaggatctggtctaggagacggaggcgttcggcagcggagtccagcaccaggagggcatcggagatcgacactggcggccccgacactgggatgggacttatccccagtggcgccagcgccgacctcgcctcgccggcccactcagctatccgctggaccccagcgcggtgttctgcctggagatcttccagggccttcttggcagcctctgccacctgcggacccggcgctgcctgcgtcgcttcgaactggcagacccgctcctctagcttccgctccttctcctccgtctcgagctcatgctcggccagcaacgtctcccgcctttcaaacatttcttccctgaaggcgagatccttctcccgccaggcgagatccgtctcccgcctatccagggacgcatccttctccttgaggttctcctcggcgagggcaatgttgctggtcttgtcctccagctccc

SEQ ID NO: 11616 - DNA, 593 bp, Zea Mays
ggattcatgatgcagcatgcatgagctatgaaagagttgagcggtgtccagtgtcgtcttgcgtcatgcacgagggatggttaattccgatccagtacaagaaacagatgagccaatgaaccaaatgcctcgaacaacagccatccactacgtatctgtcgtccatgctttgcatcgaaaggccatcaaccgtctctatctcgttcccaactggtctagctctcgcgaaacagtacacacccaccttcgtatggagctacaataaaatgctcaccaatgactcgtcacaagcgcgcgacggtcttgtagctcctcactcatgaggaagcacttctcctagccgctagcaatgacttgtgacacttcatctctcttttctgccacgactctcgtaacgatggtgttgatcgtgctcatcggcgacagcaacaccatgtgccacgtcgtgcggcatcttgatcacgccccgcccccgtcgctcttttcgccgtcccggacattcctgtcgtgccgaagccgctgatcatgcccatggccacccttccactaatgctcgcatgggagtcgtgtcacagatccatgtggtgcctaac

SEQ ID NO: 11617 - DNA, 934 bp, Zea Mays
gcgctcgcggcccttcgaccatcctatcgaaagcccatataccgtgtgatgctcatgagcgtggggcgtcatggcggctgagcgaatcgtgagggaaggaatcgcgcactaccgcgagacctccggtccgtgccgttgtccgttggtgaagtggcctcgctggagcttcgccattacataggaggaaccgtccgcggaataatcaggcggagaacagcggccgagaccttctctggcgtacagaattgctcactggagcaatttgcgccgctgcgggcttgacctgctccatgggtgctggtcatcttgacacaatcggcggtaggtatgctactaacatgttcaccacttcccctgcatcgtgtagctcatgttagaacataatttggatcaccggtacgcggattcgaccttctatggcatggcctccgtcgtgcctgagcgccgtcacggggcaagggcgttgccgccgttctcggagtcgatgggggaaaaggagaagggtggtgggccgagcgatcgcggttggacggctacaattaggctctacgtaccccccccccttcggctttttgacccggaccgttggatccatattgtgcggatatgattagaccgtaggagagctattcggttaaatggattcgttccttcggatctcgatctaacggttggcgctgcgttacagttcacggtggtgttagagccattgatcttgatccaagggctgccagtccataccacgttaatgaagactcaatctgatctacgctgctgatcgccgatccaacgaccaacgtgtgccgataccccccttcggtggccgctttcctaaagagaccccgcatttttctcgaaataacccgcagtgcacactgagggttagatgagtctgggggatacttatgatttcgcccctgtgtttctatagatt

SEQ ID NO: 11618 - DNA, 575 bp, Zea Mays
gtcgcgatgtggacaggtcgtagtcgtacgatgcgcacgggccggggtgcggaaatggaatggaccttgaaccagccagcccatggacccattcatgtcgtccccgactcccccggtgccggtgcgttgctttgggctggctaggagactgggaaggcgtttggtaaccacagactgttcaggtagggagggactggtggcgccgacattctctgacgggcattcggtcggtcggtttgttcacgctctccatccgtaagctgcgtgccgacttgacgaagcgtacactgagagggaggacaggacaggacaagccatatgcgcgtggttcgactcgacatggctcatgacaacacatgcagaagcaggatcacttcccttttttttctctacacaggcacacagcctcacgggtgcagtgcaaagcacagggccatcggacggtcagagaatgccggcgctgctgcctgctgggacagacaggacagtggtagatgccttgcccgcgtctgacttttgtgcctcccctgggccctgtcccttctctccctccctttcactttccctttcccgcc

SEQ ID NO: 11619 - DNA, 587 bp, Zea Mays
tggcttcactactattacctaaaggtcgtactgctcattcacgttttaaaatacccttcgatctagatgagggtggtgtttgtggtgtcaagagaggtaccatgctgtctgaacttatacagcagacttctcttgtcatatgggacgaggcaccgatgacccatagacattgctttgaggccctagacaggactatgcgtgatattctttcgaaacatagagcggaaaatgcgaacatcccatttggtggcaaacctattgtgcttggaggagactttcgccagattttacccgtggtgcgcaaaggttcacgatctgcaatagttaacgcatcaattaccagctcaccgttgtggcaacacgctactgttttgaaactgcgaacaaatatgaggctttccaacccgtctttacatggtaaggaacgtgcggacttggaacagtttagcaaatgggtcttagatatcggcgatggtgctctgccagcgatgacaagaggagacgagtccgaacctacatggattacgattcctgaagatttgttgatacatacggatggtgatgctgctgtggcactcatatccgag

SEQ ID NO: 11620 - DNA, 731 bp, Zea Mays
ggccgctaccgctgtggccggtgatctacacgcctcgacttccggtaagaaaaactatgtcgcgttcgcattgtcatacactacgtgattgtttgatcggtactagggattgagctatgtggccggggcacattgctcgccggcgaggcggcgaagttcgccgtgaacagggagcgacgccgctgtctcagtgagctgggaaggtaaaacgctgcgggccattgattctttaatctacggtgtagattagacggccgcgtaccctttcgcgcggcggattctggaccgtagatttgtgatcgtgcgactgagagcaatcctgggttttattaagtgtggaccgttagattcggatcggtggactgaagttcaatttgactggggtccgtgggatctggatccaagggaccacatcgcgtactggtttaagttaggcagatcagatctgggcgctcgatccctaatccaatggctcataacacccgataccccttcgctgcgctcgttttgcatctaggcccctcagttttcaggaaaccaacccgcggtcctctcctcgggtttctgtgtcttaggaagttttgcgccagagcccctgctctttctggtatttgaggcctagtccagagagcagaaaaaaatcagagaaatgaatttataaatagatttttaatattaaattaatggcagaaacttgtttaattcacagaaaatgcatatgaactccaaat

SEQ ID NO: 11621 - DNA, 689 bp, Zea Mays
gccagggggcgaaaagaaagagggttgtgagtattctggccagggaagccatccggtccgtcaaagaagaccaagaaactttgaagaagatgaaaacagtgccggagccgaaggtatcgactcctaaaaacggaagcttgctgaaaaatcttctgagaagacgaagacacaagatgtgctaaaaccaactgcaagcccttcgtcttctgctgttgaggtctcagaaatattgaaggtaatgaccgagtccttcccattcacaccgctaagtcctctagtgttggaactgaccagcctcttatagaaaaaggaagtctcttcggctgctgatgggagagacgggggccagaagaaacgacgcatgacgaatatactacaaacgattgagaaaaccctgccccggcttcgacaaacaaagctgccaaagcgatcgatgccgaagccactgctacagccgaagatgaaaacctcacaaccactctgtccgaaattgacagacttatatcagatgtggttgtggagaaggaggtggtcgcgacagttttagacaagggaaagaaaattgatgaaacctcttcagagggagcgaatttcgacctacgacacttggacagccaacaactctctgaagaggacaaatcggagttgaaagaatttacgatctccggtggttaccagtcggggtcaat

SEQ ID NO: 11622 - DNA, 472 bp, Zea Mays
caccgaaggcagttgtcatagcttcatcttcgacctttgagtatgctccaaacaactcatcgctagttgcctctatagcatctagctagtcatcattcggttcatcaaactagctcctgtattgaaaggtgtacttcagatgaactaaaccattttggctggagccagcggtagcctccttcggcatttcccatccgtttccatgtggccacactctgtaagcaatatgctcctggaccaagtctcttgtgtcgatataagtgcacactgtattgaaagccacctaacatgcttgcacgtcatttccaagtgcagtgggcggcctcctaatgcggaagcgagaccatatagggcgttgaataaccccttttatatctccctctgactcaggtaaaccttcacataaaatcattcttgcatccaagagcctggccactttttccgaaatgtcggcataggatagctggcctca

SEQ ID NO: 11623 - DNA, 523 bp, Zea Mays
gaaatatagtctatgtgaggtgctctaattatttcaagtgtatgcacatgataaggggttctaagggtagggttaagggagaaaagtaaaataagggggattaggaggttagggtttcaaaccttagatgggattttgggatgttacaaacctaccccacttaaaggaatctcgccctcgagatttagactggatttgagaaaagataagggtattccctcctcaaggagtcctcactctcccaggtagcttcctcttctccttctctgctccactgaactttacagagcttcaactctgaggtgcgggtctttctgactgctgaatcaagaatcttcactggtttttcacggtactgaaggtctttctgaacctgtactgtctcttcttcgatgtgacttcctggtgctagcaggcatttgcggagctgggatacgtgaaacacattatggatgtcggacatggattccggtaattccagacggtatgctgcgggtcccaccctgccaatgatgggataggg

SEQ ID NO: 11624 - DNA, 778 bp, Zea Mays
ctggcgtaaaattctacaggctcagtttaatcccgagttggactgcgggttctatttctgttttagtcaggggctcatatgaaaatgcgtacccgcgaaggggtacgcgccgatttggatcgtctggtcgaaaaccgacgcatcagattagatcaccgtttataaaataagtaactcgccccgaccatctgatcccaatctaatggccaggatcacaccgagtgaaacggtacgcagattctaatctctgtcgtagggaaccgatccaacggccacggtttcatcacttgaatcgttcccctgagattaaatcctaacccttgagttccagatcttcggcccacggtatctcttcctcccaccaccgcacacccacggcggaccgggacacagcacggcggtgcgacgcgtcggagatctaatctcccgtctcccggtgataacccacaatgcaagctagtgcaaaataaaatgggtgcgattaggaactgcacggaaggctttactcgcagcgccacaccgtgacgattctcgaccgcggataggggaaggtcacggcggaatgccacaccggcgagcaatttcgtagactacgcgggtcaaattcgagcgcggggtgaacttctaccgaccaagggaggtgacacaactaggtaaaggaattaccggcagagagggcagacaggggcacaaacacggcgccaggcggtcgacgacgatggcggatcgacgtggtgtagattcgcgcaccctggacggccacacgcccaacgacccc

SEQ ID NO: 11625 - DNA, 957 bp, Zea Mays
ttctcgctggtacattttactttcatgctgttgctgctttgatgtttccttttaataaaatttatttttatggttcatgtgaacatgaagtgttttttgtttccaatagtgaaggagatagagaagtgaattcttgatccagacaattacttgccctttaacttgaaatatgaaatattctgaagaaactacgtgcatcctcagatgctgaagcaagcctattgatctcaaataacaacgtgttttcagtttgcctatgaaatggcgcgccttattccctctgtcgttgtttacctagttaggtcggaatggtgtggactcagctgcagcgaatcgcactccatcaacaggaaggtcaacctttgcacctccagttggcgttagtgtgaggcctctacaagctgtggaaattcccaatgggacacctagggatagaaggtgaattgtcaagctttttgagatatttctcttgctaatgcattgtcacattgttagcatgtctcttcaaaacagatgtcgctctcattctattaatgattttctgccccatttcgtagtggggttcaggggttttctcgatctatgtgagattgtcttcttcatacgatgcttggggctgccttaccccaccggttgagttttttgtatataagtagcaacaagatttggattaacagttgatatttcacggtgctgtagggctgtttatcccgatcctactttcgcccagtccacacggtcacgggactcacatgacagttcaacactgacagaagaggtctctgtcgccgagcataccgctcacaccttctacattctatatttttcagatgcttttgtactgaacagttagtgaacttacacggggctttcttcagtaatagtagtacctttttccaatgaataaatctgcaaatgctgtttttcttttgcagcttgaaatgctaaaagatgaga

SEQ ID NO: 11626 - DNA, 373 bp, Zea Mays
tataatcccttctattcaaggcgtacctagattgtgtttatgtccactcaaggaaaacaccacacatcaatttgccacatttttctcaaaataaaataaagacgtcttcatcgactagcccaatgtgccttacaaccttaacctatgtttggactgttctctcactcaatttggctaaattttccatggtcattgttttattttgagaaatgatgtggcatattgatgtgtgttgtttttcttgagtggacataaacaccgtctaggtatgccttgaatagaggggattataggaaacctggtattataaaaggtcattagctagcccaataatgtcttcatccactagttgtactctaataccctctcgtgc

SEQ ID NO: 11627 - DNA, 2883 bp, Zea Mays
tggagggtgtagttatacagcattcccacatgaatttcttaggaaacattatagtgatggtggattcctatctccaaaattgttaccagatttccacattcaaagagagccttcaaactaagtgggtaaacagagagtaactgtgggaaagaggtcaagtacttaccatattttcatggtcaggagaaattttattagtacatagataaacagcaggtagaacatcatcaggggataaagcaagcaaactgcattacagaaggtaagatgttaagcattccccccagtaatgaacatatcctgtggacgatcaacatgtatagaacaatcaaagaggtaaacattcagaaacctcctgaacatgttgcaaaatattgcgatagttttgatctttcctttttccttttcaaccaagtcaaatgtgcgagccaaatgcaagtatggtgcaggctgtcctgctatccagcaagctgcagaaatgcagatacatatggcatgactaactattaaataagatgctaaagaatatcaggaataagcagctaaccatgttcaataggtagatacttttcaattagcagtgatgtgttggcagaatctccatgtgctaaagaagttcctacatgtaagtttgacatttttggagtagcctgagaataaccactagccatgtctgtttcactacaattatctgcagtttcaccttgtgcattctgcagcataatattcttgtcaacctcaattacattattaccctcacttgaactgtaaaatatgtcaactgctacagccacatctccgtttgccttctcaagcaaataaactgcatattctctagacatgctaccatctacaatctggagaagctggtctacaatctgatcttgtgttttttcagtatcagctaactgatcactgttttccacgttattttgatgtgcctccacagttactctttcaggtctacaccttttaaaagcagcttcagtagctctaatgaaataatttgtaattgtggactgcttccgcccaccagattctgttgaggaagttaatcggcctttcttttttggcttgtttgtattgctggaacccctcttatttacctttttgggagtatttggtttcattctcataggagacaaatttaccagttttgcagagtattccacaggcttctgtgaaaataaagaagattcttgctgactacttacatcagcagacgacccatgattagaagaatggtttttctctgtcttgggtgtgccattacaagaaacatttgcttcttcaaagaaatctctttcccgctcaaaaaaaatcgatgctgctttaacaacatcaccttcagaactcatcagcaggtctgtgatctgttcctggctcacccacgagggtaagaaatctgacagttctttaagtgtttcctgcatagtattctccatcagtttatcctgttgttcagaagcagaagagattgctggtaacaaagcagcatcctccccatcaagctggctcgagcaattaacaaccacatctttgcagctacgagtagcatctattgacctacgatggaatgccatcaagaactcctgtttgtttgctgtctcatcaaccaacccagcaaaatgcttctgcagagcaactgcctccttactatcgagcttcccagcatccactccggcagtagggatcacactctttgggtgcaaaaacttaacatagtcgcgcaactcattgtaacttgagtgctcactataaggaacaagatggatttcgagtgaatctttcaccctaacagcaaaaccttccttcttggtttcatacatccacccagttggtacaaacccaacagccttagcataccctctctccatcatgatctccttcaatttcacaaaattcggctggaagtagggcgaagtctcccctaacaaattccacccaagaacatgcacatccgtccctgttgcgtcctcagtaaaaacgctattcttcccaccgaaccccaacagtgtcaaaatcttcatcttcctactgtccacatggattgaacacccacagcgctgtgcgacctccagcaaaatcttctccttgccgacagcataggtggcgatcagacatagcacacgctctcctgatactgaactctcctctttcacacgtttgattgcattcactatgtaatccacagaatcctcttgcgaagggaatgtaaacttggggttgcagtatgtggtgtccagaaacaccgcatcagcacggacgaactccagcaagttaggatcacgcgtcatagactctgtgtaacgaaagtcaccggtgtgcacatatctctcggctctcggcccaggagaggcgaagaggaactgaacggcaccgggacaatgattggcgtccacggcggtgacgccccacccatcaacggtgatacggacaccgatatcgagggagacgacaagttgaggcgggacagagagcacggatgagacgaggcgtgcggttggcgcggagcagaatacaaggccgcggcgccaggaagggccgaggccactgtagtggtcggagtggaagtgcgagaggaagtaggcgacagagaagtttccggcatggcggaaggcatcgacaaggaagcgggagcccgggatgagtgcggcgggaggcacagagaccgggacagggggaagaggcgtggaggcggaggtgaagatggagaaggcatgggaagaggggagagaggcgatggaggagaggaagagcgatgaggtggtgacggacagcgacttggaatcgtcgggggaggagaggagggacgccattgattgctgcggcgggtttagggtttggaggcgccggcggcggtggcggagaacggcatggcgc

SEQ ID NO: 11628 - DNA, 443 bp, Zea Mays
gccctacggtctgaggaatgccttgccaacctttgtacgggcaatgagcaagaccttcggggacctgatccgggataaggtgtaaatttacgtcgatgacatcgtggtcatgactagggaagggtcggctatagcggaagacctggccctggttttcggcaagctgcgggcaacccgcaccaagctgaacccggagaaatgcatcttcggtgtctcagcaaggaagttgctggggttcctggtttcataccgaggcattgaagctaacccggagaaaatcaaggctattgaggtaatgaggcctcccactcatgttaaggacatccaaaagtttactgggtcgctggcagcccttagccgcttcatttcgaggttggctgagagggcgctgcctttcttcaagctcctgcggaaatcaggcccatttgcctggtccgaagagg

SEQ ID NO: 11629 - DNA, 951 bp, Zea Mays
ggggaattgatccgggatggataacttcgaacgtggtgcgattctgtgaacccagtcgagcgtggccggagttagtcaccggcggccgccgtgactcagataattccgccgcggtgtcacccgtaccttgctccttcctcactatgtctcttccctacgtggtaaccatgtgcaaacaaagttatccatggccgtagatagctagctggaccaccgtggctataaagggcaccatgaaccacggcggggtatgcacacctccacccagtgagttgatcgaaatccaaaatttgcgctgcctctgccccctcctcccaaattgaatgtgcacggtgaaactatagttccttacggccgtatagccccaatctccacccccccaatttcacccagagccaccgcgacaccattttccccctttctctgtcaccgacaagcccaggtcctccgtgctccgtggccagaccactctggtaaggctctgtacatcttgagtgttgttttagtagctctgtatgctcgtgaagctttccggcaaccgttggaccaattcaagcatgattgaacgggaacacggggtttgatgtcacggtttccgccgtgcacatgggcaggccattctcaatgtgttcaagccgaaatcaacgagtgttccaaggtcaccttgagtcggttatgcctcccctgtagctagactagacagccaccaccggtcatggccagaacgggccgcgtcagtgatgaacggcgagcgcaccgtggtcagggacctatttggagaagaaacgaagttctggggacctctgtgtaagatgtcagtgactcttagaatattctgtagaacgttttacaaattagttaagacctcgggggcattttcgcaagtcagtcgtgtagacgcgcgtgcgggcacgcgtgggcgcgttcccgcctgtggatgggccgacctgg

SEQ ID NO: 11630 - DNA, 824 bp, Zea Mays
gagtgttctaccgtggggtaaagccacgcgtgctcatggttgtctggctatctcatatcctttatggcggacgacacgggtggcatgggcctcgagtgccatcattcgggctatgtcgtcccctagcctttgtagcctagggctcagcgtggttcatcgtgttgtgccctgctagaggtctgcgtactcaggcctagtcctagtaggctatgagtgcatcttaagttggtgggagcgcaagccataaatgcattgtagtccaaggggttcgtaggtcatgagtgctctacggcctgaggggctcgtaggctatgagtgggaggcaaactagcgcctccgttgtggctcggtaccagtgtagctaatgtggtcggtcatttatgacaggttggtctcaggccaagagagggatcactcgagtgctttccctttgaaatgctcacccccttgttagacactgccacgcccgaccccgggcttaatgctgcggggatcatctgggggcaagttcctctagggtagacgctacatgtctcctccagctgaccgatgggccccaattgccagtggctttccccagacacatttgctgatagatgggccctagggttcatgaatcttatcctcgatagtagcccccgagcccctagggggagtttctccctctagagctgatgaagggtttggtggcgcttgtcttttcgcctttctgagtaatcatggtgtttaatctcccttgggactcaggtcgcttccaaggcggcctaccgcccctcgtggtggagtcgagcgcttttgccccctttataagctctcggtggtcg

SEQ ID NO: 11631 - DNA, 986 bp, Zea Mays
ctttctctcgttctagctagctagtccatcttccattgcgattttgcgactgcaattgctgccggctccagatgcatgcatgttaaagttgcagtgagcgcgtagctgaagctgactccggtgtgcacactggtcaaccctgatcctctcttctttcacacttgaagatcgtcgatcgagggaaggggttcgattagctcttgatgctttctttggttgggaggaagtgtggtgattagattagcatgtgggtggtgatagatagggcactgattagaggagagggaataatgatatgtcagccaggctaggcttgataatcaatcataggatggaatgggagctagctctagtagagtagacactagtgctgtaccggctgaccactgcgctggcttggtttttcttggcttctgcttgcttgcagcagaaaccagcaatgcatcagaggaaaggaagattgtactggtgtgtgcagcaaaacggaacccaatgtgaatactccagcttctgctagcttgggggcatgtgtgtgtccttatcgtgtgcgtgtgattcatttgagagaagaccaatcaccgagaagctacgggggcatagggctgagaaaaagagatccgcgaacctcggcggtgaatctcctttgcagagccgggggtggcgctttccatctccttctctcgccccaatgcagtgctgcctgtgctgtgctactccctaatccctatccattctgcctaattgccctactagagagctagctgcatgactacacacaccgtcctcctctctcctgtcctgtgtcccttcttccacgggtgactgggttataatagtctctctctcttcaacaccagtcatacacgccagcattgcgttgcgctagcggtagccatgtctggtgaacaagaatcaaacgggatgtatggagcttttgctttcagctttctcttttcctttttgtttctgagcgacctctgatcacg

SEQ ID NO: 11632 - DNA, 716 bp, Zea Mays
ctttaaatccctccatctttacccaaaagttttcgaaacggaaggaggggctacatgttctcgtcagctctccctgtaggagaagcgaagtgtggtcagacatgagggacgggagggagtgcaggtagcaattggggaagagcatctcccattcagaagtgcagaagattctgtcaatccttgttagagttggactagcatggccattgctccaagtgtaacgacggccattgaggcagatttctttgagcaacaggctgtccaaagctgatttgaacgcccccatgagatgtcggtttaagtttctattatttttatctaaagtctgatagatgaggttgaaatccccaagcacaagccatttctcccatctctgtgacgctaggtttttgagctcctggaggaaattgtgcttctccgcaacagactgcgggctatagacccctgtaatccaccaaactgagttatcggccttcatggtgatcgaggctgagatagtgtgaggtgtggtgtagacttgtgagagggagaaaaaatcatcagaggctgctaacagaatccctcccctagtgttattcgcgggtaggattgcaacattgttgagaaattttggtcccaaggtgcgtaagatggctgcattatcaagtgcagctagcttagtctcttgtatgcaaacgatggtgcttccggtgtcctggatcagttcctgaaccgag

SEQ ID NO: 11633 - DNA, 412 bp, Zea Mays
gttcgctgatgtcagaagcattggccacatccaaatcttttgctattattagaccgtcaccagcactggtcagcttggtgttaagaccggacagtatgcctttttattttggccgtttcttccatacctacgctgcaaaatctctgttgcgtaccgggcaacaggcgagagcacatggttggccacttggccttcgcccccatcgagggtgtcatcagcttttcggtgggctcggggcatgtcagcctccgcacgtccttgcctactttggcaatattatgttatcgaaacctcgaacacattattttatctcagcactagaatgtctagcggactttcggcatttttgcatcctttgctccaaacttatcttctataaactaaactttgaagctctacccactaaagctag

SEQ ID NO: 11634 - DNA, 686 bp, Zea Mays
aagctgaaatgcttgctgttgaagaattgttgacagccatcggtgaggagccatattcagtgactgaggctctgaaggtcactgattggagaaaggcaatgttagaggagatggcatcaattgaagggaacaagacatggccactggttgatttacaaaaaggacatcgtgccagaggtctgaaatgggtgtataagctgaagcgtaacgaatcaggagctgtgatcaagcccaaagctagactggtagctaagggatatgtgcaacaacaaggtattgattttgaagaagtttttgctctagtggcaagaatggagactgtcagggtactattggcagtcgtagcacatcatgggtggccaatccatcacatggatgtgaaatcagtgttcttgaatggtgatttggctgaggaggtatatgtcacacaacctcctgggttcactgcaaaaggggaggaaggcaaggttctaaaattgcacaaagctctgtacggactgcgacaggctcctcgagcttggaatgtgaagctagacaaaagtttaggcaaacttggtttcacaagatgcaagactgatcatgcactatatactagaaagaaaggtggtcagagagttgttgttggagtatatgtagatgatttgttaattataggggaatcagacgcacagatcactaaattcaag

SEQ ID NO: 11635 - DNA, 358 bp, Zea Mays
agtggtagggagtcccggcgacacgatggcgcggttaggacacgcggcgcaaggccggacgacggctatcaccggcgttcttatcggcttctaccagggtgacatagtacggtggccggagttctttatcggttgaagcttatccacggcggcgtacaccggtgttacccacttaccccgagaacaacgtggaccggctgccgcacgaatcacggtggcaatcggtcgccggcggtgaagttgccgcgctggcggcctgatccttatcaggtcactgtaccatggccagtttccttcagatgaacctgacagtgcaactttaggtcctattttctccagattttctatggtaccaagc

SEQ ID NO: 11636 - DNA, 961 bp, Zea Mays
tttaattttttttcttccaaacccatcacaaggtaactgtagtttacgtgtaaaactacacttcctgataccagtgagctgaacaacattatgctcaacacagttttaggataatgttacatatggtatgtgtgacgtcctggcccaattcaaattagccccagagtggcacatgtgtatttgcatgtgaagttgcgggagtttagtcccaccctgctagttgaggatgcatttcttagattccacgtgaccaacccaggtggcacgtgaagcgatcataaaagtaaaatgagttgatgagagtgtgttgcccacacagcatgtgagtggatctaatggagcagtcaatgcaataccaaagcatttttctccgcaaaaaattacctgaacgctcgccagaggagaatctcttgtcgatcctgaatgcagagaaagctcaaccagatttattgagacagaaaatttattagctatccatgtttctgcaccttcggacaagacatgaatactttctgaagaagaagctgatacatgggatggagtagtggaagtgccatatcgaggatcatccagagtaggcacaggatgtggtgtctcagagaagttagacaatgcacattcagaaataatttcatattctcgattggatagtgttgctttcaaaacatccacctatgagatattgtaaaaaaataaatgagtatctcaatggtgctataagaaaagtaaataatctaaccagggaccttcaatcaaagatgcattcacagaaaaatgttctaccttaattgctgcctccaccactggcaactgatgtctcaaatcacgcaatgatctacgaagttcaaaggagagaccttctacatcttgaattatggtttcaccacgcaccatattcataccaataactaaatttatgtcccgtacctacaaagaaaagtgtaatcgtgttataagaatg

SEQ ID NO: 11637 - DNA, 717 bp, Zea Mays
ccgaggtgaaacattcgtttccatgctcggtttctcccaattctgctttgtcttggccaattcggcttcactggagttcggtcgcaccggttcgccgttcccacacagtgactggccaaattagctcggccctgtgtccctgctttggtccatgatgttcccctcaccctgtcgtagctagtccaggccctagcgcgccctagaccccctctccccgaccgagattcctcgccagagttacccccgacccatcaagagctctccctccgccgttctcccatctctggcccggtttcgtggctagaaccccaccagtgtgttcgacgggttctcctcgccgatcctggccaaccccggcgacctcaaaaccgctgtaggccaaacccaccccagctctggtgacctcaccgtcgtaagcaagagtggcgccgcccacggccgttaacccctccggtgcttgattttggtcgtccaatctcaaccgcgtggcccggatctctagataccacttcacgcgcgtgccctgcgcctggacccacctgtcgaccgcttgtgcccctggcactgggtccgactggtcaatctgcttccccgcccccggttgctgaccgccctggcccgttggtcagtgcgcgcttgtgcccgtatccgcgcgctcgcccgtggatctgttctcgaccattgatcatggatctgacggctgaggataccccgtac

SEQ ID NO: 11638 - DNA, 1091 bp, Zea Mays
ccctggtgagtcgtcctcttcccggcgccgctacccgtaacaagctccgctcctagcggcgggcaaggcgcgaatctctccaccggctctcccagatccgcaaccgactctacgctcgaatcgcgggaacggtttgacccggtgtgctattgcctcctctccctacgacttcaacagacctcgcgcactacccgtatccgtcgcggcttcttcggggatccattgcaatgaagcgagctgccgcatcctttggtcagcacgaactccagttccctgggctatacaaaccgggcatcgtgcttcctctgcgcctcccctcttcatcgctgctcctctacattttcccaaccgcgcaaaccttcaagccgccataccgccgagcgcgcatatcgaaaataccccgcgaccgtagccattaatcgaccctaggtgcttcggttagtctactgttggcgtttccgagctctctgcggggaattgggggctggcgtccaacgaattcgtcaacgacattgaggtgccgccatgaccgtgctcgctgccgtggacagggcgttcagcacatcgaattaaggtattaacgctgcccttgcattcgctaactcatggggatagagtagaagcagggaatttggttacggggcctcaaatcgggcgcgcgctgtgctccggcgatggtccgccatgtgccctgggcggcgccaccgtagctcgacgtgggtattgggggaggcacctgggtcgttgatgcggaggcggatggctaggattagaagccaggtgaacggctcggctaggactcggtgaccgttgatctggggcttcaatggataggattgaatttggggtatttagatctaggccgccgatgggtgatccagcggctgcgatctagtacccgttcacgatggcgccgatctaatctgcgccacaggtataggatcggacggctctagttaccagataccccttcggcctgcaaatctttctaaagagcccccgaagtatttagatatcaacccgcagtccgcggtacagaattctgagtcttaggaattcttctgaaataacccctgacttctctggaaatc

SEQ ID NO: 11639 - DNA, 633 bp, Zea Mays
tctgtccttcgtgcctctcttcacgcttaggcggcggccctcaccagcatccgggcaaccgtcaccgacattctcgtgcccgactccactcagtaccctcggtggcgcgaccaggtcctgcagatcctccgccgctacgccctcgccgaccacatcctctctacggtcactgacccgtcggaggactggctcctgatggatgaagtggtgctttcctggatccatggcaccctcacggccgaacttcgggacatcgttcgagtgccggacgataccgctcaccggatctggggtgcccttgaggcacagttccttggcaaccgccagactcggatcctgtaccttgagaccgcttttcgctagcttgctcagggcgatctctctgtggacgagtactgccgtcaaatgaagacgatggcggacactctccgcaccctcggggcccgcatcaccgatgagagcctcgtgctcaacctcctccacggcttgagccctcgcttcgatcgtgtgacgcccatccttacccgcatgaagccttttcccacttttgcggagaccaagaacaatcttcttctcgaggagcttcgcctctccgctactgcgaccgccgctcccgccacggcgctctacagc

SEQ ID NO: 11640 - DNA, 686 bp, Zea Mays
tcggggtcgtttctagtggagatttttgcaaccatgacactctctttgggggacttcacactattaacactgccatccaagcaattgcaacagtggcattataatctatcacaaactaaagaaatgacatcggactctcctgattgtcattagcatatttgtcgtgccggtattgcccctggctctgttcgctaccgctctgttactcccgcacgctatgatctgggcgttgtcttctatctctcgctctctgtgttcgtttgagttcgtcgtttccccaatgcgcttcccttcccttccattctctcgccggggatctccttgcgttgaggtcggatcctgcgccaaggtcggatcctgcgctggtgagatctcctatcgtattccacttgttagctctgtaaccctagggtttatagccatggattccggcatggaatctgtcgctgagctgtgtgcccagaagttctccgtggccgttgaagcaggccgcgacaccgtcaatgcttctgttgccacctgtgtggtagctggtgatctctgcgccacagcatcagtaggcaaccatgtggtttcgacgcttgatgttcttgaatccgttgtggaggcggaaaaatgtgttatgtgttcttatcaacaggccagtgcagccgtcgtttgtgctcaggaacaatggccaaatactc

SEQ ID NO: 11641 - DNA, 980 bp, Zea Mays
agaaaactcaggggccacggagtaagttttccgtgacacagtgaatagtaataggtggacggcgggtttatttctttagaactcagggactctttagcaattgtgacacggcgaaggggtatcgtgatctcagggccgcccgatcttgaatcaagggaccagattagatcttccccccgaccgaaccggtacgcgccgtgagtcgcacgattagagatcaacggcccacgaatgcccacgatccaaactaccccgaaccacacgattgaagttcgacggctcggatttaaaatgacgaaggggtacgccccgatctaatcgtggccgttgaataagatccaacggtcacaagtgatcgtctatcctttgatccccccgacggcacaccgtgccttgccgcggcgagccatcaccggagcggccccgaatccgcccacccgagagctgattcgccaaattagtcggtgcaaaatggaattggggagatgacaaatacagaggtgggattcttaccgaggattaggtcaccgggaggcctgcccacggcgcacggcggaggtcgaagtgcgacgagcaattgctcgagtcccggcggcgttcgacacaaatcaatggcacagacggctttcccaggtagaagcgacactccacgacccgatttcgagagccgaggccccccgacgacggctgtcctcggcggcggcgcttctcggtgtttttcgttcgatgctatggacgagaggagatggctggtcttataggcagtcccgcgaagatctcggcggggttggagtcttggaggtcgggtcgcggactccgttgcccgagatccccggcggcgggtgcggaggagctgttgtctccccgccgcgagcggacttcgtagagggaagaccgagctgacagccccggcccaggtgacagcgagagaggaagggaatagggctgacaacgtgggtcccagttgtaagcgacaggcg

SEQ ID NO: 11642 - DNA, 444 bp, Zea Mays
agcagctggtgcgaaggctggcctctagaaatggtgaatgttttggttagccgtgccagccaactgctggtggtgggcgtcctcgcgctgcatttcagcaatttcttgctccagtgctctggctttttgcttctcatctatgatcatctgccttactctggcctgcatgttggttcgctgcctcttggctgcgagtatctacctttgtttctgtgggtgattcttttttatgcgaagcgctcgtaatttgagttgatcttcgactgaggtgcctaggactttgtcttcttccatgatgtcttgggccttcgtgggggtaaaacctggtgggatgtcgtcccgaggggggtcttctgaactgcacgtgcgactgccttcgggagtgggtgggtcttcggttcggggatgcttgctctttattgctcatgcttcattgttctcggc

SEQ ID NO: 11643 - DNA, 491 bp, Zea Mays
gacccgtgtggcggatgaacaggacggagcgtcttaccagaggtacggcaacgcacgaccctacggacgacgtcgggaggtccacgccacccaaaggcagcaagccaaggtccctcccagtagaatatgagatcctactgtaaagttctcccttgaattataaaagggcagggcaaccttccttctacacacaatcacacaagttgtaacatgacatactgcaattccatgatcaacactacactggactagggccccgacctgaaccagtataaccccgtgtcccaagttcatcgttcgagtccgagcgactcaccattcgaagcgagtctgcgctagcacttgccgaacaaaaatctcattgtccttcggtttttgaaaccatgacaagtcccatacctcccctgctgttatagtctgccctctgctgttaccattgatcgccggcccccagccggtgactgtcccttcctacgcagccaagggtcggc

SEQ ID NO: 11644 - DNA, 397 bp, Zea Mays
cgagcctgtgccgaagggcaaaaagttaaaggttcttacccaccggccgcattatattgaaccggccgtggtgcctgaatttggcggggaggcttcttcagctgctgaaccaagagaacttgttcctcccacgcagaaggctgaagagccggttataatgccgaaggcaccttcggttgaactagttgagacgaaggttgacaaagataaggctgaaaggtcaaaaactgaagaagtaacaaagatgccagggattttaagtccttcaacagaagcaacagcgttgaaggcagaaaagagttctaccacaactcctaagagaaggaggatggtaaatgtgttagatattttagaaacaaccgactccataagtccctctcccacagggaaggttgtc

SEQ ID NO: 11645 - DNA, 392 bp, Zea Mays
gttcgtgcacgagggaggaatcatagactatgcctcctcgacatcatggatcgtgttcgtgaggccttggatttcagggttcactggggcactacgatggctcttgccatcgcatagctatactttaatggccacctccgcgatgctatcggtctgcctattggatcaacatcattggacctagacctcctaacatgcgactttgatgctactacaaacgttgtaattggggtggtgtcggtggaggaaataatcagtgatcttccatagcctcatcccatggcttgattatttatgcgacgtgtatggtttttgggtcccctagatcttggttggtctcaggatttctcttggtctatgggcgcttttcatgcgactttctctcatttgcc

SEQ ID NO: 11646 - DNA, 518 bp, Zea Mays
gtaagaactcccccgatgaactcgcgctaccttcttctgcattttaaagtcattagacaagcctgggatggccggggcgccaaatcaaccgtcgccagcgagtcgccgtcgcgaccgtgttgcacgggaacgctcgaccaccgggagggggggagaagacgaccccacggccgtccatccgagattggacggtatggattcgatcgtgggagcggttgggtttaatcgccggtaaccgtccgttgtgaaatcgatggtcccgattagatcacgagcgcattgatcataaaccctagatctctgatccaacggcctttccaacgtactgattcgttattgcgtctacctaatccggtgcgtcggagctaaatcagagggctgtgatcaattcatacagattcggcctggaaaaattgttaaagagcccctatagtttcctaacatcaacccgcagtctcggttcgttagaatgtaattgcgtagaggcccagaattttatagtttacccccttcaattc

SEQ ID NO: 11647 - DNA, 542 bp, Zea Mays
ggaagtccttacctgcaggaagtttctgtgctcctacatcaagacagccagacaggagaaagaggcgagtatcacccattaagatgtcccttttgatcatcgcccattaaattgatgcaacagaatcaagtggtgaagaaccaaaccagcagctacaaaagcaatcatgaatgatgcacaggaatgcaggaacgcgtggacggatgcttaagaattcagagatgattgtgaatttgtgatactgaagtgggttctgacttcatttatgtcgcctagcatttacatgcgctcctttgtgttttgtcatgactcacaagcactctgcaaagtacatttccctgatcattcaaagggcaatactcgaattagcagttaaaagaaatggcagccacgccaaacaatgtatcacgaggagaagagtagagggtagactggatgccataacaaccaatgcatcacacgagaaaagtagcggggtgaatagaatttgcaactgaacctggacaagtgttcactccaccacagcaccatgtttaatctgc

SEQ ID NO: 11648 - DNA, 297 bp, Zea Mays
gttaacaactctaagggtggaccggaccaggaagggacaggagatgaagctgttggagatgaagggaagctggaagttgaagctgtccagaaattaagaagaggtatgcgagcaaggaagctgaatccaaaatacattggtgccaactggatgtaatagaattacagggttgttagactgtggttttgctttttgttctcaagtataaaaggaaagcatctgcaatattgtaaagtggcttttggcattagacacaactgaacttggaaagcaagaaagaataaatcgcatactctg

SEQ ID NO: 11649 - DNA, 475 bp, Zea Mays
tcaccgttgatgccttggagtatatcaccttctctggacacgtggcagctctaggcccacccatgtggtggagtcgggcgcttctgtggacctagagtagtcgcccgtgactggggcgagccatggcctggtcccacacacagcacctttaccacacgactaagagatagtcgcgtgggcactgcgactttatactgtagtaaggggtaccctagtttcagggtaccgacagtggcccccgcgcccacctcaagggaggatgcgagcctgcaggtggggccaaaacttgtacttcgcctcaatatggcatgaccagtgattggggcaccatcttagcacgcctgctgacacaccgcattaattcagcgtatctatcaacgcacgcactgtcaatctgcctttggtcacatcaactgccatatctgtccctgtggctaactgacccacgaccccacgtctagcggttccatcaggc

SEQ ID NO: 11650 - DNA, 336 bp, Zea Mays
tagcgcagcaaaccatgccgtcaatttataggggcgctaagcggtggctagtgaatttggtttggcgtggtggcggctggagaggaagaggggcactggcgcacacgattggtggccgcaaccgtggcaacctcaccggcgatctctggacaggtcagtacgagtcacggtggtgtggttaaagtgctgtggcacgtggcacaagaccgcgaggtttgtaactccggcgagggttgattcaaggtgatcggggtagagcggacacggcggccggacggaacagtgccttaagctcatccgcggggaagatcttttcaccgtgagacgttatccgag

SEQ ID NO: 11651 - DNA, 338 bp, Zea Mays
ctcgctcacgccgccgccgtggggtggcctgctcggctgctggctctgggtcatcggtaaccatcttgggcacttcctgggtcacacagaagaggtccgtgttgtcgccaggccagctcggtgggtgaaacctcgccaatttctcgccgtgatttgcaagtcgccgtgaatccgcttctcgtcgtgggtagcttcgttgttgccatctccagccctggtgagtagcccatccttttggttgcactggtggtaacgcgtaggctgtcgggattgaggtgtaagggcccttaaatctagaattggccgatgccagccatgaaccaccggatttccgggcg

SEQ ID NO: 11652 - DNA, 727 bp, Zea Mays
agcaacctcgccttcggcgcatgcggcatgcccttccttttcctggtggacgcgcgggccaaggtcggtggggtgtgtgtgtgcatgtacataaacataacacaaaccttcgaatcaatcttgggtctacagtcacttggtttcactcctgaacttcgatgaggcgatgacccaaattcggcgcaatgggggtgttcggcgcgacgccggcggtgaggtagacccaccactaccatggcggaaaaaaattggtacagcctgaatgcaaatcaaagtgtttacaacccctcactaaaaggataatacaccccacccgcagcagcagcaacaacaactaaaacgttatccgggggatctacaggtgggacatgttctccttttcgtgaggagcttcaaacaccctgggttgcattcgggttgcaccaaattttttttccccaccatggcactagatctcggtatcccccgaaaataagcaggtgcacgggcacgtgctacgacgcgggcatcgtggtcgtggccttggacgttcgatctggtgatcttcgtcactctgctggacaccgacggccaagttgctaacgcatggtgtgacgatgacacacgtcatgtcagcagcacttggtcggatattccatagttcaatccttccctctggcccgttaggccgtcgcgagacgtacgttacgtttggcgtgacggaggtggaccatgtgcttgatctggc

SEQ ID NO: 11653 - DNA, 879 bp, Zea Mays
tacgtgacttatgtcatggttttggaaactgagggacaataagatttgtgttcggtaggggatgctagcatggactcactccaaatggtgaatcgctgggactcaacgagaaatctgagacaatgggtcatactggttcaggcttgcgccctactctagtgtagtgttgatcgtattattacttggaacatgttacaacaagtgtgcttgtgtatctagaaagaaagtggcattgtccttttatagttcaagggtaagactttacactgggggtttgtattctactaggggtgtccgatcggttgccctaggatagtgtagtcctcttgacgtcgtctgttggtcgtacactgtcgtacttttggtatggcccacctctttgtccgttcggcatacgggttcctgtagcaagtttgatgttgacgtagtggcatccggtgggtcccacatggcagacttatggtggagcttagggtcgtgtttggtgcggctccatcttctgtcatgaccaccgcgtcactttcagcatgcgtatgcatacacccgatatggtatatcatcctgtcctttcatgtatgtgggtcactatagagactccatcgtggaggtccctacgatcggggttgaccaaccccatacgactgtgggggctgagactgtatgtgatgacatatagttgtgtttgacagggacttttcgacaccgcacttgtggcctagatgtggtttggtggtgacgcgtcttgtcgtggtgacattggtcagcagcattgggtcggccctatcatcttgctgattagcttggcacgagacccagtcgtttgccccgtctcatgggattgctcggcagaaagttggtcgtttgttccgcctcgtgggg

SEQ ID NO: 11654 - DNA, 534 bp, Zea Mays
ggattctccagcatagcaagacctatgaccgaacttctcaagaaggacaataagtttgtgtggaccccaaagtgtgaggaaagtttccagatcataaaggagaagctcacaaccgcgcccgttttgacactacttgatatacaccaggatttcgtcatcttctgtgatgcctcaaggcaaggcttagggtgtgtcctgatgcaaaatgagaaagttattgcttatgcatcccacttactcaagccgcattagcagaattaccccacccacgatttggaattggcagccatagtgcatgccctaaaaatatggaggcactatctaattgagaacaaatgccacatcttcactgatcataagagtctgaagtatatcttcactcagccagacctcaacctccgttagagaagatggcttgaattgatcaaagattatgaccttgagatccattaccaccccggaaaggccaacgtggtagcagacgccctcagccgaaaaccttttgggataaagggaaccaactttttagaagat

SEQ ID NO: 11655 - DNA, 365 bp, Zea Mays
ggctgaagaagcgtactcgtcgtggacagaggaggaggaaggttgccggtgctgtttctggtcaggaggagtctgttcattcgcctggagggcctgctcgtgttgtgaagttccttcgtcgatccagggaggttgatcatgccgaggctaaccttcgtcgagtgctagtcgtctctgttcttgggccagggagctctgattgcgccgcggtggtgttggagcagctcgcatcaagggtttcgcttgaagctgacgcgctccacctacgacgtgctgtgtcgaactcattcctggtcttcttcccctcggaggagctggcttcgcgtgccattaatgttgggcagtcgcttttcgttccccccgtc

SEQ ID NO: 11656 - DNA, 571 bp, Zea Mays
gttggatggggctgcggcggagacttcgccgcgtgtggagggtgccggggatcttcctagtgcgagtactgggtgtaggcggtgaagggtggtgggaaaacatagtgtgggtgaattttcgcgaagtggcaggcggcgtcatatgggtatggagcgtggctgtcttcgagtagaccgggttggtaaaggagaattgttgtcctcgccgattggggcgagcataggcgagggggatcttcggaagctttttgagggtgaggaattgaggataatgttgtttaattatagggagatgggtatcatctcgaaggttgagccgatgtaatatgtgatgccctcgtcgtgtgtatgtaattgtaatttgtatggtaatgtggcatgtttgccgtattcgtacgcctgtgttggtccggctgcgcccgtgggcgaatttgcgcggagtgtctttttaatgagagacttcgattaacgcgcttggtgttctattccggctgcacccttaggtgacttttgcacggagtgtcttttaaataaaagacttcgattaacgcacttgttgtgctattccggc

SEQ ID NO: 11657 - DNA, 574 bp, Zea Mays
ggcagcaggggcaacactggaacttcccgcctcatgatcatgtgagcgaggtggcacaggaggcagggatcccaaggtcatcatcatcatcatctgaagaggtgtcagcaactataccctgggtctcgaactgtctgaatgcctcatcctcagcctgaatatctggacctggatctggtactgggactgggtccttagggactggacgatatgaaccaaactggaggcgagaggcctcgagggtgccctggaactgaggcggcctgatcagctacgcgaagatgtgatagaggtaatgcgcatacggcacctgacggcgagcacgaataccatccaaaactgtgtcctcaatctcacagataagaaaatcaaccacgtcaaactctgaatctgtgatcaaggcaccaagaagccatagctgaatatgtgtagtggcctctctataacccgtcctaggtagcagtgaccgtctcatcagctcatatagatacttcgctacaggggtgaagttagcttggagagcgtagcgacctagctgtgaaaggaggtctgaacagggcagcgacgtgagcta

SEQ ID NO: 11658 - DNA, 416 bp, Zea Mays
gacggcggaccacggcgaccaaattttacctttccccactttgacggtgaagctgaccccttgccttggatcaacaaatgcgacacatattttcgcggcatgagcgttcatcaagatgagcgggtttggcaggcatccttgcacttggaaggcgtcgcagcggagtggttttatgccctggagcgtgacattggttgcgtactcacttggtcaaggtttatagaattcctccagatgcgttttgggccaccactccgtttcaatggcatggctgacttgaaagcattgcagcgcaccggcaccgtcgaagactacactcgaccgtttttaacaatcctgtgccgttgacatgaatcatcggcagcagaccaacatgtacacagtaggattgggggagcccctacacactgatgtgg

SEQ ID NO: 11659 - DNA, 608 bp, Zea Mays
tgccattgccttgcagcattcacactgttcgtggcggtgaccttcccgttcttcggcgacctcctaggcttcttcggagggtttgggttcacgccgacctcctacttcgtaagcagctgcagctctgccttccacgctgacacgtaccatagcagtgacgactgacgagactcgttggaccctgtttgcgcagctcccctgcgttctgtggctgaagatcaagaagccgccgaggttcagcgcgtcgtggtgtgccaactgggtaggcgacgaccgccacttcttcttcttcctcgcattctttggctttttcaaactgggagagagtccagagctgggactggcctctgcctgctcaccacttgcttgctccgtccgcgtctctttgtcagggctgcatcatcgtcggagtgctgctgatgcttgtgtccaccatcggcggcttacggagcatcgtccaagacgcatcgacgttccagttctactcctgaagccctcacacttgcatgtacctctacactcacatggttccagcaagtcgtcaccctcgctcgtccacgcagctctacctctacattttgttgcaagcttgagggtgtccgggtgtg

SEQ ID NO: 11660 - DNA, 720 bp, Zea Mays
gaagttgctcgttatatacgcgccacggcgccatcgacctcgttgttcgcgtctgcaccatcgtcctcgccctgaactcacccacgttgtcgtccattatttaccacgagaggcccaatccaggatgagtggtcccagcagccgccgactcgagcggacccacgccgccacggccgcgatagacctctgctcctcatggaatgagcaaccactagctccgatgaagtggcgctaccactgcatatcgtctggttcactctaagcaatgccagcatgatggacgagagatgagactcgatagggatccgaggaggttgttggtatttggtagatgtcgtgcagttgaaacgttcgacatgatgcagcaccgacagacgtctggatggatacacatgcaatatgttcgatgaaatgcatgttcgagatgctgtgacatagaaatccatcctcacctccgtctttgtatttgatttgatatgtaacctcgaagatagcagcaacttgtgtttcttgatatgttaatttatattttcttgctatttttctccattttttgtgttttggtttgtcacaacaaaagacccagtattggaatcaatgacccacgttctcctgtagcaggcactatgaagatggcacagcagccatcaggcatggcgaggttgacagtagttgaggccacaacccttcccgatgtccatgtacgtgactaggttgctc

SEQ ID NO: 11661 - DNA, 532 bp, Zea Mays
gccggcgctacgattcgtgcccagtatcacgcagataacgacccctggtgaaaagatctcgctgtggatgaactcggagcactgtggccgctctgtcgcccatccacttgccggcgacgtggccgatcggtcgtcgcaggggtgtacaccattcaccgtaattgtgtcacgtcgtgaccctttcaccacttcgtaaccagccatagtagctcgccagtgaccgccgtagctccttagcctgtgactgccacgatagttcacgtcagggaccttctcctctcaccggccgccagcgcgatttcttcaaattgggcgccaccgctctcggacactataaattgaaggtgtcgctagctccgttaggttgtcacgaagccagagcacccgccccggcctccgattagccactatagcgccttaatttctttcttcccccaattcggttctcctcgccaccgtgagccaccgcgtcatggaccaccgtttccaggtctgttcataccctccttgcccttgtttcagcacccttgta

SEQ ID NO: 11662 - DNA, 671 bp, Zea Mays
gaggtgttgggcaatcccacaatgaagtccatgctgaggtcctcccatttccaagatggtatagggagtggctgcaaggtacctgctaccttcaaatggcttgctttgaccctttggcaagtgtcgcactcagatacatacttagcaatttctctcttcatcctggtccaccaaatataaagatctgagatcatgatacatcttgttactccaggggtgcatggaaaatttgaaatgatgagcttcgtccaaaattttcttcctgagttctgggtccttggggacaaccagtcggtcttcgaaccataaaacacccttgctgtcccgacgaaagaatttatacttatcctccttttgattgagcatttccttaatgacttgaacgcccttgtcaccagtctgtggcacgattatctgctcttgtaaggatggatcaactgagatatactccaaggtacctggggaaaccacttccatgttcagcttgcgtagctcgtcgcacaaagcggcgaccttagagtccatggttatacagttgcactgggcttttcgactcaagacatctgctacaacatttgccttgcccggatggtagtgtacttctagatcataatccttgatcaattataaccatctcctcttcctcatattaagatcagcctgagtgaaaa

SEQ ID NO: 11663 - DNA, 320 bp, Zea Mays
cacacggcttggcttccaggccaaatcctacaggtcctgttgcatgaatcaaaggatggctgataccagacgatgggtcctaatgggtgtgctactaacacttcctagccaaagttgtgtgcaggtctaggtcccagtcaaggctacctcctggggaccgggacaccaactctttcttaggtatgctggtatctagcctcaacacgacgagcctacgtcccaggggggccaagtaccaggagaggagttgataaaaccacacacaacaagaacaagcaccatacagataagagttgtttaattgatagttcccaaaagta

SEQ ID NO: 11664 - DNA, 536 bp, Zea Mays
ctaggctttccacctgggaatttaggtgggtgcagtgggagaaaaggtcgtcatagtggttgtcaagggtgtggagatatctggccatgtagactatggtggggtcatcctcattaagatctctccctgacaaggcatgaagtcttttcctccaggtaggggtgtttttgttgctgggtgggaagtagcgaagtggtgtcttagagacttccctgcagtagttttggcatagctggtggagggctctttgggcagcattttggcaagtgtctgggaagcgatgtccagtggcagtgacttggaagggagggtgatttgggtagtttcggctttctcccaggtagactgccatagagcatttctcaattccgttctcacggtattccttccagacgtactccggcttcttgtggatccctatgcgaagcgcgcaactccgtagaagatgagggaatccttccaccttcgagcagtaggatgtcctaatgacaaaggagccttccatctggtagcaagagaagaagggtttgttaata

SEQ ID NO: 11665 - DNA, 333 bp, Zea Mays
ctgagtcccttcaggaaacgggccatcttcttgccctcggtactgacatcatctagcgcgtagcgggctaactctgtgaacttgtgcacatattcgctgacagatcttccgtcttgagtcaattctcggaactcgtcctccttaagctgtacaagtccttggggcacatggtgctcccggaaagctgcttcaaattccgcccaggtagcatctctgatggtgacgttgaaggtgtcccaccaggctaaggccatcccggaaagttggtgggcagccagttgaacacgctgattttctgggcaaccaatggcttccagctttcttttgatcgtg

SEQ ID NO: 11666 - DNA, 707 bp, Zea Mays
agggtttggaatttcaccacgtggaaagggatcacaatgcagcagtagacgtgttgtcaaaattggggtccagtcgagcccaggttccacctgggattttcgttcaagaggtacaacaaccgagcatcaccgcagagcaggctgaggagtgcaatgttttaaaccaagtagaagcatatcccaacgattggagggaaccaattatcaagtacataaaaaacgaggaagaaccatatgacaaggccacggctgagcgcattacaagacagtcagcccactatgccatcatagggagtctgctgtatagaagaggtgcaggaggaatcctcatgaagtgcgttcattcagctactggaaggcactttctggatgaaatcaatgcggggcaatgtggcgtacatgcagcatcaagaacattggtagggaaagctttcaggtccgagttctactggccaacagcgaagaatgatgcagcggagttggtttcgaagtgcgaagcatgccaattcctatcaaagcagcaacacttgcccgcccaacatttgcaaactattcctattacctggccctttgcatgctggggctggacatgattgggccattcaaaaaagctcaagggggatatactcacatactcgtcaccattgacaagttcataaagtggatagagtacaaacccatcgtctctttaacctcaacaaaagcag

SEQ ID NO: 11667 - DNA, 358 bp, Zea Mays
cccgggtgaagatcctggcgacggataagtttggattggatcaacggggagttcaccgcacccgctcggattgcagctggccgaattggtcctcgccggcgttagccatttaccgaccatgcaccacgtgcccgagcatctacccacgtcgtatttagtcgtgttgagcgtatccggtgattgccggagggcttgccacggtaataggacaccaatcgcgcgcaccagtaattcctgttttctccggccaccgcgcgtcttcgcccaaatccctggccaccgcttagcgatcctataaattgatggccatgtctattgcgccatgttatcacgaagccaacgcacccacgcttgcctc

SEQ ID NO: 11668 - DNA, 464 bp, Zea Mays
cttcggtccccctgtacaatatgataggggaggttttgaaaagatttgaaatatatctccatcagctgacaccgaataccattgttaggctcaacatttacatatggggtctccgaagccaaggtaaaagtgcaaatgccaaagggttctgtcgatcgcacgaactgcactatcagacgaaggccagagccgatggtctacacaagaacatcaggtgctataatcttacataccagaaggataccaaggccccggtgattggctatcgtactaaatggccaaccgggtggactaatgaatgattttacgtgaaggctgacgagaagaagaaggagaagctcatgactatggtaatgagtcctctaagattaagcttcggcatgacgaggccactattcaacatgcaactcggctccccatgccagctgggcgaagtagaattcagggtggtagctaggcatact

SEQ ID NO: 11669 - DNA, 584 bp, Zea Mays
ctaatgctgagacttgcccctcttgtgggctggacgtccagtgttgcccctcctcgcgtcctggccacgaggctgatcaacacccgaagacttctgcgactccatggtatactggtgttgcatctccacacccagtgcctgctccactttagtacgaaagtccaccaatggaaaggctcctagggcatgcctgatagaaggtttcagaccctgacggaactggctggccttctccatctcattataagccacatgagggacaaaacagaccatattgttgaagcccacttcatactctgtgaaagacttcttctcttgcttgtaggactgcaaatcaatcttcattttctccaggaaggtgaccgggtagaatgtcctctcaaactgcccgataaaaacatcctaggacaggactcctggtgaagaggagtgagctgcttgcatgcccctccaccaaatctgagcttctcccttcagcagctgttttccaaagcgaacacgatcaccatacacaatctcaaagacattcatcttatcctccacgtaagttagccaatccgtcgcctcgaccggagtaccactgc

SEQ ID NO: 11670 - DNA, 949 bp, Zea Mays
gccagatcaaggacacttgcctatgtttaaatgcctcaagtacttggttccagtgaagttcatcccagccctcgagttctagccctgggtcactgctagtacgtggtgatcctcgagtctgcaagcctatgttagctcccctcttcagttccaggtgtgcctagccttgtgttcgcgcaccaacctctaccagtggtgaccatagccactagattactcacctcaccatggccaggacattccagggagttgcacggccgcgtggtccacgttccaccttcttcaaaggtcagtgaagctcttctagttggtagttccagttctactatcgtgtgttgcttggaacatagcggcgccgtcatgggttggcgccgtaggcagtctccacatcgaactgttaagccgcaccgtcccctgttggtttcacgcacgcatcgtagagttgagaggtctctgaagctccccatctcatttgtttgaacactaccgtgcggtggtcggggaattgagttcgtcggatccagtgttccgccgccgccgtcggtagctagtggtagagtcctctcgggtcgattgagcataggcctaagttcaccatgggttggggatcatgctggggtcgtcgccgttgtctgtactgcaccacgatggccggaccggcgctaggtcgccggagtttcgcgtggcagcgtcggtgccgagaaattgtaaaagggagatagacgtggggtgtctgcgcgattgtcagtggcacaaacaaatagtggcaggagctcgggttggttaagttggagcacgagggctttagcgcaaaatggccagtgcggacgcgggctccccagccgtgggccgactctgcctggaaatgggccgactaggtcagtttcagccgagattaaggatttttctttattcttttgtctgagagattataagagttaccaaaaat

SEQ ID NO: 11671 - DNA, 408 bp, Zea Mays
aacggttattgtccgtgtcaacccagacattattgggcgactccgcagcttcggctgctattcagactttgaactctatggttctgatttctcagctgaatggtgggaacttcgctgctgcagtgggtattacctccgaagttgggaggatatctttggtagattcaacagcctcatctttgagaccctagcatcatgcagtatagcagccctctccaaagtatatgactttggacggtgagtgacgactttcattctctttggttttggcgaggtagaaggcgtcgctaatgcaattctctttttcgtcccttgcttccgagccagaaagcagtaatcaggatagacaaaaccgatgacatcaaatactctattcagccttttctttccacgggcgccgaaggcgac

SEQ ID NO: 11672 - DNA, 323 bp, Zea Mays
tgtgtcagagcaagtggcggaggagaggaacgagttgtttcaaaaagtagaagagactggtcgagtggtggcgcaattgaggttggagaagatggacagatagtttggagacaaatcgaatgaatcggaggagtgtggggatgaaccgtaccaacgtcgtcgactacctcggttcgggaagcgggtggatcatggtggacccatcaagtgtatgacgttgggactctagagtgtatgacggatgcatcctgatcagggtcgtcaggtattgccaaaactatcattctcgacatttgttggagaggatccggtggtttggttgg

SEQ ID NO: 11673 - DNA, 583 bp, Zea Mays
tgaaaactagactttgatctaactttttctcggtgcttcaccactcagcccactccccacccgaatcgtggtgctcgtcgccacgtcggtatcctgcacgcagcacaactactttgccttctaatccgcaccgacggatgggtaggctattagtgggattctaccttggcatcacagcaccacccgccctcgctatctcacaagggtctcatcatgccgtcgcaacgcgacaatggctgacgcttgctgccaccgccttttgcctcctcgtcgccatctaccgtagcgtcatcgcctgccctcgctatcccacgcctattgtcgcctcaccgtcgtcattttgcggtggagtagctgactctccataccgacgtgttgatgcgtccgtttcgctctaacgtcgagtctccgccagtccacccctttgttctctccaactctcctttagggtggccaaaataaagtttcggtgttcatgttattttagaacactactcatattatcacttaatctccgtgttattatcatggaactatttttatcaaatggtctagtatattgatttgtctcctacgttatcgt

SEQ ID NO: 11674 - DNA, 598 bp, Zea Mays
gttgtatgtcgtttggagcctgagaactcaacctagtcgagctctgcatggaaacacacctttcttcatggtctatggttcggaggcagtgctacctgctgatctcaagtttggggcaccgaggttaatctttgaaaacatagcagaagctgaagctactaggctggaggatgttgatgtactcgaagaagagcgactgaatacggtgattcaatcagcacggtatcagcaaactctgaggcgctatcatgataaggccatacggcatcgatccttcgtagtgggagatctcgtcctccgctgaattctaacgggggagggacgacacaaattgtcacctctatgggaagggccattcatagtagcaaaagtcactcggccgggatcatatcgtctcactcagatggacggcacggaaattgggaactcatggaacatagaacacctcaggaagttttacccctatctatatctcaaaggctgctgagatgacaatgaactctgtaagctgagaaatgtatcatcaataaaaaggcttcaaaggcactcaaattgtttgctgtcaattggcacgcttactaaactcggggtgaccact

SEQ ID NO: 11675 - DNA, 609 bp, Zea Mays
gcgacgaagggatgagtcagtccctaatctcagccaccggctagagatcctacggtgcgtttgacatctccctcccccaaccacaaccacggtggtcgccggccatcgcggcggggtcttcaccggcgaccaccaatctgtggcctaggtaatcccaactccaatttgaaaggcgcaaaacgaccaggggatgaagatgaagccagaggaaggaaacttaccatccattataccgcagagccatccacccacgactgggcatggaatcgcggtggagcataaacatcagtgagcaataattcgccccatggtgcaactccaagctcaatcgtgcatgcagtaaggtccacatgccctggcgacgcttcctaccctgcacctgagggcccaacaatggtgaatcagactttttctccccgcggcggacgcatcacgcttttcctctctctgcctctggttgccgatgcagctcggtgctggttttgtgtgcttctagcctttggtcgatgggagggtcacggggctccgtgctttatagcctcgagaccgaaactcgcgcccagagtggttgtagcagttcgaccggatcccgcgacattggtggtcgcc

SEQ ID NO: 11676 - DNA, 318 bp, Zea Mays
ggaaactgcagggaccccggggtgaaatttcttagactcagactgcagtgatcgtggactgcgggttggtttctataaaacacagggtctttttgacaaatgcgacacggcgaaggggtatcctgtgttttcagccgctggatcacgaaccgagcgcctggattagatcggcagccacatgaaccggtaagcaacacgggccacacgatttgaaaggaacagttcagattttattaagctagagtcactgagatccacccgatcgaatccgacggctacggtttactcacgcgaaaggggattcggggttctaatcct

SEQ ID NO: 11677 - DNA, 344 bp, Zea Mays
gcggttgcaaccgctgctaggccccgaaatcgtaatccctaggggtatggggtgtttttatagatgcctggacctggtttgactcaaccggatggcgagtctggccagagcttcctctagctattggaactctaggtctttatatatagcagtagagagcccaagaatgaggtcacggttaacaacaaccagaacatcatgcatcagactttctgtttgcaccggcagcaaaaatagcacatgaacaccttcacaccagcagatgcacgacctccaatcaccattggtagatggcacactacaatacactctcccaatccactacaatatagggcttcatatcg

SEQ ID NO: 11678 - DNA, 418 bp, Zea Mays
tgcgacgggagtcctcatgaagtgcattcactcggctattgggaagcagctattggatgaaatccacgccgggcagtgcggagtacatgcagcatctaggactctggttgggaaggctttcagatctggtttctattggccaacagcgaagagtgatgctgccgagttagtccagagatgtgaagcttgccaattcttaacaaagcaacaacatttacctgcacagcagctgcagactattcctgtaacatggccatttgcatgctgggggctggatatgattggacctttcaaaaaagctcagggaggctatactcacgtgctggttgccattgacaagttcacaaaatggatagagtataagcccattgcctctttaacctcagccaaggcagtagaattcatacaagatataata

SEQ ID NO: 11679 - DNA, 404 bp, Zea Mays
agaatatcttgttgagcatcggaggctcggggtgcgggatattcagcgttcgcacctgggtcaggttttggtgcagtttaacagcgtgctagatagagacaaccttgttttgcttgggcctcagcaatatcttgatgccaccttcactactcaaagacataatgatgcctggaaccacagggcactttttttaaccgtgagtgctggctaatgctgttgggatttcccctagactatcgctcctccgagtacttgtaggctgccattggctcttttggtagattaatcttgtgggaggaggacaggcacaatgtgactaggactatgcttagggttcgggtcacatctcttgaggaagtcccccagttcattgtcttttctgaagcagatggtttcctcggaga

SEQ ID NO: 11680 - DNA, 599 bp, Zea Mays
cacgcacacgcacgccgagacggcagcacccaagttgcctccccgcgtgaaatcgctagcctaactccctttgaagtaaccacacgcgcccacttccctctctgcctcatttctttcgccttagcgcacccacccgatctgcagccgcccacgcccgagcttgccggagctctgtcgctaccgcgccatttgtgcctcggattctccacgacaaggtcgcctcgctgtccctaaccgtggtccgccaccaccgaacggagcaccgccaccgtccacgcttcacccgaggtgaatttccctgtcgaagatccctttctctctccccgttctccctgctctgttgaatagccagcggcgatcaccggcaatggcaccgtgcggttgtgccagggttctccggccaaccgcaccgccccatgccctcccttgcccatgtgaagtcaccggctccgtccatggcgatcgctccgtgcacgcggccaaggttgacagcgatcccgaccagtgggccctacttgacagcctctctgtgcctaatctctcccctccctctctgggccgctgacctgtgggtcccgttcgtcagagcgcgcctgtgc

SEQ ID NO: 11681 - DNA, 496 bp, Zea Mays
gaagaagatggcttgcaagaagtcaaggttggtaaagctgagaagagctgtcggagaaaagatccctaggcccctggggcccactagtcagcaaaaggacaagggaaaggtctaccccggtagcacccacccccagatagtcccgaggccccgagcctaggatcgagcgaggcagagccaaagggggcgagagaattgaggggaagccactagtgtggattccgcgccttatctaagactaaaccgtcgtaagtgaccgaccacattagctactccttgcactgagccaccatgggagagtcgatcctcttcccactcatgaactatgggtccttagacctacggccactcatgacctatcaaacctaggcctgggtgcactggctgtctataggatccgcaagatgatgagcatgctgagagcatgagacctaggctatggaggccaagggtcggcgtggtgcagaggcgataataatggtgccagagctcttcg

SEQ ID NO: 11682 - DNA, 819 bp, Zea Mays
gcattaaataaaataatgaggataaaaataataaggtaataattatttgaagtttgattaaaccctaaatttgaaaatagggttttgaaaataagaagaagaggaatgatataaaaatataaaaatccttaaacttaatacttttaactgtacaaacatagtgtaaatgatgagccataaagtttgaatttaaacttgaattcaaattggatttgaaaatggagaaaaagaaatggaaaagaaaagaataaaacaaaactaacctaattgggccccgactttgttttcggcccatctcctctttccttctctttcgcggcccactagctgactcaatcgcgcgcgcgcctggtgacttccatgcggatcccggtcgccagccacccaggtctttccaccagcgtcgtgtagtctctgttgcgtgggccaacatgtcagctctcaccttcctccccacgcgcggaatccgaggtacggggaggttgttgcgggcgtctcctacctcttggctgcgactcgaactcgtggctggcaacggaatccgcggatctcacgcggcagagaacgctgggctcgcagggtctttgtcctcgttcgtcgctggcggagctcaacaaaccagggagtaaaatccgcgcggggatctcgctgctgctccgctcggacttccttgccccctataaggcccgcctgaactgccatggggctcgaccacggaggtggtccgtcttctatcacgagccgggcagggcgccgttgcagggtgaagctcgtgtgcgttcgggattcggaaatcactgccgccgtggctgattttcc

SEQ ID NO: 11683 - DNA, 680 bp, Zea Mays
gcactatagactgtccggtgcgcccatatcgcgttttaaaaaacggcctccagcccgagaccgagctagaggctctcttctccctctatgctctctgtgctttgcgattcctccctctctccgacgatcccccctcaccggcgtccaccgtctccggccgtgctccggcgacctcgaccagtgctgctctcctgccctcgctcggtgagcagccttgtcttctcctctctcttccctctgttcaactcagtgagaccatttccaccctttgtgctcaaattcaaatcctgtgaattccagtgaatccttgttgtgcaatgtgttcctctgtgtgccttgagcattcctgcaggtcttagctccttcgggagggttttcacacctcatatggccatttctccgaaaccctaaaacttcgccctccacctgttcggtgaaatgcccaaaccagccaaaaatgctccaattgaacccaaacttttcaggcactttcacaacacctccagtaacatattcgccaaatctcacgccaatccgatattccaggcttaaatttcaccaaattccctatttcgagcgatcgtttccgagccgagtgcccaaatatctttttcttcgcctaaattcaaaccaagcacacacttcactcatattcacctatataaacctattcgtgaagt

SEQ ID NO: 11684 - DNA, 454 bp, Zea Mays
gaaaccactccagagccgaaaaatgatgaagtagtagttttcaaaagctttttcagggcagaattgcggtttccgcttcacgagatgattggagaagttttggataattatgaaatctatcttcatcagctgacccctaacgctatcattaggctcagcgtcttcatctgggcccttcaaagccaaggaatggacccaaatgctaaagctttctgccgagtgcatgaattgcattaccagacgaaggccagagaagacgggttacatgaaaatttcggttgttataacttcgtgtatagcaaggatacgaaggctccgatgctcagctatcgtaccaagtggccaaccggctggaaaagtgaatggttctatatcaaggctgatgagaagaagagggagaagttgaagacgatggtcccgagcccacagagtttaagcttcggactgactaggc

SEQ ID NO: 11685 - DNA, 364 bp, Zea Mays
tgactggtgtccggtgaaatttgccactccatgccacctccacccagctcctctctactgcagggtttatgaccctacgttggtccaagggttgtgtcggtggaactctaagggaccgccgaaacctacaaaattgtaaattgtgcactggtaataatatcaatccaacaaaaatagaactcatcgtcaaaataaaaatacctgaagtttgttgcctgtgtcgttgtaacaacctcgtcatcggcctctccatcgtagtcctccccatagtcatcatcatcacgcatcggtgaaccttggcctgccagctcgtcctcctgcctaggtgcattgtggtctgccgcctcgcgctcttgctcaagtg

SEQ ID NO: 11686 - DNA, 1059 bp, Zea Mays
gccaactatcggtgcttatgacccaacgatgcaccacgaggttccccacatgatgcctttaagcaggatggcgtcattgattgcgactcgatggtacgtgaggatgcacgtcggatcacacaagggtttatacaggtttgggctgctacgatgcgcaacaccctatgtcctatctaggctgagtatttgagtatcactggtgtacatgggttacagatgagctgtgggtggtggagggtgagttctcctatcgatctagtggtggcctagttgctatgtgaaggctaatgatctatgaggtggtgacgggatgtgatgagatgaaatgacatggcatcataggggtaccccctcggccttatataaatgaccagagggttatccctttacaagtcatgatgactatctaactctatctgaatatatccttttagcacggcatgcattccttcttatctggagttcagctcccaatcatccgagttatttccgagtatctagctcttctagtatgttcaacctccctgcctgaggtaccagcgctccttctgcacataacttggttgtccggtattcatctccctgggtcaagctcatccagtctggttgcggcctgagggcatgccttgctaggcaagtcatcgagaggcccatcaagaggcccatggagcgtttctgggcttccgcctaaagtcagcctcgggtgaatcgtgactgcatctctcactcaaggttggccttgggtgagccggaacagtgtgttctgcctagagctacccttgggtgagtcggaactgcatctctcgtttgaggttggcctcgggggagttatgactgtgtctcccgcccatagccgaccttgggcgagttggaacagcatctcccatccgagctgccctcggacgagttagaatgcatctcccatctgaggttggccttgggcgagtcggaactgcatctcccatccgaggttggcatcggttgagtcagaattgtgtttctgtgctcataaggacccaggggatatccatctcccacatccaccgcccgttgttctcc

SEQ ID NO: 11687 - DNA, 401 bp, Zea Mays
gtttagggcctgcagggcgaggacacggtctccgtcgatgagatctttggaggtcggttcgttgacgttggggacaactgatttgtttgtttggggggacccatgctttaactcttgcggtgtcattgcttcgaatccatacatcaggcgaaagggtgtgatcccagttgctcggcactctgtcgtattcagcgcccatatgacttcgggtaattggtctgcccatttgccctttttgtcgtcaaggagccttttcttaatggcgttgaaaatcttgtcgttggcgcgtaacgacgcgttcgacgatgccgttggattttgggtggtagatagaggcgaagactggctttgtgccaatggaactgcagaattcctggaagtcttagctgttgaactatttg

SEQ ID NO: 11688 - DNA, 499 bp, Zea Mays
ttaaggaactataatctcatctaggagatattctctctacataggagagtgttcattcgtcagaaatgtattattcggtacgagatttatatgttgcatatttataattcaaagatatgtgtcctcctaggatctcatgatggatcttcagaatcctattaactgcatattttaattcatgccatttgccagatatattacacagcggaacagtgtttattcaacacatatgtggggtgggtctctcacaagaccatttgaaccatcgcattcaccacacattatttcaacagtgcccataaatgtccgaacttcaagctcgcgactttcattttacgattattgattcaacctcgattgcatttatcaatgacccgataagagagcttcaagcactcatgcctaggactttgttttggatccctttgcaatctaaagaggcaagatagttgtcgacatatttgtctcccacatttaataatgatctccgtcatttacc

SEQ ID NO: 11689 - DNA, 480 bp, Zea Mays
gattttctcccgaggttcacttgcttgccggcaagctacgtccccgttgtgtggaccaacaccccatggttaggtggctaataggcattgcacacaagcctagtccaacacttggacaccacaagaacctaccgccgagtgaggtaactcaatgacacgagcaatttactagagctaccttgcggcactccgctggggaaggtacaatacccctcacaaatccaccggagccggccacgaacaatctccacctcatgccggacctcctccgctactccaagccttctaggtggtggcaaccaccaagagtaacaagaaatcccgcagccaacacgatctctagatgctcaaactcaacacaaatgcacttggatcactcccaaactcacaagtgatgatcaacacatgaactagatgagtgggagagagtggaatatgctcacaaggtgtatcaacaagatagagagccaagagggccag

SEQ ID NO: 11690 - DNA, 928 bp, Zea Mays
acaccagctacgcccctcagccccggcagatcccggtctacccagtggtagtcgaggaagttccggcggatctccctcccatccgagtggagaatgtagtcatcctggaggatagctcggaggagcagctgccgacccccaccccgttggcagagtccctggccttcgcagctgggtcatcgatgtcagcactgtctgcaccagccttccaagcacctgcacccggaggagacgaccccgacgactccgaagacgacgatgatgaggatgacgacgacgaagaaggtggggacgaacacgtcaacgaggaagctgactacgcccagcaggacaacttcttggggtttggtcctgttgtcgaatattacacatcaatgttcgagacggggcacttccccaacctgctacaagaagtgctacacgcgctaggcacctacgtccgccccctgtatgaaacaaggcgagtgagcgagcctccccgggcttgctattacatcactcgcatccacgtcagggtgatggatgcaggtgacaggggattcaggactctgtctgctcacgagtccctgacgccactgtccacctacgctgcctcggtcagcgatgctgcccgtcggaccctatggtcgctcagccacacctaccggcagctgctacagaacacgaggttcaggcatattcctcagtgtctgcgtggagaaagccagaccaacatcgtcccaggagaagccggtgaggatcgcctcaacaccctagctggtgtagtggccggtctcaacaccgacctggacagtgccaccctggatctctacagggtgcacttggagctggagaatgcccatgccaggattgcagccctggaagcccaactgcaaggactggatccacccgaagctcaggtccccgccatggcgttgtctcctccccg

SEQ ID NO: 11691 - DNA, 384 bp, Zea Mays
ccgggttcaattccaaaaggaaaatgccaaaactggacgtccaaagtcgtcctgccatcacctgccagcagactgtcatgtgcagagctctgcagcatgccacccatgtccaccaatagctgcagcgagtgcctctttaaatggcagcctacctgccctgctcccttcctccccacgccgtcctccctctccctcacgacagcagcaagctcctcccatggccgtcatttcccagctcggctccctgctcccatagatggccagcggcctctccagcttgcccatggcgttcagctggccatggctcctccactgcacccctactcccaaatgctgattccctctgtaactccctagcgtttcccttctccccctcggttcctt

SEQ ID NO: 11692 - DNA, 813 bp, Zea Mays
tagcaaacgtgatagtttcaaaaagaatgagcaaagcctgcatgcttggttattaacatgcatgaaacgaaccaaggatggatgagatgaaatgaaacgcgtgcatgcagacacaaacttgcctgcgtgaacaagaacagcagacttggttaaactctagaacaattccatgaaacacgtcgatgaccaagtcaccttcaccaatatggatgcaaactcaagctttacctgttggcaggtccatccatgactggtcgttttgaagctacaccaatgttccggattgtcatcactgctataagaatgccctgagtcgtcaaccttcaacttcacatccatccaagtatcatgtactgcagcaacaacacatctcctcaaggcacgcggctcactaatggtgcccttaaagatctggatttcttcacataacccactggtaaaacagcccgcacgcaaactgaagctgccctctacttcagatacgtgaagttgtatcgtcgcctcaactgcaaagtcaaggcgtgataccgttatgtcaaccgctccacaatcgccgtggatccgttttgtgaatgcataagtactcctaggcatgctcatctcgtctagtacgattgctacaccatcaatcagctgtgggtcgtctttctcttctccgcccctcttaatcctcatgtcaaattcaagcataatttcgccacacaactcaatgcctcgcttagggccagtcatttctatgagggaaccctacaagtgtattatatactatatattcagtagctcttctggtaagaaacaatgtaagaaaataat

SEQ ID NO: 11693 - DNA, 760 bp, Zea Mays
ttatagaaggccccgggctcttccttttatagctgcaaggaggaggcccaggggtacaggtgttgctatgctattgctgtggtaggaggaggtgtgtccgagccctgtagcggtatggccggcgggatggccctcgtccttgatgtcgtctttggtcaggagaaggacgcccgatccctgtagcctgtcctttgactaggtagagagccgaggccgggtttgggagcatgggcgtctgcccgagctcgtcctgtacaggggtgcgaatgagacgtttccgagggtgtcgagtcggagtggttgaaacagagctcggcatggtgaaaaagtgtgtggtaatctggtccggatgtcattctggatggtggaaagtggattggacactggtcttgttgtttctgtagccttcctgtcttcagcgggagagcaggtggcatttaatgcgcgtgcttccctgttggggcagttggccgaggtcaagctcgggcgaggcgaagatttcttccgaggccgaggccgtgattagacgttgcatgtagtcacgctctgggtggttgaaacagtggtcggagtgggggaatagtacccctgtattcgtgccctgaccatcgttgtgggtggtaaaagtagattagaccgtgggcgtgtcgtcctttgttgactttggcacctgctgcggggcaggtggccgtacagactacatttaatacgcacgttctgggatcggagtggttggccgaggcgggcatgccccggagcg

SEQ ID NO: 11694 - DNA, 703 bp, Zea Mays
gcaggagaacatgagcgataggaccgtggtcccgtcaactttcaccaactacgatgacgcataactgagtaaaacgactactattcccccacgccgcctaccaactcctgatgaaacacgcatacgacaaagcgcgggcttgacctcaggaggaaactacgcctcgcccgaagccagcctcaacctcggaacaaactccgcctcacccaagcctgaccttggctacctgctccccgtgaatcccgcaggaggccactccttcaattgtgtcatgcatgtctaagaatcctagagcgggctcggtcacggcctcgagcagacttctacctcgcccgagcacaacttcggcctcgataatatcaacgaagggcgcccgatatcaccggaaacagcgaagctgacgtattacccaggggctttttgccatattcagcactgcaccaaccactatggcatgggcaacttcctcatcaggtagctcaggtacgtaaccgatcccttagtcctggtctcggctctctacgtagttaaagatgcaaatacacgaactagacgtctccaccgggcacaaatcaataacgggtacaaaggccataccggctacagggctcggctatgcctcaacaccatacgcggccaaccccgtcactcttagcaaccctccttgaggctataaataggggagtccacggctttagggagg

SEQ ID NO: 11695 - DNA, 455 bp, Zea Mays
tacagaaggaccagcatcctgatccatgatagtcaccgaagttgcctcttcttccttttctcctcgacaggtgcagtcgggcggttcactcggcgtgaacgctttgggtgggcaccttcaagtttccgaatctccgcctcttcaccaaattcttgcccagtcgtgatgccatcggctcggtgcgggtagagtcagacgattcctcggccaacaggctaagcacgacatccatctcagcatcatcagtgctggctggcatctcgaagtgagtttgcctctcatcctcaggaagactccgaagtggatcaatcaaggccacaatgtcctcatgagagggtcacactctatgatccaagctactgtcatgagcagaagggttggagacaaattcagagaatggcctatttggcggtaggttccacacagaataagccacaggagcaccagcatttgag

SEQ ID NO: 11696 - DNA, 1378 bp, Zea Mays
cgaggagaccatgcacatccaatgtccagacatcgggtcgtcatcgttgtccaaggactccacatctaacggttctccgtcgtatgcccaagaccactcagtgctggtgtcggagtccagctccccgtcaatgaggaattggaggtcgtccccgtcggtgaggtcgccgtcggattccgatgcaactgcaaagtcccatccatctgcatcccagtgcaaaggtgcctgtttttcatatgccgctataggatcccactctgggttggttcacggctagaagaatgggagacaaaagaagcagaggaatcactcggtgatgtcgacatgggtaaagctaagcgttgtggcgatgaatggaaatgtggaaatgtgcttgttttttctgagtgatattcccgtagctctactgccggcttgcaccgattgtacaaccgtcccaagctctattgcgtcaacgggaaataaggtctattatccaattgatgacataacaaggccagtgacgtgcacactggttataagatatggtattaacaataatcgcacgaagaaagtaggaacaggcattgcgatcccacgacgtaagtttcatgaaagtgacataccagatgattattgcagggtagaagtgacgatggtcgtccaaggatctgaggacgacatgctagacatccttgggcccgaaggaatcgagacactcggacaagccatcaaaaatttcgtcctttggcctcgaagggatgtcgaattggttgatccaccaatgtcgtcgtcatctcatccccaaccatctccgcctcttcaaactttagtacctttacatccatcatcatctccacaatcttcccatgctgctcctcatcctctttctaatccatcgtctccgccacaggcatcaacatttaggacaccaccaccttctccacaaccatcaagggattcacgacaatcaaagaaatctaaattccctctacgaaaattggtgtccacattcgagaaaaagaagagtaaagctactactgctggcacaactcgctttttgaaagggattggacgggacctcacgtcacgtactgttgatttggccgagcacgaggagtctgcagaaaaggctaaggcaatggccgcaaagataaagatcccaactacggcagattataaaaatgtgcctaaacattatgtgccggccagacctctactaactcttgagaaactgaggaaggtccctgctggtattaaaaggttgcatgactggtacatgcgtgcatcttcagttggcattgacaccattagtgtgcatataccagaccatgcttttattggttcggaccaaaatgcctttcttgcattcgaggatatgtggttaatgatgaacctt

SEQ ID NO: 11697 - DNA, 420 bp, Zea Mays
atctctatttaggtcaggtcatgatttatttagtccgtgcatagtgttaggtcgggttagcccgtggctcactattgaacacattgggtcggtttattttattgagtcgagttttggagcaaacatcatgatctatacctgaccattggattgtatgggtccttcccgtcctttatattggtcggttaagttttcttttggacgggtcggattgcgtggcttatctacttgcaggaatcaaggatatatattcctttctatttcctgaggtgctgaggaaagggtagtaaaaacaggagtagcgcgtgtttaggtcaacgaccgggcggtgatgctgccagtggtagactggtaggcggtggtaccgtggcaggctaggcgcgtgggaccaaccaagtaatacccaccggccaggttctc

SEQ ID NO: 11698 - DNA, 1446 bp, Zea Mays
ctggagccattgcagtgtgtcctgccccagaacgatgggcaagtacgctgtcatgacgttctccattgccccagcagcccgggcggcggttgtatagacagtcaaccagccccctgggtcctgcttaggctcatatttgtcgacgttggagaccttgatattaggaggccaatggatggcccggaggcgaggggtaagcgcggagatcacgcacgtatcctcttgtcgatgatcatgtcgtcgatcctagggaggggagtgagtattaggtcgcctcgaccgtccccagaccggactgttggttgaggctgctgctgactcaattcgggttgcgtggttgtgtaccggtacaccatgatctcggtcgtattcctctcggcgccttatctcattctcgtgccgatgatcgcgtgaagcgctgatgttgctccgcatgtctcgtcggctgttgatggcatgacgcaggtcattcggcgggtggtcgacaggtagaagatgattggctacctaagtaagcaccgttgataatcctccacgtctggggtccacgggaggccattggctatctgctccagtactcctccaacttcagtcggcgtgttcaatgctcgggcgaagtcagggtacaagtttcgggcgagaagcatattctcccgttggagcctagcatcttgttcagctagttcccactctcgttcttaagcctgacgacgatcgcgggggcgggagttgcgtcgttctcgatgtgttctttcgtcgggggtttcccccatctctgaggcttcgtcgcgagagacaggttgtgtcgggtcccgttctccggcttcgtgatgtcgtcgcacgttttggcacctatttctccatcgccgagcatcacgctggggaggttcctcccccagcatggtgggttcattgttagagatgggtgatgactccagtctcccctgaatgaagaggacgttggggtagaaaggagcaggtacggtggtgtgcttcttctcatcctcctttgagggcggaggtgttgggaggattgctcgttgtgttcttcttcccctgtatggaacatttgcttcccttcttcgagtgatctgtgtacactccttaatgggcaaggtggacaacggagttcgccgggctaaggaggccatggttgactggccttccaccctctagggacttttgagcccagacttgcgcggggccatgcctcgtcgtgctgtgagagggggtatgactcgcagtttccctccagcttcctatggaatttccgaggagggtttcttcttgggtggagttgctatgcggtgcagagtttcctcttcgtccgctacgcatgaaatggtcccgaagcagaaaatagctcccgggctgaaggtgatcttgctcttgaagatgatggtcatggagttagcattgatcgacgacacaccccctacctggcgc

SEQ ID NO: 11699 - DNA, 432 bp, Zea Mays
gacaagcgctgggagaagaggtctcgtgaagaggtccacgccgctggaccgcccgcctctcgcgcccgaggaggacctcgaggaggcgaacgcacgttggacgacatcctcgacgcccagtgtccgtaccacaaggacatgcgccacaccctccggaactgcagggatttcaagcattccatcgggcacggtcgacccttccaacctctacctcctcccccaacgcgaggagggccaagagaaccgcgacaaccccagcagcagaaggggggaggaggtggagccttcccacgtgttgacagagaagtcaacgtcatttttggcggacatgggttgcaggaaagcaagagacaacaaaagctcaacgattcgtcagatactggtggcggccaccggtcctcccgcctcgtaccgatggtctgagcacctgat

SEQ ID NO: 11700 - DNA, 402 bp, Zea Mays
ggccgccggtgacccttcgccgggattagtgctgctcgccacgattcgtgcgtctgggctgtggattgagttcgccgggaaaagatctcatcgcggatgggtttaagctactgtggccatgctgtccctcggttccccgcgccggcgacgtgtcctttcggtcgtcaccggaatccgcgatattcaccgcggttgcgccacgcctccagcctataaccgcaccgccgtgactcacgttagccatccgatcatcgccggtgagttcgccacggtattctccacgaatcaactgcgtcagtagccttcttcctttccggccgccgcacgtctctcctcaaattcacgagccaccaccccaagtcctataaattgagcgcactacgagctccgtagggtaatcac

SEQ ID NO: 11701 - DNA, 820 bp, Zea Mays
tgagcgtgccctccggcgaacttgtactatctgggatgcacaatgaccggtgtcctaacttggtcaacacctaatcctacccctggcgaccttaatccccccatcaattgcacgaatctggcccagagttcttctggacacgacggcggcaaacaccgaggacaacccaaggcgttcccagcgactaagcgtggtctagttcaattggttgggccgacaagtatcccaagcatgcaagggtgctgaaacgagggtgaggagggcgagagcggacctggagacggtggtccacgacgcggtgactcacggcggcacggagaaccgatttggggggaattgcgattgctcgggctatggtgagtaatcggggcgaggagtggtgctcggggttcataacaagctaacagagcaagttagggcatcaatttatagtgatcaatagcggtggcgcccaattcggggaagacatgctggcagccggagcaaggtgagtcaccggagttcgcataacgtggcattcactgggcaaaatgttacggccgtcacttggttatcctccccaacccgcgacgacgtggtagaataccttacgacgtgtcgtgatcgaggtaaatggcggcatgacgacggcggtcatgcggacacgtcgccggtgcaagtgggtacggtgaagccggcttaatccattcccccgctgatcttttcactcccgcggtgatatcctctactcactgaacacgaattgcggcgtcgacgcgaatctaggtgcggggtcaccggcggtgaggtgcactgaacctgatcttgttcaggtattgta

SEQ ID NO: 11702 - DNA, 280 bp, Zea Mays
gttgtacattacttacagaatgtacattttgcattacaccttatttacggttattcttttgtttgttttttgttcaaattgtaggtgtatgaggttcagctgctaatggtcctgtgattttgcatttctgccatcatcattatcatcatccttggtcaatacaaataccgttccaagggagtcacatagttcactgtaattaattaaaaaccctatttttaagggcagtaaattaaatcagtgaaataatgaagcacaaaccatcttactttttctcgat

SEQ ID NO: 11703 - DNA, 385 bp, Zea Mays
tatgaggcacgaatggggggcccatgcagggacgttggtgctatccaatcgagagatgtctaaagactattcgaaagaaatgtagaaataaatgcaaaatcaaggcttccattgcagaggcatacattctagaggaggtgtcaaacttgacaacaacttattatggtgacaaagtgccgagcgtgcataattcaccccctctttacaatgatggcgacaatgaagcgaaccatagcatatttcgaggccaatttggaagcgcaagtggctcgaccaccaagaccctgacacttgaagagtggcggcatatcatgctatatgtattgaccaaccttgaagaggtgacaccatacatggaacaatttcttcatgaattctggcgtcg

SEQ ID NO: 11704 - DNA, 722 bp, Zea Mays
ggctgtaatgccgaaggtgcctacggccaaggaagttgaaatgaagattgataaggttgatgaaccagaaatttaagaaatatcgaaaatgctagatattttgagcgctcctacaagggcgacggtaccgaaggtacaaacgggttctatcgcgactcctaaaaggagaaggatggtaaatgtattagatgtattggaaacaactgactccataagtcccgctcccacagggaaggttgtcgaagctggcaaaacacaacccaaagctgatactaagcaaatagaagttgaagctacaataacccagactgaaaccgaggcagggcccacagtgcctgctgaaacgaagcctaccacaaccgagcagggggccgaaggaataactccgggtgctaatatagcttttgagaaaagtgtggccaaagaagccgaatcccttactcccgaagcattctccgaaggtcttgattatattgttagacatgctttaggaaaaagactatccgaagaagaaatttctgaaaccaaacattatgctcgggaattgcagtatccgaagggggccctagtgtttaatggtacaaccgaagatgactttttgtactgcctcctggacaacaaagaattatccgtctaccgggagatggccagaagtatgggcttcccgaagctcgaagctggcctttgcgccatgacgaaggccgatctcgcagatagtcttg

SEQ ID NO: 11705 - DNA, 804 bp, Zea Mays
gaatcaaccagttcatggcaacagtgcggatggtcgaatggatcaatgcgttccggattaccgaaagcatggctgactaaattgaagcttgggtaagcttcacgggttcaccagagtttacgtacacgctagaatttgggctgggcaagagtggaaaagcgggtcgacagagagggcatcgtggcggcgttctatagagcagaggggtgttccggtgatgagactcaggtaaactccaattggccggctccgagagcaacagggggctaaaaacaagcaagaactcgaatcaattgggtatgcactaacccgaggagtgctagccacggaagagttcttcacggcggcggaagaaaccggttcaggggaactccgttgatcacagaggatgggggatagaacgtgatggctagtggctggttggattcgcaactgaggaatgaagagctgggcttggttgatttgagacaaacaaagtgggagcagggtggatttataggctccgtgagcatcgcgacggtcacggtgataaccatcaccggaccctgctggcgatcaacgacgacaccgagcgtggtgcttctcttagagcttgccacgttcaaccacgaccgtaaagcagtcaaatcggtgatggcgtggacgaacagaggagagcggcgccggtgaccaagcatggccggaaagatcagtgaccgcgtggcggccggaataatcaccccccccccccaccgtggcgatcttatcctgcttcaagaatatcgtcgcgaggaaatgcctgtcaatagctcagctcgaccccgg

SEQ ID NO: 11706 - DNA, 1054 bp, Zea Mays
cctagttctccatagcggattccgttgcggggaggggataacgccatggcaaggacttgaactttagggggattccttccttctagttgagcttccagggctgcgatccttgtgtgtgcatcctccagctccaagtgtaccctagagaggtccaaggtagcactatctaggtcggtgttaagacctgccaccacaccagctatggtgttgagacgatcttcttcagctccacctagaacaatgctggtctggctttctccacgaatacacagaggaagatgcctgtacttcgtgttgtgcaactactgccggtaggtgtggctgagggaccactgagttcgccttgcaacatcgctgaccgaagtagcgtaggtggatagcggcgttagagactcatgagctgacagagtcctgaaccctctatcacttgcatccatcaccctgacatgaatgcgagtgatctagtagcaagcctgagggggttcgcacactcgcctggtctcatacaggggtcggacgtaggttcccaatgcatgcagaacatcctgcaataggttagggaagtgccctgtctcgaacattgatgtataatgttcagtgacatgccataaccccacgtagtggtcctgctattcatcgttggcttcttcgttgatgttgtcctcctcctcttcttcttcttcatcgtcgtcaccagagtcgcccgggttgtcgcctccgggagcagggcttggactgctggtgctggcggtgcagaagatgacgatctagctacgaaggctagtgattctgccaacggggtgggcgtaggtagaaactcctccgaactgtccttcagaataactcttttctccacacgaatgcgagggagatccacagggatttccttgaccaccactggatagacggtggcagagggatgtacttggtgttggtccgggtggtttggattgtacgaaccatctacaagagaaaatgtcaactcagttgaattttaaagaggtaaggttaatataataattttgtaagaacaaattagcatgttttgaacagt

SEQ ID NO: 11707 - DNA, 434 bp, Zea Mays
ggaaagcgcccatcgaagtccgagctcccatcggtcaccactgtcaaattgaacggagctacacggtgtgcgcggcatcacggtcacaatggatgtattcttaccggcattaaggtgcggatgaagcttggccacggcgcacagcgaagcctgggtgacggcgaagaatcgtggtcaccgggatctcccttcctccctgccaccgccccccgacgcgatccggatgcatgacatgagcctcctgaccgcgcaccaacccccgatggagaacacccgtggtgaatccatgcggcggcatcactcaaatctctctgtgcttcgttaatggcggacgcaattagaaggtggtggtgaggaagcaacggtggccggtcctggcggtgattgtggtcgaggctcggagtggatgaggtcgcggtctgggaacccacctg

SEQ ID NO: 11708 - DNA, 318 bp, Zea Mays
tcaatggccaaaggaatgcctcatgtactgatctaacctcccccgcccacatcagatcggacggtcagagcgcttcttccccgaccgaggccgagtagcgaaatgcccatgccgttggcggaggtgcgctcgccggtgacatgcttctccctccctggtgggtctacgcgtggtaaacaggatgcaaagggattgaagggaccttaccagtgccgattccatcttgagttccttccgcggagggtgcaatcaagcggcaccaacttcatcaattacagcttagattcaagcaccggctgcaccatggccaccactact

SEQ ID NO: 11709 - DNA, 930 bp, Zea Mays
agcgagctcagcttgctgcagttgcagggtaacgctctgtccggggcgataccggaggagatgggcaacctgacgaagctcatcgccctgcagctcgggggaaacgggtttgtcgggcgcgtcccgaagagcatctccaacttgtcgtccctgcagaagctcacgctgcagcagaaccgcctagacggcgccctgcccgacgagatcttcggcctgcggcagctcactgtcctcagcgtcgcgtcgaacaggttcgtaggcccgatccccgacgccgtgtccaacctgcggtccctctccttcctcgacatgtcgaacaatgcgctgaacggcacggtacctgccgcggtgggaagcctcgaccatctcctcacgctggacctctcccacaaccgcctcgccggcgccatccccagcgcgctgatcgcgaaactgagcgccctgcagatgtacctcaacctgtcgaacaacgggttcacgggcccgataccgaccgagatcggcgccctcacgatggtccagtccatcgatctgtccaacaaccgcttatccggtggtgtcccgtcgacgctggcagggtgcaagaacctctactcgctcgacctctctgccaacaatctcaccggcgccctgcctgccggcctcttccctcacctcgacgtcctcacaagcctgaacatctccggcaacgagctagacggcgacatcccttcaaacatcggcgcactgaagaacatacagacgctggacgcgtcacggaacgcgttcacgggggccctaccgtcggcactggcgaacctgaccagtttgaggtcgctgaacctctcctggaaccaatttgagggtcccgtgccggactccggcgtgttctcgaacctgagcatgtcgagcctgcagggcaatgctggcctctgcggctggaagcttctc

SEQ ID NO: 11710 - DNA, 292 bp, Zea Mays
gcaaaccactggccgactttaggtgacttgcctttatcctctaacaggtatcacattccgacacatacttggctatctctcttttcatccttgtccaccaatataggggtttcagatcatggtatatcttggtgctccctaggtgcatggagaatttggagaggtgagcctcatccaaaattttcttcctgaggtccccattcttaggaactaccagtcggtcttcgaaccataatgttcccttactgtcttggtggaagcacttatacttctcatctttctagttaagatt

SEQ ID NO: 11711 - DNA, 567 bp, Zea Mays
tcctcgcccgccgtcgtacaattccaccgcagccgagcactgcatcaatcaggcaccgattcatggtatggaccacacccatcgcattcgccttcctctcaacatcgtataggatcgttcggattgagtcttggtggtgaatttgggctaacagcgtcggcacggctgcaaatcgaggcctccgccatgggaagggatctgtgctcgatggcagatgcgattggttgaggaattagattcagggagtcatcgatttggcaagggttgagctaattggagaatggtgctcgggatggtcggattcgcagttccgacgatctcgccgccgcgcggtggctttgctctggtggtctgctgctcggggtagacgatggattagagccgcccgtttgatgatgtgtggttctgattagaacacgtgtacccgttgcgcgattcgatcccgaccgatggatcgagaccggatgggttacatcagaacgagcttaatccaatatgggccgtagatctcgtatcctgtggtcataaatagatatcggttcagcgcggttgtggatttaatctgcg

SEQ ID NO: 11712 - DNA, 526 bp, Zea Mays
atttttatagtcaatatgcatatgaggttggatttccgttgaagaaatatagggagcgaaagaattgtaaatggttgaattgttcaatggaaggaaagaatgctgaaaggggagctggaaatccaaagatgcgtaacacatgttcgaaacgaacacagtgcaaggctgagatggaatttaaaaaatctacgatgatgctaaagagaatgttatttccgttcgaattgatctggtaaactatgagcataatcatgaattcttgaagaaagatacagaaaaagggcaattgcaatacaacaaaactcatgatcgtgattatatggagttccttagtgcgatgcaagaaagcaggattccacaacattgcattatggattttgtttcagaaatgcatggtggcccgaaaaacgttccaataaccgtgcaggacatgagtaacctgtaagtgtattattcattgacaataatggttattatatattaccgaaacaatcgacatgtgttaaaaatatgtagtgcataatca

SEQ ID NO: 11713 - DNA, 814 bp, Zea Mays
gcgagaccgtatcggccaaaaaacgcaacagctatgcttcagcgttgcacaacacctaattctacccttaatgaccatttctcctccatcgattgcagagttctaactctaaatcgcgctgtccacggtgatggcgcaaactgaggataacccgaggcgttcccggcgctctaacgcggtctaattcaattggtcgggtcgagaagcatcaagagcacataagagagctgaaacaagagcgaggagggcatgatcggacctatggagagctggccacgacgagctcacacactaaagtgttcttgaccgatttgtggaaaattcaaaattggagcgctctggtggataatctgaggcacgggctagtgcgttaggtgtgtgattacctaggggagtgatggcacgcttaatttatagggcccaagggtggtggctcctgaatttggagtggcgcgctagcggctggagagagggaagagcactggcgcaaaggattcgtggctttcaccatgggaaggtcaccggcgattaccagacacgctaaggcgagtcactgcgacaaagtactgcgtttaggcacgtggcacccgagcggcaggtggctaagtccggtgaggttatctggaccggccgtgagacaagcggacacggcgaccggggcagaacagtgtcccgagcacatccccaatgcgatatttcttacctcgagcagctatctgcacttcactgagcatgaatcgcaacgatggcaacgatcacggcacgggatcaccggcggcgatacactgaatctggcaatctttgtcaggtcact

SEQ ID NO: 11714 - DNA, 591 bp, Zea Mays
gtcagggaagctcctggcggtgattgctcgggggttggaagactataccggtcgggccatggtggttggctctcggcttgcagggcgggtggtggcgtactttggtggctgcgaactccggtgaagaagggctagcgatggtcatggagggagaggccaagggcgcactggtacttatacgcacgggcgcgcgtgatgttgtggttccctggtcgtggtggactagttggtgcactagttggtgcacttgcaggcggactagttggtgcactagttggtgcacttgcaggcggactgagcccgctcggcttctatcaaccgacgtcaaacacctggcatgtgttcgtttggcactcttctcagctgtattgttgcttgtccaagcccgatctcagctaaatctctgtatatgatttgttgtttatgccctaagctagagataaggtgtgggggctatcggagtttgctcactggctgagcaaatcttgcacactcaagtgtgatctgtccagcaggctatttccatggcaaagtcagggtttagtcgtgtctggctttgagttttgatgccacttctaacatgggttaggt

SEQ ID NO: 11715 - DNA, 363 bp, Zea Mays
gagaagctgatgaccatggttatgagtccactgactttgagcttcaggatgaccaggcccttatgcaatatgcaactggggtcaccctgtcagttggctgaagtagaatttagagtggtagctgagcagatcagtactagagacttggtgcaagaatacttggcaaatagaacatatccgatgtaacaccccaggtttttatcaccagtttaacagtgagtatggacttaagcacaaaatatgggtgagaataatggtctctatgtcctgaacattttcgcccatcccgattttcgatatcgcatctatttctgtttacctgaactgcccaagatatttttgtgcagctcggtgttaaactgc

SEQ ID NO: 11716 - DNA, 700 bp, Zea Mays
caaatctgaatattatgtcttgtatgaactccactgccttggatgaggttaaataagcaatatgcttgtactctatccatttggtgaacttgtcaatggcaaccagcacgtgagtatagcctccctgagctttcttgaagggttcaatcatgtccaacccccagcatgcaaatggtcatgttatagggatggtctgcagctgctgtgccggtaaatgttgttgcttcgacaagaattggcaagcttcacacctctggactaactcggtggcatcactctttgctgttggccaatagaaaccagacctgaaaactttcccaaccagagttctggatgctgtgtgtactccgcactgtccggcgtggatttcatccaatagctgcttcccagtagttgaggaaatgcacttcatgaggacttccatcgcaccccttctgtatagtgcgccccctatgagggtgtagtgggccgactgtcttgcgatgcgttctgccatagccctatcatccggttcttcttcattctttatgtacctgatgataggctctctccagtcattagggtccaactttggttggtttaatgtgttgcattcttctatctgatcggagggaatactcgggtgtgacacttcttggacgaagatcccaggtgggacctgggcccgactggatcccagcttcgacaacgcgtctgctgc

SEQ ID NO: 11717 - DNA, 399 bp, Zea Mays
ccagcaacatcagtttgaccaccaccaacagagccggcactctccatgttttcagttcagcaagctacaaattacaaccaactaaccaacatctattttagatactaggattccaggagcagagaagtagagaacatatggcaaagggcacaagctataccaggattccaggagcagagaaccgatggagtgtagctgtgcaggagagggcagaccggcagagggactgagggattgagcacgcgtgcccgcccaagcctcaccatgcgcaccgcgcaagcctgaactcagagagacagagggctgagggagctcgctggcgcgccgccgcgagcgcagctgctccacgcccgcgcgccgtcggagctgagggaggagcacgctcgcgcgctgctggag

SEQ ID NO: 11718 - DNA, 768 bp, Zea Mays
tctattttgtttgaatgatttttctagttcattttcctggtaacagagaatatcattagtcttggtttgttttatcactcgcaggtgaacagacttgactcgatgcgctagttttatagatcatatgttgaccatttctttttgtggtggttgtaggaggaggaggctgcttgccgatggagttcaagtatgctgacatgtatgcttagttgacgaagaccgctatattatttcagatagtgagttagctagtaggaccagactggtgcttgttattgtgttggtgtgtttaacttgtccgctttaatttattttcagatcatcaataggctttggtagtttgttggggggtctatctatcagtaggaccttggtgttgtacatttagcactattatatttctttgccgggagaggctgcctgattgttgtgagcttaaacactactttgtgcgtatgtgtcattcagtggctaacatacatgcaggcgagagctctagctattgcagtcatcgatgtcaaatgaatgtgtgtgagagcagtgctatgatcacgaacgaagcacacatttttatagtcaacattaaggggaacttgattatatttgttattccaatcaacaatctatcctagcggccagccacaagcgtatcagttagcaatgtcagtgtatgatcgagaacagagttaaaagctcagacctgcgttgatcgatttcgttcatcgcactcacataattgtttcataacaaaataaatctaaatcatta

SEQ ID NO: 11719 - DNA, 736 bp, Zea Mays
gcagggtcccgggattctgggacaaagaatacccaggccttaatcaaggccaggcgggggtccagagccgacacgtgtccggaccataccatgtacacttctgctccccgctcaggcggagacccgatgctgccacgtggcctactgcccatgacgtaagccagcgggcggagcctgacgtaaggcctctgggccacgcggcgctgcatttattgcggataaggtgcaccgcgtgtctattccactagcaggtgatgtgtcgcctcggcatttaatgagccctgccactccactggcaggcgatgtgccacctcagcatttaatgtgccctgtccactccgctgacaggtagcgaccgggccatcctgcaggcggcgtgcctgtccattctgttggcaggcagtacgcccgtgctgcggcatacactatgctcatcatcactcgtacgttgctagtgaagcttccgctgcacgccgatactacgcaggctgcggatatccgggcgcaaggagattgcactggcgaccagcattagttgctctaagtattacatccgttatgtccctgggcccgcatgtcggggctcagcacccttatacgtgcccctttcagctataaaaggggggcacacaacgttacgggggggggggggggctcaaaaaaagcacacttaaacccagctcaggctcacaagttcatacaagctctatacatcacacagtggagtagggtgtta

SEQ ID NO: 11720 - DNA, 579 bp, Zea Mays
aaaagttaaaacaagtgtgttcccaagattagcggggaatcggactactgaggatgggagaacagatggtacaagaaagtgaatgggcttccgccgctgtgctgccactccactccctcgcctgcgcacaagtgtgtgcataaagctaaaagcttttgcattggaagggcactagtttacgcgaaaggacggcgtgcgcgtgcacaccagccctagtgcgctagcccatagtgccacggccgtgagcccgtgacccaacttgagttgagcctaggctaaatcactaggtcatcagttacgtagacgggcaaaaatagaataaattgtctatttatatagcatgtctataatctctatatctatctctatttctatctattctctactatattaaaacattagtttcaacggtcttcctacgccattttttttaaaacagtctcttacatcttttgtaatgaacccgtcgttccgtcgtccacgcatctgcaccgtccgttctatcggcccacgccattcaaccactcatgccctctcccccgatattgcgcccgcccctacccacgcgcggcataacca

SEQ ID NO: 11721 - DNA, 504 bp, Zea Mays
tgacactagaagcaagcatggtcgatgcagagcgactagctcgacacgaggtgcgaccctggcgtggccatggctggtgtaaggggaggggtgtgaccaatgggagaggcgtgcgggtcagagagagggcacacatggtcgaggggaggggccatgtcctagagagagagagagaggcacaacgatgatcatgagaaaaggtgtcaacatgcacatggtcagggtgaggggcatgactaaggagaaaggcgcacacaatcaggggcataccaatcgagggccagggagaggcgcggccacgatcgtggatgagagtatgaccgaggggagatacgtgcatgaccacggagaggacacatttggctataggaggggccatggctgtctgagaaggaggtagtgcagtggatcgaggtaagggaaagagagggccaaccgtgatgggtggtgagcgatcggtgggcatggctggggtgagggtcgagaaaaaagataacatgatga

SEQ ID NO: 11722 - DNA, 740 bp, Zea Mays
tcgcctcgcctcgcctcgccggcggcctggtggtcgcggtctcgctccagcaccgataaagcccacctcgagttctgctctgctccaccccccggtaccggaatgcagatccgccaggacctggattgattccttcttctgtgatcaatcaaaagtgaaagggttaaactggggttcgatttgactgcaaccgcttactgtactgtttcaccgttctaatgtctatccacatgctttatccaggcttcagccgcagcttgtggtggaatcggagcttcttatccgagagcagacatggagcagagtagtgatgggttgccaatcagccagcggtgagttatccccatggaggagttgctatcagtttttcttatggaagcttgattctttgagagtctggtgttgacttgtcagtacaatgcgggtttcagcttcatgtaacgttgagttttagcagagttttttcaacttaatctgagtataggcatttcatattactagtactccctttccacttcattttatgggaatatattccttagtacgtatatactttttgttgaccattattaaaacacaagaatcaaagttatcattgtgacttaaacacttgataagaggactgattacataatgttcacttgattatttcttctttttttaggagggctaacagttcaacaaaacactcaagcaagtcagatgaggttgctgaagacatggtaatgccatatcgatgc

SEQ ID NO: 11723 - DNA, 3252 bp, Zea Mays
cagcttcactagcaccctttctctccatcagggatgtaattctacccatccaaacatacaattcagcaccacagtctaagaagtaacacttgtttgtctcaagtaattcatgtgctaaagattggcagtcgacaggctccagctttccttggtcaaaactgaaaagtaaacatttcatagattactaattgatttcaggtagaaactgatttagttggcaaccaaacaaaaggagcttccgtatacagaataaaaactcagttgattaccatagcaatttgaaagcagtttcatcatgtttctcattgccttctgcaggtgccctcctaggaagaggggcaaagccgccaaaaaaaccccagaattcaccagcttccgcatcagccatcattctaccatcctctaagaaaagtgaaaacagtcatatctatagatttttaatttccagtaccacacaaggtgaatagatgctcaccaacagatgcaatttcacacttgccctcatgaaatgtatctttgatgtactgcacaacttcaagagcttttgctcgctcttgaatggatgagtttgagccactgaactggaaaattttggacttcgtatccaaaataaatatgtcatcatgattaagggatgatcgagcaaagggaacctggttgtaaaatggcaagtcttattatacgacatgaatacccatacttgaataaaaaagacagtcacgcagataacttgcctcgttaacatgaacaacatgcttcccatggcagacatataagtgggtcttgtaatcctgctcattgacctcaacatggttgaatccagatgccactcctcctggctgtggcatgatgcatggtctaaaataggacaggaatttttctgtttcattgccttgtatttctcggtactgaacagcacgcccgccaagagcagcatcaagctctactgttaaaatcgcagcagttccagcttcgtcctaccatggacaaaattggagtcaattacctttccaaaacagtatcaccaaatgacatgagaaatttacctgactagtatctttaccaatccagtaatggatatcatggcgaagagaaccatttttcaaggctgttgtctgtaagaagggaaaagatgcggaagaagttacatgcccgtgagcaaaatccaattgaatccccaagcataccaaatcaaataaaaataatgataccatatgtatggaatgaaaggagactaaaatgttgattaaggtctacaaatcatgtgacacactacccaaaaacaaagtaggattacagactttagaataacatggaattttactgatcgaatgaatcattttataagaatatttaactatgcatagctcataacctcaataaaaccattttcatgaacttcagcttactaaactaatccttcttcaatatgtatctaccatatctactaagaaaaatcttcaactttagtgaagttttacagtaacagtataatatacttgctgcattcaactcctccgccaatggaaataaggtcaagtgcaaaatacaattgatgacaggaagatatcatgccgcttgataccttcaagataatgtaagaatcacccatgaagaactttccatacgaagatgcaggggcagggatcggcttgaaattctcaatacgccatatttccaagccgctgcaaggtattaaggataacaatagccattcatggacctagaccaaaagcatagtggagttgtagagtaattttcaacaataaatttgagatcaagtgcgtgctccataagaccataaatactcgatgaactcaattttgacaagctttagttattataatatcatccttcgatgtaattgctcaatatttaaattagcttattaatattgctatttactatttagttatccaaaaatgcagacaccttttccaggaaatgagtaccaatttctactgtgttatatatatagaacacactgagagggcatatcccacgagagttcattatgtattacaaattagtaattgataaaaccgtcaaacaggtacatgattgtttttcctctaccgctcccgtgtgggatataaaaatggttatcccgtgctaatccaaaaacgattgtttaattttcttgtatgatacctcatgtcatcgcccaaaatcactaaccaataactaggagagaggttagagattcgaccagcatgaaggtgacaaacgctaaaaaacagtcataatgtaattgtgtaacaaaataaacgaaagcctgaaaaggatactccttttgtccagagccacggaaagctgggtccaggtccttcatagaaactgacatcctcgattcgtaaagatgtgctgcctaattcttctttcaaaggagacctaaaaggatgttgtgaatcagaagcgcatggatagtacgcaaataaacaaacagataattccccatcctgagaaaactaaaatagccagttttgctgttgtgtggtactatcattacataaaaaaatctctctaagcatccagattagcttcaaatgatgttactgatatgaaagtaacaaaataggcacaccattcatcatatccgtaactgtaaccaacaaacaaaaaaagagcacagactgtacaagttctcgcagaatatcttctgctataagatctgctataacttgactctgcagaaaaatgtattagaccaacacatacggcgcctaactcagccagggtcctatactaataagtgtgcttacaatgcctatttcctcagtgccatcaaatttacacgatggaaacgtgtctggaaatcatggggctccgctctgctgcaagttctttatttggatggcaatcaagaataggttatggacttcaggtcatttagctaaaagagggctgccacatcccactgcttgtcccctttccgatgtctaataaaacaggtttggcaatgtgttcatcctccgaaatttgagtttggatgcccctaatcttcaacctgctgccactcgtttctacaagtggtggcatggcgtgaccagaagtgttccaaaggacagaaagaaagggcagaatacccttcatcatccttgtggcttgggggataggtaaacatagcaatgcttgtgtgtttgagggtgccaggtcttgtatttcagtagtgttagatgcagtggaaaatgagagtagtttattttttgtgcgttagctctccatgaactactcatgaggtcgttaaagctc

SEQ ID NO: 11724 - DNA, 605 bp, Zea Mays
attggaggcggcaccaaaaccatcaaagccaaagagatggagccacagcacggctcgcttcccaccccaaagaattggggggctcgtgggatggagccgtagctcagcccgctgtccaccttcacgaggctggtgatcatccttccccccgaatgctggaggaagaagcgggaaggagcatcgcctccacggacatcccgtggaggtaggcgacgatggacgcctgaaggttgaagcaggacaccacgggtagaggctgggggccaagcccctccaacagctgcacaaagaaaggtgggatcggcagagccaacccgctggggagtttggaaacaaagaacacaaactcttcggcggaaaggtcgccgagaggagagaccccaacacaagtcctcccggcaaataccggcgcattccatccaagcaggcggtataccatttcgagcactcactcagtctgggcgcgctcgggatgaagtcacaaggccatggcaaactacggcaacgcaaagcagaaaccttgaaggcaaaggggcatagagagctcgaagatgaaagggcgccgcgagtgggagagaagcaagacatggctgctatctgagggg

SEQ ID NO: 11725 - DNA, 589 bp, Zea Mays
gctgggtgattggccacaagaaacgtacccatcataaccggctcttcctccggtgtagtggccacttgagtgtaatatattcacccagtcttcttaatattcttgcccgctgaattatttgccatgtttcccttgccttgatttgagctccctgagttctgctgattgttggatttattctgcctcggatatgggcaatctttgatgaaatgactagactccccatagttgaagcagccagttgaggaactagggagggcggggaaacgagcaccaggggcactcagttgatttgtagaagtgggggcagtggcagggcgaatgaagacaggctgtttgaatgggtaggagggtggacgagatgaagaacgattctgattaacaggtcggattaccatcctggttcgctttttaggcccctgattggacctgtcacctccgaatcccttcgattttccttggcctgtattcttagcatctactgccagcgctgtgctgacagccctgttgtaagtgagatctaggcaggtggccatttttctttgaagccggtcgttgaggcctctcatgaagcaattcttatttttca

SEQ ID NO: 11726 - DNA, 385 bp, Zea Mays
agggatagctgttggacggatgaagactggttacttgaaaggatagacgggtggacgaggaaaagagcgatttgggttaaagggatgaatcaccaaccttgaccgcttttcggatccttgagaggatccctcactcccttcacatccaaacctttttgtcttttgctacccctaattctttgcctccatcgagagtgttgtgctcacggccctgctgaaagtgagatctagacacatggccatctttcgctgtagccaatcattcagacctctcatgaaacaattcttcttttttaggtctgtgtcaacttgctctatagcatactaggagagatggttgaatttggtaaggtattgcatcacatagtctcctccttgatttaag

SEQ ID NO: 11727 - DNA, 420 bp, Zea Mays
ggagaaggtgtcagcagcagcacacaggtggggaagagagtggtcgagcggggagtgtcagcagcagcacgaggttggtgatgacgtcccgcgaaaagaggtgaacttaccacaggtcgagcggaggaagcagcacgaggaagatgaactatcgccggggtggatgggtggcggcgacagagaatacgcgagacgagaggaggaaacaaatcaggataaccgcccgaccttcggacatcggatgtgattccacacggaaattgggctgacaccgggtcaatatcaccacgaatcggccttccaaacacactacaacttattatgccttctatgacgaatatacaatgacactagacatatttgtcataaattagttctatttatgacattttttgagaggtgacatgatctagtgacaaa

SEQ ID NO: 11728 - DNA, 1032 bp, Zea Mays
gggggatgagacttatattacttgcacctaagtgcttgtagtagggggtacaagctggccgagagagggagtggatcccaagtccctggtggtgattgaggcaagtgccaatatcggtcgtggaggtgaaaaactgtgaagtgttaccctccctgaatgaagccctaggctcctctatttatagcctcaaggagggctcccagtagcgccatggtttgttgcgtataggagaggaggcatgtctgagcccctgtagtcagtatggtcgccgatatggccttcatacttgttgctaacttgaacccgaaggtggttgtccgttccctgtatttgcatctttgaccgagcagagagccgaggccagcgtctggggctcgaacacgtacttgagcctgcctgatgaaggcgttgcctgagtcgtagttgttgccacagtgataagcatggtaaaaagcgcatggtaatccgtcccatatggtgtaaagcagacttgacgtcgatcctatagccatcctgttgtcagcagccttcgcggaggagttggtgatgtcctctagtcgatgttatctaggccgaggccaagctcgggcgagatggaggttcctccgaggccttggccgagcctgcctttgggggccgtataaggaggaggtagcacagttgtcggagtggcctcctgcaggattcgcagggagttgttgttggggcagttggccgaagccaagctcgaacgaggcggagttttctccgaggctgaggccgacttcaggcaaggcggaactctctcctgagggtgagaccatgccctgacgtacgcacatctcgtccggagttacttgagtacagcagacagcgtggggagcagacaacgtgggggagcagtggtcgttatccccgggcctgcgccatcgtagttggtgaaagtggatgggaccgcggtcccgtcgctccctgtttgactacggcgtcacgtggggtaggtattcgcattaaatgctcatgtccccgtggttcccgtgacctttgaccgag

SEQ ID NO: 11729 - DNA, 554 bp, Zea Mays
cgcctccgtccgctagctctaccaacgatttgtagcaaacgctttgcccctaaccgttctcatgtcacccctacgcgcagatttggaggggagagggagacgaaggatggagcaagagtaccagagagaaggtcacacgtctcacaagcctcacctcgcgcctgcgcgcgaccatgaggatcgcctcgccgcggctcaacaattcctggacccgaccgtcgtggccctcatcagagcgatggcagcgtaggatctgagggggagacctctcctcgaaaccggataaggaacctgttggggcgagtgaaggggtagggggtaggatgtggtacgcaaatggaagctctagcgatggtggcatcgagtggcggcggcagaggatctagagcggggaggaggaggagacgaaggacgagagatcaagggggacaacaggcagcggctccgtgagagttctacatgggatggagcaaaatggacggcccgcgacgcagatggaacccacacggacgaccacgattttctgtccgacgtggaccagcccacaaacaaag

SEQ ID NO: 11730 - DNA, 505 bp, Zea Mays
catagcgaccgcggacgtgagccaatgagacgtggggcgcgcaagattgacaacggcagaggctcgacgatgctgtcaacagcggcggcgattaaagttgagggcgtgcggcggaggaggacagcgaaacgcgctggcagcggcggatgaagaagaatcgccctggcgacccctgaagaaacgaggcgagtcggccaggaaggttgaccgtgcgggggttagggtatagaaatgtttgaccgcgtgggaagtggggtagtgggccaattcctttatttctggaacgtgggtcggctgaagtagttacgctaaatcactattatgtataaacagaagaatggaatagcgtaaacatgtgttgactaaggaagatatggttgaccacgtggaaagtgggcctaagccgctatttctggaacgagggctcgcggctgttactctgtttacgctaaaatgggtttctgtttacgctaaatcagttcgcttgcataaaaagtgatcggac

SEQ ID NO: 11731 - DNA, 854 bp, Zea Mays
caggtgtgttattcagctctgatgtttatgctacaattccaagatataagaccaaaaagaaataacttaatatttgttattcataaattgattgcagttgatctataatgacttacaggttttatataatgagcctgcatgtactgttaatagtagaaacatacctttgagaccgaaatccatattatctaatactaattgatgtctatccgagtacttttaaatgtggatgagccaatctaccccactgtatggaggtttgtaatgactgctacctcttataattcgtatgtgctaaaaaggtcttatacatgtggttttgtaatgtttttggcgactcatgatgcatgtatcagatacttagtggcagactgaaactgagggattcataattttcatggaggatgtagaggtttttaaagtgattcataatacctatcaaattgaagcttcataaacggggggattcattctaaagaaccaattggatcagatacttggtgatagactgaaactgggggattcatggtaagcgtggggatgtgggggaacatgatgcacgaagaaagtcaccaacactgagactgaacaatacatgtcgaggaggatcaaggtaggaggggagaggagcagagcgtacctttgagctgtaggtcaaggtggtcatcaacgtcagcgtcggagtcggcgaggtacaagttgcgcacgccgactcttcttctctctcctccccatattcttgtcgttgtgggcatgagcgtgagctttagtgccgcggcggagcaatcaatgacaacatagatggactcatcttctccctcctctccacagactgaaccgcctcgacgccttcc

SEQ ID NO: 11732 - DNA, 621 bp, Zea Mays
gaggaaaggtcatcatattggttatcgagagtgtggaggtatccagccatgtagacgatggtggggtcatcctcggtagtcggtaggatctcttcctgacagagcctgaagtcttttcctccaggcaggggtatttttgttgctgggtggaaagtagcgaaggggggtttcaaagaccactctgctgtagttttggcatagctgtcggagggcttttcgggcaacattttggcaagtgtctgggaagcggtgtccggtgaaagtgacttggaaaggagggtggtttgggtagtttcggctttctcccaggtagactgccatagagcacttctccattccattctcgagatattccttccagacatattctggcttcttgcggatccccatgcgaagcgcacaacttcgcaacaagtgtgggaacccctctacctctaagcagtaggatgtcctaatgaccagagagtcttccatctggaataggaaaagaagggtctgttaatatcggggaaaaggagagaagatttttcttggggtaagaggtattttcttttaaggcaaacttttaaggtcagggctgcgacctacgaccagtcctatggctctgataccacctgaagc

SEQ ID NO: 11733 - DNA, 1011 bp, Zea Mays
aatttgccctaggtcaccacatcaaacttgtagaccttacaaaggagaacaactttgcttaagagtgtaagcatagttgttaagaagaaatgggagataattaagtctaaagtctggctgtcaggctaactgaactctgaacttcagacttacagtgtaacagagccatcttggacttggattcaaccttgatctagtgctcaactgagttcaatccctatagttaaaatgtatctggtttgtagctctgcaactttgctacagagagttgagtaagttactagagacagtttagagaaatttggacctaaaaacactctgtcaggttgtctgatgaccctcgccatggtacagtaagccccaaactgaagaagatcacgattcacccccctgctcgtcgctggtgatttttcgccgggattgttgacggatcgccacgattcatgcaccgtgggcagcagataagctcgggcaggtaaatatctggcgcccggattgagttgagcctcgtggcggctaagcccgccgtacttcctccccagctcatcggtcgatcggataacctcgccgccgtcgagctgtcgccgttgcgcgccacgtgcttaagcactggtcctcatcgtggtgactcacggggtgcatgtctagtgatcaccggagtaactaccacggtgaaagccacttattccacgcacagagctcgtctctcctccggccgccagcactgctcggccgaattcatcaccgccgctcgctaagcctataaattgagcgcgccgcgagctccgtaaggtagtgaagtatccagccaccacgaattagcctcgatcgttcgccagagctcttgaatttcaaactctccccaaatcaagtctccgccaccgcaaagagtacctcaccgcggccagcgtgaaccaggtcagcctacgccttctgctccctcgtttgaacattctcataaccccgtgatgcttgccgaaccaccgatttggactgagagctcaccaatca

SEQ ID NO: 11734 - DNA, 339 bp, Zea Mays
ttaaggatgatctgcttgcagctatcaatgccctccatcaaggtaattctcgggggctgtggctgttgaactcagcttatcttaccctcatccccaagaagtctgatgccacaacaacgcctgatttcagacccataagtctcattcatagttttgccaaattggtgaccaagattatggctaaccggttggctcctctcctgccaaggttagtggctgcaaatcagagtgcttttgtgaggggaaggtctatccacgataactatatgtttgttcagcactcgatcaagtcccttcatcggcggaaggtctctagcctatttttaaagcttgacatta

SEQ ID NO: 11735 - DNA, 557 bp, Zea Mays
gcacgaacaagaaatgagttgtcttggttaacttatccacaatgacccaaatagaatcatggtgctgggaggtgttgggcaatcccacaataaagtccatgcaaatatcctcccatttccaagatggtatggggaggggttgtaaggtacccgctacctttaaatgactagctttgattctttggcaagtgtcgcactcagatatgtacttagcaatttctctcttcatcctggtccaccaatataaggatctgaggtcatgatacatcttgttacttttggggtgcatggaaaatttggaaagatgagcttcgtccaaaattttcttcttgagttctggattcttgggaacaaccagtcggtcttcgtaccataaaatacccttgctatcctcacgaaagcattatacctatccgccttttgattgagcatttccttaatgacttgaacacccttgtcaccaagctatgccatgattatctgctcttgtaaggttggctcaaccgtgatataatccagagtacctggggaaaccacttccatgttcagcttgcgca

SEQ ID NO: 11736 - DNA, 592 bp, Zea Mays
ttggttaatttaaaaaaaggacttgcaaacatgaccacgtttatagtcgattcagcttccaaccaggtcagactccaaaaaaacgagaaacaagcgtgtttttgcaatggggtagacaggtagttattcaaggcacctttaacgtacttaattggagtactaaacaataatggaaccaactattttcatcaatgtgatattgtttattgtgttgcctttcgtgtgcggaggacgaccggagtccataaaagatccatgagtgagaagaatgaaaacaccatagtagcatcctggttcctgagtatgagctcttccttcagctattttggcccaagagaaacgaatatttcgatagttttgctagaggtccgtccactattctggtagtaggatcgagaggcgtcaggaatgctcttgttacagtagaggatcgccggccattgagcctatggggatgaggatgctccgacaagtaagagcaatattgctatgcactatcatgcgcatcattcatctaaaatgataagatagttaagacagattttcagagcgagagctcgtgtatgagtgcgttcgagctgcctggtgcgtg

SEQ ID NO: 11737 - DNA, 562 bp, Zea Mays
gattatttccctattttcccaactctctggatcgggcctcaaatatcgagatgtgcaggggctaacgtgaaagaattcccaagactcatcgcactgctcctgtggacagcgggttggtaacacaaaaccacagggattcttatggagaactaccaggcaaaagggtatggtgagttctgggccattagatcccctttggatggctacgattaggccgaccaccatccgaaaacgttcagcaatgagatcctctagatcccgcaccgacggtgtagattttaagtgactacgatctgctttcacccacacgatcccggatcaacggttaaggccaaccggtacgcagagactaatcgagaccacacacgatcagatcaacggtcaactcctttcttcctcttgctaccgcgcgacagccaggaataggcggcgcacagtcaccgcggcacaactccggcgacccccaattccagccctatggtcgatactatcgagcgcagaatgaaatttaagatcgggcaaacattagggaggtgtcttaccaaagtgatcgtgattatag

SEQ ID NO: 11738 - DNA, 822 bp, Zea Mays
tgggcatcaacttctggtggaattttttgggttgggacaacctgtgcctaatttccaattagatctcaacttccctcccaatggtgaaatcgaagtagaggctgctaatgccaacaatgctgatgatggttgggatccttggctggttgagtaggttcagcaagaccctccacctgcacctgtaccaattgccaacaatgaggaggaacaattcagctatcagttctcgagtcttgaggacttaccctcagacaattcagtcggttttttcaacgatatggttattccgcaagttgttaactttccgcaggaggatgtccaagaccaagaagttgtcgtgctagctctaccagccctccccccccagcggaccctttttggagggaaataacgatctgaacgaccaggccgaccaaaatttgaacttgattgcagatgaaaacatcattgtgggatgcataacgcatctggatcagccctctcaggacccggcctacgaagatttcatggctagaaagtgtttctcctcctgggctgagctttgcccccccaatgcaaacctcatctctgttccaaaattatgggcagctttctttatgggcctgcttatgaagccggattcttttgagtgggccagaaaatttctattgtcgggggccctttctgctttcatggagcccaacatggaaacggtgccctttaagattccccccaagtgcttgctcccccctagccaggatccacctgtggaggctcagtcccctacgacttctgaagttgtcagcaggaagaaacgttcaaccttggtcgatactgaagtaa

SEQ ID NO: 11739 - DNA, 660 bp, Zea Mays
tcacattcctctctatcggcttctctttcagctctcaggggaaaccctgctccaatcccggaggcggtaggtgtggttttatccaaagccatctgccaggaggagagagtcactattatgcacatgccaattgttttcaaccaagttattttattcattacaccaatacattcaagcatacagctactacaagtcgtactacacgcgagcgttctctgaggtactatcgaactctttttctaaagtttccccaaattccttgagaaggtcatcaaggctagctagggacatatcctcgacgtcggacaaattctctatcctggcgggagctggtgctggaggggccttcttcctccgctcagtttggccttcttggttcttggtcttcttttgaattttcttcgtgggggcgagcttcttcagcttcttatcgtaatccatcttcagggttcggtaggcttcacgggtgttggcctcctcgccttctgctatatcgagacactcttggagggatgccttctccttcttaagttccttgacctgctgctctaagctttccacctgggagtttaggtgggtgcagtgggaggagagatcatcgtagtggttatcgagagtgtggaggtatccggccatgtagacaatggtgggtcatcttca

SEQ ID NO: 11740 - DNA, 339 bp, Zea Mays
tacctgagaccaccacattatgatcgttatgaccttaacatttgaactctctaagaatcttctcataaatgggaaaagaaatagcatagaagcaactatgtttggtgccatatatatcactatggccaatatgtacaaagatggctgattctgaccatcaccaagccaactttttattgttcttgcaagtccagtaggattctcccaagtgtacgcgtaagtcacaggtaaaatcacaacccatgcagcagcacatattaacttcaagatatatcgcagcttgactgcaaatgacatgtttcttcttgctttccaaccaaatatgaggtctaggattgc

SEQ ID NO: 11741 - DNA, 682 bp, Zea Mays
ctggattcgcgcccactagtgcctggataacgcctcggggtgaaaagatcttcaccgtggatgagaccaagggctggccgccgtacccgcttgcctcacggccggtccagatagcctcgccggagttggccacctgctgtgcgatggtcacgtgccttgaagctttaccacgtcgtagtaagccactttagatagctggttcgtcgctggtaagcttgccatagtgaaagccatgcatcccttgcgccagtgaacttctctctctccggccgccagcacgccatgccaaaattaggagccaccgctctgggattctataaattgagcacaccgccagctccgttaggtaatcacgaagccaaagcacccgctcctgcctccgattagccaccatagccctctaattcccctttcccccaaatcgggttttccacacgccgtgaaccaccgcgtcatggtcagccttctgcaggttagctcaagtctttttgattgatattctagcttccctcatgccccctgttgctcacagaaccctccgattgaactagaccgtctcgaatcacccataactcattgagttatctccggtttccatcgccaccgtggacaaagtgattgtgagctagaactttgtaattgagtgagggattcttgtccccggggttagaattaggggtcg

SEQ ID NO: 11742 - DNA, 1501 bp, Zea Mays
ggatttgggcacatccgaagggactgcccaagcaagcgtgtgctaattataagagaaaatggtgagtactcatcagccagtgatttagataatgatacatatgccatgcttgctgcccaagatgcagaataggagaatgatgatgtagagcacattggggctgcatataatgaacactatgagagcctggttgtaagacgtgtcttgagtgcccaaattattaaagctgaacaaaaccagcgacacaacctgttccaaactaaatgtgtagttctggaacaatcttgtcgtattataattgatggaggaagctgtaacaacttagcaagcaccaccatggtagagaggcttgggatgaaaacgcttccacatccacacccctactacatccaatggttcaatgacaatggtaagcttaaggtaacacgtatggtccgtgtggaatttacaattggttcataccatgattatattgattgtgatgtggtacccatgcaagcttgctctatgttatttggtagaccatggcaatttgataaggacaccatgcatcatggtaaaacaaatcaatactcttttatgcataatgagaagaagcttgttttgcaccctatgtcccccgatgctatcttgaaagatgaagttgctagagcatgcaaagagaaaaacaaatctgttcataataaaaatctagatgttacaaaggaattggtacaacctaagagtgataattctaaatatgctcatgtaaggaaaaatgaaatacaactgaaaagtgcttgtttccttgcttccaaatctgatttacttgaattaaacgatgttgatgcaatctgctatgtgtttatatgcaaggatgctttgttctcacttcacaacataccatctactctgccgtctactatcactaatcttttgcaggactatgctgatgtatttccaaaagaagtgccaccagggttgccacagataagaggaattgaacatcagattgacctcatcccaggggcttccttgccaaacagagcgccatacaagacgaacccagaagaaaccaaggagattcagcgacaagtacaagaattgctcgataaaggttatgtgcgtgagtcccttagtccttgctctgtccctgttttactagtcccaaagaaagatggctcatggcgcatgtgtgtagattgtcgagcaattaataacattaccatcaggtatcgtcatcctatccctaggttagatgatatgctggatgaacttagtgcctcgatgattttctctaagattgacttacgtagtggatatcaccaaatttgcatgaagctaggagatgaatggaaaacagcatttaaaaccaagtttggtttgtacgagtggttagtcatgccttttggtcttactaatgcacctagtactttcatgagattaatgaatgaggttttacatgctttcattggaagatttgtggtcgtctactttgatgacatcttgatctatagcaaat

SEQ ID NO: 11743 - DNA, 709 bp, Zea Mays
gtgtgataataagttaataactataaatatacacttcgtcatgcacagtgagaaaacatacacaatggataggccattatgtttagttatgaaatgcagttgcctccttcaattagtgtaatctggccagacgaacagacatgctgtctataattatgaaatgcagttgccacctttcggttgactggccaccaaacgcatcatccgaaacaggtttcagcgctgtcttaactatgtcctggtcagatgctcaaaaaccattgttgcattgcattgtttttcaagcaccacggcgacgagtgcatgcaacttgcaaatccagcacgtgtccatagatgctgaaggttggtgcgcctgtatccctatcaagctgtcctgaccctgcaggcatgcaagccgtacgggcagtagtaggtgagaactgccgatgtctccaaaaccattcattcccttttcgtttgcaatgtgggtaaccgaagatgtttaagaaacttggctgtaaggtaatctaacacttcaaatattacagcccaaaagctcatggttaaggattaaggatgatagtgttactattttcagtctgttgaacaccctttgttgaaaaccatttatggcactggacacgaccggatggtccggcctgcggacggtctgttcgtaggcgcgaacaatctgtgatatgattagatcagacgaattaaactcctac

SEQ ID NO: 11744 - DNA, 400 bp, Zea Mays
gattgcaaaactaggtggaactctacatacaagatgctctctattgctattccatatgagcctatttttaactgtgccactcgtgttgaaaaactttacgattgtgcaccaaataaggaagagtgggattttgcgagacaaatggttgatagactcaagatgtttaatgagattaccaaggtcttctctcgaacagattatgtgactgcaaatattcaactccttaaaatttgtgaggctaaggtgaaaattacacagtggtctgaatgtggaaatcctatcatagaagagatgtcaaaaaagatgatagaaaaatttgaaaattattggaaggatattcaaggaccaatgggaatagcaactattttagatcctaggtttaaggttgattatctccttg

SEQ ID NO: 11745 - DNA, 405 bp, Zea Mays
acgagagctcaatggtgggagaagacacagaggcggacgagagtttgacgtgagaggacaagtggtcaagcatgacatggtggttggctgaggcggaattggacgggagctcaacggttggagaagagtagaagacacaaaggtggacgagactacgagagtttgacgtgggaggacaagcggtcaaccgtggcatggtggttggctatggtggaagtggacgggagcttaacggttggagaatgcgcatgaacagtttgaggcggttgcaagccctctcggtctgcggctgctctcttcagtgtgaagcctgctggcatcaagaacctcctcaaggtgaggaaccaggccaatcctggagatcagggccaggggaagcagattggaacttgtgcatgtcgtgat

SEQ ID NO: 11746 - DNA, 638 bp, Zea Mays
gtggtttcattgcgcagaagaggaggatagtatgcgtgttgaagctgttaaaccccgacggtgggatggacggtggttcatgcgtgttgctgtgttggtagaatctcctagtatagttgtgagaagaaaagataggaaacctttgttttcttgggcgcgctgactgtctgcttcaaacaaaacatgcacaacatttaaaagaaagcccagtaatgaatgtcccaattcaattgattgcctcacataccaccatcttgacaggtccctgtctcctcgacctcaagagagatcttcaccggctgacagcaggtgcaagccccgctgaggtgagcgctgtagtgcactcccgtggtctgccccgctttgaatctgacgcggttggatgatgttcgccgtgtcgtttgtctagtcgttttccctgtagaggaaccctagttcgtcatcgcgttgcagatggtggagcgtcgtcctgctactttggacttatgccttgttctacacacaaattcaaaactagcgaacggattgagttgtttaattgtgtgtgtgtttgtttggggtggggaggaggaggaggagggtcgtgtatgtgttgaaactgttatcctgccccaggatgggatggacggcggtacatt

SEQ ID NO: 11747 - DNA, 1009 bp, Zea Mays
ctcgtgtcctggctacgaggctgatcaacacccgaagacttctgcgactccatggtatactggtgttgcatttccacacctagcgcctgctccaccgtggtccggaagtccactaacggaaaggcccccagtgcatgcctgatagaaggcttcagaccctgacggaactggctcgccttctccatctcattataagccacatgagggacaaagcggaccatcttgttgaagcccacctcatactctgtgaccaacttcttctccgcttgtaggactgcaagtcaatcttcatcttctccagaaaggtgaccgggtagaatctcctttcgaactgcctgatgaaaacatcccatgataggactcctggtgaggaggagtgcgctgcctgcacgcctctccaccaaatttgcgcctctcccttcagcagctgagtgccaaagcaaacccgatctccatatgcaatctcgaagacattcatcttattgtccacataagtcaaccaatctgccgcctcgactggagtaccactgccatcaaaagaatccaacttcatgcccatccactgcatcagagaaagaccactgactggaaggggcacctcggccccgccacctggaacagcacccgcagggacagcgcctccgggcactactccacctccagcaccctgagcagcacccgcaggggcgacaggaatggcttgcctcagaagggccaactcctgctgcatggcctgcattgcggctaacattgccgccggactcatcgagtccccactaggagcttgcggactaccccgagccctacgaggcggcatagctgcagccacagggatgagaataataagtaaatgagataggcatagcatcgcttcagataatgtcaaagctagcacagaccataacataatcatatcaatagcaagacagaaatcccatcctacatgtgcagtgtgtcaatttattactactccacttgctaggacctacagcctatcctctgataccaa

SEQ ID NO: 11748 - DNA, 782 bp, Zea Mays
atttgtgtaaaacccctcccacttctatttcttcacagacccaggtccccgacggcgaactgcggtgagcgcgccctccggcgagcttgtaccggccgagatgcgcaacgactgatgccctaactcggtcgacacctattcctacccctggcgacccgaatccggcccggagtttgtctgcccacgacaatggcgaacaccgaggacaacccagggcgttcccggtgatctagcgcggtctagttcaattggttgggacgacaagcatccctagtgtgcaaggatgttgaaacgagggtaagtaggatgtgagcggacctagagacggcgatccacggcgcggtgactcgcggcagcgcggagaaccgaattggggggaatctcaaattgaggcgctacggtggatgatcggagacgaggtttggtgtactgagttcgcaacaagtaggcggaacagggggagctttcaatttatagactccggccaagcttagcacgaattttggattgagatcaagggtactatgcccgggatattttaccgtggccgactcaccgtggcgcgctagtatgaattggtccagggatgataatcgctggcctgccacgacccttacaacgtggaggagtggtcattacatgtcacggcaggagaatggtgacctccggtaataccagcgcgactgaccgtggtgggacacgacggtcggtccggccagcgactggattcacccctccccgaatatttccacattgggccaacattatctaccactcccgca

SEQ ID NO: 11749 - DNA, 357 bp, Zea Mays
gcggatgatgtaatcaatgctctcttttaaagcttcgggagcaggagtggcaaccttttcaaacgaaatttgctctgtggccttttcttctgttgccttttcttcaaattctgcaggcttcgtctcagcaggcactgagggccccgcctcggtttcagcctgggttgttgtcgcttcaacttgcttagtatcagctctgggttgcgttttgtcagcttcggcaactttccctttgggagcgagacttatggagtcggttgtttccagtacatctaatacatttaccatcctccttctcctaggagttatggcagaactcttttgtgccctcagcgctattgcttctgttgaaggact

SEQ ID NO: 11750 - DNA, 1027 bp, Zea Mays
cggtgagcagcgactgccaggacatcgacgacatctctgcttctaaggtatcacattatgccaatgatctcgccgctgaggtagaggagctaatgactgctttggctagtcaggataagctgcttaggctcactgctcatgagaggaaagattttaaattcaagtatgacagcatgtttaatgagcttgagtccgctagagcctcagttgtggtgactgacgtgactgaatgtcatgagtgcactctacacatgttgaacatcacaactttgtagaccaagtatgccacctttctagataagcgtgacgagttaagatctaggtctagcttcttaggtgcgtgtattgcttggcctggcttgcagactaagctagaagagggagatgctaggatagccttgcttgagaaggctaactcagtgagtgtcccttgtacctgcatagtgtgcacttgtgagggtttgcagtttgctcttgagtcctacagacatgacaagtcctggatcgaggaagaacacacataccttcggttagtcttgagctggatgtcgtgcagtgagccccagttgggcatggttgttagtcagttcaagaggtgaagtggtggaccgaggttaggctttgctgctaaggatgggagtgttgtgtgttttggaaatgttggtgagtggagtggattgaaaccatcaaagaaaccttcagccactcccaagctcatcaaaaccaccccacctaagctaccacccctgtgagagatggtgtcatcaaggagcttatgagagcccctcctcagaaacaagtgtgggttccaaaacctaaccatctcaggaacacacttgatacccttcctgaaatgtctattgattcccttcctagatcccctcagccgtccaaaaggagagttccctcccacaaacaaattccacctaagagagaggtggggttccattgtgagtattgtgagaaggatgggcatttggctgatttttgctttaagaggaagagagatgagtggcgggtttctgag

SEQ ID NO: 11751 - DNA, 1155 bp, Zea Mays
tattgctttcaggttttcatcagaaattagtttctttgcgggcataacaattggtaaccaatcatcatttgtgctgttactaatactatggtcctcatattcctcatgataggacaaaggggagctaataggcaatccagctccaataaccagacattcatgatctggtggagttccctcatccatatctgcaccgatgccagaaacatgtgccctgaagtcatcttccgctccatacatactggagtaatttaaagacatgctatctgcaagaggatgtgaaataattggttctgccagagcattggcgttttgcgtgttagcttgtgaccacagtatgtctgtttgcatctctaccttctgagggatctcagcaacaccactatcctggtcttcagctataaggtcattaaccaattttgtcttggcttcagcttttggtgaagctacttttggtgtttttgacagtatgtccctcttgccagtacgtggagaaacagcagtaaggacagatgaaaacctgtcttttctaccttcagttggggagagaggctttggatgtgttgaactgaatagtttactggcagctcttggagagaaaggatctgaaaacaatgggctaatctgtctgtcaggagtgattgaaataggcccaggaaatgatggatccaaatccattctgccatcaggaggaatcgcaggagcattctgtggtagaaatagatctcttttgccagcaactggttgaccagtatatggaaagacagtcttttctttgctagttggagcacaatctggcccagaagaaacatcatcaacgaccctctgcgattttttagaatgcacaagctgtgaacagccagatgggaaatcactttcactgttaagaaaaggtccttctttgactaagtacagttcttcatactgcctcaacccaaaaccatggtattctaatagattttcaacatcctcgcccttgaaagagaaaatgaaggcatataaggatttcacaagttcccagttcagaattagtttctgtccaaaggaagaaaacatactaacctccatagcaagccacaccacaacctgcgaaatagggatgccttggccattctgaagaccactgtgcaaggaagcgagtgcttgcctccttag

SEQ ID NO: 11752 - DNA, 286 bp, Zea Mays
cggccatggccggccgacggccaaatcccgccagcgcgcacaaaactccattacaacaggtacccagcctagcacacgcaataacgaaagggtaggatgggttcttaccacggtttgggtagcagtcgacggcggacacggtggagcgcggtccgcggcggggaatagaatctcggcgagaaatcagaagcgctccaaccctcaatcgagcacgacgataagccaaacgggttagaaagacaccggtgatcacatccatggactctgcaaggcatctgctcccttt

SEQ ID NO: 11753 - DNA, 345 bp, Zea Mays
caggttcctagctcattaaccttgctacttgaactatcagtttctttccatgttcctcacatctggtctctccctgtgtttgtgtgtcagggggtggggtgctatgtttctcagtttgttgccatgttcctcaccatcatcatcatacgaaacttgctttccaggccacagaacctctcaatctttggcaggatgagcctgttagacaagatgccaaacataaaaggatttggttggaatgtgttcacattgaggattctcatgggcaatatctatggacgtagctgaaagagtgtgaatgtgtcaggtgttggtaggaaagtttgctgtgatgcaaggtgctag

SEQ ID NO: 11754 - DNA, 857 bp, Zea Mays
cttgtgcggagaactgcggctagacctaaagttatcctggatgttggggctcatatggcaaaggtggtgcttctgtaaatggctgagggaagatccatcgagccgaagagtgacttgccgaagcaactcaagccgatggtttcagacttggctactggttatgaacatactctggaatgtatggggaacagtatgaagcggtatggaggacctgctttgactgattctattgtacttcagcttcggctatttccttctgtttctggattgtgacttgacagattcttgttgtatgccccttatcctctccatagaaaaggcataacattttccttggttgagagttgaatcttcctctgaaactccttcatcctcttccacctcttggagtcagtggtctgaacgtattttgctgggttcctatggattgataatgactttgttgtgcctcaatgtgtctgtctttgttctcgttctgatttgaattgtgtatggtcctgacatgccttggattgaaccgtccgccaaagcccctggtcatctcggaatatctcaaggcctcctcttttctttgtcgaaaatcattattcactctgatatattcatccatcttctagagaagcttttccagggtctgagagggtttcctggcgaagtattgtggcaccggtcctaagcgaagccccttgatcatggcctcagtaactatctcatttggtactgttggtgcttgagcctgaaattggagaaatctttagacataggcttgcaagtattcgtcttggtcttgtgtacattagaaaagggcctgtgcagtgactagctttgtctagaatccttgaaagcttgtgatgaac

SEQ ID NO: 11755 - DNA, 306 bp, Zea Mays
aataaagcacgggtcaccccgaacaaacacatcagcaatcctcgacgtcaacaaaccaacgtctaaagacctcatcgatggagaccgcgtcttcgccctgcaggccctcaacaaataccaagctcaaaccaaggcctggcgcgacaacgcggtcgtcccaagagagttcaacacaggagacctcgtactcgtccggaccacccggacagagtcacagggtaagctagagccgaaatgggagggtccattcatcgtcaagtcgaaggcatcccccagcgcgtacaggctatcaatgcccactggcaa

SEQ ID NO: 11756 - DNA, 437 bp, Zea Mays
aactaggggctaaaattgagtcttttccacagataagcaactgcgagttcattttctaaaatcccaaggtcacttctgcaagatggagcggccgaagaggctggtatcgttggtcatgaccgttggatcacctggctatggtcaggattagatcggatccccgagggtccagtattgaactccaaccattggattcgagaacgacggtccagatttttattatgtttaggtttcatctaatccgtgtgatccaaaccaacggctcaaatttaacatgccgaaggggtattctatcgcctaatcgtgaccgccaatcctggatcaacagttgttgttgtgtcttcctcccacctctccttaccacagaccatacacggtgacattgtttcctgtcatggcggcgcagtggcaaaggtgagcaattgctggtgttcgcg

SEQ ID NO: 11757 - DNA, 337 bp, Zea Mays
acacctcactccacacttaccctcgcttaccagaccccgtcattagctccggcgagctcttcgccgcccgcccgagccacccgagcgccggccaccgtggccagccatttctagagacccctagcatcacctgagcctctggacagcttccccgaggagccgtgaagcttctccaaacaaggatcaaggccctgccccaccggaacagtgagatcaccatcgccggacttcggtcgcccgccaccgcacgtagaccgagctatcaggtgaaccattcttcaattcctcgcatccatgcctcccctagcacctagtgaagcttgctgatcggtttaat

SEQ ID NO: 11758 - DNA, 438 bp, Zea Mays
tggagatgcctttctggctgcttattgtgaatcaaggttggtgccataggtggtggtggtggtagctgagcccatgcagcttgagaatgacttgtcgaagcaactgatgttgtgggttgctggttgcccacatactcagggatatatggcgaacaacatgaagtagtgtgcaagacctgcttcggttgattctgtcgtgctttggcttcagctatctccttttgcttttggatcgtgacttggcacgtccttgttgtatgtcccttatcctccccacagaataaataaaacaacctcttgggttgagttctgaaccttcctccgaagcttctttctcctctgccccttggagctggtggcatgtaagaggtttgctgcattcctgaagattgtgagctttgttggttgccttgagtgtggtttgccctgtcatcattt

SEQ ID NO: 11759 - DNA, 478 bp, Zea Mays
gctctaactcccttaaccatctcgacgaacacccagtcaccaagtgaaccgtaggcggaagggagagagaagaagattgccgccgctttgtgcatcggtcggggctgcgtctcttgtcgtggaaagaagacctggagcatcgccgtgatgcggggatgatgtgtgtgcccccacctggcggaatcagcggctatggcgtgcgaatttcctcgccgacgttgatactccgccatggatggcacttcaccgtggtcaggtgctccccacgtcgctacaaccagtaagacttccttctttatgctcgcaaacatcaaagcttcgtgtagctccattcgatttggggtttggggctctggctcgtttggggggggaaccacaatcatggcgccgtcgtgcccgtgagcgcgccgtcgctcctcggccgtgggtggaagataggctccctgtcgttcgatcgtgaacggacggtggagattag

SEQ ID NO: 11760 - DNA, 287 bp, Zea Mays
ggaaagtgagcattggcattccaataacttagtgtgattatgcatctggggatatacagtttgtaatggagtacgacacaatcgtggcgttgtggcgttaaactctgattcaatttgtgtgtagtacatgtcatatatttcccatgctgctcctagaaggaaggtggaaagaaggttttgtagtaggtggatgatgcaacagcagtgacttgcgagactggaatggcatgccgtaggcgtgtgtgatgccggtggggatgttgtggtatctagctgatttttttctt

SEQ ID NO: 11761 - DNA, 731 bp, Zea Mays
gagagacttcaagaacttgcccagcgatgaccagccctttaatcactccctcctcctctgccccggtaggatcaaggcccgcaaactcagcagtaggggtgggtggaggggagtttcccagcatttacagggaattcaacatcatctatgggagccacgactcctaggagaacaagagtaaacaaaagatcaaccatcgataggtcatactggccatgaccgatccaccgacgccataccggtggttggagacaccgatcccctttagttgagctgaccattggcttaaatttgatcatccggacaagtacactctgcttgttaacctagtgattagagacaactgggtcaagaaggtccttgtggatgggggaagcagcatcaacgtcacattcccctggaccctctaggcgctcgggatctccctcaccaaactccaccaatcagacactcccttcattggtatagtcccaaccaagggggaataccctctaagtcatgcatctctacatgtgacgttcggcacaccagataactaccgcaccgagtaccctcgctttgaggtggcccaattcaactgcgcctacaactactccatcatcgagagactaggactggccaaattcatggtcgtccctcattactctcctacgtgacactcaagatgtttggcccgcaaggcattatcatggtgaaggctgacttccaggccttggtatagtgctaccgag

SEQ ID NO: 11762 - DNA, 421 bp, Zea Mays
cctcgccgtcacttacctcggcgagctcggcctactccagttcaaggacgtgagtgctcctccctctctgtcgccgctccctgctacctcggcgcccctggtcttctcgcccggatctgcgtacatccagtctcgagtcgtgatctctctcccggccccgctcgcgcgtgtcacgctctgcgctatgtttttttgtcagagaaaagctgtaggagaaatccccacaacacgaaaaatattttattacgataagagagaaacaatgtacaaaccgagcattacactggacaagaatttagaggagaaacataagaaagatggggagggagtgagtgggtttataaagagacaagccactgagaaacagacgaattgagatccgggctaaatctgatcatctgaagcttcagcgtggaattga

SEQ ID NO: 11763 - DNA, 352 bp, Zea Mays
ccacgatgaaaaggtcgccttggacgatagtgtggagtttggcgtcgaggatgatagcgcgaacctcccagttcccaaggaattggctttcaacagcaagccaagtgtcgcgagcggtgatgccgcagtccccctagcgcctggcgatgtcttggaggtcgtcggagagagttccatagagccaggagaggacgacatagtccatccgcgcctagtcgggcgagtccagggcaggaaggtcgcgaaggacgtggtccagtagagagtacttgccgaggatgagcaggaactattcacaccaacgagtgaaggtgtcagcgccaagttcgaggacggtggggacgaggctgcg

SEQ ID NO: 11764 - DNA, 374 bp, Zea Mays
cttcttcttttgcccttgtagaggataatggtaatcggggtatatgaagccaatcgcatcaaagaccatgttcagtcttttcttcccccggcctccgaaggctgcggacaaagcattatcttcagccttggaataagctccaagtagctcatcagtggtagcttcaatacacttcagccagtcgtcgtttggctcatcgaacttttccctaaacatgaaggtatactttagttggactagaccaccatcactagaatcggtggtggtctccttcggcatatcccagctttccacaagtggccataccctgaaggatatatgctcttgaatcagatcccttgtgccaatgaaggcacacacagtgctaaaagccc

SEQ ID NO: 11765 - DNA, 415 bp, Zea Mays
ggaaatcaaacatgggtccccacggacaagtgcttcagccgtccccgacgtagacgaaccaacttccaaggatctcatcgacggagaccgtgtcttcgccctacaggccctcaacaaataccaagctcaaacaaaagcatggcgtgaccacacagtcgtcccgagagaattcaacgaaggggacctcgtactcgtccggacaactcggatagagtcacgggcaagctggagccaaagtgggagggtcccttcatcgtcaagacaaaggcgtcccccagcgcgtacaggctaacaacgtcatccggcgaagacttagagcattcctagaatattgacaatctccgtaaattttttgtttgaatactcagggccaacacgcccttgtaattcaccaaacatttttatcccggcccgc

SEQ ID NO: 11766 - DNA, 397 bp, Zea Mays
ctcattttcccaaatggattgaaaccatctgttgcaagaccaagcctgatattcctaggatcttctgcaaaccaaccgtgttgcttatcgaagtccttccatgccttaccatccgctggatggttgagctcattttccacaactttcctcttcaagttatgccattgtgcctcctcagatatttttttgaggaaaacatccttttcaacctaggaatcaaaggaaaatgtcgtagtaccttttgaggactcttatttttaccttcaccatctttccatctagattcttcacacactgggcattcatctttttttgcataatccttccgaaacaaaacacaattatttgggcacacatggattcactcatatccgagtcctaatacacgaataagttt

SEQ ID NO: 11767 - DNA, 787 bp, Zea Mays
gtggaagcctccgggctgcagtttcccgtttgagctcgggaccggcagggtaatcgcgcccaccgaacctgtgttgtgtaggtaggccgtaggctgcgagtggattcaagcacctgggggcacggcacggcagtaggatttttttttttctataggataggattcgggtcggacagcgggctggggcctggggtcatgcatacgagtatggcaagtggcagcagcagctacgaaaccctagcaacagcagcacgccacggcatggcctactcctcgcctagatacaaccgtacaagtatagactcctcggtcactggcacgcagcagcgcagcgcaagcagtgcgcagttgcgcactggcgttctctctctgcctgttctcttctcatgtcatgcgagatgagacacaaggaccgcagatgacgtgccctatatcgtctactacactatcctatgcatcttgacctttgccctatatcgtctaataaaaagttgtgagttctactgtgattctctaaatatttttttagataatggaaacatagtccgaccttaacctctagagagattacggccaacgtttacaactgaaggcttactgccttgacacaacacacgactgcacagtctgcacccaagaccacctatgacaagagtttaatgttctgcggttgactttatcagataaaccaatgtctgctatggagatttttgagcatgtcagagaagtggattgttatcctaatatttctattgcttatcggattttatttaccatgcctgttact

SEQ ID NO: 11768 - DNA, 320 bp, Zea Mays
cggagttgctcctggtacagctcacgtcgcggctttgttccgaccgcccttctcagatgggtcacgacgttctccggcagacttcaccacagcgacaaggtttctatatcagctcatgagacggatgcttctgcaatggatgggttacagggaggctaccactcatattcagctttggctccttggtgccctagtttctcactcagagtttgatgtcgtggattttctcatttgtgagatcgaggacaccgtactggatggtctccgtgctcgtcgacagctgccttatgctcactatctgtgtcacatctttgctcagc

SEQ ID NO: 11769 - DNA, 600 bp, Zea Mays
ctttccactcatcattgggatgttcacctttctaggccctttatggctatgaagcatctgttcttggagttcctttagtcacagggtaagaggatgagggagctgtccagtttgtccaccacataactgagcatagtgagatgttggaggccactttggctagagatcaacagaggtataagcattttgcagataagaagagggttcctagggagtttcaggtcggagaacatgttttgctcaagctccagccttatgctcaaaattctgtggtcaatagaccttgtcgcaaattcgcattcaagtattttgtgccttacacagtgactgagaaaattgggccaactgcttatcgtttggctcttccaccagaagctcagatccaccctgtcttccatgtttcccaactcaaaccatttgttccaaactatactatggtctttgatactcttcctcaaccactggatttggacaggggaactctggctctggtagagatcctggatcgcagaattatcaagaaaggcaacgtagctgtggtccaagtgctactcagatggtctgagctaccatcatcatgtgctacttgggaggatttta

SEQ ID NO: 11770 - DNA, 458 bp, Zea Mays
cagacaacctcagccacagcctgcagagatgaatcctcctaatcctccaccaggcggagttgacccactggttgctgctcagatggcggtgatgcagcaaatggcagacactatggctgatatgcatgcccagatgcagcaagaacgccaagagatgcgtcaggaaagagaagatatacgccaggagttgcgccaagagagagatgagatacgccaagaaaggagggcgcaacaacagcagctgcagcaacaacttcaacaacagcaatcaccactgaggactccacctcctcgacaggctactcccactggcaccccgacgaagtttgcaggacagagtccaggctctacgtgtttcaagtgtgggaagactggtcattatgcaaatgtctgcccgcagaggattgctactactccagctcagaacaagcaacagacccctggcaagggatattcta

SEQ ID NO: 11771 - DNA, 297 bp, Zea Mays
tcttcgccaagaactgttgcctgcactggcaaaaaaggaaaataggagataagattgcacaattttgatcgtgcacctttacgccgaggactggaaagacttcggtggaagtcgtggagatagtcccttgtgccaggaacaagtggggcaactggtgggacttttgggtttatgtttcttgtggggaagtcgaagatctgcctgggctccctccggccatcatgtgttctcactgctatgtggcattcccacgattcgaggtgcgaaggatgatgaagacgaaggggcccttcggta

SEQ ID NO: 11772 - DNA, 489 bp, Zea Mays
acctgcaacactggagaactaaagaaataaagcaacactgggagaactaaagcaataaagctcctcgacctcgtaggtccattgcgccgtcggcatagttgtctccatccccggccatgtgccattagggaaaacatcgaccgctatacgccatctctcgcaccctctggttgtcacggcgagctgctgcctacagattgacaacaggtcccgttgccggatgcactccatcgaggatggaactccgaccgtaacttggaacagtcgagctgctgcctacagattgacagcaggtccccttgccggatgcactccgtcgaggatggatctccggccgcaacttggaatagtggtgacgcctccaggacgaaaatggcgcgtgaaggtggaaatcgacacgggaagcggatggattgtgggattctaggttcacgcaaatatgcggtagagaggctgttatgggggaggggcaaaaaattggggaaagat

SEQ ID NO: 11773 - DNA, 338 bp, Zea Mays
caatataaataaaattctgtggttgacactcatacctttgtgctttcaacagccaatgcaaaatctttccaataatcgtcaagaccatcactttcatttttatgtttctcctcttcctctataaccatgtcaggttctggtgatgtagcagtttgttgtgaaaccaatgacaaattagctgctgctacaactgtggcacctttactttttctttgtttagggacagtagcagtatcgtcactggcatgcagactggggtctgatctccttcgctttttctctgtgggaagtgaaaggaacacttgtgtttctgctctcttctcggctatgctagcagc

SEQ ID NO: 11774 - DNA, 392 bp, Zea Mays
actaacgctcatctccgattagccaccattgccgtagaatttgagttttcccccaaattggtcatctgcgccgccgtgaatcaccctgtcggggctagccgctctcaggtccgcactcaccctccttattcgtgttttaacactcttacacgcttgtgatgcttgtcggctcaactaaataagctagacgacgcttactcatcgggaacgccttggtttgacctcggtgattgccgtcattgtgggtaggtgaatccagggcaggaataactcaagtaaagcttgctctgggttcgcctcgggacggtgatgcttgcccatcagttaatttgggcagccaatgccggtcatggccagtccgagcaacaaggtggtcgacggcgagcgcgtcg

SEQ ID NO: 11775 - DNA, 1274 bp, Zea Mays
atggactcgatttaagctcaaaggagtgggcaaatgagccaggtctctatagtcgatttgtagctggattataggactacaactttgatgcagagagttggtcaggtcaccacataaaatctgaagcaaatcgtgctgcaaaatgctctgtcagaacaactgaagcaacctctgatggtacagtagcgaaaatatcccagggttcagtccccctcgccgccggtgatccacgtgcccggattcacgccggtcgtcgtgattcatgtttggcacgcagtggatattcacggggaagtaaaaagatcgcacgggggcgtggatttggtcgcggcagaggcttatcaccgcgcttgtagccattgcgacgtggccagaccgccggtgtcgccgtggaaactccggtgacctcggttgtgccacaccgtggcttgttactgtgcggtagtgactgtggcgcacttaagagtacaatcgtggagccattgcgccggtgaacgccacgaattcattgcgccagtgctcttccccctctccggccgccgtgcgtctccttcaaatttgccgccaccgctcatgaatcctataaattgagcgtgccatcagcttcgctaggtattcaagcatccagcgcacccacttgtgtctcggactgttcacaagagagctccaatttgggatttccccaaatcgtccaaagaacactgtgtgagtgagctcgtcgtggccaacgctctataggtctgttcaccccctctgtttcctcatttcagtacccttaagtgcccttgatgcttctcgacccggccaattaagctagaacccataggatcaccgggaacacttcaagttgtctgttgatcgcactgtcaccgtgggcagagagattaggggctagagtcttgcaattgatcgaggggaaatggttattaggggtcaaattaggtgtcaactgctccaaagcatcgttagttgagttatccggccgatatgagctcaccggagttcctgctccgccgtccacggtcgtggacttcaccttgtgaagaaatagaaaaggggagggtttatttgcaattgtcagtgacttaggaaatagtgcttcagactcttttcaagttgtttaaaacgacaggggcctttgcgcaaagtcatcagcgcaggagcacgggggcgttttgcctgtcatgggctgtctcgggccagattgagcccagtactgttgaccttttctctttttctttttctaccagacttagaaaatccatagaaagttc

SEQ ID NO: 11776 - DNA, 661 bp, Zea Mays
ttatctgtgtcatttcgagcactaaaagtaccatactcaattaacaacgcattctctatgacaatcaatatcgaagcgcttttcacccaatagtttgtattttaacttagacatcacatgagcactactacttttcatccgcgaccataaacatacgcatttagactaaaacaagcaattcatcgtcacaacgaacttaacccaaaaccatctaacaagtctgctaactcattattatagcactccgagacacaatatgtatatagcgatcacttaacgcaatcgactcctgctgaacacgagttggcgaatgacgtgactattttctaattaccaacatacaccacattttaccattttggatacttgcacgatacacagctattgtaatacatcacaagtacattcaactccatcagtaaagcaccagaacatttccgaaaattccccgagactatgacgacaaggcatcgatctgccatacgacaaaaatcatgacgaagccgataggtgctatcaactaatcgtttaaaaatattagacttacttctcactttgccactacaacaccctttagtcacatgaccatcgggagcatccttcgcacgactatataatagcgaactaagcgtcgtgttacacaatacatacatctttcgcc

SEQ ID NO: 11777 - DNA, 939 bp, Zea Mays
aactttgcttaagtgattaagccttggtgttgtacaaaattaggagctaaatcggtttgaagtctggctgtcagaccaccctatgactgaatattaactgacagtgagttctggcgaactttggacttgattctagctcaagggaataagcaaatgagcaagatctttacagcagaattgtagctggtttatagagctgaaactttgttacaggtagattagcaagttttcacacaaaaattcgagattagggcgctgcaaaccgtgctgtcaggtgctctgaatgactccccgatggtacagtaatagaaatatccttgggttcagtccccctcaccgctggtgatctgcgcgcccggattcgtgctggtcgccgtgattcgtgcctggcacgcagtggatatccacggggaggtaaaagatctcgcaggggagcagatgtggtcgcgggggaggcttatcaccgcgcctgtagctgttgcgacgtggctggaccgccggtattaccgtggaaactccggtgacctcggttgtgccacgtcgtggcttgttactgtgcggtagtaaccatggcacacttaagagtacaatctttgagccattgcgccggtgaatgccacacctcctttgcgccagtgctcttccccctctccggccgccgcgcgtctcctccaaattagccaccaccgctcatgaatcctataaattgagcgtgccatcagctccgctaggtagctgtgcatccaatgaactagctctcacctccaaccatcccctacaactccccaatttgagacttcccccaaatcggtcgtgaacatcgtgctatgtgagctcgccgtggccagcgcgctacaggtccattcatgccctctgttccctcgtttcagtactctggtgtgctcttgatactccctgacccatccaattgagttagaa

SEQ ID NO: 11778 - DNA, 643 bp, Zea Mays
atttgtcactttctcagggtctcttttgaaagaagcgcacgacgaaggggtatcagcaacccacagccgtctgattacaaactggtggcccggattagatcgcccaacatcaggatcggtgtgaaatccgaaccgcccgcccctgattcgacgctcacgatttaatgaaatccaaacccagcaccacccatcgatcagccgatcgacgaccacgatcatatcacgcgaaggggtatgcctatctaatcgtatccgctcgttcgaggatcaacggtgtaaaaatcccccgagcaatcgaacactctacgcacaatctccaccgttcatcgtgagataaccgacccaaagattgtcccctacctcccgctgcgaaattcacccagtaggccccgaccgcgatgtccccgacggcgatcaaggatccgcctccctggcgagcaggtgaccaacagtgctaggctacatattggcgcgtggataatttctgcgcataacgcaaacaatggcgaatctacagagatgtgcccttaccgcgatgggaagcgaccgcgcgacagcgtttcttcgaggcgaggtgtcggtgttctagcttgatgtcgtcgaggacgtcggctgccacgcgcaccagactctttctgagccc

SEQ ID NO: 11779 - DNA, 394 bp, Zea Mays
tacacctactcgtccaggaggaggaccacgcccagtccagtacgctccacaggggtctccacggacacctcctactcgtcaggctactcccactggcaccccgacgaggtctgcaggacagaagaccggccctacatgcttcaagtgcagtcagattgggcactatgctaatgcttgtccgatggggaattctggtacaccagctaagaacaagcaacagactcttggcaagggatattctatagccagggtgaatcaagtcagcattgatgctactccggatggtgcggacatcgtacttggtatgttttatattaatgcaattcctgcaaccatattattcgattctggtgctacacattcattcatgtctgctcgatatgctaacacaaat

SEQ ID NO: 11780 - DNA, 857 bp, Zea Mays
cggggagcatcaggagtacctaaggatgctgaaacaagaaagcagggagcatgaactgacctgggcttcgctgaccacggtaaggactctaccacggcggcggaaacagaattgggggaaatgggaaattggagagttgtggtggctaatcggcggcaggagcgggtgctcgggcttggtgatgacccaacgcagcagaccatgccgtcaatttatagtggcgctaagcggtggccggtgaatttgggaaagacgcgcggcggccggagaagaagaaggttactggcgcgcgtgattggtggcaattaccgtggcaagctccccggcaaccaccagacgagctaatgtgagtcacgacgatgaggttaatgtgccaaggcacatggcgcaaggccacgaagaggacatctctggcgaacctatccaaatccaccgtggtctgctcgggtacggtggctagagtaaaataatggccggagtatatcctcggcgtgatatttacggacccccggtgttatccagctgatccgagcacgaaccaccaacggcgagcatgaatccgagtgcacagctcgtcgacggcgaggggatctgaatctgatccaatctggtcattgtaccatgggattgttcttcagtcagcctgacagcccaacttgcaaggcctggatcttaattttccatgtagcgacttactaatccacctttaagaaagttgttgttctactatccagattcaatcttactatagcaatcactcccaaattcttactagatcatactcgaatcctagctcaaagatggctcaatcacattgtcagtctgaattcagaattaaggcagtctgacagcccgac

SEQ ID NO: 11781 - DNA, 580 bp, Zea Mays
gcggaatgcgtgcggccgataggtggggccaaagggtcagttgctcaggcgggtagcaaggcgcgcgacgggatacatgtgggtgtgggtgcgtcctgacgagcagggtagacttgtcagcgacccgagaggaggggagaagggtttggcgtggagaagcttacagtgggccccagtgtcggggtcgccgtctacctcccgtccgtgcatggcgtgcgtgtcgttgccagggtcggcggtgcacgtgggaaggggggacgttgggtggtggtggctggctagaggaccacggtacgatggcggaacgcagtcgttggccctcaccggtgagcgagcaacggagatgagggaataggggggagagagaaaaagaaggaacgaccaatggttttacctcgaggtgagctcaaacggggcgaggcttggatggcggtggcggacctcgggcaagaacggcggggtcggctcgtcgtgggggctccagtgagtgggtggctcggcgggtgcggcatcggtgagctcggagcgacgactagctacgtgggcgagagaagtgaggcgggggaaaggggcgacgtgc

SEQ ID NO: 11782 - DNA, 455 bp, Zea Mays
agtacaagtgggtcacgcaagtcatggtgctcacgagaaccagcgtcggaccaatagaactctggttggtcgacacaggcgccgtttacgggttagcacacggcgtcgagctcgcgttccaaccaagctatgccagtaatgaccagacgagcacttcggtaaacttcaccaacacccagggatactcaaacactaaatcaaatgcgtagaaccataccgggtttgcctggccacggggacgcggagatgaacacgcactgcggggtccgacgggagcgatggacgtcgtggtgaactccggcgtaaataggcagtcacgcaggagctatacgaccaaaagagacaacaagttcaccgtgcactaccaatttgggacgaggaagtgagggcaccgtgaattttggcttctactgaccacaccggaagacagtgaatgcctcacggtggttcacggc

SEQ ID NO: 11783 - DNA, 501 bp, Zea Mays
gaacccggttctccataactgtggcaagctctgccacactccggcctctgtccaaccgcaggagaggcgccacgcacctaggtcattagtgttttaggatgtcgcgatcgtctccatgacgatagacgtgtcgccgtcaccatcgaccatgcatgccgtcagcctgctcaccactagcgaccacggcggccatcccggaggtagtaggaatgcctcccctggctctctctcctcatggtccatgacaccacactgtcgcagcccactctagctactcctaccgacttggttgccgactctagcgcctcgtaccaaaaccacttctggccctagcactgtctctttccaccatcctcacaacctcaccttaacttctcccattgttgtcggtaatgactaatgagtcaactttatctgtcacctcaataggtgactcggtccttcctagttaattgtacctcagcagcattcttgttgactccaacatcatatagaaccttc

SEQ ID NO: 11784 - DNA, 495 bp, Zea Mays
aagaaattgccgccatggatccccaccgatgtggtcgttcgaagcgcaattggggaccccgaagattcgcgcaggaacactgatggttgttcccttcccgttcgggccggtggggcagccggtgtggtgggattcctcgccggagggcgccaccaccatgtgatctgcaccgtgctgattactgggtccatcatcgtggtaagttgactctcctgtgttccactcgcttccttctttgagttacaccgtcccgttgggcagattggtagccggagcgcggagcatggttgctccgatgagggcgccacctccctaggcggagcgccgccgcctggtcacggcatgaggaagagaaaggcgcgggcgttgatcttgtaatcaacggctccggttggacgaggggggaatgagtcaaggaccgtagatctccatgcgtgcggctacgattagggcatagcttatcggttcgtcgtggaccgttgatccctataggag

SEQ ID NO: 11785 - DNA, 510 bp, Zea Mays
aaattctaagaacatatctcgttaaaatttgcacatgtttcagataagagcaaattttgaccaaaaagaaattgatagcattacgacactacttgcatagtgtattgaagtattcaaactataaatggcagcaccatgtccaaatcaaatcaggacatggttggatgcacatggttagttgctagtttggctaaaaataaggtcaaattaggcatggctagctaacaactggttggggacttggctaaaaacattagcccgcctattagacccagctaaaattaggtagctaacaatgagcccaacatggcctccgattatgtccaggatttgtttgtacccccccaacacacacacacggttataccaggccatcataacttcggccccccagccggcaagcaaaaaaaatgaccaagctctaacaacaagtttagaatctctgtaatttgggtaacaaatcacaggattagctaaatcatcctaaagacagaagttgattcatccttg

SEQ ID NO: 11786 - DNA, 477 bp, Zea Mays
gttctaattgtgtttatgttttgcagttaaagaaccttgaggatcacattgggtttgaggatggctacgatatgagcagtcaaccggttattattgtaagtagtatgcttatcagacttgatattccttgaactctacaccaaccaattaagatctcaaaactgtaacaacttgcagtttctggagatattgcgagagtttggaagagaggagcagcgggctttcacacaattcagcactggagcccctcatctcccacttggcggcctagcttcgcttgatcccaagctcactgtcgtacgcaaggtttgttagcatagcaaattatacataccactagggcacagacctattcatttgttgaatacttatctgccatgcatcttgcccgacaggaatgcaatggcaatgtagacgacgaattgccaagcgtcgctacctgctggcactgtatcaggctccctccttactcctcga

SEQ ID NO: 11787 - DNA, 433 bp, Zea Mays
cctgatattgaaggtctttctgaatctgcactgtctcttcttcgaggtgactttctggtgcttgcaggcatttgcggagctgggacacgtggaacacattgtggatgtcggacatggattctggtagttccaggcggtatgcggcgggtcctaccttgccaatgatgggatagggacctacaaaacgtggggctagcttccctttgacttggaacctcctgacaccacgcattggagaaaccttaaggtagacgaagtctccttcctcaaatcggagttccctccgcctgttgtctgcgtaactcttctgtcgactctgagcttcaagcaaccttctgcggatcagtgtaactttctcctctgcctccttgacaaaggcaggtccttctagtgctttttcccccacgttggaccatatgagaggggtctggca

SEQ ID NO: 11788 - DNA, 574 bp, Zea Mays
gttggcgcataatggactcgtactgtagaatggggtaattatggaataatactggtttaaactaagttacacaaagatccacacccactagaggggttgacatgtgggcctgccgcgtagacgaagggcccactagattcttgttagttgttcgcagtcttctaactcctattctccaaggccttcgtcccaaggtcttcgatgttgccccatcctttggaacgacgtcgtgagggagcggttgcccgtcgatagatctaagcctttgccttggtctaggttggccgctctagagcgagggaggagagcgtgctcttgagggcctttgacccctttgacccaacgtctctgttgttgatcgagccccctttgcccatggaccctgagtcgagcagactgtcgtattcttcgttcctagaacctatttgcgttgttcttgtaccctgcgtacgcaaacggggtcaacgatgaacatgattgaggttacgttcgaccttcgccctaacagtagtcccccgaggggagcctcaacttgatgggtcgatcctgaagtcttgcacgaaggatgtgaatg

SEQ ID NO: 11789 - DNA, 615 bp, Zea Mays
atgccgaaggaagccatcgctggttcttgctagggtggcctggtttatctgaagtatacctttcggttcagaaaccagtttgatgagccaaatgatgattggttaaatgttatagaagccacaggtgatgagatgtttggagtgtactcgaaggcagaagatgaagctatgacgattgcctttggcgctcgggcaagaagaggttaaatatagtgtttgatgttattaggtttgtttacccagactactgctatgccgcccagaaacaagggagaaaaaggaaagccgctgcctcagcatctactggtgtgtcgaagtcaaagaaaatcaaggttttgacatgtagacccaggcgcatcgagatggccgatgtgccaaagttaagtgaaagagtggagacaaccccctggccatatagactgttcctgttgtgcctgttgaaactattgcagacccggccagagagccagagccagaaaaggtagcggaaagagtaccagagcagccgaagatgaaggtgacagcaatgtcgaagctgccagctaccaaaggaactccaaggaagaggaggatggctagtgtcttggaagctgttctagaatctgtgaaacgccg

SEQ ID NO: 11790 - DNA, 526 bp, Zea Mays
aggctagaaaatacacaaggctctcgtagacaatgacaaccaagcagatatcgtattcatgcatgcgttcgacaagatgagcatgaatcccaacctgttgcagctagccaacaactccctatttggatttggaggcaaggccacactcctcctcggtaagataaccctgccactatcctttagcgccaccccaaatgcacagacagaacaagtcactttcgatgtcatcgatatggtgtacccttataatgcaatcgtaggcagaggggtaattaacattttaggcagccattcatggactttacttatgcatgaaagtactcagactgcacagagtcatcgtcatttttgaggaccagcaagtagcccataatatagaaaaagactttgtcccaggtcagcgcaatgtccactgcctgggcacaaacacagaaagacggcctccgacacaaccaacaaatggagacaaggaacccaaccctatacaaagtaacgaagaagccagaaaagtacccctcgatcctaa

SEQ ID NO: 11791 - DNA, 792 bp, Zea Mays
tctccatgaaactagattacctcccataaatacacaatatccagaagtggatctccgatcattcctactgctcgcccagtccgcatcacaatacccatccaaattcatatgttgatttggtctaaaccacaatcccttgtcaggggttcccttcaggtatcccaggatttgataaactatcttcatatgcccagttctaggatcatgcatatacctactcaccacacttactgcataagcaatgtccggtcttgtatggcaaagatatatcaaacgaccaactaccctctgatatatttcccgatctatagggtcacctgacttagcacaattttggtgattcctatcaatgggtgagccacatgggcgacacccaaacattcctgtctctaacaaaaggtcgaggacatactttctttgggagagaagaataccctgagatgatctagttatctcaatcccaaggaagtatcatagtggtccaagctcctttacctcaaaggctctacttagcctttccttcagtttcttgatctccttcgcatcatctccagtgatcactatatcatcaacataaaccactagaatagtgatacacgagccctgatgtttgtagaagactgtgtgatctccattgcattgatgataacccatatcacacacaaatcgcttgaatctatcaaaccacacacgtggtgactgctttaggccatagagcgacttcttaagtctacacacttttccaatagtctgtttatttgcatatccaggtgggatttccatataaacctc

SEQ ID NO: 11792 - DNA, 444 bp, Zea Mays
gtttcctgaggcagaagacacttctttccagttcgattgtcgagaggataaagggtagtgaagtcgagggggagggcataccttttgaggtggaatgtggaacaacactcggcgtgttattcctcggaagggacactgtcatttaatgcaacgagacatcctgtctgtcagccgaccgttcacgacacgcgtgcccacgggattcgaaacagccatcgtccagccgttttcgaatcacaccttggtggctccgtccgtcctataaagctgaccaagagggagggctttggaccattacctttgcagccttaatccttttccttcaaacaccgtttccaccttcttacaaaagatcccttcgccttcttctcgccccttcgttcgtttcgatggcagaaaagatcatcgtccttcctccctgtgacccgtggcccgtgtcctccg

SEQ ID NO: 11793 - DNA, 1462 bp, Zea Mays
gagacatctcgtacacattaaaagtgatcggcagaatagcaacaaataatggaccagtttttaagatctaccacagcccataggcgggtgtggagggaggaacatccacgtatataaataagcccgtctgcaaacctcaaagtacgactcatcaaacagcggacgcgctgaactttcatcagcataacaacaatgaaactgttccaacaatgcgctctagggacatctcagcagatttaaaaacaggacgttgccaggcagccgtcggtgcaaggcaaaagtctctatcctgctctgacaaatcctctaaaagtcaacatgccaggaagattccactacagcattccttacttgccaaactatgcagtaattccacgtggacgagtcaacatgaatggttggatggatatgcacagctcgaagcggacactgctgccagctagtaaagcaggcaatcacgggcagaacacagacattaacaacaaaaaatgtttttatacttttttccctgtaagcaacaaaaaatatgtctctattccaccagaccttcaccagaaagaaactactctactgattcctgcacccacagaaaaaatgttttatatgcttcactaaactttctaatcaacaacagtagcacagaaacgcctcttgagtttgctcgagaaaagaacgcaagatagaacgtgccccgtgtccgtaagctataaaaagttaaagaggaaacaaaaaaaatccaaagatcgggcacagttcacagacagtttcacagaaaagctcaccagcaattcctatgttcattggtccatgcgaaaccaaacaattttgcacagcagaacagatagtgtaatggagaacaattatcataaaaattgatccatgcgagaacagagtctaatggagaacaattatcataaaatgttgatctatgcgataacagatagaaaacagaagcgatccccccaatctggcaacgtaaagggtagcacgactttttttttaaaaaaaacgagacagaacaattacgacgcgccgcgagcaaatggtttacgagttaatccagatccgtacaaaccaaacgaataatcaagcgccaaatcccttggaaagcgatggaacaagactaaacaaaccatgaagccaaaaccaaagtgaagaagacaaaactgctcctgattggaggtaaacaaccggacgagaatccccatacatgccagggggcagcagaggaatacggaaaccttacttatctacggaacgaaacatgactagtcgattaccccacccaagcccaactgcacaagcaagggcaaccgaaagagaacgcggaaccgccccgcgcgcgcggacgggagcgacccggcgctgcactgcagcgcactgcgacgaacgcacctcgcatccgagcgctgagccgacgagcctccgcgcgtagtcgacgacctccgcgcggcggcgctcg

SEQ ID NO: 11794 - DNA, 468 bp, Zea Mays
ctgcactggtggcaccacgacgcgacatgaaccaacaacccaacaagcgtttggagaagaggcctcgcgaagaagtccacgccgccgggccacccgcctctcgcgcccgaggagcacctcgcggaggcgaacgtacattggatgacatcctcgatgcccagtgcccgtaccacaaggacatgcgccacaccctccggaactgcagagacttcaagcactccatcgggaacgacggacccttccaacctctaccacctcccccaccacgaggaggacctggagaacctcgacagcctcaacaacaggaagggggaggaggcggagcattcccgcgcgtcgacggagaagtcaacgtcatcttcggcggacatgggtcgcaagaaagtaagaggcaacagaatctcaacgaccatcaaatactggcggtggccaccggtcctcccgccccgtatcgatggtccgaacacc

SEQ ID NO: 11795 - DNA, 699 bp, Zea Mays
ggcgggtcctccttagggtcgcgtgtagtcgtactccttgcatggcgtcgtcctcacctactactctagctcctgtagcgagttcatcgctgacatcttcgtaatggtgtgcggcgggttccacggatcagtctcaaagtgcggtcgtacgtggtgtggcttctcctattgtcatgggcccttcgtcacctgtcagcatgcgcaggtgcatgcttggtctgccgtgttgtctcgtccttccgatgtacgggtaactgtagagaccccgatgccattcggcatgctatgcatatgttcggacgtggtttgatggtggcgcgtctcgtcatagctgacgtggataggtagctctggacttagatctctgcctcgttgggttgttcgacggtgagttggtcggccgaagctggttggcggagagttgtcagtcggactgtctcacagagttggtcggcagagttggtcatcggagagttggtcgaccggtccgcctcgtagagttggtcactagagagttggtgagtcggtcttcctcgcagagttggtcagcaaggttggtcatcgtagagttggtcagccggtccgcctcacagagttagtcggcaaagttggtcatcgaagttggtccactggtctacctcgtagagtcgctcgaaagagacttagtcgacaggtaggccgtttttgaaaaaggctcat

SEQ ID NO: 11796 - DNA, 421 bp, Zea Mays
acccctacgcagaaacgtcgagttggtgggaccgacaaacctgcaacacgccttgcacttggcaagggcattcgagcggcggctggcgtcagcatgcactgccactcgctcttcatcctccaactcatcctccagatccggggctaccaaacctgcaacatcgacgacaagtcgaccgcgtctccgtcgtctttctcctgacgaacttgcagccaaaagagccaatgaggaatgctatcactgctcagagaaacattcgctagatcacaagtgtgcaggtcgtggggtatttctcctggaattggaatatgatgacaacacagaaaccatcagtaccagaagacctcggcatctccctccatgccatcacggggattgacgtcgccgaaacactgaagccgccagtcactattaatggtgt

SEQ ID NO: 11797 - DNA, 898 bp, Zea Mays
attcaaagactcggaacaaatcagtgactgcctaggactacagtgatcacgcaaacttggatcgagacaaccaggaacgaccagtcaacatgagccatgtccacagcagcgttcccagatgacgacacgatgttccctaagctactgtgcagtagcgtttaattggccgagactaggagcttcaccagcacgagagggtgtacaaacatggattagagggacgtgaacggacctgagaatggctggccacgacacgatgtctcacggcggcgttcctagccgatttgggggaaatctggtaaacttgcactctggtggacgagaagggtcggctgagggtggactgggttcataacagagaggcagagcaagggaaacactcaatttatagagagcaaccatgagcgtaacaaatttgggtgtagatggactcgcggcggcgaagagatgagtcaccggagcatgactaccgtggcgctcagtggggtaaggacttagggcggtaaatgggctatccactgtgacctcttgcgacgtggtaacaccctcaagtacatggcatcatcgcgatgagcagtggatgccgatgatggcactttggtcgatcatgaagcaagtgggtacggcggctagcgcacaaactcatatgaggtcacgatattttcacccacccggtaatatccgcgtcgagcgatgcacgaatcttcatggcgagctcgaatcatcgcactcaatcactgggcggcgaggtgctctgcatctctgatattttgctgttactgtaccatgccaactccatttagtgccgcgatagagcaatttgaggagccttttccttcaattttcattcagcaaactaccaagtcgactataacaaagttgttcccctatataccag

SEQ ID NO: 11798 - DNA, 435 bp, Zea Mays
tcatcttctccatgatggctccattgcactttgcacatcttaataactttatttcttgtaactcgagtcaaagtgtcaagaatcttgataggatattccgtgtaagtcagatcaccctgaacactgagctcccccattggtaactgttcctcaggtaccctgagacacttcttcagttgtgacacgtggaagacatcatgtacatccgcaagatgatcgggtagttctagttgatatgcaacttctcccactcactttaagatcaagaaaggtccaataaagcgaggggacaactttcctttgactttaaatcttctcataccccagattggtaacaccttcagatacacgtgatcacactccttaaactctagtagccttcttctattatcagcgtagctcttttgcctggtttgagctaccctcaaattctcc

SEQ ID NO: 11799 - DNA, 320 bp, Zea Mays
gctcatcctagcagatcttgttttcctacctctcctttgtctgaatctggtaatcattttcctcgtgaatcatgttgtggctttatcatccaaatctctggatccttcatcgattttgccccgttatctggttatctgctataacccgtccacaagtaatggatgttgatttgcctaaatctctcatttctggtcattctcacacccccttctccgaggatcatgacgcttgttttatcaacttatctctaaacgacatatccatgtggattaatggatgttgctgttatctttggatctctcatgtctctaaaagctta

SEQ ID NO: 11800 - DNA, 449 bp, Zea Mays
gtcgatgctctggtcctcattctcttgttgtcaccacccgcagtgctctcaagacttgctccttcgccatccaaactattaggacatgagggatttgaacccaacactgcgtcaacatcatcactagacaaacctggagaaaatagcattccaatattagccaaccaaatagcctcactgttattacaaacctggacaaatcatgaaactagacaaaccgtattgtttcggttacactaataagcaggggaaaatacaagagatccgacagctgatggtcatgtgcaggggaaaaatacaagagatccgacagctgatggtcatgtgcagctgatggtcatgaaactaattttgagaaaaatacaagaaacagtaccatccacaggggaagtagtcgatggcgacaacgacggtgttgctgcacggatggaggcgggagcaggagtagg

SEQ ID NO: 11801 - DNA, 677 bp, Zea Mays
gttatatagaaatcagagatccaagcctagcaaaacgctcggtcaggcactctgaataagaatcccatggtacagtacgcagaaagatctcaggttcagcccccctcgccaccggtgatcttgcgcccggattcgcgccggcgtcgcgattcacgcccagttaatcgcagataacgatcctcaggtgaaaatctggcgcttgggatgagcatggaacactgtttcgccctggccgccatacccactcgccttacggccggtccagataacctcaccggagttggccccctgccgctcgggtgccacgtgcctaggtgctctaccacgtcgcagcgaatcaccttagcatgttcgttcattgccgatggtcatgccacggtgaaagccacgaatgacttgcgccagtgaccacccttctcttcggtcgcctgcgcgccattccaaaatcgggtgccaccgcccttggacactataaattggtgccccagccttcttcgctaagtaattgtgcgcccagtgaaccagccctcacctccaattgtcccccacaactccccaatttgggatttcccccaattatgttctctgcgccgccgtgagtgagctcaccgtggccagctttctgcagctccgttcacacccgcctcgctcttgtttcagcactctagtgtgctctt

SEQ ID NO: 11802 - DNA, 725 bp, Zea Mays
ggcgtctgggtcgggatacagatgtagacaacgacctcctttcctctctggtcaaggcttatcatcctgaacgacgaattctgttccagaaatccggccgtagattcttcgttggctgttagccccaagcatatataacccgaagaccttaccatccccggcaccacgtatcctggagatcacctgtagccgggcaaaccacaagaacagagggccgccgccatgccactgtctcggtcgccatggattcccgtgcttcgatttctggtatggtgcccctcattcggttcgccctgccatatgctacgttttgcatctagccgtacattgttatgggccgggttaggtcgctgctgttgctctccggcgaggccaccgtcgggtgagagtggcggcgccgccgtctgggcactgtcgtggggaaggaagcaatctagtcgtttgatctgtgatgggcggtcctgattaaatgtgtccgtaccccttcggctgggtctttttgctaaagagtcctcgggaaatcttgaaactaagccgccatccccagcctgtgctaataatttaatctgtgtcctggtcatttatggaatagcccctgcgctctgtagaatttgtaccagcagtccttggcccttgttttcagtaaatagaattttagaaagtgatttacaatataaagtaatcttagaaaattcataactttcccattttagttccaaatcgat

SEQ ID NO: 11803 - DNA, 756 bp, Zea Mays
gggggatctcctagatcttcgtcgtagccgtcgcgtatgggttacaacaaatgcccgaccaattcggctcggtctgggtgcataaatagtgtgaagctcagagccccttgacccccatcccaagaaccccaagcctcacgcagcagtaggtagcatagggcctcattggagtgagaatgtcgctgtcgtgcctagccatctaccacgccgaccctttccctctgtcggtggtctggtgattcttcgaggcgcatggagggtcaccgaggcaccagtgcgggtgtatggccctttgggatagctagattgctcgccggtgccgttcttctgtcgtcaaaccgcacaacaatgtgggcagtgttctgtgcatcgccaaccccggtaagaccctgccccatggactcacctcaacccccgctacgcatagcaccgtcgggatcaaacttcgatgtgcgagtcacgtgattggggcactgccgcaatgacgctgccatggtttgcatgggcatcgccactgtcgtgttcgagtgaggaagagtgcgcgtgggccgtccatccattgcttgacgactgagattagaagcgttcacgaccttcgtcatataaaattgccaccgtcgctagatggatgagcggttgggattaggttctgcgtaccccttcagcttggttgaatgagagccgtagaatttaatcgtgcggctcgggtgtgttggcgggatgtgatctaatctaggccaccggaatcatatcaaa

SEQ ID NO: 11804 - DNA, 416 bp, Zea Mays
caaacagctagctcttccccacttcgcctgcggcggcgctccctcccgccggtttgctcgctgggccctggcgcgttcgtctcaacgaagcactcgcaccgccggccaccccgaagcaatcgccactgctatctcggtgtcctctccctccacccggactcggattgacttcctatctctcgtcggtaagcaaccctagcccatttgaatcactggtgatgactgtatcctatcgtccccaagagtttgttcgcgtgattccgcctctgattgggtcgtggatcagcagggggccaagcatgatggaggtgggtttgaacccgggggaggagctggacttcggggacaaccaggaggacgacgacgacgcgggggacatctcacccgccagcaaggagctggccgccatggtggcg

SEQ ID NO: 11805 - DNA, 658 bp, Zea Mays
gggaaccagacccaccggcgggcatggcggccggcagggaaggagcgtccacggaagccaaagaaggggaggccctgacgggcaaaggacggatcaagacctgtcgacataaaagctacgctcgaaaaaacattggaagagcctaagcttacttgggaccatgaaccttccagtggccttggaagcggggcgcctgttgtcgttgctgctgctgccgtccctgctgccgctgcccccgcggtgacggcggtcggtctgacacaggcggcggcggtggtggtgtcggatccgaaggtggtggtggcggagggctcacgcccttctgctcgtcctggacccgaggttcggcctccttagtcccaccagctgtcttctgacgcttctggggggagtccgaatcaagggggtagatccgagacaaaggacccatcggcacgacgcaatcggtgttgccttacttcctccgacctcccggtggcgtctggagtggaggagttgcttgcaggccccttgcccttgtccgaggaactgggggccgtaggaggagctctgggggccacatcagcaggctgggggcctccgaccggtgcaccaagaatgtggatcccccggtgggggtcccggccgccggtctggcggatcgcgacaccactctcat

SEQ ID NO: 11806 - DNA, 386 bp, Zea Mays
tccaagaacaattcttgcttcttttcatcttcagcaacctcctgaggagcatatattgacaactagatagatttttctttgtactcacaaacatgcctccctgcctgactaagagaaattccttcttaatcttcatcaacctagcaggaatatgatactttctgaaattggttgagaattctgcccaagtgatggtgtcagcagcggcatgtggagtatagtaagcatcccaccaatcagcagcggggccagtaaggcgactcgatgcatatagtaccttctctctatcaatgcattgagcaatgttgagcatcttctccgctgacttcaaccagtcatcagctttcagtgaatctagagagctagaaaatgttggtggcttatgg

SEQ ID NO: 11807 - DNA, 460 bp, Zea Mays
tctacggtgttatagggatcatcatttcaccattgtcgattagtaggggcgaggtagagcgtgggaggaggcctaggtgccaccggtgaagttttgcggtgaacagaggcgagggttggcgcggccgcctgcgaggcgcgcggtcgactcagtgccctagcgtcgagacgaagaagacaacgatgcaaccatagatatagaaaccggcgactaagtttggacgcacataccatttgggtgaaattcaactgaggtggttggatcacgatcgagtggtttgggtgcatcacgtttgcatgagatctcccatctaatctggaacgtgcattagtaatccttcgaccgatatagcttaccgcttcataagggcaagacctggtttgatccgtggaatttggatccgatggccagcgatgagccccttcacagtttaatctgtaccataggtttttattcgaat

SEQ ID NO: 11808 - DNA, 823 bp, Zea Mays
cactatttatcctctctctgacagttacgcaaaggtccctagactttcttttcttctccaacaagctccctgaccgcggcgcgctcgccgttcttccccgacgcggcctgtactggccatggccggcgatggctgccaagtctagctatcggggaggcataaccgacctaaggtgactcaggaacactcactaatcttagcttgaatactttgggaatggtctggccatgtgcacggcggagaccgtgatcacgagctcgtgttcccgcttaaccatggccgaattgagctaaaggttgccacgacaagcttcacaagcatgcagagatactaaaacaacgcttgaattggacagagtcttaccagagcgggctggccacggatgagctgttctcggcggcgcgactgaccgatttgggggaaaacagcgtcgtggcgtgctcggctgaaattgagggcggagcttggggctatacgaccgcaagggactctagttttactgtgcacaatcaatttgagaggagggggcagaggcagcgcgaatttggcttcgattcaactcactgtgtgtgtgatgttcatacctcgccgtggaccacagggctatttatagctacggcggtccggcgatcacttcatggccacggataaccttgtcagcgcaagcttacatgtaaggaaaagatacagtgaggtagaatcggggcatggatgacaccgtggcaaaactggctgagtcacggtggtcgccggtgattatctccggccacagtcgaccgggttcgcgaaatcatgccacgttcgaggctatccaccccagatc

SEQ ID NO: 11809 - DNA, 361 bp, Zea Mays
gttcgtgttggtctcagcaccgtatagcgatggccggtggtaagaatagggctcggggcggggggctggtgctacccaggtgtggatcaccaccatggagcatagagccaccacgttcggtgactcgggtggagaagatggtgggctgaacctttatctgtgaatggacgattgagatttgataggtgataccccttcgatgcctaagatctgtgtcgtcaatccgacgatgggcgatgcgggatagatcacgtatcaataaaaccttgaccgtaggatttagatccgaggggttgtgatggcataaagttctgaccaatctatgtcgtgggcttctaattcaatggacaatacatatcca

SEQ ID NO: 11810 - DNA, 346 bp, Zea Mays
tggcaccagtatttggcgatcgttgagcttttgttgtctcttgttctcctgcgatccgtgtccgccgaagatgacattgacctccctgtcgacacgtgggaaggatccacctcctccctcctcctgctgctggggttgtcgcggttctcctagtcctccccgcgacggaggaggaggtagaggttggaagggtcagccgtgcccgacggagcgcttgaagtctctgcagttccgaagggtgtggcgcatgtccttgtggtacgggcactgggcgtcgaggatgtcgtccagcgtgcgttcgcctccacgaggtcctccccgggcgcgagaggcaggtggtccggcg

SEQ ID NO: 11811 - DNA, 307 bp, Zea Mays
gtcctaaaaatctgtcatcgtcatccatgaaatatcaggtcatggcgagcacactaggatgcagaccgccactgtgtagtagcacaacgtgaggatgcggagctgcgcagtgcttgattgaagtgacgtgctgctcaagtccattaaccccttgctttcaaaaggagcctgtggtgtcgtggacactaggaattcagattttggacgtgtttggatctcaacctcccagccagttgcctaccacgcagcaaacggtggtggactctgtacgtttggtgactctgctgcctattttagtgaagaatat

SEQ ID NO: 11812 - DNA, 884 bp, Zea Mays
gttaggattcacgctcggggtgggtggataacgtcgcgagatgaaagatctttgccgtcggtgagctggaggtcactccggtgactcaccatcaccttctcctttctgttttgcgactgagcagataagctcgccggggaaccgtcgtcgcacgaccttgcgccacgtatccgagtacctccaccgcatcgccgtgattcgttttagcttcctgtcgatcaccggagtagtcgacatgacggttgccacgagttcacttgcaccagtaacctttcccctctccggccgccaccgcgccatcatcaattcaagcgccaccgcccctggaatctataaattgagcccaccgttagctctgcaacctcatcacgcaccacaccgtctagtatcgctcccaatcttgcaaccgtgagctctaatttcaagttttccccaattctgttctgaaacaccgcagggtcgagctcaccgtggctagtcctccacaggtttaatcataccatccttgttcttgttttagcatctctgtgtgctggtgatgctcaccaactcgcccaattaagctaagatcccatgaatcaccgggaacgtgtagcttgttagttcatccgcgcgctcaccgtggccacagacattggtgtagttgtttatgaaattaacttggggaaaaccttcactcggccctgaatttggtttagaccaacgtagagcgccagtacttgccccaatcggtcgacctacgtgctcaccggagctcgaccgcgcgcgacgccgtcgtggatcaagcagtgtaaagaaatagaaacttagggtcctttctgcagttgtcagtgacgtgctaaatagtgcttcggtcccgcttccaattattcattaagcctagg

SEQ ID NO: 11813 - DNA, 748 bp, Zea Mays
gaccgatagcgccgtgagcgagagtgctgcacagagaacgtgaagggaggctcgccattggtgattcgtggccccgggggagtttggctacgattgtggcctggaggaagaccacggagtgtggcgggtgcatacgcgaggaagtttcgggctgatcacctgcgctgtggggcggattgctcaccgacaatcgattcgcaccgctgggccgcaagtcctcgtcgatagagcacgatacttcgaaatcggaggtatgatggcggggtatgtattggggatgtgcaccacatcacgtagcaagttgtagattgaactgcggggcaccaagcgccgagaatcgaccgcaccggcggtagctccgccgtggggtgggatgacgccgccgtcgaacacactggggggagtcggcgatcgttgaaccgtagatctccactcggacggttctaattagatgccgtaaataccctttcgcaccgttgaatcccgaccgtaagtcgcgaatatggcggtccgcgttgatccctttgtaatggcacgtgcgctagtggcggggattcggtgcgaacaggatcccgtgcgccccactgtgggatcccgtgtgtggcctggctctagccagtggttgggcgccatgtgtccctgttccgtcgtctgcaggtaattatgcaaatgagtcccctgttttcacaaaaataaacccgccatccagggggaatgtttactgagtcttagtacacattgcaccgag

SEQ ID NO: 11814 - DNA, 821 bp, Zea Mays
tggtcaccccgagttaagtaagcgcgagcatgttgcaccatcttaagtcgttgccgacttaagccgattgctccgttagtagggcatagtggtccccccgagttaagtaagcgcgagcatgttgcaccgtcttaagtcgttgccgacttaagccgattgctccgttagcagggcatagtggtcaccccgagttaagtaagagtgcaggtcgaccatgaacaatttgagtattcttgaggcctttttattgatgatatatttcctagtttacaaaatacattgtcgtcccaatagctttttgaaatacagctagggataaaactttctgaggtgttctatgttccatgagttcccaatttccgtgctgtccatctgagtgagacgatatgatcccggccgagtgacttctgctactatgaatggtccttcccatagaggtgacaacttgtgccgtccctcccacgtgacgagatctccaactgcgaaggatcgacgtcgcatggtcttattgtgatagcgccttagagtttgttggtaccgtgctgattgaattatcgtgttcagccgttcttcttcgagtacatcaacatcctccagcctggtagccttagcttctgctatgttttcaaagatcaaccttggcgccccaaatttgagatcagtaggtagtactgcctctgaaccatagaccatgaagaaaggagtatttccatgcagagctcgactaggttgagttcttaggctccaaacgacgtagggcaactcccttatccactttcctgcgaacttttcatttttattgaagacttttttcctgagtg

SEQ ID NO: 11815 - DNA, 566 bp, Zea Mays
aatcacgtgctgggttcaggcatggggcatgtccaaaaaggaactgcctcatgtgccatcataacttcgatggcccacccccgctatcctccaaggtgctgcggaatctggacaccaggctttgtaacctgtctgaggatgacctgtctgagcagaggttgaagcacaaaaaatcgtctgtgggacctgttgggccgcggagggttgacaggaaggacctggcagatgagaaaactgatgattcttctgatgaggatccacaagacaaccattaggcggatggtgggggatctgggcttgtgtgtgggccccattaacttttggatgtactcggttttacttttggttcttgcaggtcttttggactttgggctggcacctgggcgtgcctgctttactattctgttaatatgtggcttgtggactgacctagactttatccactggtgtgggtatgtcccaaaaatttctggtgttcccaatgagtaatctcaattctgttaacttcatggagtggtctgtgctgagccacaacgttagaggaattaactctaccgccaagtgga

SEQ ID NO: 11816 - DNA, 508 bp, Zea Mays
gttcgccggcgtgttctgaccgccaggcgcggcgccgccgttagaagccaccggggaaggcgatacccgagcaccgtccgatctccaacgggcggctcggattggtgaatcggacaccgttttggtcactggatcatcgccgtcaatgtgaaatcgggcggtcggatggcgtttgggcgttcattgaatcgaaacctttagatcgtgatccgagggctctcgtcgatggtcgtgtgattgatggatagatctaatcgtcaccctgcgattctaatccaacggcccagaactcactataccccttcggccgtgaattttgttaaagagtcctcggggattaagaaaatagaacccgccgtcctgggggcactattcactgagtctgttgagtcttgcgccagagcccctgctgttttctgttattgaggcccaatccagtagtattgaaaatcaggaattaatatcagaaattagtttttaatgcataaataaatgttagaacttgttt

SEQ ID NO: 11817 - DNA, 1434 bp, Zea Mays
cgataagtggtaggtgggcatggaggatagaacagaagatacgagcgtgagccggccagctcggtttagaagatttcctttccatcctgccagacggttgccaattttttcaatgagtggttggatgtggattttctgaagtggtcgggtatggagtaggagacctaggtaacgacaggggaaattccctcgagtcccgtggaacgactggagcacatgatcaaggtcgatgtcttcacaccagatcgggtggatggagctcttttcaaggttagtaaccaagcccgaggagcatccaaaggcgtgtaggatgtctttgaccgccacaatttcatccctagagggttgatgaagatagcagcatcatcagcataaagagacgtcctaagattgggtgtgttcagcggaaggggggagaggattccttgtcgggttgccagctcaaggatgcgatgcaccgggtcaatggcgagaatgaacaacataggggagagggggtctccctgcctcaccccgctcctgtgcaggatacctgacccttgggagccgttgaacagagccctgaaagaggtcgtaccgaacaggatggagatccactcacgccagcgtggcccaaatcccatgtcctgtaggacttctaggagatatccccagttcacagagtcgaaggccttctggatgtcgagcttcaggaagagcgccgactttttttgcttatgtagcctcctgaccacgttttgaacatacaagaagttgtcttgaatgcaccttttcctaatgaatgtagacagggatttggaggctaaattgttcaggaagggggccagccgattagcaagtaatttggagaagatttttgctatgctatggatcaagctaatagggcggtagtctcccactgacttagcatctggcttctttggaatgagcacgatattcgcagagttcaggaacttgaattcagctccattcatggcatggagttggtcaaggcctccaacacatccaccttgatgatgtcccagcactccttgaagaaaattcctgtaaaaccgtctggccctggggccttatcgcttgcatggagaagatggtttccttcacctcatccaaggagaacgacgcttccaaggccgagagatcgtgtcgcggtaaggccaacgccaaccagttgagggtgagctctctgggtggggttgtccccagatgtgacttgaaatggtcataaataattttttctttgtcattatgggccactgccagatttccaatggtggcctgcaggtattggatatagttcttcctcactctggagctggcagtgagatgaaagaatttagtgtttgcatcgcctaatcgaatgcgggtaagtcgggcccgttggcgaatcctcgatttctcaattaccaccagtccaagggagcgggccttgag

SEQ ID NO: 11818 - DNA, 370 bp, Zea Mays
gaaaagaaaatataaagaaaaggagaaggaaacctaattggccccctgactacacttttggctcaacaatcaataaaacacgcgctcggcccatccctgctgtggcgctgacgtgtgggtctcgcccataggccactcgtgcgtgtgcgcctggactccctccgtagccactggcgtgtgggtcgtcctcgtcatccagtccctctgccatggcttgagcacttgcagatgggccccgaagcacagcttcgtccccttcccgacgtcgcgattcgtatcaaactccgcttctgggggcggcctaggcgagagtgactccaccggacctctgtgattcgcgcggagctctggaacggatcggccatgctcg

SEQ ID NO: 11819 - DNA, 467 bp, Zea Mays
ttcatttgccagaacctgtgtcaccatatcatcagcatgacataagcatgcaaattaaccaacggttgtatcgcagcctcatgtgcttccgcacgcgctagcgtctttgctcaaccgtgctgacacatgggcccccttgccagcttcctctcccttgttcacgagcatgaacagaatgagctgagtcatcttctccaggactcgcttctgttgcctagagccgtcatgcgcacagatattttctcgtccagaatacgaccccttcctcttcgatcgggacccatggtccagcctctcccatgcgcatagcttaagaatcatctcccacgcgatcgtattccattgcaaccacctccgtaaacattacatgctcaagctcttcgttcctagtccgttgagatcccttccgggattttcgtggtcgctgcaacaaaccaggccgtcatctaaggaccgaccaatctttc

SEQ ID NO: 11820 - DNA, 680 bp, Zea Mays
cccacttgacccaccatgcactactacaaagatgttagcggaggactcgctataggaaccattatgacgaacgagcaagatgatatgctacaaggagtgtggttgcgcacgaccctacggactgtatcaggagcactacgtcaaaccaagggggcagatggcccacatacctgtagagaatatatctcttctgtaaggtcctacccttgagatataaaagggcaggggcccctccttcttcagacatgagtacacaagatgtaacatgttctattgtaataccatgatcaacactacactggactagggctctggcatgaaccaatataaaccccatttgtcccaagttcttcgagtcacaacaattcaccattcagagagagtccgcgctagcatccccatcgaacacaaatcttattgtcgcccggtttcctaaaccacgatagttggcgcgccaggtaagggagcgctagcgtactaagtgacaccttccacttcgatggcccagtcatcagcatttgctggaggcaaggcctttgctctagggagccgcatcactttcagcaccctcgacttcttcaccaccaccaccgacgagctcatccttgtcgtcccgaacatgcctggcaccatgggcacgcaacccacgcactccaccatgagcatggcagagaagtgac

SEQ ID NO: 11821 - DNA, 422 bp, Zea Mays
gcggctgctccgtggcgaggacaagcggacgcggatccctgtggcgctgcagaaggagatccacgggctgcttcgctgttttgcagggtgcgatgtgaggcatgtgtaccgcgaggggaaccaggtggcgcacaccctttgccgtcaggcctaccactgccccgccgtgtgggtagggactgtaccgtccgtcgtgtttgacaaggccgaggaggaccggcgtggcgtattgcatgagcgctcggtggtccgatgattggctgggcatacaaagttctggatgagaaatttgcaatatcaccaccctggaaaggtggcttcgctgcattgccaccgttgagcacgctgaagtgccaatatcaatcactttcttgctgttcttatgccatcatgcctcattcacgagttcttttcaactgtgc

SEQ ID NO: 11822 - DNA, 574 bp, Zea Mays
cccactttctcctccccgggcgaacacgacgggatcacacagctgggcgcgaggagcgaaacgggacgcggaaatcctatttatccccaagggactcggtccacaactacccgcgtgcaaaaggcggcatcagaagcggtgaagctcgcgacagcggcggcgttcgttacggagaagatgaccgagctgacgggtgggtcctgtgttgcagtgtaacagagccgcggggcaaaggtttctggtgagcgcgtggcatggggagtgcatcaaatccgagcaggcggtagcgttcttcatagacatcatccatcacttcgaggtccccatctccatcatcacagacaacagcacacagtccacaaggaagacattcctaagcttctgcattgaccaccacatccacgtagactggtcaaccatagctcatccgaggacaaatgggtaagtagagcgtgccaatgacatgatcttacaaggccttaagccaagagtcttcaatgaactaaacaagtttggaataagatggcttaccgagctctcctcggtgattcagagtttaaggacaacctcgagc

SEQ ID NO: 11823 - DNA, 416 bp, Zea Mays
ggggagttcagtaggaactacaaagacatcttcaactcctacaacaatgcatgcaaagaaactaggaactgctaattcctccttctctacctcctgctccagcatcattggtgcccacacatcacttcccttcaaccacttattcacctacaacatagaaacttcttgagatacctctctctttgcatgtacccatctcccttcaattggactggaaccctttatccacaaaggttagcatcttcctttgccaatcacactacatgaggctatgcgactgcaaccaatcataacctagaatcatgtcatacacctctaactccaacactctcaaagaggttgtataagtgtgacctcctggccaacactccatctccaccactcttttattgctcaacatctttctcccatttgcc

SEQ ID NO: 11824 - DNA, 653 bp, Zea Mays
gtttggagcttacctttttcacttggtaccatatgaatttgtggtatgcctactttcaagcctgtcaagtatagtaattaggggtacctagattacgcccctaataaacgcttaatccatagaccaccgtcaaagcacgtcccccgaggatgaaggatcataagccgcgcttcacccgaggccccctcagggatcaccaaaactctgcctcgcccgagcatgccctcaaacagggtatgttctcaggagaatcctcatcccgaccgaggtcccctctccccagaacggcggtctccgcctcgcctaagcctgcctcgggtaaggaagacaaagccagggcaagactaagccgaagcccgcaggggatagcagcattcaatgtgcatacctacccccacgcagggttgtaaatgtacaggagcaacaagactgcagccctgtcaagcttcaccaactatgattacgcatgtgaccactgttcccgcacaccgtctgtcaactccacctcgcccgaagtagaatcagatatcaagacaaactccgcctcacccgagcctggtctcggctacctactccccatgaaccccgtaggaggtcactccttcaactatggcgcacacgtcttcgaatcctagaacaggctcagacgcgac

SEQ ID NO: 11825 - DNA, 974 bp, Zea Mays
cgaaagaccaggggctaattcctatatttctccaagactcatattcaccccgcgtggatggcgggttgaaactctaaatttgcaggggttctttagataaaaatcacggcgaaggggtatcgacgatagtgggccgttggattacgatcgagcggatcagattagattcaaaccccaccgaaccgctatgcagctccagtcgtccgattttgatcaaacgaccaggaacaccccacaccatgatctcatctgattcatccgtgggtcgatcgacgacacggattaatctcaggaaaggggtacgtgcacatcaaccgcaaccgcggatttcaagatccacggccatagtacttcttctccacgcgaataccaggtgtggcagcaccgttccccccctacggtggacgtcatagccagaccacccattcaccactcccgggccaaaaattctaatctgaggtacgctacgcgcagttaagacgtaagggaacaggatgaaggctccataccggggtattatcgacggtgaatcgcggatcccaccggcaacaaccactctggatgccgacgctgagctcccagtgctccgtcgcagttgcagaggggaaagaggaagcggtggacgtagggagagggaaggggtttgtattttatactcctaggtgaccgaaacttcccctcgaaacaaccggatcgatcaaacggatctgcacgattcatggctctcggcaattgtttttcttcctcggtctctctctaccctcgagttcttggcctcaagattctaggcgacagatagtggagcggggcccggcggtgcacacatatatacgcgggcgaagttgggtgtccatccaatatatccgccagaatctcaactaaccccagccgacgcagatcacggagccccaccgcggtattcgtttccagcttctgcgcgtttccgtttcaggctagaagaagaccctaacaag

SEQ ID NO: 11826 - DNA, 698 bp, Zea Mays
atttctgccgcatcagctcctcaagttcccacgtagcctcgcgctcagactgattagtccataagaccttgacatacttaattgatatcttcctcaaaacacgctccaaggattccaagatacgcaccggacgacactccaaggtcagatcctgctgcactgcaattggttccatctcaatctgatggtccggatcccgcaagaacttcctcagcatagagacatgaaaaactaggtgtacccctgccatggaatccggcaattgcaagcgataagccaagctacccacccgggccaagatagtgaacggtccaatatatctcaggctaagctttccggaggcaccaaaccgaacaactcctttagtgggtgataccctgagaaggacttggtcacccactgcaaattccaaatcccgcctcctcacatcagcataactcttctgacggctctgagcggccaaaatattctgacgaatttcccgaaccttttcagaagtctgctgaacccaatcaggaccaaccagggatctctctcccaaggtctcccagcacagaggggagatacaccgcctgccaaacaaagcctcaaatggtgccatcttgatgctagcctggtagctgttgttataagcaaactctgccaatgcaagatgatcttcccagctacccttccaagatagaacacaagcacacaac

SEQ ID NO: 11827 - DNA, 1012 bp, Zea Mays
tgaccaggaccctcctcgccccttcaaacaggacaaggggcagactatctaccttgagcagcaaggggacgagaagagatggttggacagagccactcgtgcagcgattgccacaatagcagtagtagatcacgcagagcagggaggttagttgaggatttctgatcagattgccttccgagtccatcgcctctcatctcggactcactcctccactgctcggtccactccctcagaccaagtctccactccacctaccacttcgccagctcctaccgctctcgagccttccaccacacccgctgctaccaccacctcaaccactctagcttccactgctcccgctcctgcttccgctccacctatttctccacctcgcttccgggagcgtgatgagaccgaggtgcgaccacttgctgctgatccttgactgctcaaccttccaagggccacaactactagggtatgtcagtacagacatgtacccgtggactcgtggttgccagctcagagagacctagtggctgtgcctcttttcagcaccagggcccaggagtccttcttcagggcatagttgtctgctcagattgccctgagagctcactggcaattggatctcactgccttccattcagcagccggtgcagagtcagagggtcacatcacatatctgtcaggtttatactctctcttgatcttcgatggtagatatgttgaggagtgggtcagagttttctatgccacagtgtggatagaaccggatcatcagtgaatgaggttcatatttgagtgagaggatgtgaccttgcatgctacttagatcagagagatctttggatttcctaagtcgtcgatgaggatccacagcctgtgctatggcacttcagatcctcctcatcgccctcacgtcggagtagcccctgccactgctcacatcgtcgccctgtttcgacctccattcacagatgggtagtggtgttctctagcagatttcactccagcagcgaagttt

SEQ ID NO: 11828 - DNA, 646 bp, Zea Mays
atcacaggcgtttagtgtctgtcagttctacaaacaagggtggttacatccacaagatcacgatgtaatagcgcgaggttccgttcatcgaatgccatgcaatggaaatcttcttgatttatgctgcgcgggtcatctggctaggaatacgactccacattcgtagactccattcatgctgcttaatttgaagccgacatggcacaacaagcagatttcataacacatcttccctatcgcaatttgacagtcagatctgggagaagttatggttcgcctccacaactaaagaatctcactcgacggagtcacattaatgctctgagaccgaaccctgtctatgatcttctgcctgcctgttaaatcttcttcgtatccaacgacctgcagaaaaaagccagatttaaatgagtcagacaatgttttttttttttgtgattgccgagttattcgatagactacacacctgagattctgtctgcgtctcactgaaagggtagtaagtagtaggagctggggaggggactggtacagagtttaagttttgaacctttgtgacagaggtgctatcttgcttctgttgcctagagaaaataaacaacagttaccgaaccaaacgtgaagcagggacgacaccatccctcaa

SEQ ID NO: 11829 - DNA, 673 bp, Zea Mays
tgcggacctgggagcagctagccacgatgaggtgattcacggcggcgcagtcgaccagtttgggggaagaaggaaattctctggctatggtggctaatcaagggcagggatggatgctttgtcttggtgataacttagcgaagcagaccgtgccgtcaatttataaggtcgctaagcggtggccgatgaatttggtctcgcacggtggcagccggagaaagaggagatcaatggtgcaagtgattggtggcatctaccgtggcggctctccggcgatccccggatatagatgacccgagctattgcgacgtggttaagggcctgaggcgtggcgcaattgcggtgaacaacacagattccggtgacgaccgtaaggccacgtcgctggtgaagtggtcgagggacagcgaggccacagtgtcccagacctatccgcggcgtgatcttttcaccgtcgagctcaatccacagacctgaagcacgaatcgtggcgatcggcaacaatcacggcgaagggtcaccggcggcgagattcacagaatttgtagatttttgccactgtaccatcagaggtttcatcagttggtctgacagggcttatttggggcgaattttctctagattttgtgtggtgactagaccaatactctacatcaaagttgtagcttatcaa

SEQ ID NO: 11830 - DNA, 601 bp, Zea Mays
cctccaccaccgacgccggcgtcgcatcctccttgggcgcgtgatcatccaccttcgatgccgcctcctccatgtgcgtgtgctgcatggtatggacgaagcctctgctggtgatggtgctgctgcggcggtgcgatatgactacgagcgagcgagcagattgctttatggcttcctgcgtagtagactgggctctaaggaggaccaatgcaatgacgtggccgtgcgtgcggtttaatataggctggcaggcgagcgccacgtgtcaccgccccaccccacttgaacgaactcacgctgacgctcggtagattcatccgggagtggcatcgttcgttggtgtagtggaagtatctctagtctgaacgctggtttatcattatttccgggtattcatccggcgattatcatttctcggccccgctccatgcgtctttactcgtgataatttgatctttttttcatctggtccttatctctttatttgtttatgcgacacaacatgaagatgtggaagacgtgagaaggttaatttagacacatcttagaaacatagtatattcattaaaatatgagacacgacatgaagagagatgtgaga

SEQ ID NO: 11831 - DNA, 898 bp, Zea Mays
atcaatttctgtaaaatacagggcatcaatttctgtaaaatacaagggcggctacgtaaaaatccacagacactatcaatagtaacactggactgtgggttggtttagataaatttcagggactctttagcaaagtgactcggcgaaggggtatctagtaactctggccatccagatcaaatcccactgccaggatagaagtacccaaactgcgcgtctatattcacaggtggccatcggattacagatcgaccgcccagattctatttactccgtttgcttcccaccctcgtgatctagagtggatggctgagatcgaaatcctatagatccctcctagatcgcccattgcttgatcaacggcgcggatttgcccaaaactcagagttacaaagatcatatccatatcgtccctttgtagatcgatggccacaacaccgtcgtcttcctcagctatcccaacgtggcagcggagcaatcaccaatacggtgagctcgctggagacaaccggcctggcaccacaaggcccggttccccgccaacttttgtgcaaaatgagacctggatctaggcgagaatcatgaaaggctactcaccaatttcagaggcgaagaagaccccgcccacggcgccgcgcagtccacgcactccgacaacgaattaaggtcgccctagggatcccctcttcatgcctgagttgcggctatcttcccgaaccaatggtgaacccccatgaacaccaattgaggcgagcggcggaggttgtggcgaattagcagagcggcgacgatggcaccccaatacacgacgggcgacgacgaggagtccttggcctaaaggtctttctgtaatacctacggagctacgaggaggatgcggacacgatcactggcatgc

SEQ ID NO: 11832 - DNA, 755 bp, Zea Mays
aggcatttattatgaacctctaaattcaaaatgcctagcctgccaacctccttaggttgaaaaattacatcccatctagccagcctatattttttttcttatggccctccccttgccagaaaaaacgtgatatgaaataatctatcttctccagcactccatttggtacctcaaagaaagacatcataaacatcgctagactggtcaacacagaattaattaatacgagacgccctcctactgacataagttttcctttccggctgctaagctttttctcgaatttggcctccactgttttccaatcaccaattgtcaacctacggtggtgcataggaatcccaagatatctgaagggcagacctccacaactacaaccaaacaaccttgtgtacctcccttcaccctctttttccttcccataacagaatacctcactcttgtgaaagtttattttaagaccagataactgctcaaaggcacataatatgagcttcatattcattgccttttctagatcgtggtccataaacaaaattgtatcatcggcgtattgcagaatggaaagccccccatctaccaaatgcggcaccaagcccttgatctggccattttcctttgctctattaatcaaggtagcaagcatgtccactaccaagttaaagagaataggagatagcgggtcgccctgcctcacccctccttgagtctggaaaaaaggacccatgtgatcattaactctaaccgcaacatga

SEQ ID NO: 11833 - DNA, 340 bp, Zea Mays
ctgggacaagagtctaccatatgctgggttcacatataataatagttaccacgccagtctgaagatgtcaccatttaaagctttatatggcaggaagtgcatgactcctctatattgggatcagactggagaaaggcagttctgtgggcctgaacttatccaagaggcagaagaacaagtccgtataatccgggagaacttgagggtagcatagaccaggcaaaagagctatggtgataatcgaagaagaccactgcagtttgaagagggtgatcatgtgtatttcaaggtgtcaccacttcatggaatgaggagattcaaagttaattgcaaattatcc

SEQ ID NO: 11834 - DNA, 586 bp, Zea Mays
caagaatcaagagatcgagaggctggaaggtggtcagttcaggaaaaagctgaagatcaaactttgcaaatatctgaagaacactggtaaaagatctacggcactgttgaatcagatgagctcgagcgatccagtggggggaatcgatccgggggaggatagcttcgaacgtggcaccatctcgtgagttcagccgggcgtggccagagttattcaccggtggccgtcgtggctcggtcaattccaccacagtgtcatccatgccttgctcctcccttactgtacctcttctatacatggtttccatgcgtgagcaaagccttctgcggtcactgatcgttagccggaccgtcgtagctataaatagcgccatggaccacggcgaggtattcacatctccaccagtgatctcagttgaagtccaaattcacggaatcctctccacctctcccaaaattggtagtgcacggtaaaactatagttccttacggccgtgtagccccaatctcacctcccaattccacccagaaccgtcgcagcgccattttcccccttttctgtcaccagcgagcacaacttctccgcg

SEQ ID NO: 11835 - DNA, 461 bp, Zea Mays
gcatgatatgccgccactcttcatgttgtgtggaaggagcaggtcgtcataataggggagccaagtcaagcctgacttatgtgttcacatatgctgctcaccatatcccacaaaaccaccttctgtattggccacgagcccatctatctgttgacgaatttcggcaccagtcatcgttgcaggtgggcggtctgtcactacaacacctttcgtaaagttcttgatgtctaggcggaatggatggtcaggagggagaaattgtcaatgtttatcgaaggacgaatattttccaccctttttcaaccaaatgaacctaagagctttcttgcaaactaggcatgagaacttactgtgaacacaccaggcgcagaatagcccgctcggcagcatcttcagctctttttgcttcttctgaaacgtcatgagattccttctcatttcttttgatggcttcatcagcg

SEQ ID NO: 11836 - DNA, 280 bp, Zea Mays
gccaagtacatatccgagtgtgacacctgccagaggatcaaagccagtcatttgaaggcagcaggccctttgcaaccccttcccataccatcttggaaatgggaggacatttgcatggactttatcgtgggactacccaatacctccaggcaccatgattcaatttgggttattgtggacagattgaccaagaccgctcatttcttgccagtgcataccacccacaggacggagaagtatgcagaaatctacattgaccagatagttcgtttgcatggga

SEQ ID NO: 11837 - DNA, 837 bp, Zea Mays
cctgaaataggggtggcaatgcgccaaagcttgcgatcacaacctgtgaagatttgcaattaccctagtaactatttacatatacatatttatagtcttagggactctctaaccctagcatatctgacatgctctatcttcctactctgaagctaacttatcatcacacaatttgtggatgcttatcttgggacactcccgcgcggggacacgtccttctgctcctttaggccgctcttcgcggcccatcctacgttgtggcctatctcgggcctgactgaaatccggtgataacacatgccccctggttttagcaatgataattccgaaaccaccattttcttcccattttattttccatcgtttcatttttttcttctcttgttcagtcatgtgccgcgcctctttaatgcaacaagacatacctgttcgaatccttggaaactggcgttgtgacgtctctcaccctgctcaagccctttctttgggcgtcgccagccttgggggctgacatgtgggcctggtaggcgccctggcccacgtgcagtggtaatgcgcatggtagtcgatcgtcatgaaattggccccttaaccttgctttgatgactcgggtcctccgtctttcttcccccccgatccttgttctgcaatgcaccatgctaatcttgcgagtaatggcccccacctatttttcctcctcgccattctccttcccctacttcgagcacgactccgaccgagagctgactctgtagtggaaccccaccgtcgcttatgagaaggaggcttcttcgcatgggatgcggaggagtgggacttcgcaatggagtccgagga

SEQ ID NO: 11838 - DNA, 639 bp, Zea Mays
attaatgccctgcaaatggccttgtcagacagactgaatggtgttctgattgtacagtgactgaataagatcacaggttcagcccccctcaccgccggtgacctcgcgcccagattcacgctggcgtcacaattcacccccggtcgaacacggataacgctcctcggtaaaatcgggcaccgcggatgagcttgagacactgttccgccccggccgccatgtccgcttgactcacggccagttcagataagctcaccggagttggccaccggtcgattggttgccacatgcctaggtgctctaccacgtcgcagtaagccgctctagattgccggctcatcgccggtaagcctgccacggtgaaagccacgcagctcttgcgcctgtgctcttccctctttccggccgccagcgcgccattccaaattcaggagccaccgccctcgggtcccataaattgagcgtgccatcagctccgctaggttgtcatgcatctagcgcacccactcgtacctcgaattgtcctctagagagctctaatttgggatttcccccaaatcagtcaaaactccaccgtgtgtgagctcgccgtggccagctctcgacaggtccaatcatgccttcctcgctcttgtttta

SEQ ID NO: 11839 - DNA, 374 bp, Zea Mays
gctggtccttcggctcctgctgctgaggaggttcccgtgcctgatttcactgacgccgaccccaatgggtgtgctccatctgctgctgatcccaatgggtgtgccccatccgatgctgatcccaatgggtgtgccccatccgatgctgatcccaatgggtgtgctgcttatgttgttgatgaaaacgacagggaggaagaagatgaggtccctctgacccggaagaacagtcggcagtatattgccagtggggagagtagcggagttccttctcctactttgtcagccctcgttggcctacaggagttatctctggcaaactttgatcagaccctggacgatatggttccagaggaccttttgttagagccagc

SEQ ID NO: 11840 - DNA, 637 bp, Zea Mays
atctcttgtaatgggagatagtggaacgagatagggctatagactaggtcgtaaattcacgctctatagtctggaatcgcgaggtgaatgcccgagcccgggtgatggagctaagtgtagccctagagaatctgcaagtgtacaataacactctacatgaggaagcgcacatgctatacgaccagctgcacccaaacgtgccaccggaggttgcagcaatgggagccgaaacatctggagcagctggtggaggaccttatggggagttggatctctttggagcccctccttccatgaaccttgcagatgaacgttctcccaaagctggtagtggagcgaaagcagtcaaggatgaagataactagagtagtatagtagtaggtggtatccttatgtaaattaaataaggaaagttgagttgtaccagtgagtatgtataattagtaccagtctggcataatgtaataaaggtggtgtacttatggagtgtaataaccaagtatgtttttcttccttagatgccatcaagaactcgtgctcaagacggggcgggaacttcccgcggtggggaggaaactctgaacccaccgcctgtacctcccatgttggctgaggctatcactgccttagtcaatgc

SEQ ID NO: 11841 - DNA, 475 bp, Zea Mays
cggcagagcatctactcggtggacactacattgttcagggattacatccggattctgttgatgggacggatttgtcagttctgaaactgaaggcttggggtttctctatggattgcttgccctctcgctatgatctccatgttgaagagccgacgtctattggtgaagatggatcctgcttccctcgcacattgatttactccgtttcggtgaaggtgactactccggttgcattgccggttgaggagcagcctctgttttcctccccggatgatgatgaagatcgggatagcaagcatcagcgtcagaggaagcaccttccaaatcatcagttctctgcggtccggacctccgttcatgcacggttgggaccacgtatcactccttatgggggaggtggaacagttgatgccgctcctcttccaaattcctcggttgatgagttgcaggcgcctgttcactccgtccctggcaa

SEQ ID NO: 11842 - DNA, 458 bp, Zea Mays
gccctattggggggcgagggcatgggtcaacaaagctcgggcgcggaactagtggggcggcacgacatgcggctcgagcgaagagcggggaggggcggcacattattgagctctggtgcagatcctcgacgaggccgaggcggggcgacacactgtggacagaggatgctaggcggacggtggtggcacgacgtcgagctccaggctccgacgcggatcctgggcgagagtgcagggcggcgtaccgtgggacattgatccggcatggacttggcggggcggtacgacgtcgagcactgctcccgcgaccagcacaaatttgggcgaggctagggcttggggcggtacatcacggtgtgggtatgggagacaaggaggatgaccgggacagagtggagtcgtggggaacagatataggggatggtcgatctccgatgtatggggtgtggcttagccgt

SEQ ID NO: 11843 - DNA, 818 bp, Zea Mays
atttgcagctatggagtggtcatcagttgaacagacatcgcacttgccaactgctgcatcaattctggtggaggatttgatagcatttgagacatcaagtctttgaactctttctttgcctcctgcttaaaataatccgacaacacttctttgtatcgatcacgtttcttgtacaaaccttcccactgtggtccgaatccttccttagacgagattcctcgtacacggcctggatgctcagggttaccgagaccagccattaggatgtctctctccctttgtggcttaaatgatccttggctctgcttagctgtcattacatatatgtttttcgcaacttctttgacatttggatcatcaaaagatacaccagcctcagtttcccagggttttctagcacgaatctaatttgccgtcctttcaccaagttgctcggaaagcatcggcaaccctgcggccttcttctcggcgtcttcttgtctccatttagaaacttgacgcttgtaaccacctgtgcctaagtggtggtggtacttgttcttcttagatagttctgattttgcctcgcttagagatatgaattcagggctgctcctctactctagaaatactgcccacttaccttctaagattttatatttttttgtcgggtgtaggcctttctttgcaaattttgtattcatcttagacctccagtttcgaaaattgattgcaagctgcttcatcgtgtattccttcacgagttcttctgaaccccgaggtagaacaaacctcgttaatagcttattccatatttgattcttgacatcatctgacac

SEQ ID NO: 11844 - DNA, 833 bp, Zea Mays
gtcggtgatgaagcgaagttcgggtgcttctaggactaggtttggttgcacgttggaggtagtcgtggtactagggatgcttaatggagtttaggaagagcagacattgttgccggaagagccaagacaatatgtggtgctatcctagtgtgaactctagtgagagccatgatgcgattgttattcctggaagattcaagcatggcaaagttccaaaaggtggggccaagggaagacaatcatggtgagccactaagaagtcatgaatctagagtgtctcgtcgtcgacgcggagtggtacattgaagcaagctccatggtagcaatacaactgccattgctgatcgagattgctgtgtcgacgtggcgttcaacatgtcttgctagactagtaaagttgacattgataatgtgtgtggcgtcagtggctctagcaaggaacatggttctccaggcatgtatgcttggctcttgatcgttggtgaggatcatcaagcttggctcaatgttctttgggctatagtcattcaccaaagcggtattgaacaaatgcttgcacttgtgcgcttgagcgaactactagtcgtagttgaagcataggcaacccaacattgttacaccatctcctctgttgtgaggtgtttgaagctacggtgcggtgatgtggttggggtttctatagtcattgttggggttgacgctgtaggcgtcgtaacaagtgtcagcttaaagcgcatgtggaggttgtggtaccattcttgttgctctagtggatgttgacttggtgaggctagcgacaacttcagtgtgtcgcttatgcatgccctagctag

SEQ ID NO: 11845 - DNA, 724 bp, Zea Mays
tttaaaacaaatcatttttttgtttattctattacttcaaatgtcaacttctcttaactaagtagatgtttttttctcgaactcgcaagaggattgcatgttatattaataagagaaaaaagtacagaaacaagggaggtggggtaaccccagcaacccccctaggaactaaacaactacaacatgagccataacagacaacccaaggagccctctggctcatgcagcaccccattcatagcactgcatggagataagctgcaataaactaccaagatcagggtgacacccatcaaacacacactgattcctaaacttccacagctgccaggcaatgaggatgatgatagtattcatcccttttttcttttccttggggaccaccttaattattctgccccaccaggatgcaaaacaactgtctgtggcttggggtgctaagactgcgaagccaaactgtcggaataaagtgacccataactgcctggcaaacacacaagataacaacaggtgatggattgtttcagcttcctgatcacacaagggacagactgaagggtgaggaagtccccttttagcaagcatgtcagctgtccaacacctattattgatcacttgccacatgaaaaatctgcattttgggggcccaactcttccaaatcaatttccatggggcaaaaatgattcccccttgaaagaaggccttataggcagccgttttttt

SEQ ID NO: 11846 - DNA, 682 bp, Zea Mays
gaaaccttgtcccgggcccctaaaatgttaggaccgccactgctgaaaaggaccaggtaagatgataatcatcttgtttaaaacttactccctccggtcttcaaaatgcatgatgttttggacatgatctcatataccaatgagttattaaataaagttgttcttttctatagtacccctaataaataggctcagatcatatacgaaatataaaatgatgtttgcctagttggttccaattccaatgctagccgcaagcattcaaatggctagctcgtgggatcaaatctcacgattccctttcatatgtgggaccatctagatcaggtgtatactatcatccaaagtgaaaaaaccttaaacatcaattatttgaagactcgagggaataactaaaagtaacagtttgtagcatgcacatatcacacttgtacacagaactacgatactgccatacattagaccacctcaaaaaatataattcaaaatgttaaagatacacacacaccagtggtatctaagaccgatccaagcaaagaaaaccataacaagtggggctcatgggcttggctatgatatccagggactcagcccacgtgtcaatgagtttctccaccagcaagtaattctcaaggggatggatacgataggagaataagatcgatatatgtgtaaatatgac

SEQ ID NO: 11847 - DNA, 387 bp, Zea Mays
ttcaggacattatacattgaagacatgacttattcggtacaagggaagagtatggattggtaatgatacaagtctctagcttcagattatttcagccatgcacgatagtccaataggagaccattccggatttcctgtgacatatcgccgaatcaaacaactcttttattggtcatcaatgaagaattcaataaaggattatgtggcttcttgctctatttgccagcaatcgaaatctgatcgcagtaaatatccgggtctgttacaaccattgccggtaccataccaagcttgggatgtgataagtatggactttgctgaaggtcttccacggtatgcaaatgcaaacaccatattggtcgtagtggacaccttctctaaatatgc

SEQ ID NO: 11848 - DNA, 709 bp, Zea Mays
cgagaattgaggataaaggatgaggagaattgatagcaaggctgaccatcaattcgagtcgtggactcgtggcaacaaggatttgcgtttttactcgcagcgtcgcagatgccagagggtgggctgctgtgtgagagagaggggtgatgaactgatgaatatgtggataaggatgataggccaccaaggacggggtcaggatggctagatcggcggccccatcgttgtcagcgctgccgagctcgatctctcactaatactggaatggtatggcagtggcagggtggtcggctcggctgacgacttcgagctctccgcggcgatacccagtcgtcgacattgtcgtgggccccgcatggcacgtcgatagaccacctcagacaactaagcgattgtgatgggttcggcctatgcgtcgtgtcgctcgtattcgtagcgtacagtggatcccaagcaacagtgagcactgggtggtcgagtcagtgtgtgcgagcgtgacactgtcgcgcaacggcgatcgttcatcagccacgagcgcagagagagtacctattcccgtgctcgtgcttcggcagagtttgtttggctgggtgggcactgggcaggcaggcagccagccaggcaggtgccggtggccggtgggcgtcgtccgcgctccatataggataggacatggaaaaaaaagtttgaggtttgagagccggctcag

SEQ ID NO: 11849 - DNA, 395 bp, Zea Mays
caaaccgaagcccttgccctcccatccccctccaaacgcgcgcaaccatggagagtggcggcatcattgcgccgtgtactccccaatgattgatctctcatcgtctcttcttccaaccacctcctcgtcctcgcactcgcactcgcactcgcccttctctcttccctgcccggctgcccgcttgtctccccaaaatgaccagcaacagcagccagaacatgagcagctgcagcaccggcggaagcgacgcggcggtcggcggcggcagctggctcggcttctcgctgtcgcctcacatggcggcgaccatggacggcgcggccgacggcgttccggtgcagcaccaccaccacgaaggcctcttctaccctcccgtcgtcagctcctcgcccgcg

SEQ ID NO: 11850 - DNA, 455 bp, Zea Mays
gccagaatgaagatggtttccccaagttactgagagcatgcacagtttgcctcggaatcaggagccagcctgagtatgatggtcgtgaattcatcgagcatggcacagagaagtgtgtcgtgactgtatacattggatctagtccacaccatgtggaatggagtgtcactactgctgggcatagattcaaagacacctgccaagtcatcgctcgcaaggcaatgagggccctatgtcagatctatgaagaagaagtggccgacaccccgctcagattctttccgccctttcagagagaccgtccagtttggatggtcaggatgcgtgcattggacgggaagcagatgcttgaggatgaccccacagtcgtgtacctcactgcatacctgctcaccctggatgcatagtatgatttcttggctcggcaccaccgtcagatgattgctcgagcagaa

SEQ ID NO: 11851 - DNA, 483 bp, Zea Mays
ttgtcaacagttctcttgtaataattggcttctgcttcatctgcaacttgggataatagctcatcctcagcctcatcagacttcttcttgtaataagccgcctctacctcttcagcggcctgagacataaactcgtcctcttcctcttgagcacgtaatcctgcctcagctagtgcgatgagctcactcaaccttgatgtgtcgtcctcctcttctccatgtaatcctgcctctgcgagagcgataagctcactcaatctagatgtgtcctcctcctcctccatcagctcaaccgtcgccattttatcctgaacatatcttgcatgcgcctcatcggccaaatagtttacgccacatccaatctctgcaaatataatgagcaaataaagttagcaaagtcaagataaataaattgtactaacataattatagtatcatttttctcactcacttcccttgaggcgatcagcaagattatccaac

SEQ ID NO: 11852 - DNA, 470 bp, Zea Mays
gagctcctcgccgcttaagccataataggacgccatctaccgtgggctagagtcgccttctcggtcaaaaagcaagggcatcccatagttccaaaggagaatgcgcccgagccctcctaacttatgcgaaaggagggagggtcagatccaccatgttgtaaggagggattagacatgggcatcattccacacaaggtgttcactgattatggtagcaccacgctcgccacactcatggaggacaacgcgcccccatcctcaaaggaaacactaacaagctgactggaggaagggtcgaacgaatcctctcggggtcgggcgacaagcccataacaccctcgtcagtactaatctctataaagtgtcggtctttggtctacagtccggcctaacctgatttggcatttgatgctataaagccagcatgtggggatggaccgcctccttgaagatgaatggctcgagagccg

SEQ ID NO: 11853 - DNA, 497 bp, Zea Mays
ctcaaatactaggaagcgcaggggctctggcgcaagaaaccagagactcagtgaatagcgcccccaggacggcgggttgattcctagattttctagggtctcttctgcaaaccggtaaagtgaaggggtacgggcgaaactgagccgcccgatcagaaacggagggctcagattagatctgggttccgcgtgaaccggtacgcaatgcaggccctcggatccaagatccatagccagggaacacacaccctctcacccattcgatcccgatcggatggccctcgcgaatttggccgaatcgttatctcgcttctaatcaggaccgttcgccgtgcatccaacggcgcccggacacccccttctcctcctaccccgcgacggcggcgcataccacccactcggcggagcatcgccggaggaacacaatccccgacaatatcgcaccaaattcccgaacccgaggctctaagcgtaactaaattgatgatgaatcgaag

SEQ ID NO: 11854 - DNA, 461 bp, Zea Mays
gccgccggagcgtaataccctactccactgtgtgatgtattgtgcttgagagcttgtatgaacttgtgagtctgagagtctaagtgagcctgagagtgtgtctgtcttgtaacgtcgtgtgccctcccttttatagctcaaaggggggcaagtacaagggtgctgagtaccgagatgtgggcccaggggcaaaatggagggaatacactatagaagcatctcatgccacaacggctgggcaatccttaggcgccataatgtccgtagtccatatagtattgatgtcgcgcgttgcttcctcggtaacgcgcgagtgatgatgagcatagtgtatgctgcagcacgggcgtactgcttgccaacggaatggacaggcacgccgcctgcaggatggcctggtcgccgcccgtcagcggagtggacatggcacattaaatgctgaggcggcacatcgcctgcca

SEQ ID NO: 11855 - DNA, 629 bp, Zea Mays
ggtacagtgttcggatcagatcgccgggttcagttcatctcgccgccggtgatcccgcgccgagatcctcgtcgacgttgcgattcgtgctctgtggggtgcagataactcctaagggtaagaaatatcacatcgtggatgaactcaggccactgttcactgtctggtgcgtaccacgtcagcacgcccgtggatgaactcagaccttatgaatttggcgccagcaactaagtgaacatctctgatctttagaagagggctgatttttgacttagagaaaatttgggttgctctatagtgctctccacttgggggctgaatttgggggttttgtgggacctttttgggataatttccttactctttcttgtagatatataaatgtacttcaactttggtataaggtttaagtcatgaaatggtcatttgcataggtttccactaatcccatgcttgggagcctaatggctcaacggggggtatagggtgttagcatctttttcctaggtgaagatacatgaaaggctagggtattccctctatcatgaccattacttaatagatccatggtttctaaggttttggtgccccttctccccacttaaacacatgtgataataggccatagg

SEQ ID NO: 11856 - DNA, 332 bp, Zea Mays
tggcgttcgtgttgtcggtcccgaggaggggagttggtagtatgtcgtctcgatcgtccctagaacgacccactagtcgaggctacggccgactcaacacgggtggtgcgacttcgtgccgggacaccatgatcccggtcatactcctcccgacgcctttatctcattttcgtgtcgtcggtcgcgcgaagcgttgatggagctccgcacgtctcgcgggctattgatggcgtgacgtaggtcgtttgctggatgagcgatgggtagaaggtgactagatgtttgagtaagcagccgccggtagccttctacgtctgggttcgcgggaggcc

SEQ ID NO: 11857 - DNA, 462 bp, Zea Mays
accagtcttaacaaggcttgtctcaaagacccgtatccacttccatgaatagatcaaatcatggattccacctccgggtgcgaccttttgtctttcttagatgcttactctggtttccatcaaatccagatgtctaggggagataggaagcataccgcttttgtaacagcggatgggctttactactatgtcgtgatgccctacggtctgaaaaatgccttgtcaacatttgtgcgggcgatgagtaagagttttggggacctgatcagggacaaagtggaagtatacgtagatgacatcgtagtcaagaccaagagagggtcgaccctagtggaagacttgaccctagttttcgacaggctgcgggcaacccgcacaaagctgaacccggacaagtgcgtctttggtgtctctgtagggaagttgctggggttcctggtttcgtaccggggcattgaggca

SEQ ID NO: 11858 - DNA, 397 bp, Zea Mays
cagggttccaagcttggtcccttaattggtatgacatcccactcatccacagatgacctgaaccgtggcgtatccgccgacatttgccgcatgacggagaagcaacgtctcaagaggttcacaatcaacctcagacggtgtctcaataggcacacaaccgccatcaagcggaaggcgatgggagcctcacccacaacaaagaagtctaccgctgccaccttcccaccaatctccataatgcctgaggtcacctctgtctacccccagcctgagttaacaaggcttgaggctcacactatcggccaatagccaagcaaaggcgtgaatggctccatcggtcagccactgtattccatggttagaggagttgtctcccccgaccacaggggatggcttc

SEQ ID NO: 11859 - DNA, 652 bp, Zea Mays
agctgatgtcagggatgtaaatatgccctagaaattcgtttgaggtatgcacagcattagagcaggggcaatagccctgtgcaaggttttggttaccaatcaggtagatagtagatatgactgcttcggttccaactacagccagaagagttcctatgatggaggttgtccagtatatggcttatgcagttagagtatcttaagtttggtgaagtttagtgcgcaacgcattagcataccgtacatctgtaagatagacctatgccagtttgtgcatagtgtgcttgttctggtaatataggtaaaagaaaagtcgttaaaacaaactatggcaactaaaggagacatttagtgtctaggacagatttcatggtttgtgatgtctagcaatcgaaccactctgtgcaggtacaagatatccctcaccgctgaagacgacactgacaccaccgaatttatcttctttggacgaatggcgcaacgcctcattaaaaaaaatgtggacaccctcatctcgactaatccacccgatttcattccaaaagagattacaaatctactggaaaagtctttcgagtggaatgttagcttcaccgaaagcacaattatttatggcaatgtttccttccaagtgaatgctataaacgcaaaa

SEQ ID NO: 11860 - DNA, 435 bp, Zea Mays
ctgtcatcctgatcttgtgtgtttgatcttgttgtgtccttgcctgccaaattgctgtgctaaacctgcggcagagacaaccagtgtgccgcccctggccctggctatgcggattcttgggagccacggtatttgcacgattccctctgccctctttgcataccaaaaaatctagtactccagtagtagtacattgtgtgtcctgcacttgaccaatctcgctgcagcacttttaacgtgtactactactgattaacttttgatgagcgttacaacaaccatggcacaacctggtttgcgcacactactaccatggcccctctcgcccccagtccataccaaccagcccaatccaattcggcctgcaatggtggtgacacacaggggataggagaccaagacgatttgccttctggcccaacagcccaaaagttc

SEQ ID NO: 11861 - DNA, 574 bp, Zea Mays
ccaccctgctcccacttcgtttgtctcaaatcaaccaagcccagctcttcattcctcagttgtgaatccaaccagccactagccatcacgttctgtcccccatcctctatgatcaacggagttcccctgaaccagtttcttccgccgccgtgaagaactcttccatggctagcactcctcgggttagtgcatacccaattgattcgagttcttgcttgtttttagccccctgttgctctcggagccggccaattggagtttacctgagtctcatcaccggaacacccctctgctctgtagaacgccgccacgacgccctctctgtcgaccctcttttccactcttgcccagcccaaattctagcatgtacgtaaactctggtgaacccgtgaagcttacccaagcttcaatttagtcagccatgctttcggttatccagaacgcattgatccatttgaccatccgcactgttgccatgaactggttgattcgaagccccgttagtaaaattggttgaggggaatgcgcagggggagttcaatccgatgtctgctgcttgggagcactagtcttt

SEQ ID NO: 11862 - DNA, 300 bp, Zea Mays
tttttatcacttgccgtgggagtatatataaagaaagtgagttctgttcttattagacaaaagtgcaatcttactagacaataatgatgtaaaaataacaaagtaaaacaatgcattgcatggaccatttcgattcatcgtttgagtgtcttcttgctcccacatgatacttttatctgtccggaggattgtgaaaacctacacaacgtaggataaattagctaaagagctactactagtctaccaccattatcacccgccacacgtatcattatcgccaggtcatgggtcgtcctcccg

SEQ ID NO: 11863 - DNA, 702 bp, Zea Mays
cttgtagcgtgttataacaggtgtgcttgtgtctctagaaagaaagtggacttgcccttttatagctcaagagtcggactttacaatggtaacttgtattctactggagggagctcgactggttgcccttggatggcgtagtcctgacgacgttgtctgtagggtcgtacgctgccgtactcttggtatggcataccgccttgcccgcttgtcatacggatccctgtagcaagttcgatgttgatgtagcggcgtctgacgggtacaatagggtagacttatggcagagcttagggtcgtgcttgctgtggcattgtcttctatcatgaacctcgcgtcacctccagcatgcgtaggcgtacacccggtatggtgtatcgtcctgtcctttcctgtatgtgggtcactgtagagactccgatgctgaggtccctacgaccagggttgactggccccacacgacagtgggggttcgcttgagactgtatgcggtggcataccattgcctttgacagggacttttcgacatcgtactcttggcccggacgtggtttggtggtgacgtgtcttgtcctgctgacgtgggtcagcagcgttggatcagcccttctcctttgtcggattgcttggcacgagacctagtcgtttgctccgcctcgcggtactgctcggcagaaggttggtcgttcgttccgcctcgcg

SEQ ID NO: 11864 - DNA, 925 bp, Zea Mays
gatgacattttcttgctggcatcagatatctggcaggataattcctgaacattctttgtcttctctgcaagcaaattcctaagatgctggttttcacagtatagtgaatcaattctactattcaatctgctcctttcatcaactgcatcactagtactgattgtaggtgcttccattccattggacataatttggtcaaatcttgaaatgacttcagggaatctcttcctcaaaggctcaaattctacatcgtacttgagagccagtgaccatttctctcgtttgaatttgaacagctcttctgttttctcctgcaaatccagctcatgcaacattttcaatttactgatctcagatctgaaatagttaagaatttcttgtccagtcatgcccttcagatgtcggaagtcagatttttctgaaataacttcactgggacttatagatttctgtgttgcagatttctgattttcctcagaggaagatagagagtgatccttttgtggtatctttctgaaaaagctgaacttccatctgtcgctccaattacccaaactttcatgtctacacagaggaatatggtgttcctcttctgaaggtaatagcatattagaaatagcaatcaggtcttcacggatggaagcacactgagccacagtttcttgcgaattttttcttagactgttcacaatggagctttgctcatacaacttcctctctagttcatccttaagacctctgacacagtctccaataataaagccagtaatttctaactgtaactcatgctcccactgaaaatcatgaattgaagaattaaccagtgtgagcatctctctaatttgtcggaacaccacaaccagcagcaacttcaagctgttgaacccctcgtctatctcagtcagcttcccaacatggcctagtg

SEQ ID NO: 11865 - DNA, 592 bp, Zea Mays
cgggagccacgacacaacaaaggaggggcattgagggtgggaaagtagtgggcgcaggtaggatgatagcagagctagatcggatcggcgtggcggtcactggaggcaagcagtgcacgctcggagagaaataggggtggcgtcgacggcgcatcgggtcggtgcgacaagagtgtgtgcagtcgcattgaagcatggggggaggagcccggcacacgcggacgccataggatggtcagcgctagtggggaaggaagcgctcacggcagacacaagaagttagctagcgcggggaaagacgccagcgttgggcatagggagttggctggtgacagggatggggcacaggctgggtgcagcagtagtgcgacgcggaggttgaggtcgcggctagggagataggcaagtggacggtgctattgtgagcaaggtagccagccagggagagaaggccgacaaggttggtggcatctggggacagcggcacagcgtgggaggggccaccggggctgggtgcaaccagtggcggacccaggatttgaagacagcctaggcgaaattacactgctatactctacgcctgtgcctagac

SEQ ID NO: 11866 - DNA, 591 bp, Zea Mays
caggaatttcttcaagagaggcaaccaaagcactaacttcttcgggagagggtcgcactctaaggcccaaaccgctatcaccagcaggagaatttgacacaaaactggtaaaggccttggaaggaggcagattccaggccgagtatgcaacaggagcgccgacgtttgacaccttgcctctgagtatcatctcgagccggctcaccaagtccacgacaggaattcttctgttggttatccgagttgaatcagcaaagcctcgatacagataggccggatatggtctgtctttcagtggttgaatgttcttgaaaacaaagtcagcgaccacagcctctgcagtcagacccctttctttcaacaatccaacttcagccagcaaagcccctgcctcagccacttcctggtctgtgggggattcggtccagctcggagtgcgaacatctggctgtctccctgaccgtggggggagagaattcccatgattctccatgataaaccattccaggcgccatcccttgatactatccttgagtgggatgtcgaggtagtcagccttcctcccatggcgcatctccaagctcgcgcccc

SEQ ID NO: 11867 - DNA, 449 bp, Zea Mays
tgaagcctataaattgagggcggggacagttgcgccatataattgtgaagctgtagcaaccactcctaccctcgatcgtccaccagcacgcccgaattgcgcattctccccaattcggttcaagaacaccgcgaagagcaacctcaccgcggccagccctttctaggtccgtccatccctcactctctcttgtttgagcactctggtcaccctgcgatgcttaccgaacctctaattcgaactaagagactaccactcgccgggaacacgatgatcttgccacgctgctcacggtcaccgtggccagtgagttttagtgcgcaattggtggaattaagttaggggaaacatcaattaaggtatgaattcggtgttagtcgacggagagcgctagtcatagcccctattggccggtctacgcgctcgccggagcttctccgtgcgctgcc

SEQ ID NO: 11868 - DNA, 326 bp, Zea Mays
ctttttggaggtttattgttgatagggacctatgtggtattaatagcagatgagttatgtgtgactcagccaacagtggttatatctagcaagccaacaatggttatgtttgctagaagtaaagactagagaggctagatttcaaagtgcgcgtgcgtatgctgcgggcttggtccatggatctgcggtgggatggatgtgcggtccaccgtggaccaagtcaacagatggaggcatggtgcaatacctttggtgtataatctctctgtaatctccgctcaaaatgtattcccccattgcccccttgctttgctggtaaaacgagc

SEQ ID NO: 11869 - DNA, 610 bp, Zea Mays
cctttatttcccagccagcgcgccctctgttctctggttcctctggcgattcactccttctccgccggtgatctccagccaccggcggccaccatctccggtgatcctccggcgacctcgcccgagctcttccccctcggtgagcagctctccccctcccctgcctttctctctctctgtctctaggcagtaaaccacccttttgcaaatccttcaaaattctgtgaaatccgatgaatccagttggtggaatatcttcctttgtccctattacatgtccctgcaggtccttggctccttcgggagggttttcccaccccaaataagcttttcactgaaaccctaaatccccgcccttcacgtgttcggtgaaatgcctaaaccacccaaacttgctccaattgaacccaaatttttcaggcaccttcaccacacttccagtaacctacttaccaaatttcacaccaatccgaggtcccaagcttaaatttcaccaaaattcccgttttgagcgatcgtttccgagccgagtgccctaattcctttttcttcgcctaaattcaaaccaagcacacacttcactcatattcacctatataaacctattcgt

SEQ ID NO: 11870 - DNA, 730 bp, Zea Mays
agacaaagcaaggttgcacactgtctggatcattgcagaaaatgtaccagatgaaatgcatagttatcaaactatctatgagttgggctctatggtgggtgcagtagaggaagtggatctgcaagctttagaggaaaaaattgcattagatttaaggttcatgtgaaaagtttgtccatgataccaccgatgattgaggtaggagtgaagcctttcttgtatgatgtcttcttaaagaatgatcacatcgaagaaaatggttggaacgatgagacaatcaatctagggaaaaggaactcggtggagattaatgagacaaatgaaaaagaggatagggggagataaaaaaagctagatgtgataacaaggaagagggatctggtttgaataaactagaaaaaaggagtacctgacactaggaagggtaacttgactgtcatggcttcaacttataagaagaatggggaagatgaatctggcttgttggatgatgatgagggagaatagaaagtggattatgatgggagtgatgatgatttgttaagttcccaggagacataggattttgctaaaaaaaaagtgggtggtctaatgcatgattctcaaaacagtgagaatgaaacaaaggaagaaggagcattgaaagatggttttcagctggtaaaaaataaaaagggcaaaggtaaaatgggcgaacaagcagatggtgttaggagaagctcgaggctgg

SEQ ID NO: 11871 - DNA, 580 bp, Zea Mays
ctgagcggagagatagaaggaccaaaatagtggagcgggggtcctgactgaagagcaggaacaacagcagcctaaagagtcggagggggagcagtctgcactggtggaagctgaacaccggtatgctggagaatatgtgtcatgaatgcccggtgctctaccctatctgctaagagctgttgctgtagggtgtcctagcggtcctgaatagtctgaaacatcaatagcatccactcagtcatctgctgctgaatagatgcctgtcgggcctgctcttctgccagatgagcctgctgctgagtaagagattgaagaatagtagccagggtagggtcaatagctggagaggtagcaggagcaacactggaactaccagcctcgtgatcatgggagcgaggtggcacaggaggcggtggcgggatccctaggtcctcatcatcatcgaaagaagtatctgtagtgacaccctgagtctcgaactgtctgatagcctcatcctcagccctgatatctgatactggagctggcattggaactgtgtcctcaggagctgggcgatagaagccaaactgaagtcgag

SEQ ID NO: 11872 - DNA, 710 bp, Zea Mays
gcgacatcagttagatctgcttggtcgggatgactaggccgaggtcacttgggacgaccaaggttgggatgatcaggtcgggacaattttggtcgaagccgacctggtagatgtgactaggtcgaagcggttttagttgagggttgtcctagttaggaccacattagattgtgctcttctcttagaatgggcttttggggccatattgggataccttaatttggtatatgtacacatcactcataaagttattgggtcattccctaaccctatgcagtttaccgccatgagttgcattgggtggctgaacatgcaaccccagtaccccacaatcaaggaaagatcctcttccatctccatctccacagcaagggatccatcctttagcttagaattcttcacgccacactccgcactagcatcctatgccatacgcttacgctagtggcaaagctagagtgaatcagaggagtgtgcaaatgtcttgagggtgcatagtgctaacatataggtggtgcatatatggtgaaaatttggtctaaaccactgattttattaattttcgtgggtgcatatgcatctgcagactcaaacctaacttcgcccctggcttaagcaagctagatagagagccactggtcttgtttggtataacttatttcacagcttcttcatgaatttaagtagaagttgtaccatacaagacgttt

SEQ ID NO: 11873 - DNA, 554 bp, Zea Mays
cacacctagagctatgggagatataagcttcttcgctttataagtgcttgttggtagtttgttgggttttggtagtaattgggacagaaaattcaaaagatctgtgaagctagtatcggaccatccgacgctagccttcaacttaagaagttctagaactgtacgcaatgtagtaaactctttgtcacaaccctttgattcatcatataaaagttcttttgaggcactttccagtccctccattttagacaaccccttctggccttctgtgatcccacagaactcaacatttctggttccatatggcgcaacatctcttcacaatcaaattcttcaaaattttgattggcatccacagaatccactttatctaaaattccgacaaccatgttctgtccatatcgtgtaattgtttttaaaccctcttttcaacagatgtgattggattactcctatatctctccaagctaccttattatcacaatcgatgcacagacataatatctccttactctttcgcaaattcgcgtgcttgttggctacttcaataaagc

SEQ ID NO: 11874 - DNA, 733 bp, Zea Mays
cgcatgctaacagcaaggccgccgtatccaggtgcttcaacgcggatcacctccctgtgctgtcacatgggcccgggaggtcaggacttctcttcccccttccaacggagtagcgcgcatggcgggcttggccgttgcgaaaccttcgcacagccagttccacggtcagccatacccggttattgcggatcgctgggacacgggaccataaaattccaatgcgcgcgatgaaaactgaagccctctgttaccgccatggccgcgcggaatccgccagctcggctgaccgtccctgcggactataaagccaatgtggccatgggactcgttcgctccataccctcgcaccctccctgttcctcgcgccatcatctgtgagagagagaactccttcaccatgtggagaaattgccgccatcgtccagttcgcaagaactcgcgggccaggctccaagcgacataatcgaaggtgagaccccctccatgtagttcgcgttgccatccttcacgtttgacactatttcgtgttgggtttcgtgctctggttgccgctcagggatgtgaccggctatggctccgccgtggctgagacgccggcgttcacgcggctggccggggaagtagggatgacggcagggttcgtgcgtcgttggattcgctgtgggcggccatgattaaatggtgcgcgtaccgatacgctgggtgaacctgggccgtttgatctcgatcgggc

SEQ ID NO: 11875 - DNA, 822 bp, Zea Mays
ctaaaatggagttaaaatgtattagttatttttctggtttattttattaaatctgagattgatttggacttcgggtataaatttctgaaagaatagggtcaaacgtataaagttgaggacctgaatgtcataatatcactactacagaggatggcgggtggattatataaaagcgcagggtttcttatgtaaaacctacgcagcgaaggggtacgtgtctatcctagccgttgcatcaacggcgtgtggcccagattagaaccgcataactccgaaccagtacacaatcgtggccgttggatttgtgaccgacgatccaggattcaccacgccacacacctaatctgactcgcccatattccatcgcacgaccccaattttatggggcgaaggggtatgttcgcttttaatcatagacgcccatcacgagatggacggtacccgcaccatcttcaacctctcgcactcctgcatctctctctcctatctcttctagcgtctgccgcggcagaactgcatccaccaggcggccgctattgccagcaaacgccaccccgatccagcgctcaggtggccctatggtccatgatgcggtgcaaaaaaaggattccgtgacggtagcgaaccataggcgtgaaatcgtaccgtcgttggagacaaagacaaggccaactgtagcatatggtcttcacggcgtggcggtgtcatagccggtaaataggactccatgtacaaccctgaacagcggcacatgcacgacattgatcacgacgacggcttacctctctctctggtttttttcggctggtcgagatattttcg

SEQ ID NO: 11876 - DNA, 447 bp, Zea Mays
agaggagaggagagaagagacgagaggaaataaacaatatctattgctttccatataaactcataaagttatatatattccaatcccatggagagatgaggggaggagagctacaaaaaccaatcctgttctgtttctccttttaggcctaaccctatgcagcagcatattcatccaagaaaccaacaacctgtaacatatcccttattatcctacccattacaaacttgtcattaaaattaaattcagtactgactaatattatctcgatcaatcttcaaggacatcaagctcgattttgctatgctacagagaatggtgcatgtggacccttcttccttatatgcatcaggtggtctaaagttagctttaacctttagcccaccttacattagagatttggacatcaaaagaaagctaaaacattctaaagcttttagatctcta

SEQ ID NO: 11877 - DNA, 886 bp, Zea Mays
gggatcttcgtctgcacaggcgctcgggtcacgacggtcgcctgggtgcttcaccaggccgtggggttgatatcagtggtctcagctggccaaatcggtgggcaaggggaagggaatttctcatcagcacgcctccgtcgccgctgttctgtcgtaccgcgtcgacaacctcatcctcgtcaccatcgacggtgagaacgcctctgtatggctcgccttcatctctgctccgtctaccgtcccttggatttgaggatttgtgctcagatcggcaggcggccgtgcaccggtaatggcaccaccgtagggtggctggcgccgccgctgttcgcgtccggtgtggtgcaagcgtactagggttgcagatgaccgttggatcctattcaacgtttgtgatccaatcaacgagataccggttcgggaatagatcgtaaccgttgggaaatgcattgagtggttaggattaaagataaggaactcgttcggtcgatgcgatcgtagccctcgatttgaaattggacggttccggttgcttaccagttagagttatatggaacctaatcctgaccttgtgccaccgatcggacggctaggatcgtctgatacccctttgaccagtgtgtcttgcaaaagagaccctgggttttcatacattcaacctaccgtccacacctgtggtaaagtaattgcacctggacccagaaatttgtgaactaaaccctgtgtttactggtatttatgccagcagcccagtgagcacctaaaatgaataaaacaatttagaaaatggtttccaatatagaaataattctagaatattgtttaattcatagaaaaattattttaattcatttttgatccattccagttgcgttgaattcataat

SEQ ID NO: 11878 - DNA, 682 bp, Zea Mays
atgctgcgatgtagagcgaatctaggttgaattggagcatttaggccccgtagattgctcacgggagctctaaaccgcctcgaacccgcctagctgcgtggtcagctctgccctatacatccccgcctaaaaaatacctcggttgtgttcgccgttgttccctcctcccgtggagctaggatcgatgagttcagggaacgattttgctagatgctggactccgtccatgcgcgtcgccgtggctcggcggtgggaaggggatggatcttcggacccttggatcttgaccaacggtcacgattaggcagtaggcgtacctcttcacgtgatcgatccggaccattgatccagtggagaacggctgagaatagatgctttcggtgatttgatccgagccgttgagcggatcgaatggtccatattagatcgtgtcccgttagatactgaccgtagatctgggatcctgtggtcgcgagcgcgcaccggttcattatatgggccgatctaatctaggtcgttcgtgcccgatcggacgactgaaaccaactcataccctttcgccctggtaatctttcctaagagccctcctagaattttaaaaccaacccgcagtccatctgtatacaaagatcattaccataaggtccttattttctccaaacaacccctgcacttgtggata

SEQ ID NO: 11879 - DNA, 509 bp, Zea Mays
caacgagccaggcggggctaaaacgtatcgggccacaagccgccctacaaacctgtcccatgtggacatgtatactctcacactagtgacgcgcacgtgcaggtaggtaacaatgcaatttaagttttcctatagtacaggttcggtgcacattggaccttggccatgcctgtaggttcattgactgttttgtccatgtgtcaggtgttagggtggcattagaccggtccagtgcaacaccagacctaccacatccgagccatgtcatctaaccattgggtaaactccatccgatcgttcgatgtacgagtattacggtgctcaatggacggagtcctatgctccaagtctaaaaacaacgtctctacgtaagtggtccggtgcaccaccggaatggtccgattcactaacccacacaagcccagaataatgactctttgcgtaaccggtccggtgcacaccggacttggtctgatgtgccgcaaagcagcacaattaagtcatttctg

SEQ ID NO: 11880 - DNA, 590 bp, Zea Mays
gaagttcccatggtacaataacctgaattagatcaggtgcagtgaatctcaccaccgatgaactcatgccgcgattcgtgctcattggcgcgtcgataactgtgagaggtaaaaagatcggaagggaggaggatttggtcctggatgtgagcttatcggccgcactcgattgcctggcgacgtgtctgtgcggtcgatgtcaacgggggatgccggcaatctcagtcacgccacgtcataggccgttttaccacgtcgttgcgagtcatggagagtaactagtgactgtcgtaagaccttgccccagtacgcgccatggtgaactcactttagcaacaatatcccttcaccgtcatgatccaaatctcgttcaaaatttggagcaaccatgaccgacttctataaattgagcgcatcccttgctccgcccctttgtcacgaacccaacgcaactccaaccacgtcatgccatctatcgttgctcgtgaattctggttttctcccaattcggtctgccgtgccgccgtgagacaccttgccgaggccaaccatccacaggtcggtttgtgcttctctggtttgtgttctag

SEQ ID NO: 11881 - DNA, 577 bp, Zea Mays
acttaggacaccgccgcgtgggaccatgttgtcatcaactacctcccgagcttcgcgcgtacaacaaaatccctagcatggtggagttcagctcctcgatctgcgcctggtcggactctatctgttcttggggataaaatcggcccccttgcaacccctgtttccccgtccctcctcggcggcaatcatcgccgcgcctgtggcgctaacgacttgatgcgagatgtgcgagatgtagatcaggccgcctccgtgtatccacgccaccaccgattgaccagcatcgattgggctatcgggggcttcatcgtggactggggatccctccgtgctcggtggttgcacgggtctagtcccgaccatggccaatcgttcactggagttccctccatactacagagtcgtgcctcgccatcgatacacccttgcccgtgcatcggggtttgagggcctggtgggggttacggtggttcgccagcacatgggtaatcttcttgcgccaattctacgcatggacttctggcggctcgttgatccttgccggacttcaaggaccgccgtagaaccgtcttctccg

SEQ ID NO: 11882 - DNA, 684 bp, Zea Mays
ggggttagccggatcataactctcatcatcactatcaaccatttcaatctcaacaccatcggaagacacaacctcgtcattaatgtcattgccttcaaggattactaagtcattatcattttgcacctcatcctcctcctcatcaacaaccatttcaatatctacgtccattccgatagcttcggttaagtctatctcaaatcgcccttctagcccatcttcttggaagaactctccatcatatgtgtccggatctaagttgtaatcttcatcgttaggaataggtaacctcccgtgcggtgataccttatgcacaacatcccaacccttaagatgttatttcgtttggaacgcatatgggagataatacacttgtgtggcctgttgggccacgatatagacatcgtctcctggtaaggtggaatcttgtcgaatttcgactatcccaagattagaatgtgtccgtctcatcacttgagggtcaaactaatgacatttgaatatcactggagtaagaggtttggaaccataaaaattaagctcatatatttcttcgattcgtccaaaataatcgacattgtcaaggtcgggcataaagactccagaacacgttgtttttcgattgggccgacttttgtcgtagtttgttgtgcgaaaacggtatccattgacgtcatacccaga

SEQ ID NO: 11883 - DNA, 612 bp, Zea Mays
cttcggcatcggtcgttgcaccccctgccgcctggcgtagatatattgtgaacacctcgctccgcccagtctttccccataggaagctagcgccgccgcgacccgtgtcgtgccataggagctgccgccctcgaaatcgcgccacacccatctctggccccgaaaagccctggggggacgtccgtaccgtagtgttgtgccctctcgacgcatcctagcggaagaatcgcgatcggttgtgggggaatttctcgccgtcgggcgcatctgcagtgggtccgcagtccattggtgcctgggacccctactctgcaattcctggtatgagatgctcattcgtattcaccttgacccactgtaccttctgcgcgtattggaacataggattaggtctcaattcaccggatggctatcaccggtgaggggcgcggccgcaggaagaatcgccaccgtggtcgattccggtggaggtaggagacgagacctggtctgttgatctgtgacgaatggctagcattagatcctagcttaccccttcgcgagatttgatctagatcgttgtttcgatggcgtgcggttttgatccgatcgggacgtggtcgtccctcaacc

SEQ ID NO: 11884 - DNA, 503 bp, Zea Mays
gtttttgaggaccttcggaagaggacgacgagtgggtgcgaaaattaataacagcgcttcatgtataaattaactcacgtggaggacgatgagtgggtgcgaaagttggggcagggacacgacatgacgagtgagcgacgaatgtcaaggcgaggtgcagcggactcgtggtcggcagagcgatgatcgaacggtggagcatcggctggacactacggagacggccgggagggacacgacatggaggacacgacggtggcaaggtggacggtgagggcgaggcctgggcatagtgggggcaccgccgggaattcgtgggagtgtgccggggcgaggccggggcgagctgggcggcgacgtcatccgcggcgaggtggacggcggggtgggggcaaggttgggccatgatggcgttgcgacggagcgacgggagcagcgcgtgggagatgagtggaattgaggcgaagcggtcgggccgacgcccattaaatcagtaatccctg

SEQ ID NO: 11885 - DNA, 522 bp, Zea Mays
ccggagacccgcgcccgcgttcctggccatccagctcactggagaccgctccaagcctccccgagctccgccccgaggtgagacacccgtccccgtgcccaatttcccttattgcgccctgtgttcgtccaattttgccttcgccggtgctagaccgcggtggtccgccgtgctcgcgcggtgaccggccgatttagcccggtctagttcactagagtaggtccctgtgtcgcccctgcctctgctgaagttagccaaggccttagcgcaccttaagtcccctccccgtggctggaatcgctcaccagagtttctccggcccgcctgagactctcaccgccgttctcccctctctgcccgtggattcatggcctcttccccgccattgagttcgccgtggcaccctcttcccctctacgcaactccggcgaccccggagccaccctagcttgcgccagcctcaactccggcgacttcaccgccacggagaggagcagcgccactcgcagctgtttgtttccc

SEQ ID NO: 11886 - DNA, 321 bp, Zea Mays
agtcttagctgtgacaagaggacggtgaagttagtgtccttatcaggagaggaagtgttagtggagttggtcttgtctggaccaaggaaaggaagctgtcaccaagtcaccgcccatattgaggaaatcgagctattagaaactatcaacatagtatcagaattcccaaatgtgtttcctgaggagttaccaggcataacacctgaaaggaaagttgagtttgccatagagcttatacctggcaccgcccctatttccaagagagcctatcaagtgtccggaccagaattggtggaactcaagaagcagattgatgaattg

SEQ ID NO: 11887 - DNA, 449 bp, Zea Mays
cctggtgccatcattactacctctatgacacgtcgtctcctggcctccgtagcctgggtctcggcacggctcgttgtattgcaggtcctgtagacagtctgcgtacctagacctagtctcactatgtcatgagtgcgctgtaggccgagggacacatatgtcatgagtgtgtcgcgggttgaggggttcgcaggtcatgagtgtgaggcagaccgacactcctaccgcggctcactgtcggtcatagttaatgaggccaaccacttatgcggggttagttaggtcaagcgaggaatccactcgagtgacttccttttggttcatccggtcctctctttctagcttcgcctcacccgaccccgggctcgcgtgcctcggggttattcgagggcgcgcgggtgctctccagggtagacagtttctataccttcctgatgaccggtgggtcc

SEQ ID NO: 11888 - DNA, 333 bp, Zea Mays
accgggagcgcgtcggagatggacgccggccgcaccaacgccgggatgggactcacccccgacgacaccaatgtcgtacttaccttgccagcccaggcggcgatgcgctgggccccggcgcgttgctcagcccagaggtcgtcgagtgtcttcctcatcacctccatcgcctaggggcccgaggtcgtctgcgtcgcagagcgttttgcgctgcctggagctggtggacctactcctccagtgcccgcactttcccctccaaacgcttccctttctcctctgcctcgagctcaagctcatccagcagcttgttccgccttgcccacatctcct

SEQ ID NO: 11889 - DNA, 460 bp, Zea Mays
gagaatctagttgtggagagaatctgattatcgtggagattacgtgtggtggaagataaaagagtccatagggaaaggcctctagtatttggggcctgctggtcagctagaggagatagataacatctaccctggaggcaccctccctcgaacgaaccacacgacaccgagcccagggacgggcgtggcgaaacctgacaggggaccgggcacgccgaagggaaaccactcgagtggatcatgtgcctagtccgagaccgacccgtcataagtgactggtcgcattaactgcgcctggcgacgagccacggcgaaggcttcggtctgcctcccactcatgatctacgaacccctcgagctgtcatgcacttatgacctacgaacctcttggactacggcacactcgtgaccaatcgggactaggcctgagtgcgcaaaccgttgcagggcacaacacaac

SEQ ID NO: 11890 - DNA, 651 bp, Zea Mays
cagagacagaggaacggcgacttgaagatcagaacgagcaagatgatgctcggtgtttcctccttggtagcagctcagctgctgccgtcgaggttcatggcaccggtgtcgggacgggaatggagactggaccgagcacggcggatacgcgcaccggatccaccagcccgacggcgacagccgatgctagcacatccgccgctgcccctggtaagcgctccaggaggcggggaccgacctctaaggtttggttgcgttttgaggaagttactgagaagcagggaggtaaggaggtaaggatttccgccatttgccttcactgcaagtacacactgtctgctaaatcttcttctggaactggacacttgatctgtcacctagaactttgcccccgctaagaaagataaagaaaaaaccggtagatctcaatccatgcttaagtttaatgttgatggatctgttgtgcactgggagtacgctccatctgttgcaaggactgagctttgtcgtatgattgctagactagacctacctctgtgttttggtgaatgtagtgcatttcaagaatatattactcgtgctcataatcctcggtttgttaagtcctctaggcaaactactgctagagacttaattaggctttttaatgat

SEQ ID NO: 11891 - DNA, 718 bp, Zea Mays
gttcatgcggcccaatatgtctcatggggatgtgcttatctgcaccgaccatgtctgccgtttttgtgtgctcatcaatatgtccagctgccctcaatgccgccgggggagtaacagacacaccctctgtgtaaccggtgatcgcagacgctacaggatgcatgtccattgaaatagacgtacctgttgatctatgcacagacgctacaggtggcatgtcatcgccagcgccggtgctggacattttctcgccgctaatcgccgcccggtgctctccctttcgccgccgttaaccgccgccaatatcacagatacgaacgtggacgagcggctgtaaattagaatttgtctcctcccgtaattgtgcctttatttacgcgaacgtggagcaagtctttcctttatctcaaaccggtggagatttaaatgttgcatggtttacgctatcatgttacacagcgttatgcagtcgtaaacggtgtgcacatggtaatatttgttcccgtgattcgtggcataaaagattccttctatgcatgagttatgcacatttctacatatatttacgcgtgcgtatatcgcctctcacgtctcagccgggattcgtggctatcatatgcatggctgacgcaagctcgcgtacagtgggccgaccgcgacctggttggcgtcctggctagggcttcccccactaacggaagcccagggcttccattac

SEQ ID NO: 11892 - DNA, 707 bp, Zea Mays
gctcccttcatctgatcaaataaatcttcaatccgaggtaacgggtatttattcttgatggttacttcattcaaactgttataatcaacgcacattctcctcgaaccatccttcttgttcacaaatagcactagagctccccaaggggatgaacttgggtgaatgaaacatttttctagtaattcttctatttgtttcttcagttctactaaatctttgacatccattctataaggtctttttgagataggtgcggttccgggtaataattcaatagaaaactctatatcacggtcaggtggcatacctggtagttcctccagaaatacgtctgggtattcacacactactttgattttttccaagggtttttcttccaagtgattgatcactgttttccctttttcatctgttgacttgtctatattaacttggattctttcaccttgaggacttgtcaacataattgttccattggcacactgtatcactccatcacaacttatcaaccagttgcatccaagaatcacatcaataccgttggatcctaggaccactgggttgactgaaaaatctattccttgaatcttgagattaacatgggggcatgagtgtgtggccttcatgtcacctcccggtgaactaatgtgtaacatcttcttaagggggtacttaggtatgttgtgtttttccacaaatgactcagt

SEQ ID NO: 11893 - DNA, 391 bp, Zea Mays
gttttgctctgacgtgggaacgaccctgcctgcctccctcccttaccaggagctagaaacgccgtcgacgatcatatactgcatctgtactaaattgacagacaggtcatcagcattaaaacaaagcataaagaaccataacgggtgcagtggtcaggagaaccttcaaaatcttttgtgcttcttttaagctctctgcattagtgatgtatgagcagaaattgaactgcatctgtagctaccaacaaagctattgttttgcttgtactaccatgtaccatcatcaggagcaatcaaaaccaagtcaaggccccgatcttatactaatcttatactaggcaccctctattgcaagattattgtcattgttatttaatatgtagtactagat

SEQ ID NO: 11894 - DNA, 1286 bp, Zea Mays
atacatgtgtacttgccattatttcgtcctctatcttcaatagtcccttcattattgaaattaaggagcaccgaagtaagcaggctagttcgaagagccatcactattgcttcttaagagcactaccgtgtcaactggaagatgaaatgaaggtcgagcattatatgaaggaggagcactatgtggggaaggagcaccaaatgggggaaggaacataggaggagcaccgtatgaagcattgtatggaggagcaccatatgtccatattgaggagcgccatatagatacccatacaggtatatatgagggtattaagtgagtggtggaggaggagcgttgatggtaggaggaagagtgttggtggtaggatcatcactaggaggatgacgaggatctatggaaagttggtagggataccatatagaatataggtatacaaacagaggttgtggagtgaaggaacgatgacgagcaaaaacatcctcctgatgataatgtacgagagaaaggccataaaaaaccttcaccacactaataggggtgcctagaagttgagaagattggtcattgatcaagtcggtgaatgttgaaagtttggactccacctatgattcatattgaaatagatagtgagaggctacaatatgaaggaagatgagtgtattggagagtgagagtgtgaataaacctaaacccctcccctctatttgtcatttttaggaattttttcctatttttttacttcaaatggttcaaacaatatggaccaatcagaacacatcacatgactaaattaagatggttggtaccgaccagtaagaccgaattgtctaatgcattggtcgatactaatcggttcacctccaaagcactcgatacagatcaaactggatggtcaaccgacccactgaccggtcagctaaaccggtattgaagttgaacaagtcgatatcgaccaacctgcagaccatacatgtggttggtaactataggaactagccttagtaggactgtaggagtatgtgggaacatttactgccttcacatgctttatttaggaattatttttcctagaataatgcaacagtgttgtgggctgaggtgcaattggaggaagaagcatgcaatggcggatacaagaacgagtttagagggttgattttctagcgactagttgtggaggtagcacaagcgggtagggggcacattttttgtctcttcttcttcctccttccttcttctctaccctctacctctctctctcttcaataaagtgggaggcttgt

SEQ ID NO: 11895 - DNA, 304 bp, Zea Mays
gttgcgagctctgatgaggactgtgatgaaaaacacaatcaaaacacaccatctttcgggactgattggctcgatacgagccatgctgccaactctgcaattctgacgtccccattccagcccgcagattttcttttgcatttccacgcttttattcatgcgtctgtatgctgcatcgtaaaaaaattgatctgaaatactttgacagtggcctgtgacgaaactcagcaatcaaaaacaccatctttcggggctgattggcgcgagccatgctgtcacactgcaaagaattctgaggccaaac

SEQ ID NO: 11896 - DNA, 1320 bp, Zea Mays
gtttacgtccattgttgataatcttcgtgcatatggtcgacgtatggaccccatgtactttgtgcaacgctttgtggacgggttacgtgaggatattcgtgctgctgtttttgtccaacgacccacttccttggatactgctgccgttatcgcattgttgcaggaggaagttgctggcaccacgaggcgaatggaggttcgtcggtcggatgtcgtgccgagcaggctgtttggcaagggaccattgccactgcccttgcctccacgaccagcgcagcaagtgacggtgactgaagacaacaaacatgatgaggttcctcgtcagcgtgggatggatgataagttggctgcattacgtgcttacaggcgagcaaagggattgtgtcagcgttgtgcggagaaatggtcgcgagatcatcagtgtccgccgactgtgcagcttcaagcattgcaggaagtctgggatttatatcagtgtgaagatgatgacagtttcaccccaccggaaacggctcattctggggaggagcagttatttctcgcagtttcagtagctgcagttcagggcaggaagtcttctcatactatgaaattcagtggcataattcaaggaaaagaggtattgattttaattgattctggtagctctcattcgtttgtctcaactacattggcagttcagcttactggcgtgttacccatgacgcgtccagtttctgttcaagtagcagacggtgggcgtatccattgctcacaacaattgttggcaactcagtggtccgtgcaacagtgtgtgtttacaacggattttcgtgtgctggatatctctacatatgacttaattgtgggtatggattggttatcagcacatagtcccatgaaagtacattggttacaaaagtggatgattataccataccagggctcttcggtattgttacatgggttatctgcaagtgttccacctgggtctgttgtcgaggtatctgtagtacagtctgtgcctccttcttttgcagagctggggttgcctgagtcctttgtaaatttattgaaggagtttgccgtggtgtttgctcctcctactgggctgcctccatcacgggattgtgatcatgcgattcctttggtaccaggtgctacaccttttcaagttaggccctatcgctatcctccagccattaaagatgaaattgaaaatcagattactgttatgctacagtcaggcattattaaacccagtaccagccccttttcttcttctgtcttgctggtcaagaagaaggatcagtcgtggcgtttttgtgtggattttagaca

SEQ ID NO: 11897 - DNA, 943 bp, Zea Mays
ccggacctgaaagcctttcccactagagtccgtgacgctgcaactacaccacattgcccggcatgaatcacatctaaaagttgcttcccagtagccggatgaatgcacttcatgaggacccctcctgcacctcttctatacagcaggccccctataatggtatcgtgggccgactgtattgcaatgcgctccgtcgcagctttgttatctagttcttccttgtttttatgtatctgatgattggctctctccagtcattgggatctgcctctgcctgactcagaacgtggcattcctccatataatctatggcgacactcggttgttgtatttcttggacaaaaaccctaggtggaacttgagcccgactagtccctagctttgacagtgcatcagccgctacattgtgatccctttcaacatggtggaattctaatccttcaaacttgtcctccagcttccgcactgctgcacaatatttgttcattgagtcggtcgagcaatcaaaatctttgtttacttgacttatgaccaccagtgagtcaccgtacaccattaatttcttgatgccgagtgaaacagcgatgctcagcccgtggaccagtgcttcgtactctactacattattggatgctggaaataagagctggagtgcatacttgagttgttcacctccgggagtgataaagagaatccctgcccttgctccttgcagtctcagtgagccatcgaagtacatcctccatattttagtgacctctgggctttccaggacctggtgctcagtccactctgatatgaagtcgactagtgcctgagtttttatcgccgtgcggggtcggaactctatatcatgagctccgatctcgcacacccacttggctattctcccaacagcttccttgttgtgaaggatatcgcctattggaaatccggtgactac

SEQ ID NO: 11898 - DNA, 407 bp, Zea Mays
gcaacttccgatggcacattcggatgcagtcggtcgtataacacgtgcacttcctcatgcacagtgttacagtatgcttgcagattcttcagagttgcgcttagtttcgatacccgggctagagaatttgcctcacaatcccaggcaaaagagcgtgaatttatgacccagtctatagtcgtgtctcgttccacgatttcctgctgcaagcgattaacctctgccgatagctcagcaatgtggcggctatcccgcgcacgctccctatttccatggcgtagttcttacgtgagtcattccaccctggcctctagatcccctatgggatcattgcttccgctactgctcccctcatgtcgaggagccaactgatgtcggggcacacctcgaggtctggttgcctttca

SEQ ID NO: 11899 - DNA, 405 bp, Zea Mays
gatgtcctcgacccccctctccaccgacgacctcctcagacgggtagcgggcacggtagggaggctggacgctggcgtccttaaccagcccctgatgcgtcacgaccacacgtatgtgtccctggtaagtgtccgacccttcttctgttttgtgccgtgtttcttacgtttttagcccttacccttgggatttttgtttgtccccaggggttgaggaactttaaaacctctcggccaccggtcccggaggacgcggcgggccaaaccgcgcgtaggctcgccgcggagaaggataagcagaaaaaagacgcggaaaaggcccgagctcgcgagaggatgcgggctcgggaagccttggagaagcgtcgtcagaggcaagaaagggacgggctcccgttggagccg

SEQ ID NO: 11900 - DNA, 280 bp, Zea Mays
gtcgtgactgccaatctcatctgaggttggcctcgagcaagtcgtgattgcatgtcccactcgaggttggcctcggggcgagtggtgattgcatctcccacctgatgttggcctccagtgagtcgtgattgcgtctcctgcccggggttggcatcggacgagttgtgactgtgtctcccacctgaggttggcctcaggagagtggtgactgcatctcccgcccgaggatgcccttgggcgagtcgtgtctgtgcttgtagttggttttaccttttttttg

SEQ ID NO: 11901 - DNA, 463 bp, Zea Mays
atcgttcgtctctatctcctggttcaactgcgtttctctcggcaaacgtgggtagggcggaggccggctcgtccgaggcgagcgccgcggtgtgcagtctgttgtccaacgtcggcgtctccagggtgtgcgcttccatcgtggcagacatgggagaggagttcgtggccatgtcgacagaagatcgtgcgatgtcgggggagtctgtgcttggtggggcggcaggcgtggccagtctggtggaagctgcgaccatggccagtgcttgcgtttccatcgcagatgacaggggaggaaagtcgacgaccatggcgtcaggggaggacggcgcagtgcatggggactccgtgcttggtgcggtggcaaccctgcccggcacgtggacaaccgtggtaggcgtggtggccttcatggccagtttggcggcgttgggtggcagcaagcagtctcctctcctcatctg

SEQ ID NO: 11902 - DNA, 566 bp, Zea Mays
cctcggcgccccaaacttgagatcagcaggtagcactgcctctgacccatagaccatgaagaaaggggtgtttccatgcagagctcggctaggttgggttcttaggctccaaacgatgtagggcaattcccttatccattttcctgcgaacttttcatttttatcaaagaccttttttctgagtgcctccaatatcatcccgttagctcgttcaacctgcccattggctcttgggtgcgctactgaagcatacttgatctgaatgcctttttgctcacagaaatcgaagaactctgaacttgtgaagttggatcctaggtcagttatgatgttgttcggtatcccgaacctgaatattatgtcttgtatgaattccacggccttggctgaggttaaagaagcaatgggtttgaactctatccatttagtgaatttgtcgattgctaccagtacatgagtgtatcctccttgagctttcttgaagagtccaatcatatccagcccccagcatgcgaagggccaagttactggtatggtctgcagttgctgtgctggtagatgttgtt

SEQ ID NO: 11903 - DNA, 499 bp, Zea Mays
gagggtgtgtgccagggagctggaggcgacccggagggagaagaaagtggccaggagggaggaagccgtgacccagagggaggccctcatgacggagtaccagaccaagctgagtgctctagacaagactctggaagcccagcgggcccagcaggtaaaggccatggaaaggctgtagaaatggcagcaagagctcgagggcaaggccaacgacgtcgccctcgccgaggaaaaccttaaggagaaggagctatccttggacaggcgagagacggatcttgccaggcgagagacagatctcgccttcagggaagaaatgctcacccagcgaggcgagttgctggccgagcatgagctcgaagcagaggaaaaggagaggaagctggaggagcagatccgccaattcgatgcggcgcaggcggcgctgggtccctaggcaatggaggccaccaaaaagtccctcgaagatctccaagcagaacaccgtgccggggtccag

SEQ ID NO: 11904 - DNA, 690 bp, Zea Mays
aacattgataatctgcgcaaattttttgtttgactcatcagggctagctcgcccttgtaattcgcaaaaacaatcttattctggcccgcactcttttcctcccggggggtgaggtttttaacgaggcggagtcatgtaatatacaagtgaaaaatcccccgcaaaaatccacgtcgaaaaaagaccgcgtcgacggtcttcgacattcgaccaatacaaagtcaccgcgaggggcagcgctagctaccctccgcgtgcgacaatccgtgcaaaagtcgcctaagggtgcagccggactaagcacaacaagtgcgaaaaatcgaagtcttcctcaaaaaagactatccgtgcaaaagtcgcctaagggtgcagccggactaagcacaacaagtgcgaaaaatcaaagtcttcctcaaaaagactatccgtgcaaaagtcgcctgagggtgcagccggactaagcacaacaagtgcgaaaaatcgaagtcttcctcaaaaagactagctacgcaaaagtcgcccaagggtgcagccggattaagcacaacaggtgcgaaaaaatcgactacaggtgcgccggaccgacataataaacacactagaccaagtgcgcaaggcctttatgagcatatccaaatgtgcgaaggcacacatcctcatcatacaagctatttcatatgtacagcgagg

SEQ ID NO: 11905 - DNA, 544 bp, Zea Mays
acagggccatcgtgttgcccgcgcccaacaatgaaaccagctccacgccctcgaccagccagaccaagcctaccacgaacacgacctgctactgcatctgtcgatggattactcatttgttttcaacataacaagaattcatatggatttcagattttgggaacaccatgcttactttgtgtgtgcgtatggccaccgacgttatgtgttgtgtttgtgtggccggcgtcaacattttgaccttctccatgttcatcgtggactgcacgggatcaaacaaattgttcatttgagtagcaattaaaagacaactagagagcggtcaagaaatgtagcaaaagtaattggattgacctaccttcatccactatgacgtgaagatcttcacctggaccaaaaagacacgccaggagcagcatgcatcgtgcaaagagggccatgaggtagtgactagtgaaacaggaagtgaatagcgcagcgttcttcatgggtatttagtgctaatttttccctccaaatttttcaccggccggcaccacgcgtg

SEQ ID NO: 11906 - DNA, 415 bp, Zea Mays
attctgcagactgtagggcattacaacataacagtatagtccatctactgtcacaaaagcggtatgcctcctatcctccttagccatccggatttggtggaaaccagagtaagcgtccaagaaggacaagaggtcgcaccccgaagtagagtccacaatctgatctatacgcggtagtggatacaggtccttggggcatgccttattcaggctggtgtagtcgatgcacatccgaagctccccgttggccttcggcacgacgactaggttggccagccacacggggtgatgaacctcttcaataaagccagcgtgcaacagcttccggacctcttctcggatgaagtcctgtcattccacggactgtcttcgtgtcttctggcttaccggcctggcgtccgggtaaacctttagc

SEQ ID NO: 11907 - DNA, 307 bp, Zea Mays
ctgcttctctgatgatttaggctgagaactaagaacacgctgcaccatgatgctttgaagattcaccgtagcatcagcaccaagcatggcatcatcattagcagcaacatcactggagtcatcatcgtcaccctcaccgtcgaaagcactaatgtagccatcatccgtagcaatgtatgttcgctgactcgggcaatccttcttcacgtgaccaatcccatgacagcggtggcaaacaatacccgaagaacgaccactggaaggtgctgcaggtgctggtgaattctgtttcttggcgggtagttgt

SEQ ID NO: 11908 - DNA, 484 bp, Zea Mays
atctagtacaacatccggtctacttcatcagcgaagttcttggaccctctaaaaagaagtatcccctgtttcaaaaactactatacgtggtacttctaaccgcctgcaagctccgacactactttgacgaccacaaagtcatagtagtcactgggtttccaataggggatattcttcacaacaaagaagccatcggaagaatagccaagtgggcctgcgagctgggagctcatgacatagagtttcggcctcgcacggcagtaaagacttaagcactagttgacttcatatcagaatggactgagcatcaggttccagacaacctagaggctactaaagtatggtgaatgtatttcgatggctcgttgaaactgcaaggagcaggcgccgggatcctcttcattgctctaggaggtgaacaactcaattatgcacttcagctattattcccagcatcaaataatgcagcagaatatgaagcact

SEQ ID NO: 11909 - DNA, 336 bp, Zea Mays
ctcacccacactcgccccagccggcgaggacaacaattcccgcttgccagtcccgtccacacgaaggcgaccaccttccacctcaccacgatgacgcctatcacttcgcggcaactcactcaccctctgtttcgccaccgcccttcgccgcctatgcccaacactcgcacccggaagatcctcatcacccattacacgcggtgaagcctccgccgcagccgcatccaatgccgcaaagtaatccaaatcctcatccgaagactcctctgtccacacaatcgaactcccagaatcatcagactcaaaacacttagacacagaatcatcagaatcgtc

SEQ ID NO: 11910 - DNA, 511 bp, Zea Mays
gtctttgaacttgaatttcatctaataacgttgtcagtgtcatcattttgatacccgtgcgttgtgacgacacacaattattagataaaatattaactcaaaaggagattcttagagtttttgaaatcagattaagactgagcacgacaatatgtcagttgtgttagcatgaggttattgctacatcagtaattatactttcatatgtttctactgaatagggagagcaccaaagaacaatacaatggtttcagctcgaactgataagtgaaagaatgaaccatcaaaacaacataaaacatcactgaaacctgatttaagatttaaaatcatataaacccacgcgtagcccgatgtggctttattttttgtctaagaaaaaataaacgtatttggctaagagagacggttcatgagcataaaactaaggtttatagagtagcagcacaagagcgaagattcataagcacaaaactaaggtatctagaacttactgtcaagagagttttag

SEQ ID NO: 11911 - DNA, 643 bp, Zea Mays
gggatgtcaggcgcacagaaaagagatgtcattgtacaatgactgaacaagaacaccagattcacccctcctcgtcgccggtgatcttgcgcccagatccgcgctagcgtcgcgattcacacctggccaagcactgatagcgctcctcggtaagaaatatcatcgctggagataagctccggccactgttctcaccgaccgtcatgtcccgccgtggtcaatcgcgctggcatcatcggtgttcgctgttatctggccaggctacgtgcctcaatgctttactatgtcatgctgagtcaccataaaccgcccgatggtcctggctcgtcaccggtgggtctgccacggtgaaggccacgaatcaccgcgccagtgactcatttcttctccgaccgccaccgcgctcaacccaaattcactggccaccgctcaagcatgctataaattgagtgcacccgtggctctgttacgtaattacgcatccattgcaccagtccttgccccagattatccaacagagcctcccaatttctctcttcccccaatttggttctccgtgccgccgtgtgttggctcaccgtggtcagcgaattctaggtctgttcatgctccttgtcctcttgtttcagcacccatacctgcc

SEQ ID NO: 11912 - DNA, 706 bp, Zea Mays
accaataggaccggcgaggagaacgtggagcagcttcggcggatgatgcccggggttagcatggcggcgcactgacgttctagctcgtccttgtgcgcggccaggtagcggtacgggtggacagccaccggggcggaaccgggtagcagtgtgatgttgtggtcgtgggcacggggcggaggcatgccggaaggcttggcgaagatgctggcgaactcggtgacgatggcgtcgaggaagtcgcggccactgcaggacttcagtaccgatctcggtggaaccgctatgccacgccagcacacccggcggtcaccacgccagaacgtcatggagagggtgcagaagtcccataggagcggcccaagcgtcacaagccactgcgtgcccaagatgatgccgtagcccgcgagcggcaaagcgaagaaatccgccgagaatgcctcctggtcgatgtggaagggcatggtgcgatacatgccccggcaaaggacgcgctcgccattggccaccgtgacacgcatcttgtcgagggtgggagatggtagcttgatgcgagcggccgcctcctcagcgatgaagttgtgggtggagccggagtcgatcagggcgaggagggagacaccgccgagcatgatatgcatctgcatcgtctcacttgtgcgcatgccagcgatcacatggagcgatatctaggggtcgatcaacg

SEQ ID NO: 11913 - DNA, 452 bp, Zea Mays
tacataatcgaactatccaaacttttgacctacatcatgtagtccatctcacccataacttttgcaaccatatgccccaactttgatgatctaccctgaccccgactcaatgaaaacaagactagaaaaggaaaagatcaacctcgtcaagaaagaagagaagtcaaactcgatcatctgaggcattactacccaacaaaagttctttctcactataaactttcttaccccaggctattcttgccctaacctacccatcttttataacaaaatgactatacatatatatgcccatgccttcctaatcacctacttatttgtatcaaagactaaaaaaatctcttgattttggtaccaactagaaactaaaagctacattacaaccaatctctctatagcctctttcttacaaatctcgaggacgagatttccgttaaggggggtaggatttg

SEQ ID NO: 11914 - DNA, 397 bp, Zea Mays
cgcctagagtatagcaagatcgagaaaagccagattacctgaagattggagaagaatgaaggaaaccccaaatcataagaagccaggtgatggctcgacgagggaacatcaactagggcaatctgaagagcatcattagggatcaactcaacatcaccagtagacattagaactctagcatcaggtgcgccggtctctaaggtgacttccttgtttaaagcatgtaccgttgccgtgccatcagaatgaggaggagaagacccaacgtggacatccatggaggtatgagaaggggagcctgcccggacaccctcgggcgctaggtcgtagctcgcgctacccatccgagccggatcattaccggcaacaccctcgggggctgggtaaccgcttgcac

SEQ ID NO: 11915 - DNA, 624 bp, Zea Mays
aagaccagctgtagatcctcaatgaagtttcggagtttcctgtcttaatcaccacatcatcaacataagcttctacccgcttgccccagtggtcggctaagcatgtttgaatagctctctggtaagtcgctccagcgttcttgaggccaaacgacatggaggtataacagaaagctccaaacggggtaatgaatgcagttttttccttgtcttcttttgccaagctgatttgatggtatctagagtagcagtccaggaataacagcatagagcatccggcggttgaatctaccacctgatctattctaggaagttcgaagggatcctacggacagtgtttgttgagatctatatagtcgacgcacatgcgtcaatccactttattcttttttagtacaagaatagaatttgctaaccactcgggatgcagtacttctctaatgaatcctgctgcgactaatcgagctagcttggcacgaatagcttctctcttgtcgggcatgaaacgacgcaacttttgtcggatcggcctcgcctggggatagacctttagtttgtgttcggctagttctctcgggactcctggcatatccgcaggctgccatgcgaatacatctcggttat

SEQ ID NO: 11916 - DNA, 633 bp, Zea Mays
aaaaaacaaaaacaacatgcgtgatcaccatcctagccgatcggtccagttaccaccgtcacatacacattcccctccctcccctcctttctacctttcactagtgggccccaccattccaattctcaagctttgaaaaccagccatctcacttacgtacgtgacctcctctctctattccttacatgtgggtcccatccagcccattcaccttctctccaatttctctggtacgctcaattgccaggttatgccgccatcatttgaagcccgacacaaatactatgccgcctgttgtctccgtctgcatgtctgtgttcgaccgtttcttctcccgcgcgaccgctcgtatgtctccattaagctctcgcctattactccatgaacgtttctccattatacgcgcctgcctaacactccacggacgtttctccattgatggccttcaagtaccttaaagccagctgtgtttcccgcctcccttgcttgcctataagaaccgcgcccacaacagcgtttctcgtctcgctatctttcccagctcgccgctcgccctctatctccctgctcgtgcaaggccaggccgctggccctctattctccgtcgtgtcgctgttcgccgaccacgctgtc

SEQ ID NO: 11917 - DNA, 287 bp, Zea Mays
tgtcagaacaactcctaaggttctcagttctgctctagaaatcagagtgggaacaacaactaccaagcacgacgctctagacagcaaggtcagaggacaaaccaatacaagaactaacagaggaacaacactcagaccgaataaaggtctagtggtcaacaacagaatcatcaaggaagcgtcgtgaacacaccggccaagaacaacaacacaaccaccccagtccaacataatggttgtttcaagtgtggggaacatggccattatgctaacaatttcccaaggcg

SEQ ID NO: 11918 - DNA, 649 bp, Zea Mays
cgcttgccttgttacaggaagaattggcgacatcgaggggagtaactccaccagctcctaaaccactaagtcgaccacttcttcaaggaaattcttctggaacactgcagccagatggtcagcgtattccaaaaccagtgattaccaacagtgggggtggagtctggaaatcaggcacggatgaacggaaagcctcggccctcatggcttaccgtaaggctaaaggtctttgctataagtgcggccttcgttggagtacaactcacaaatgcagtgatacagttcccttacacgtcgtggaagagttgtggcaactgttggatcaaccagattcacaggataactcaccggttagtccagatcaatcaccggaagacttattggtattatcctttcatgctgttcacggcactgaagctccagagaccattaagttaatggccactgttttctctaagaaagtgctgatgttggttgattcaggaagctcctcatctttcatcagtcaaccgttggcagccttgggtcctccattaattcctctgcctgaggctgttcaggtcaaagtggctagtggacaattgctggcatgtacccattatataccccattgcaaagtgagtttgccaggtcacgtattctctattaa

SEQ ID NO: 11919 - DNA, 761 bp, Zea Mays
gagtggtggaggtggtaggtatggctaaggtggtggatggcgtaggagtgactggagcgggcgaagtgggaggtggagtggtagcagtggcgggagtggtaggtgcggaggagcgaggccgagaggcgagacgacgaacgcgataagcaatctgatctgaagaaatccgtagctgatctcctctctctgtctgctcagcggctgctgcttcttgcgggcttcctgctgctccaagtagacagtcttccccttgacctgcctaaagcggcaaggagggtcctcgtcatttcctcccctggcgctaacacattcttcgtgcatggcatcttgacctgaagactgcatatgagagagataaactaagcacaagaagataacagccgataggatgacaaaagactggatagctacctagaaatctcacacgagagggagagaatccaggcagaacaggagacgactcacggacaggcgaggtcactaaaatgacaggagagatgagtacgtattagtcacatagtcataagtatatgaaatgtgaataaatacatacacagagtggtatggcacagaaatcgagagatatggcgatcgagaggtcaaacgacgcgaaaacggcgtttggacgagaaatagtgccataggaggtttgaaattgaaaatgaggcatgaaatgatttggaattgagccgatacttcacgaataggtttatatgggtaaatatgagtgaagtgtgtgcttggtttgattttaggcgaag

SEQ ID NO: 11920 - DNA, 384 bp, Zea Mays
gtgttcattatcgatcaatactaaaaactaaagtactaataatgaccacaaagtgaaaatgcaacatacttatcctaatttgtacaaatatagctagaatcaaacaatgttacatcaatatgagaccactcgcgctcaagaaaaatgtaatcatatataaaacgcacgagcataaaaacgaacaaagctgattccctcgagtacctcgcatgatgccatttgtacatagactactcaaacagatcgatctatcaagagcggaaggggtcagcgcaggaagagtgccgacagatttggaaaccatatgttagatcagtccaaggggagaagaaaaacaagatcaggcacctgggagaacttggtctggagccagtggttgacatc

SEQ ID NO: 11921 - DNA, 320 bp, Zea Mays
ccatcacgtcacttgtgcatgacacggtgagtgggtcgtttcgcgtctcgtcaagccagccacgccgagcgaagccatgataactcctatttttaccgcaacgccaccataactgcctcactccaggtaaaaaccaaaattcactccaactcctcgcgtagagtgaggggtgggctgagcaagctcctagagattcgcaagtcatgtgaccggcccataggtcatttgcttgattccacatctaaggtcgtacctcacattctcctgtggcaacgcggctgacggggtggccacggccccatccgaccgaccagattgac

SEQ ID NO: 11922 - DNA, 405 bp, Zea Mays
cgacttacgagttacgtgatcgggagcggtgccataatccgcccgccggcagtccaggaggggaagtgtcgactatccattactccattagcggcaaagagggacgactggagcatgagcgagacatgtcacaacattgaggggtcaacgtcacaaaaactctaatgtagaaggatcattagttctatttacaccacacaactaccagaatctagttacgacttacaagctacgagatacacgatcgagactatatgtgactattaaccgcaagcgtgtgatgtcacatcgttgaggggtcaaggtcgtgaaaactctactacaggaggatcaacaagtctactaacaccacatcaccggaatctacttacgacttacatgaccgagaacggtgccacattccag

SEQ ID NO: 11923 - DNA, 712 bp, Zea Mays
catcctcgccaaactcttgtcccatcgtgatgcccatcggctcggtacaggtagagtcagacgattccctggccagcaagctaagcatgacgtccatctcagcatcatcagtgctagctggcatctcaaaatgagtttgcctctcagcctcaggaagactctgaagtggggcaatcgaggcttcaatatcctcgggggagggtcgcactctatggcccgggctaccatcacgagcaggagggttggagacaaattcatagaatagcatatttggaggaaggttccacgtagagtaagctaagggagcaccagcattcgagaccctgcccctcggaatcatatcgaatcggctcagcaagtcctcattgggaatctgtctgtttgtgacccgggtggaatcattgatgccgatatacaaataagcgggataaattatgtccttcaagggttgaatgttcttgaagacaaagtcagcgaccacggcctcagtagtcagacccctatccttcaacaagcagattttagcaagtagcactttggcctcggttatcactgaaaaagtgggagactctaccaaggtgggcgtacgaacgtctggttgcctccctggccgagggggagggatttgccgtgattctccacgatgaaccactcaagacgccatcccttaatgttgtccttgagggggatatcaagatattccaccttcctc

SEQ ID NO: 11924 - DNA, 606 bp, Zea Mays
tcaatatgattataaaccacataaaaggaagggtcattatctagaaatgtctcattatatatttggatgacctcataaaatagtataagatgatctagatagggaggaaattgtattagaatgatgaatggctccatattagtacatttccgcaatttcaactatatactatgcttaatattctgaaagttaagatcgccgaatttggatcgaacaacactcttttcaatatgtatagagtgtcgtccggtctaaactagcagatcttaacttttgaaatattaggcatagtctagggttgacattaggaagacgtattaccgtggagccatttaccatgcaaattcaattttctctctatctaaagcatcttataacattgcatgagatggtccaacaatataatatgacgttcgtagttaacgaccctaacttctatgtggtttatactcatataaagagagaagcatataaattatttaaatttaactaagcatgtgaattttgcatacattactggtatagttcttcatttgaatccattaaagcatatcagtgaaatgtcgtacagagagaccacactaattgatttgaggtcacactaat

SEQ ID NO: 11925 - DNA, 356 bp, Zea Mays
gtttcggagtgtaggcttcggtaaagtttaattggtcggctccgagagcaatagaaggccagagtcaagctagaacaagaagtaatttgtcatgtactgacccgaggagtgctggccacggaggggttcttcacagcggcggaagaaaccgattcaagggaactccgatgatcactgagggtggtggacagaacagagtgactagtgattcgttggcttcacaatgaagggacgaagagctgtgctcggttgatttggatgaagggggaagagagcgcggtgaatttataggcccagtgagccaccgcgaaggccatggtgataaccatcaccggaccttgctggcgaccaacgac

SEQ ID NO: 11926 - DNA, 642 bp, Zea Mays
acaccttggtgacaatcattacaaagatccaacttcattacatgaccatcataacaagcatccaacataagataagcaaactaactctaactagactgactggactaagacactgaacaaagcattattacagactctgactctgtcgatctaggtatccaaatctatccgggtcctgtagtctggggtaccatagtcgaagcgaccacggggcagtgaacggtaagggtgctgaatcccgacaggggcgggagaaccaccatcaagatagtggtgtaccgtgcattcagcacgcaattccgcaacctccgcacgaaccttgcccaactcgtcaagggcgtggtccaactatgtgttgaggacggcgactaggttgaccatgcttctcagcctaggattgccctcaccaactggcaagacaatcatgcctccaacattgccggtcgaacggcgagggtagtacttcaggtcaaggtcatcagctaccccgctgaacaatgagcaatactgagaaagtgcccatcgtgctgcatcatgcatggctgcatcggctagagatgtcaatggggaattccctagcggggattaactccccagacccgtacccatgaacatagacccgcccccatccccgaacccgac

SEQ ID NO: 11927 - DNA, 354 bp, Zea Mays
tttggccatgacaactgacaaggtgaactggtctctctgcagaaaccaaagcaaaggtgacgtggacttgaaagagctgcctgtactacacgtcctctggaacgaaagcgccggctatgcatggattcccaaggagcagagcgctgcagcagccctgcaggtgcatgggcaaagccgggttcggaacgacgaagcataagagtcagacggtggtgcgtcgtctttgttcctttctgtcaaaccaaagtcaccgcgcgcggcaaagaaagcgcatgcaggagaactcggggggctggtggtgcttttctcctgaaaaatataatgaagcgatccatgagcgtgcgtgcgtgcatg

SEQ ID NO: 11928 - DNA, 456 bp, Zea Mays
caagcaaccactactgacaatactgattttgcggcggagacttcaattgtagttcctgccgatgatagtgtgcctggttttatgtctgaatgttttgagtccgacggtgagtctgggagttcgtgtccttggatgaagcttggattattttgttgcgttggatgtggctgcggcggagacttcgccgcgtgtggagggtgctgaggatcttcctggtgcgagtactgggtgtaggcggcgaagggtgatgggaaaacaaagtgagggtgaattttcatggagcggcaggcgtcgtcgcatggggatggagcgtggccgacttcgggtagacgaggttggtaaacgagaattgttgtcctcgccgattgtggagggcataggtgagggggatcttcgggagctttttgagggtgaggaattgaggataatgctgtttaattacagggagatgggtat

SEQ ID NO: 11929 - DNA, 704 bp, Zea Mays
gataacatgtatagagggacgttagtaagactgctgttgatcaaaactaaccgaccccctaagctaaggaatttcccttgccaagagcccatttttttctcaactttttcaactgtgggtaaccacaaagacttgcacaattttttgtcatcaatcggaacccccaggtatttcataggaagacatttataaggacaggtaaaaatatcagcataccagttttccttaacagaagcttcacctaagcagaagatttcacttttatgaaagttgattttaagaccagacatctgttcaaataaacagaggataaacttaagatttctggcatccagcaggtcatcctgaagtaaaaagatggtgtcatcagcgtattgtaaacaacagcaaccattaggtatgatatgagggatgagacccttaataatgccttcatctttagctttctgaatcaaacaagccagaccatcagcagcaatgttaaaaagcaatggggagagtggatcaccttgtctaacacctttgtgagtggtaaaataaggaccaagtttgtcatttgtcttgatggccactttaccaccacgaacagtcttcataacccagtcacaccatttatctccaaacccttttttaatcatcatctgataaagaaaattccaattgactttatcatatgccttttcaaaatccactttgaaaatcac

SEQ ID NO: 11930 - DNA, 383 bp, Zea Mays
ggggacgactcgatgtggacatccatggaggcattggaaagagaacacacctgaacaccctcgggggctgggttgtagtttgcactacccacaagagctggatcgctaccagcaacaccctcgagggctgggtagctgccagcgccactctcggaggctgggtcttctacagtagccacctctaaggatgaaggcccctcagccacctccatgggagttggatgactcagatcagcgtctctgcatggaagactgccctccaaggtcgacgatgcatgagacaccactcgggttacctcttgcccggcagaatcaagcaacgaaagcccaccatctgggacctctgaacagacggctaggatatcatcttcaggaggctctga

SEQ ID NO: 11931 - DNA, 487 bp, Zea Mays
ggaccagcaatcgctcatctccaacttcaacatcatgacactccagccccctcaacaaaatgagtggtacttcgactccggggcaaccacccacatgtcctctgatgccagtactctctcccattccactcctttacaacacccttttccctcctctattattgtcggtaacgggaattctattccagttacattcactggcgctgctgttcttatagattctcttcgtcttaataatgttcttgtttccccaagtcttattaagaacctcatttctgttcgacagtttacctctgacaataattgttctgtggaatttgatcctcttggttgctctgtgaaggaccttcactctcggagagagatcgtccgatgtgacagctccggtccactctaccctgtgcggtttccggcatctaccttccttgcctccaccactccgtcgctctggcatcaacgcctcgggcaccccggtcgtgaagttttg

SEQ ID NO: 11932 - DNA, 763 bp, Zea Mays
gataaggtcagggtcactgtggcaaagttgaagctctaacattagtaaacaactttgtcataccaagcttgaccaggtgctgaacgatttttggagtaaaacgctctcaaacttgctctgtcaggcgccctgaagggagttcacggtggtacagtaacctgaataagatcgcgggttcagtgtatctcgtcgtcgatgactccacgccgtgatccttgccagcgctgtgattcatgcccagtggcgcgcggataacgactcagggtaaaagatctcgcgtggggatgagtttggatcactgtattgccctatcgccgtacccacttgcccgacgacgtggcctcacggtcatcgccgaggctactgttgttttccccagttgagccacgccttagctagtttaccatgtcgctgtgcgccgtggaggttaaccagcgatagccatacgcctatgtccaatgaatgccacggtagaacgtcacggtgactcagtccctcttctcggccgccagcgcatcttctcaaaattggacgccaccgctgatggactctataaattgatgccccagtgagctccattacgttgttatgcgtccagtgcaccagccctcgcctccgattagccaccgtagctcgcgaatttcaaacttcccccaatttggttctccgcgacgccatgaaccaccgcgtcgtgaaccgtcgtttctaggttcgttcacatcctccttaccctcgtttcagcacccttatgtgctaaggatgc

SEQ ID NO: 11933 - DNA, 360 bp, Zea Mays
cgacatgtgggcccagggacataacggatgtaatacttggagcgactaatgctcgtccctagtgcgatcttcctcgcgccctgatatccgcgatctgcgtagcactggcgtgcaggggaagcttccctggcaacgtacgagtgatgatggatgagcacagtgcaccttgtagcacgaacgtactgtttggcaatggacaggcatgccacctgcaggatggcctggacgccgcctgctagctgagtggataggacacaataaatgtcgatggggcacatcacctgtcagcgggatagtcaggcgacgcgtcttctctgcaataaatgcagagacagtgcggcccagaggccttacgttaag

SEQ ID NO: 11934 - DNA, 718 bp, Zea Mays
ctcgattgtatttactttacactagcagtggacgatgagttgttttcaaataaagtcagtgtcttttacgcaaattttctcggacaaaggggtatcaggtgactacagccgctagattggttcttgacgacccagattagatcggcccacatcagaaccggtacccaaccattgccgttggattagagatcgatgcccaggcttttaaataatcgagatataatccaaatcactcgtttatgatccgacgtacccgattctatcacccaattcgttatctgatcccttaatctgagctctccattttggattcgatgacccccacatctccttcctctcgaccgaggccgagcagagcacccaaccctaagctagcgagctcaccggagaacaccaacccggcatgcttggcccgattaaccatgcacacgcggtgtaaagaatggcgaacttgttagcagtgcccttaccgcggatttagggtgacaatgcccccgcccacgcgtggagcggctcggcggctgagaagaactttggtgagcaatccatgcgactccggcgatccctaggtttggcagcaccttcgatgaagccccatagaccctggtgatcccatatgcgccacttgccgaggtcatgaggtcttggacaccgatggcatcaacggcggggcaaggataccttgcgatggccgcaaccttggtctctactccctccg

SEQ ID NO: 11935 - DNA, 673 bp, Zea Mays
tgctgcattgggagcttgtcaaggtgtatggctgagaatgctgatagcagacatcatggataagaatcctcagaagttcagactgttaatagataacatgtctgcaattgagctgagcaaaaaccctgtgtatcatgacagaagcaaacacattgatacacgatatcactatattcgtgactgcattgacaaaggcatagtggatgtggagcatgtgggaactgaacaccaacttgcagacatcctgacaaagcctttgagccgaatcagacatgtggaactgagatcaagactagggatggttcaagtccaacaagattaagggggtgatagttagtctgaataagagttgtcacatgtaatctagttggaacatttgtgtttacgttttctagtcttagtggcgtagctttgtgggtggtcagtgctgtgcctggcaccacaaactgccttggtgtgtgttgaccccgtcgcactcgcgctgcgcatgcacatgatctgcgtgatctgaaaatggtggagatcatggggcacgatggcgacggggtggagggcttcaagcccgtgtaagcaccgttcattaattcagtgaaaaaacccagaaaagctgcggcacattgcgcatgcaaaatcatctgttctaacctgtgtgtgtccgcgtgctcagccttct

SEQ ID NO: 11936 - DNA, 753 bp, Zea Mays
aaaaatcagtgggcggaagagttgaaatttgatccagtactctgcaaatgtggtattgaagctaagtatggattagttccttccgagcttggtgttggatatttttgtggacatatggtcgattacgatgaggttggtatttatttattttttgcaccagctgtaatgttatagcggtacttactatttttttgtaggagacgaggaaatgcagttgggagagttacgacgacaaaggagaggtgatgcgcacaatagagtccaagagactaatgggacagaagatgcgttgtggatctcagctcgttgattcgtacattaacgatcgcatacgcgacatgcatagggaagcaaaatctgccttttatgatagctcgaagcgtgcagagtataaggaggttgaaggcggcagatgagaagagagcacatgatgcaagggaatgggaagcggctcaagccgagaaacagatgttggataatcttgctgatcgcctcaagggaagtgagtgagaaaaatgatactataattattttagtacaatttatttatcttgactttgctaacttattttgctcattatatttgcagagattggatgtggcgtaaactatttggccgatgaagcgcatgcaagatatgttcaggataaaatggcgacagttgagttgatggaggaggaggaggacgacacttctagattgagtgagcttatcgctctcgcagaggcaggattacatgaagaagaggaggac

SEQ ID NO: 11937 - DNA, 628 bp, Zea Mays
gcgtgatcggacctgtggagagctggccacatcgagctcacacacggtggggttcttgactgatttgggggaaatcacaaattggggagttgtgagggacgattggaggtgagggttagttcactaggtgcacaattatttagcggagcaggctggggcatcactttatagtttccaagggcggtggctcctaattttggcatggcgtgttggcggatggagaggaagaaggtcactggtggctcagtcatggcgttcaccggtgcagcggttctaagatggtaagcccaggcgtgccacggttactactccacactaaagagccacgacgtggcataattgaggtcaccggagtttccacgacgacaccggtggtacggccacgtcgcacggctaaaggcacggttgataagcttcaccccgcgaccaaatccgctccccctccgatcttttcacccgcctggtattatcctgttcgagtcctgcacgaatcgccacgatcagcgtgaatccttgcgcagaggtcactgacggcgagggggctgaacctgagatctttctgtgtactgtaccatcagaaaccttatgaggacgcgtgatagagcaatttgcagtgcccagatctcca

SEQ ID NO: 11938 - DNA, 1019 bp, Zea Mays
tgtgcttctattcctttacggactgaagtccccgacggcgagcggcgctgcgcagagctccggcgagcttgtaccgaccggactacgcaaagaccgacactctccatctactggcacctaattcaagccttaaccgaagtttcccctcaactaatttcactaatggcgcactaacacgcactgaccacggtgaccgtatggacaacggccaactgaacgtgttcccagcgatctagggtgacttagctcaattgagttggtcgaggagcatcaggggaacacaagaatgttgaaacaagatagcagggagcatgaacagacctagaagtcgttgaccacggtgagggctcaaggcacggtgttcttggttgatttgggggaaatcccaaattggggaaatctagtggacgattcgagtcacgggttgctgcactggttgcataattacctagcagagtggatgggggcggcaatttatagcctccaacggcggtggcgtccaattttcacgaggatgtgctagcggccggaggggaaaaggggtactggcgctcgggatgagtggctttcaccgtggcagtcctccggcgatcaccggatatgcataccatgattcaccgtgtcgtgggctagtgcttaagcacgtggcacacaacgttgagcgatcaacgacggtgaagtctatcccgaccgcacgacgagcaagtgggtacggtgaatctcatccgcgcccgagcccgagctgatcctgtgccaagatttttacttcgtcgtggttatcccctcaccagcgagcacgaatcacggcgacgatgtaaatcacgacgtaaaaatcaccggcggcgagggcaatgcatctgcaatctatttcagtcactgtaccatcgcaatcttcttcagtcagcctgacagtcgatgtttagggcagattttctcccaattttccatggcaacacaaccaatgctctgcagcaaagttgtagccctacaaaccattttcacttttgctatagcatccc

SEQ ID NO: 11939 - DNA, 433 bp, Zea Mays
tccatccttctcttgtttatttctctctgcgtcaatcctgccgattgttcattagattctcctctccaagtcaatgtccgtgcttctctctctctctctctcctcttcgggccttctctcttcagtttggccattttggacctcgcacgagctaatctcctactctatgactgtacacgcctcaccaaagtgcagggagaactgttcatccatgcatgttctcagctcaggggtggcacaataaacagaggctgacacagcaattcacaggttcacagctgcggcgccgattttacgtgcacgcagcaagctttgggatggagttatgcgattgggcggctcttaactatgctttcctcctcaccaccatctgtctgctctgtgcctctgtcccccctttcccatttatttttttacctttttcatggagccg

SEQ ID NO: 11940 - DNA, 385 bp, Zea Mays
ttcttaagtcttctagggtctcttctgcaaaatcgccacagcgaaagggtatccatgaattctggccgttggattagatccaaacggtccagatttaatgcaccgaagcggtacaccgcttctaatcctagccatccatctacgcatcaacggcccaggattttatacgggcgcggtcgatcggatccgcccgatcaacatccaacggccacgagtaactccgcgaagcggtacgcgaagatctaatcagggtcgttccttggacatcggacggtcgcgcgccatcttcttcacttgtacaagacgcgcgacggcaccgctcactgacgcggccatgacccgccggagcccctgccctccgccgcgccagtgcaccaaaacctac

SEQ ID NO: 11941 - DNA, 404 bp, Zea Mays
ggggccgttacagccatcccgacctgcctcgctagtacaaagccaccagccacgaccgctgcggcctccccgttccatcacatctgagctggaaccgagcgccaacacaaaatcgatggagaagaaatcgggagagaggaagaagtagtcaccattgtcgcggaccaaggagaggaagagagagattgagagcttgcgagcgacgccgtcaccgcactcacatcgtgtgggttcggtttgtcgcggattggagtcttcggtacgacaggaagcaaaccaagacccctgcgcgcacatattgggttgcggcgctctaaagttcctcgtcgtcatcgcggaatcccaacctccacccatccaccggggccggagaacctctgctgcgcaattaggtatgagaaacc

SEQ ID NO: 11942 - DNA, 719 bp, Zea Mays
gcatatcttaaccgcagaagggatagaagtggacccttccaaagtagaagcagtgtcaaaatggaggcaaccaacgtcagtgaagttcgaagcttcctaggaatggcagggtattaccgccgcttcatcaaaggattctccagcatagcaagaccaatgacagaacttctcaagaaagaccacaaatttgtgtggaccccaaaatgtgaaggaagtttccaaatcataaaggagaaacttacaacggcacccgttctatcactgccagatattcatcaagattttgtcgtcttctgtgatgcctcaaggcaaggcttagggtgtgtgctaatgcagaacgagaaagttattgcatacgcatcacgcctactcaagccgcacgagcagaattaccccacccatgatctggcattggcagccatagtgcatgccttaaagatatggaggcattacctaatcggaaacaaatgccatattttcaccgatcacaagagtctgaggtacatattcactcaacctgatctcaacctccgtcagcgaagatggttagagctgatcaaggattatgacctcgaaattcactatcaccccgggaaggccaatgtggtggccgacgctctcagtcgaaaaccattcggaataaaagggaccaactttctagaagactggaaggaagaatcagcacaactaaatgcatgtctgggaaacaacgacagtct

SEQ ID NO: 11943 - DNA, 521 bp, Zea Mays
cacctccaccctcgtatcctcgaggactggagagggattggcacattgctctaccatttcttcatttggcacttcaccctctataaactcaacgacgagcgacaggtctaccactagcccagcaggcaacaagaagactaaaattgttgcatccttagagcccatgttcccctcgcccctgctgtggatcacaaggaacagccaacgctcgagggctaactcatctgacacacactaacaactacaacatgtacttatggcagttcacttagcatgatttctggaatagcttccttgaggaaaacatcgaatggacacacatccatgccctgaatttttaccacacccttgaaaggagcgagatcaatcatgtcctcctgaatcttggtacgcctctagcgacgtatgagggtagttacttcctctccttcatcctcttctccctctacctcgtcgtccacacaatccacctaaatagctaactcctcagcattagccttgctactctcagtcaactcgtc

SEQ ID NO: 11944 - DNA, 750 bp, Zea Mays
atttggtgtagtagcttgaagctgtgcagaacatatcttggtgctcgactgctcgtctatgtctgttcacttgctggtcgtttatctcgcttaatcccatctagatttggtgtagtacctgtgtagctggtggctgcctggtcgctgttcgcttaatcccatctgttctcttgctggtcgtttatctcgcttaatcccatatgttcgcttgctggtcgctgtggttgtgttatgcctgttcgcttgctgttcgtcggtgttagtgtgattcactgatgggtgatggttcactgtcgtggcctcctcaccgttgcttgtttggacatctatactcataactaataactcatcctcctcctgacctcctcactcgccctcctaattcctattcccatctagctgtctcccagtcccagactcctagcacctagaatccagcctctttgttgtcgtctctggtgctccggctttcaaaggtatgtctttagtctttactcgtctctggtgaatctagcctatttgtagaatttagtttaattgcagttttggtacattgcagtcgttgaggaaccggaggcgacagttcacaggtctagctggtttagctcctcgggcttgtggtcgaagtcggggtcatggaccttgacgcggctgcagaggaggaggagcgccggcttgaggatcacaatgaggcgcatgatgctaggtactttctagggttcggtgacacccatggagatcctattgaag

SEQ ID NO: 11945 - DNA, 388 bp, Zea Mays
tgaaaaattgttatcaacaattagggcgtgggatactgataacagtaataggctacaatataccagagtatttgagctgatgatccatgcacgaatccaagactaagttagtctccacatggaattatggtcccaacggtccaatcatatccaaggcatatattaattatattagtaacacacttagtaagcacacccacttgtgacctgtccatacagaggtacagggtttccagaagtatggatggaaaagggaattaaacagcggcaggggagatggatggaggaggtaacatagcatcaaggtgaacaacatgagaggaggcagataacaggagtgacaaatgatgtggtgctgcttgaccaaaccaacacaacccaacccaac

SEQ ID NO: 11946 - DNA, 483 bp, Zea Mays
ccaccttttccgaaatgttggaatcgggtagcttgcattgggacgagcaatgaatccataacaaccaaagttgttgtgatactgctctttgccagtggccttcgactcatacaatagttcatgcatactgcaaaaacacttcacgctcggttccagcccctgtcttcttacagcccaaacaaacaagcccattctaattatagctttgggagtaagttgatgaacaaagatctgaaatatctttagcacttgaaccaaaaatctgcttaatgggaaccgaagacccgccttcaaaaggcttttgtaaacaaccacctcattttcttcaggagcaggggtggtgctgtctcctccaaccctcacaatagacatgtcacgaaagtatcttcccttcatggcgtcaacatgactttgcttaatagtcgactttccgaagatggtatggcttggtcgctagggccggtcctcagaatcttcatctcc

SEQ ID NO: 11947 - DNA, 679 bp, Zea Mays
cagatagattatcaggtagctcgagttgatagaccatctccccaacttgcctaaaaactcagaatggtccaatatagcgaggggacaacttgcccttaactttaaatctcctcattccacgaagtggcgataccttgaggtacacttgatcaccttgctcaaattctagtggtcttcttctattatctgcgtagctcttttgcctggtttgagctaccctcaaattctctcgaattatacaaacttgttcttctgcctcttgaataagttcaggtccaaagaattgtctttctccagtttgatcccagtacagtggagtcctgcattttctaccatacagagcttcaaatggtgacatcttcaaactggcctgatagctattattataagaaaactcagcatagggtaagctcttctcccaactgccaccatgcttaagggcacaagctcttaacatatcttctagcacttgattagtcctctcggtctgcccatcagtctgtggatggtaagccgaactaaaattcaatctcgtatccaaggactcgtgtaacttcttccaataccgagaggtaaactgtgatccccggtctgacacaatcttctttggcacaccatgcaggcatacaatccatgccatgtacaactctaccaacttggctcctgaatacgtggtctt

SEQ ID NO: 11948 - DNA, 422 bp, Zea Mays
agccacgcgccttcccttctttctgccccgcgagcccaccctgtcggcgtgccgccctcggtcacgcgctctctctcttttctctctgaccagccaaccccgcttgtgagccccgtcctcttcccctcaactgtctgctccgcagaggccacgccggtcgtgcccgcctcgcacgttatgtgcggataaccaccgcgcgcaccctacgaccccccatctcgcatgcctcgcctggccaccatataaggaccctagaccccagcatcccccacacctcgccctgcccattcttccccacctagcacgcagcagtgtcgccactgtcgcgaagccgttctgtcgtcgcccttgccacagtgagcttcgcctcggtgctagccgctcgggactcgcccccaattccccttccttcctttggttcg

SEQ ID NO: 11949 - DNA, 408 bp, Zea Mays
ctcccgccatatagtcaactttccatagagtccatcatatggtgttatttgagaattattttcagccacagaatcactactaatagagaatagaaatcggtgggagctctaccaaacaggcccttagattggttcgcatagaacttctatgtctagtatggcgctaaagactttgtttctgcattgagtgttacaacatggggcgtttggctctcgtgcttgtatgagaaatgtacaaaccgagtttgtctgtctctacacttcggcccttgtcccttcatatagctggagcaatgagtagccattgtaacatgaagatttcaatggggtatgtcattcctatctttggacgagtggtccttctagtatgtcatcgtgtgggcgtctatttttcatcctcaagtcgat

SEQ ID NO: 11950 - DNA, 465 bp, Zea Mays
ttcaacaaggaactcaccgagcactactcccggagcttgctgagcctcctgagcatcgacgtgatttactcgtgcccttccttgatactgggtcttgttctgctggctaatggaggagggcgccttgggggcgggtgttgaggtattcttggagccattcaccgagttggagtaagcaggtcctgatgccttcaactgggggcagttgttcttgaagtgactggggtctccgtagtgctaacatgcatttgctggcggttggttgcttgcaaccgagggggcatgaaaggagctcttactctcctgactgaaccgcgatggagtgggtccagctggtctaatgaagcttggtcccttgggtgggaacccaaaggatcgagttctctggtgccggtcttgctgctgagctcggaggacttggaatttcctcttgaggtgacctttctcttcttccattgcccttta

SEQ ID NO: 11951 - DNA, 633 bp, Zea Mays
gaggtaggaagagagataggggatggttagttatctttgtgtgatactctcttatgttgcatgcacatttcctttcgtgcattgtatgatacatatgattgcatgcacattaccttttatgcattgtatgatactttctgtttgcatgtgtatggtatctcgtgacatgtgctactttctttgtattcatatcatgtcactccttatcatttatgccttttatttcaaatttcatacaaatgagcttatttaaccatgtactcatgcttaaccattcactagtgaggtacatgttgtggacttggtttgtatgaactttcactaagatccttgttattatcgtcccaagttcatgcaaatcaagtacattgaaaacctcaaatccttctttcacatactcgaggttgtcttgccatcaatcactaagaagggagaaaatgaaaacatctaggcccatagttgggtttactgattaatgacaacactagattattctgactaatgtgtgttttatagataagcaaattgagttatgtatttttaatggtgattaattgggattatatggttttcatgcccctataaatggtattcaattatttgttctcaaaggatgagcaatgaggttaagga

SEQ ID NO: 11952 - DNA, 602 bp, Zea Mays
tcacatttgaatcccaaaggatcgggacacttcaggtggtatcagagccataggactggccatagaccgcaaccctggcctaaaaagttttctttcagagaaaaaactcttaacttcttaacgaatcttctctcctttccccaatattaacgacccttcttctcttgctaccagatggagggcacctttgtgcttaagacatcctattgctcagaggtggaatgatttcctcaccttcttcggagttgtgcgcttcgcacggggatttgcaagaagccagagtatgtctggaaggaatgccacaagaatggagtcgataaatgctctatggtagtttacttgggagaaagccgaagctacccaaatcaccctctctttcagatcaccactactggccaccacttcccagacacctaccataatgctgcccaaaaagccctccgccaactatgcctaaactacagcgaggaagtcagggagagatcaaaaataaccctgcatggaggaaaagactccagactttgtcagggagagatcataatgaagatgaccctaccgtaatctacgtggccggatatctccacacccttgacaaccacttt

SEQ ID NO: 11953 - DNA, 660 bp, Zea Mays
cgcaactcaaaaacataggtgggagcaggttaattagtttttcttaaccattttctcaacttaaactggacaacgcaccagtcacttaaaacaccatattttaggagacctcacatgtcgagcatcaaattataacataagtgactcaacctctatcacgcttgacaactaccacatcacctgatttatctatttggaacatcgtctgtctagcgtactactagtaccccgcattttgactcgacttaaaaacatagaggaagcgatgactacttcggcatgtcaccacctcactacacaagccaaaattattattatttaaccacacgcctagataagcatgatttcaatttcaacttgcccatatcttaaatctcggcataagcttggctatttgctaacaaagtgaccattttctaattaccaacatacaccacctttcaccgtttgtggacactcgcacgacacacggctattgtaatacatcacaagtacaaacatcttcctttgttgcgagtataaccatattacggcatatactcgcacacctcaatcaattatcttacgccaccaccactataatacaccacggaacacacacacatatgtgtcccccatattacgcacaagacatcaacaacatagtgactacgacaggac

SEQ ID NO: 11954 - DNA, 418 bp, Zea Mays
tttttgtgttgtggggttaatatttattctgtttgctatatttttgtcgctgtcgaaaaggaccgttctttttccaagacattcggggtgttgcggatcgatgctgagcaaacatgcattatacagttgctgcttatgtaaattattttttgtcgcataggggttggaagtcgcatcaaagagcaatcttattgtcctgctttgtcattgcgcccagtagtggttgatcctttttgacgcaggcacagtgagtagctggtttgctgttcgtcgtagtttgtcggctcaccactcctaagattcagcttaccagaccatgatctacctcctgttctcgttgtggacctgctagttacagccaagaggttcagcaggaacaaaagattcccgaggaatttagtggttatcagcccacgac

SEQ ID NO: 11955 - DNA, 325 bp, Zea Mays
gtcacacccattgggttcaactctggcagggtcacacccattgggatcagctctggcagggtcacacccattgggatcaactctggcagggtcacacccattgggatcagcatcagcagggccacacccattgggatcagctccagtaaagagttccaccagtacttctttagcagcaggagcagaagggccagcatcctggtccaaacacgacactcgccgaagccgtctctttttctttttcttcccctcggcaggtgcagttggatgactggcctggcggaggcgtttcgggcgagtaccatcaggcttttgagtattcacg

SEQ ID NO: 11956 - DNA, 407 bp, Zea Mays
gaaacctcgccaatttctcgcagtgatttacaagccaccgcgaatccgcctctcatcgtgagcagcttcaaccagcgcctagtcaccggtgagatagcttccaactggctcgctttatccttacgaacgtgtaggaccttttaattagggtttagtgcagtagcgggcccgattggccatcaccggcgtcacgtgttcgtcggtggtgggggtgtcgtcgggggaggtgagtcgctgggagagggaagaagaagaacgactgtggaccgttgatctgcttatgtttggtcgcgattagatgttaggatacccgttcggcgggagcaatccggtccgtccgtctctaatcgggcgcataagattcaccgtgggcagtattagatccgggcggttgatttcggatccaa

SEQ ID NO: 11957 - DNA, 314 bp, Zea Mays
tacaaaagcagaagaaaatagctgaagccgaagcaaggcagaatcagccaaaacaagttcttcatactacttcgtactactctccatacatcctagagtatgtacgcaaccaacagccacttcaacagcctacaactttagttgcctcaataagccactctccggctaggtgggccttacctcaaccacccacatcagtcccaacttcgtcttataatcaacagccttaagggcaatatcaggatcaacaacaacgtgatgcgagggaagagtccgaagctcgaatagttaacaacactgttctataatctaaa

SEQ ID NO: 11958 - DNA, 523 bp, Zea Mays
cggcgatggttgttacggaaaactaccggggaggcattactgacttaaagcggcctaggaacgtgtgcggattcagcttgaatacttgaagaatgatctgctcacgtgcatggcggacaccgtgtctacaagcttgtgttcccacacaactatagcggaatcgagtaaatgggcaccaccgtaagcttcgcaagcatgcaagggtacgagaacaacacgtggattagacagcgacttaccagaacaatctggccacggacgggctgttcttcacggggcggcggaccgatttaggggaaaatggcgccgcggcgttcacgagtggaattgagggcggggctttggggctatacggctataaggggttctagttttgctgcgcacaaccaatttgggaggacggggcagaggcagcacgaatttctgcttcggttcaacctacggtgtgcgtgatgctcatacctcgccgcggagcatgggctatttatagccgcgccggcccggtggtcacctcgcggccgag

SEQ ID NO: 11959 - DNA, 744 bp, Zea Mays
agccttcgcataagaaataaacacctgcaaaagcagagagaggccttagcaaccaagagacaccacaatcaggtccaagcaaatctacaacatctaattcaagaagaaaaagaaaaatctaggcacctctagcaagaaatagcatacctgcaacatcatcgaggcccagatccacaaccctcactgagaagcccctcactaagggacttcaaggatcatgattggcaggtctagcaacatgacacctttcaaaacttcaatttcatagatgaaaggtgcccactctccaccaggttatagtccacaccctggccactgaactaccgctctagcacttggcccaagtacaacattaacatagaccctttgcggtatcatgagttaccaggtggtagtagctttgtcaagaggagatgataatacaatggagaagtctttcatcatagcactagagggcccaacattaatatggtactcaagattgcccccttgtccatcaacttgtggcgagcccttcaagacaaatttctgctcaactactaaggtttttagcctgacacaacaccctcacgaaattttccctctacaagcaacaatagaaagggagcctttaggattatcacaataaaatcctgctactcaagttctagctaccatctttcaaagaccgtattgcaatccattacaccattaatgaccttcgagtaggacatttgtatagtcactacataagggacccgccca

SEQ ID NO: 11960 - DNA, 343 bp, Zea Mays
ggggaaacggtctgcgacgcgagcgcactggggaagaaaggggagaggacgtgtcgtggacggaggttggcgagctccactttagggaagatgaggaggcgggcatagggagccgaaaaaccgatcggcagcgaggtcgcgtcctagtggccggtcatttttcctcagagctagaaacgattggaagcagacttggctaggtacgtgagggactgctggtgggccccacacacaagtaactaggaagtagaataaagaatggaagagagacgtgtgactaagtttgggccatacggccaattagaaattttgtttatttttttctctttttgttcaaaataaa

SEQ ID NO: 11961 - DNA, 347 bp, Zea Mays
acatcttttagggttccctctcacggccgccgttaaatggccaggcgctgcccggtgccttcttcgatggtcgcacactcacgtgaagctaagccgcctggcggcgggcgggtggcgttccccggcctactgctttgataccgaatcgggctacgctttttctcccctttgatttctttgctcgtctgtcgttgttggtcgccttttctttcttgcatctcgtttcttaatcttgggagcagtgatgagatcatttttgctgtatgatcttcgagacgtgattatcgatctctatattgctacgttcttgctgagctcctgccacaatgcgcacatatcccattttt

SEQ ID NO: 11962 - DNA, 334 bp, Zea Mays
gtttgcagttgaaaagtgcttgcttgtttcttcagttcttctcccttctctcctacgcacggctgacgccagagacgcggctgcagctccaccggataggagatgtagcttctctcctgcacgtcggacgtcggacctctgcttctctcctcatgtttgcttctccgccactgcttgcttctctcctgcacggctgaaacccctccgtcggacgccaaagacgcggctgcactgcacttgcacccccttcgctgcgacagcggacaacccaaggactgtatgttcctcctcccctgcaaggacaaaggacctaatgtatgtccactggttcttc

SEQ ID NO: 11963 - DNA, 574 bp, Zea Mays
aggaatcgtcccaacactcgggattcagtcggcgcgccggcgacacggacatcctacggcgccgaagcagctacgcgcacgctgttttctccacgcacgggctcgcggggcccacgcctcattgactgaccaaaaacatgggcgctctctcgtttccgtttctggagcagtcaaattagaacgcggcgaagaggcgagacctgaaaacacacagacactgacatgttggacagcatcgctcggcccatgccatagacgggtcatgcacagagaaacctaatcagtaatagtttgtgatacctctatgacaaagtgggtccattatcttcagccccacgtctccgagagaggtatagggtgcgcgccaggggtgagaagtatggtggccgaggagaggctggcgtgggcggtggagcgctcccctcggtcgccacgtgtgtcacgcagccgcatctcggttccctcctctctctctctcttcttctccctctccacctcctgcttgcactgttcgtctcctcagtaactgcacccacctccacacctacacccgagaggcggcggcggcagacac

SEQ ID NO: 11964 - DNA, 433 bp, Zea Mays
ggctcagatagctgacggtctcccgtgaaccgcagacgcggaaggctaccggcgactgcttactcaggcagctaatcatcttctacccctcgctcatcctgtgaacgacctgcatcatgccatcaacagccggcgagacgcgcgaagctccatcaactcttcccacgaccgacggcacgaaaatgagataaggcgccgagagtagtacgaccgggatcacgacgtaccaacacggagtcgcaccactcgagttgagtcagctgtagcctcgactagtgggccgttccagtgacggttgacatgacctactaccgacttccctccctaggaccaacgacacaagcaccagtaggaggacacgtgcggagttttcgtgcttactccacaactccgggccatccagtggcctcccaacttcaaggtctccaacatc

SEQ ID NO: 11965 - DNA, 510 bp, Zea Mays
ctcgactctggtacagtgctgttgactgtccgagcttcagactcttcgcatgcatcatgttgttgttgtgcctggcggtgcccttctggttattgattatgagatgaggttggcgccatgagtggtggtagtgatagcggggcccatgcagcttgtgagtggcttgccgaagcgactgatgttgtgggttgttggttgcccacatactcggggatgtatggggaataacacgaagtatgcaggacttacttcggctgattctgtcgtgcttcggctttagctatttccttcgtgacttggaatgtccttgttgtgtgccccttatcttccccatagaataggcaaaacaaccttcttggttgggagctaaatcttccaccgaagcttcttcctcctctgcctcttggagatggtggcctgaaggagctttgttgtgtacctgatgattgggatttgtgctgattcgcttgagaatgatttccctatcatcgcttgagctgggattatgga

SEQ ID NO: 11966 - DNA, 488 bp, Zea Mays
ttgagaggcgtcatcttccagacagtcaaatgacggcaggtggcctcggcgtcatgatcgctttacctggagcgttgaaggtaacactcattcctccctatctctacattacgctctatccttctctctcttattacttctccggcaccgtcaagccgtcgtctaaggatttcagcacgccatcgagccaccctcttctgctccgtccagacgttattttgaaatatgctccctttggctgccgatattctccgtttccttcaccgtttcgtagcaatccacgaggcgaattcacttgctccgtccgagcgtccctagctgccaaatgcgatgacgctgctgtgttggggtattttctaggcactcactggcagatgcgtggaggcagctgcaccgaaattcctagggacgtggatgagcttccttctgttgtctgttcttccatcctctacgatgtcagttgtgaggaggaagaatgttggtcaaag

SEQ ID NO: 11967 - DNA, 382 bp, Zea Mays
ccgccaaatggagccgctgtcgccccgccgcatactcgccaccttctgaatgtcccccgccgcgtccatctcgccgtccctcctccttccctctgctgccgcctcctgctccccctaccaatccgcaccacaagtccacaacgccgagcaggcaccgggttaccaacgagattccgttgtgttggaggcttggagccttggaggggatggggcgtgcgcttgccacgctttgggacgatgggagagcgctcaggcggagggtggggtttttgtaggggtggggtgacgacgcgttgggacgggagcgggacgaagcagtggggaaggttgcctcccggtcgtgggctcgtgacagacggtcagagccgcgccgccgagggag

SEQ ID NO: 11968 - DNA, 653 bp, Zea Mays
ttggggtccaacttcacaagttcagagttcttcgatttctgcgagcaaaaaagcattcaggtcaagtatgcttcggtagcacacccgagagccaacgggcaggttgaacgagctaacgggatgatattggagacactcagaaaaaaggttttcgataaaaatgagaagttcacaggaaagtggataagggaattgccttacgtcgtttggagcctaagaactcaacctagtcgagccctgcatggaaacactcctttcttcatggtctatgggtcagaggcagtactgcctgccgatctcaagtttggggcaccaaggctgatctttgaaagcatagcagaggccgaagcaactaggctggaagatgttgatgtactcgaagaagagcggctgaacgcagtaattcaatcggcacggtaccggcagactctgagacgctatcacgacaaggccgtgcgacaacgatccttttcagcaggagatctcgtcctccgccgaattctaacgggggagggacggcacaagctatcgccctttatgggaaggaccattcatagtagcagaagtcactcggccgggatcatatcgtctcacttaaatggacggcacagaaattgggaactcctagaatatagaacaccccaggaagtttt

SEQ ID NO: 11969 - DNA, 632 bp, Zea Mays
gcgcttagatctgcgccggtgttgtgattcacgcccgaccaaactccgataagcgctccttagtaagaaatatcacgttggagataaactccggccattgttctcaccgccgtcgtgtcccgccatggttagtcgcgttggcatcaccggcgttcactgttatccgacctggctacgtgcctcaacatttcaccacatcgtagtgaatcactgtaagccactagttcgtcaccggtgaggccgccacggtgaaggccacgaatcaccacactagtgactcattccttcttcgaccgccaccgtgcccaatccaaattcactagccaccgctcatgcctgctataaattgagcatgccgtgagctccgtaggataattacgcatccaaagcaccagcaattgcctccaatcgttcaccagagaccgcgaattgctcatctcccccgattctgtttccgccgccgtggtagaaccctcaccgtggtcagcaaatcccaggtctgttcatcctccttgctgtcttgtttcaacatccgtgggtcctcctgatgttccccgacctagctaattggactaggaccccatagatcaactggaacgcgcttgattgcctatagtgccagctgtcaccgt

SEQ ID NO: 11970 - DNA, 372 bp, Zea Mays
accataatccacacgagtacaagctctagcgtatctaatgtcaacgtgtgttcaggcatcagggctacggcaccacaacaagccttcgtaataagcgcaacacgcgtagttgtggttcaatagttagggtacaagataagtccagacaacatacgcaaccagcgtaattgtggctcgatgataataacaaaggagcgtacagggcatgcaaaaaatagtgactcggcgatgacggtccgactcaacgtgagcggtccgattaagcgagagtgcgacataggcacatagcaatcatatggcgcaactaagttcgtacgacacaaataatgcacccgtgttgccagggagcaatcaattcttagccaatgttat

SEQ ID NO: 11971 - DNA, 571 bp, Zea Mays
ttctgccaacagattcaactgcaggaccccaaacatctgaatgaacaagttccaaaggaaaactagttgagctaacagatctactgtaaggtagctgatgactctttgcttgctggcaagcatcacaaactgattttttattggacacggaggaacacgagagattattattgtctatgaccttggtgaccatggggagcgagggatggcctaggcgattgtgccatttagacacggttggtttgtcaacagcatttgcctgcttgagtgaagaatcggtagaaaggggatacaatccacgatgacatggccccctaagaatcgttctcctcgtatcctgatccttgatgagaaaaaaatcaggatgaaactcaataaatgcagagttatctttggtaagacgatgaacagagactagatttttagcagctttaggaacatgaaggacattgtttagatgtaagctacgggattgagttggaacagtagtatgaccaacgtgtttaatttccatacctgaaccagaggcggtgtggatctgatcattcccatgatacttctccctcatcgc

SEQ ID NO: 11972 - DNA, 390 bp, Zea Mays
tgtgtgcaggacgggtcccagttgagattaccccttgggggccatgtcaccaattccttcttaagaatcctggcatccagcctcgacacgtcgaggccatatcccaggggggccaagtaccagggaagaagttggtagcaacgcacacaacaaagaaaaagtagtgtgcagataagttgtaatatcgcctggtaagtagtgcttaaagagtatcttacaaaaccaagatattacaacccgctccctagtccctagcgaaaccctcattttctccacgcaggcctggctactcatcgtcagcgggatcccactagaagcgcccgaccaccacgtccacaacatcctgtacgccctcccgggcggcatcttcagtatcggccaccggacctg

SEQ ID NO: 11973 - DNA, 330 bp, Zea Mays
gccctcgtagccctctgaatccgttttgtatatcaccagagctcctctctcctgagagcatgggggttaagctaaagccaatcaagacacgagccaaccttaaagcataggaacaggtgatgagaatgcgtaggaactgatgcgcatcccttgatttttttgtgctgaagtgacatagctattgtttccgtgatgtacataagacaagaggttagtcgggtcagggttgggtgggtggtcgattccattgatttgtagcctttaaaacagttgtacattgtcacagatttatttgttgaagggagaagaaataataaggggagatgagat

SEQ ID NO: 11974 - DNA, 721 bp, Zea Mays
agaggaagattccttggaggaagacaaggacagcgacaacgacaaaggtgatgacgatgcgggtggtggtgacggcggtggtgatggcgtgagtggcggtagtggcatgggtggcagtgacagaggtggcgacggcacaggcggtggcagtgacacgggcgatagcagcggcgtgagcgacgacgtaggtggtggcagcgacggtagcggtggcgagggcggacgtggtggtggtgaggcaccaccatcttagttagtatagcatggtagttgtagttgtagtgtagggtattgtagtagtagtactataagggtgatggttatcttctgctagtggtcggttcataatgaactgatacttctataaagacaatgacatatatataagtaatgaacttcgtctcatcaccttctatgttatgtgtgactatgacaggggtttagaaatcactcctttttatttgtgagaacatgcaacgacgatttaggtcaagcctcgactcaatccaattgtttcatcgatagggttaagtgatcacctttttgtgtatgcgtgagcatgtaacaccaacttaagttagactgtgacttaagccaattgctctgttagtagtaagcataagtataacaaaattgtatgagaggatgtaattgattgctcaaagtgaggagaatagtgttttattgaatatgaattttagagtacaaatgagagcttgcc

SEQ ID NO: 11975 - DNA, 579 bp, Zea Mays
gttttatgttaagaatgatttaattgaaagggaagatattaaggaaatcatccaacgtcctatctggtctcgcttcggccttcggaggccgaaggtggtaattggtcagaatgatgaagcttgccagaaggcttttagcaatgtctgtgccttcattggcacaagggatattgttcaagagcacatagcgtacagagtatggccacttgtggaaaactgggatatgccgaaggatactactgctgaatcaactgaaggtgggttaattgaactgaaatatactttcaggtttagagaccgatttgatgagccaaatgacgattggttaaaaagtattgaggctatcagcgacgaactacttggggcatatagtaagaccgaagataatgctttgtccacagccttcgggggccgaggaaagaaaagattaaacagggtatttaatgccataggctttatataccctgattatcactacccgctgcagggtcaagggaagaaaagaaaaactattgcttcggcccccgcagcttcggccaccgctggtgtaccgaagggcaagaagatgaaggtcttgac

SEQ ID NO: 11976 - DNA, 580 bp, Zea Mays
cgataggtggaatgatcggaacgagcgggctcaagaattcagaaagcggagaagcagtagaggaaaagtaagatttagggttcagaactcaagaaggcacgtcgacatgagtataagttggctccttaggtcgagcattacctctaaagtgtcagatcacaattcggaaaagtaaagaccacaatcgccattcgggcattacctctaaaatgccgtcactgtcaagcacacggacaaactttcaagcgcacgaataaaaagcaagcatcggtgattaaatggagtaacttcatccttcattcgtaataggggaagtaacacaaactcgaagctggctgattatgagtcagcctcttttacccctggtcactgcagtacattacattacatcaccttactacttacactacactacgctactaacttacactactttattctgcaacttactactactactactatttatactaatatttaaaccagtggcattgtgccactagccttgccgctgccaccgtcgcccttgccgccactgccgtcgttgccaccgccgtcaccgttgccgctgctgttgtcg

SEQ ID NO: 11977 - DNA, 387 bp, Zea Mays
attaaaggacagggactacccgacttatttgtatcgaggcctcgctgattcaacccaggttaccaacagaaaaattcctgcagtggatttggccagccggctcgagatgatactcagaggcaaggtgtcgaacatcggtgctcctattgcatactcggcctgggatctgcctccttccaaggcttttaccaatttcatgtcgaatccccctgctggtgatagcggtttgggccttagagtgcgaccctctcccgaagaggttagtactttggttgcctcacttggtgaaatccctgatgacgagaggcaggttcatttcgaggtacctttgaatccaagtgatgctgagataagtgccatgctggatatgttggctgaagattcctc

SEQ ID NO: 11978 - DNA, 385 bp, Zea Mays
gatgggttaatggtgcacccgtcagatggtgatgcatggaaggctcttgacaactttgatccagattttgccagcgatgcaagaaacgttcgtatcgtcttgacaatagatggtttcacgcctttcaatatgaccaatgcgttgtattcatgttggtctatcattgccatactgtacaaccttccacctactctttgcatgaattatgattttatgttcctatgtcttgttatacctgggcctgagcatcctggcatacgcctcaatttgatgcttcaaccactaattgaagaggtaaagaagctatggcaaggagtggaagcctatgactgcttcaagaagcagaaattcaatctccgtgttgcgcatctgttcttggttcatg

SEQ ID NO: 11979 - DNA, 479 bp, Zea Mays
gctcttttccaaaaatactacggcgaagggggtatggttcaataaggaccgatggatcagatttgaacgcgtgagattaaatcgagctccgccccgaaccggtatgctctgcagaccatcggatcgacgatcaacggcccggattcaaagtgccgaagggatatttgcttcttctaatcttgatcgtggcttgcgaatccaacgacccgagatttaaaacactcagatcaattgtcaagcgcccgatccagatcagacggccagggacggatccgggtgaaacattatctagagcgtccaattgaagatctaatggctagccttctttctcctacctgagtccaagctaggcgacggaaggcctgttcttcgcctgcatctccgcccacacccgcttcactctcctccacgcgaccaccagggagagcgactgcacagccacggacggcttcgtacccgaatggcgcgaggccgtcgac

SEQ ID NO: 11980 - DNA, 622 bp, Zea Mays
catgttggctttcgcagtaaagctagcatacgagtctggttggcgctgtgaaattattgcgtgtctccgccacggcgtacgtgcaataaatttctatatattaaagcagggaggaatggcgagctctgaagatatccacgtcacctctagaattttcagtcgttcgattagatttgaacgacgtctagaacctctctgcgcgtgtcgccacagaaacggtccctgaacagccacgcgatggttcgcgacggcaaacgaaggccagggaagagggaaaaaaaagaacagtccatgaaagcgccggtagatatcccctcctcccctagctgagtaagagtaaccacgccgcagcgcccccgtctggccgtctccacagccacgagtccaccgcgtccatcctgttccggctcctcgctccaccgctccgacctccgagtctcgctgtctccgcgaccgtgagtcttcgcgctgcactgccgcgtccttcaagtccccggctccaccgctccaggcttcggtattaccgaccgcgatttgccgctgctccgcgccgcgtcctcaattcgcaccactgcatggctcaccgtctgcatctgcttcatcctatcgcgtaccaactgcg

SEQ ID NO: 11981 - DNA, 394 bp, Zea Mays
gcaaatggcgcatcaccagggtaagtaaactgtgaagaataccaatgctgcagaatttgcccctaaaaagtgttagggaaaatgccaaacatccccgatcccgaagggaagcgatcaccacaagaaggaaactgtggtccgctagggaagtaagaaccaaagcctctgttatggggtccttggccatatggctcatgaccagcacccagtcgggcacgaccaccacgcggtctcactacttgaggcctagcagtaaaaggcaaaacacctctaggcctcataggacgtctctaagcaggctgagcatgaacaccatgagaagggcggttcatgtgcttcctactcaactcagaaacccgctgctcatctctctccctcctgaagcaaaaataag

SEQ ID NO: 11982 - DNA, 943 bp, Zea Mays
ccacaggcggactgttcttcgcgatgcggcggaccaatttgggggaaaacgacgtcgtggcggctctgggtgaaattgggggtggagattgaggctatacggccgtaagaggctgtggtttcattgtgcgcaatcaatttgggcgaagatggagaggacagtgcgaatttaacttcgactgagctttactggtggagatgaaagcacctcgccgtgtctccttgctcaatttataggcatggcggtccggtgattgattcgtggccacgaggtgggctgttagcgcatgtcgaccacgtaagaacgaggcatagtaagagagatcgacgtacggcgacagtgcggcgaactgcgctgagtcacggcggccgccggtgagtaactccggccgagctcaggagatggtgccacgtacaagttacccttttcccggcattatccatccttcaccgtgcatgaatctgggcggcgatcaatggcggcgagctgagctggcgttctgatccacccaaaacactgtaccatggcacatcttcttcagtcgcctgaaccggccacgatccaacccaattttctctggattcttgttagcaacagagcgatctctcttaataaaatttgttcactaaacatcagtctacaaacttactataggattcttgggtcaaaactgaacggattcaaagatatagcgtgtctaaattggctcccttccactgtaaccatttttatttggagttcagtttcagttttctaaaacagttctgacagagcgactttgagtagatttttctccaatttttgtataacaacagcaggagatgtctgcatcaaagttgttctcctataataggtttacaaaatttatgtggtggcctagggcaaattcttactggtttggaatttacacgactccaaagttgagcttataaccctgatttca

SEQ ID NO: 11983 - DNA, 563 bp, Zea Mays
ttccattaaatctccaccagcaatcaagagcagtatgtccaatcttctcacaaacctgacatatgatgtcagactttctgccatctgatgacaccattctctgggcaccacgaccaggacctcctctccacggccaggatcattacggccacgaccattatggccacgaccacgaggtccagatctaccatggccacgacggcttgtatcccaccgtgaagcagttccatcctgttctcaaaactgagaagttgagaacggacatccctgactgagacaggttccacacgagcaacaatggctgagacgactggattgaattcttcatctaatcctgccagaatatatgagactagttcttcatcatcaattgcctgcttggcagatcccatgtcatctgcaagagatttcatcttggtgatatactcagaaacaatcatgttacctttccgagtagtagctagagcaattcgcgtgttgacagttcgtgtgcgagactgtgacacataggtttgctctaggagagaccacacatctttgggtgtggtacaggaggcaacctg

SEQ ID NO: 11984 - DNA, 388 bp, Zea Mays
gccatctctagtcgtctccctgttccccttacgatccatcccgcttcatcccatccctcttccctgcacccctctctaacctaaccgcccccttgccatacgagtgccgtcagctcgagcccacctctcgacacgctctgccatgcaccacctcgctcgatcctcgctctcttacaccacaaagtcacccctcgcgcgcctggtcttccgcactgctctatcgctatgggtcgtggctagattggatcctacaacgtaaccctagagccgccacgaactgccatacatggcctcctgcgaagatggcttcggcctcctcgatgacgatacacaccagacgacaacacccccgccccttgccctcaccgtctagcaacttgtgccaccg

SEQ ID NO: 11985 - DNA, 987 bp, Zea Mays
ctgggcactcggttgttgggatcttgcttaatctccggaccgaccaactcggccattaatctcgcccataaagcagtacgcttctcctattccgctgataaccgacgggaggagccatgaactagacgtcgtggagttgaaggagcctcctgctgtgaagggtgagtcgacagggagtcttcgggttgccattctcgtccatcgtgctctacggcggggtgctgggcgggaggtgaaggaccacacctcgacaactcaccaaagagattcgcgctccgccgcaagtccaccggtgactcatccacggtgagtcgattttcctcctgcgcggtatcttggggattagttaggacgtcgcgagagtgtggggtggaagcggaccggggatcagtgcgctgccggtggacggcggtgtcgcttactggctagtcagggccgggcagcgcgctagttgacgtctagagagagaaagagtgccgggaggtcgcgccgccgtagcgtgtgagcgtgaggttaaagaagtgcgggtgtccgtggattagggaatcgacggtcgcgattgggcatgagcgtaccatttcacggagtaatccaagccgctgatcccataacgaccgtattggattagatcctggcagatttgatgttgagcgtcggatcagttttgggcggcgaggattagttgggggatattacttcgcccggacgcgatctggagcattgatccaccatcggacggctgtgaaaaccctgatcgtggatctcaatatcaacggtcagtaatgtttaccgattcatttaatagttaatctaatctgagccctaggtcttagatccagcgacccacaatcagtcatacctcttcgccatgtacatttcttaaagagaccctcagttcttagggaattaacccgtagtcctggcgccagtcattctgggtctttggaagttttacaccagagacccctgcacttcccagaaatatag

SEQ ID NO: 11986 - DNA, 362 bp, Zea Mays
tgcaattttaaatgagaacttcgcctacgtaggaaggtcagatgccatgttagcttggaataaattttgagatggaagggacagatgacaagaaaggttcaattgttttcagtttgcagtagtctcctctacctttgggatactagataaggtccatttacattttgatgcactaccagttatatacaaaggactaaaggagtaacaaggtagaattcaatagtatgtgcagaatgctcatttggtagtttcttttcccatcaggaggactgttgaatttcttgctatggttccaatgtgtatgtatgtttcccaacagaatttttataatgttcagacctattatacaaacgggtccggtg

SEQ ID NO: 11987 - DNA, 455 bp, Zea Mays
attacacccaaagatgggttgtcaggctgttgaagtctgaatttcagactgatagtggcctagaaccaagtttgagagccatttcgaccatgatccagtgagaatctatctagggatgctataacaaagatgaagatggtttgtagggctacaactttgctgcagagcattggttatgttgccatatgaatttgggagaaaatcgagctcaaagatggtctgtcaggtcaactaaatacactccgtgatggtacagtgtctggattaggccgccagctcagaatctcgccgccggcggtccgcgcgaccggatttgtgctggtcgccgggattcgtgccgcgggcatgtggatttcgctcaccatgaaaagatctcgtcgcggatgtgtatgagctattgtggcctcgctgtcccctaccttttgcacctgcgatgtggccttatggccgtcacc

SEQ ID NO: 11988 - DNA, 632 bp, Zea Mays
cgcgcgaccatcaccgtcgtgccaccgttcctcgcggttatgccacaccgtcagccatcttaccacgtcgcaattgatcccaatacacaacccatctatcacctaaggccttgccacggtaacagccacggtcacccgcaccagtgactcagtccctctctccagccgccgcgcgtcttcttaaaattagccgccaccgccgatggcacctataaattgtcgcctcagtgagctctgctaagtaatcacacacccaacgcacccgcccgtgccttagattgtccaccagagcgctccaattttgaagttcccccaaatcagttagaactccgccgtgagtgagctcgccgtggccaacgctctgcaggtccgttcacgccctcctcactgtcgtttcaatacccctgtatgctatagatgctcatcggcccagccaattgaactagacctatgtagatcaccgggtacaccttggattatcctcggtatgcgccatcaccgtggacagagagttctcgacctagaattgtgcaattagctgagggattcttgtcgccgctgttagaattaggggtagagcaaagaaggagcctagccgttgcgttttccggccagggtaagctcgcctgagc

SEQ ID NO: 11989 - DNA, 338 bp, Zea Mays
cggctcgggtcttcggcgggttgcgatttgggccgaggaaatccgccaattgctcgccggagggagtgcttcaccaccgcgtcgtacttcctcgtggtcggactcctccgtcgcgctggtcatccgtggacgactcggcctgcacatcttgcggcggtaaggttatggccttggaattcgccgtcattcctatgctgcgtagattcgggtcgcgctccaaacggtagcttagtgctccgccgattgccgctcgtcgggcctgaccaaggcttgatcgtcgcgcgagctcagggtagaagaaggtgttggcgccgctaatctcaagatgaacggccagg

SEQ ID NO: 11990 - DNA, 587 bp, Zea Mays
ccaaaaaagagtattagcaccattaccaaccaccaaaaccaaaactgcagagaaggatctggcattgcttgggacctgaatggggaggtctacccatggtctggaaaaatagatttttttcagccacaaccatctcattctaagagcccaacatagcttaggtaggctagaaatccccatacctcctagatggaggtgcctgcggaccttttcccaagcaaccatacagtggcctcctttagcatcctttctacctctccataagaaacctcttctaattttatcaattgcatcaattgcccacttagggaaatcaatagccattgtggtataaattgccataccagtgaggacatgctgcactagaattcttctgccagccttgttcaacaaatctgccttccaacttgggagaagatttgcaattttctcaataatggcagaaactgttgcttggtcagtttatgaagagagaaagggagacccaaatatttgcaagggaaggaagccaccccacatggtaaccaattttgaacctctaagatgatctgctccgaacatctgatagggtagatattggatttctg

SEQ ID NO: 11991 - DNA, 552 bp, Zea Mays
tgattttgtgcggaccaggcatcttcagctttaggtacttgtagttagggacgaccataaacttggcgtggtatggcctcacgagaatggcgttgtaggaccccgggaagtccaccaccttaaattgtaatcaatcgatgcggaagttggggggtcaccaaacatgacaagtaaggtgatacgctcaagtgggtaggcctggtggcccagtatgatgccgtggaatggcgtcgagctgggacacagcatggagcgtgcgatcctcaagtcgtcgaaggtttcaatgtaaatgatgtttaggtcgcttcccccatccatgagcaccttagagaggcgcttcgagcccacaattggctcggtgacaagggggtaagtcccaggatgcggggtcatgtccgggtggtcgtggcagtcgaagacaattggaaagtccaaccacccgaggtattgcgggacggcaggctccgccatgtgcacctcgtgttgggccaccttaaggcggtgattgtcgtcataggccttagtcccaccgaagatcatgagacatcccgt

SEQ ID NO: 11992 - DNA, 278 bp, Zea Mays
tgatcagatcctggatccgcccctggcaccgagatctcaaccatactaacgtttacgggacacactagcgactaacgtgatatatctcagcatcatagatcttggtgccaagtgtgtgagcacgggtttgtttcgttctgcgcacacatgtatgtaatgtagcgtgcggcacgctgctagccatgagactagagatgacaatggagaattctccgtcgagggttgagcccccatacccgtccctgcgagggagaagaatcctcgttcccatccccgcg

SEQ ID NO: 11993 - DNA, 502 bp, Zea Mays
ggcaaagaaagatgtctcactgaactgagaaatgagcttaaaatattggagactgaacatgcagaatgtcttgtgaaggcgagatcaaataagcaaatcaagtctttcaggtgaaatatttagtgattagtattggttctcacagtaaaacatatatgatcaaagacttctctgttccacaactccagatttctatgatttttttttcaattttgatgctatttgttggcatgtcgtacttttcatgtttctgtgtggcctagatatctattttcatgttcttgtttctttgtattacctaaacaaactctcctaaatattgaacatcgtcgtactagatatattacaaaataatttacgtgaactgatgtatttcttgtcacagtgtcggcttgcactccaaaggaaacacttgcaatactgaagttataaaaggatttttcagatcttgcctgcatactaccagatgttggaggtactgtgtttcagattcactgcttgg

SEQ ID NO: 11994 - DNA, 641 bp, Zea Mays
tgcgggttgatttgactctcttcgggggtctctttagaaaatgttacaccgcgaaggggtatctgttgatatgggtcgtcagattagaaacggacgtcccagattaaatacgatcaacccgaaccggtatgtatcacgggcgctctgatccatattcatcggcttggattttaaacattcgagatataatcgtgaccgtcaatcgcagaacggacgatcacagattgaatccacctaaacgctacccctgatctaatccctaccgtccagctcggatagacggcagggaggtcgtcttctccctcctctgtgcccaggtggcggcggcgccatcccacccggtggagttgtgccagagaaggccgagccggtgcccaggtatcccaatgcgtcgcggctaaagctagaggcagctgaggatacggtgaaacagaagaggagattactcacccgccaagcggccatggtggcccgcgcaccacacggcgcggcggcaattctccccgcatggcattcattcatccagccggcttggcgacgcttgaattaatggccgaggaaggtgtggcggggggtcacttttatactcggggaagacgatcctgacggatggggcccgccagccaacgtctccgagccgt

SEQ ID NO: 11995 - DNA, 814 bp, Zea Mays
cggggagggaatctggcacgcagaggtgtccacgtctgcaaaatttgtctcaatcgttcgattcggcgtgtacgtccaagatgcaacacgtgagtatgaaaatccccacaccacgggatgcttccacacaagactgctaggttccgagtcaaaagcaaaacagtgatccgctggccacaccacgggacgcttccagataaagctgccaggttccagtccaaaggaaaaaacggtggcccgctagcttctccgtggacgcttgggcaaagatctagatagcgctgcacgccgctgcttctccttccccgcgagtgtccgctccgtacgccggcgactacgatcctgtttctggtgcgtaccttacagtccatccttcttcacgtgtctacgctcttcactgcgccatgcgattcctccagtaatagatcgcgccctcgacaggtgaaagggagtgtcgcattccccatcagcactgttactgacggctgccgcgtggtgttcccgacgtgtgctaccatctccagtacacccaatcctcaacgtgccgacgatccacgcaggtacgaagacttctctggctatgtgttcttcgtgctaggttttgtcttttgcatctcattctgattccattgaacacggctagatattagggcttcgattttaggtttttggttgtaactttctcctccgtgcacgggtgattagggcttacctccagcttcgctcacttcgactccattttttattcatcgattttttatttcctaatgtttaccaaatgttgaattgctatcattcgttcaatgatccttaa

SEQ ID NO: 11996 - DNA, 605 bp, Zea Mays
gtttcatgttagggaaattaaaattgcgtcggagccggtggagagttcgccgcacccattcatgtccatcttcatgcatcgcgcgcaaaacctcttgcaggaggggagatgcaggcgcgatgtagaggtggcctgcgtactgcaccatgccgtcgatcaccgcccatggcgctccacgggagcccgcacgcacttcatcgtggatgacggtaagggccggtttggtgagctgtgcttgccgaagacgcgtgatgaagtcgaaatgtggccccaacaggactaatacagtcccttcctcaggtgtgtcgcggcgggagagggcgtcagccaccatgttcaccgctccggtcttgtattcgacagtgaagtcgaagcccagaagccagaagcttgcccacccaatgatgttgagggatcgtcgcgaggcgctgatcgagcaggtacttcaagctatagtgatcggtcttgacgaggaagcgacgaccccagaggtacgaccgccagttgcggacgacttggacaaggccgatgagctcgcgctcataggcgtcgagggcgcggtgtcgtggcgctactggcctgctgaaaaatgccaccaggtggcc

SEQ ID NO: 11997 - DNA, 563 bp, Zea Mays
ggacttggattactttgcggctttggatgtggctgcggcggtggcttctccgcgtgttgcggatgctgaagttttgcctggtccgagtgctgggcgcaggcagcgaagggcggtggcgaagcgtagagtgagtgaggtggatggcggtcggcttcgtgtgggcagggctagcaagcgggaattgttgtcctcgctggctggggcgagtgtaggtgagggggagttgcgaagtcttttaagggtgaagagcttaggataatgctatttaactatagggagatgggaatcattccgaaggttgaaccaatgtaagctgtgatgccctcgctgtacgtgtgtaactatggtttgtatgatgaggctgtgcgccttcgcgcatccggctatgtccataggggcgttgtgcgcttggtctggcacatttattatgttggttcggctgcgcctgtagttggtctatgcgcggatagtttctcggtgtagacttttgcacggatgtaatgctcttgcgttttggcgcgcttgttgagctagtccggctgcacccttaggcgacttttgca

SEQ ID NO: 11998 - DNA, 390 bp, Zea Mays
gccgggcgcgatgatggaggagggatgcaactttattagtttagtgttattattattattattgatcgattgatgaaggaaaggacgggcgcaacttggttgcgatattgggtgggtttaaagaaacgcacgtggagatgagatgacaagtgcccccgcggcatgttccagtgagcagggaagcaggtggtgggatgaagctcacgaattaacaaacaacaacaacggttccaaaggaaaatgcgccgttcctaccctacttgtgactcctgtgattctttattggtttccttttctgcatgattttctctccgatcgcatgcatgcgtcctgcgcctttatcttcttcacggttttcacgagagattccgtccggtgcccccgtgaata

SEQ ID NO: 11999 - DNA, 465 bp, Zea Mays
tctgggttatggattttgggggggggggggatcggccatggccgcctccgtggtctgtgggcagaatgccgccgctacctgggatccgcccgctcgatgtgtggcgccgccgggtgtgcgtctcggctggagaagagagccagtgtgcggtcgatttagaaacgaggggccaggattgaatatgagatctattcgggcgtgatgtaacctggacggttggattgagatcgtaaggctcatgttagatcgtagctatctgaatccgtgccgtagatacctaatccagcgctcgatatcgcgtaccggttcaatggaatgtggatctaatctaggtcgtaggaatcagatcggacggctagccttgcgcgataacgattcgccgtggcgactttgctaaagaaaccccgagaaaagcaggaataaacccacagcccccatgactgtttactgagtcttgggaatttt

SEQ ID NO: 12000 - DNA, 506 bp, Zea Mays
ctagtttgttacttttatcttgttgtgcttcgataggacacgtcttagccagcaattgtgacttgtgctttagacacttattgaacttcgctaatctgcactcgatttttgctaatccttgatattagtttttggcctcccaagctccagatactttcttttgatcaatacagttgtgaccttgcaatcgcggtttcactacctcttggtaagtatcacgaaccagcctctgattgtaccatcatttgcttgtatttcgttagacacttgtaagagcttggtaagatacattagagcgtgttcctgtgttccacctgagaggagcatgtagtgaaattattagggataaccgtcaccgtttgtttcctgtttttgtgtttcgatggcaggcgacgacgaagaagcaaggatccctacagacttcgatgaatgtgttagccgccaagatcttgaggcaaacaacaagctcctgaaagagcaaatgcaggagacggtccacaagtcag

SEQ ID NO: 12001 - DNA, 717 bp, Zea Mays
gcaacacttagcccgagctcagcagcgtatgaagtcccaagctcacaaacaacgcactgaaagacattttgaagctggagatcaagtgttcctgaaaattcagccttatgtctagtcctccctcgctcctcgtgcaaatcaaaagttggattttcggttctttggaccttttccagtaattgagaaaattgggtctattgcatacaagcttggattgccatctacttcaagcattcatccagttttccatgtgtcgcaattaaagaaagttgttccacctctagtctccattggtagttgcctacctctttggatggtttccaagtacctgaacaagttctgaagcatcgtgttggttctgatgggaagtcgcttgtgcttgtcaaatggtctgagatgcatccttcgctggccacttgggaggatctcatggcaatgcagcaagcttttcctcaggcacctgcttgggggcaagcaggttttcttcgccgggggagtgtcagcaaccaggcgtccagagatgatgtcgaagacatgagccgtgcaagtggtgaagctgaagatggcgagctcaagaaggtggtcaggatccgtaaatcaaacgtgcgcgtgggtggtccggagtgggtaagggcgtagaagcctggtcaggtcaccaacagaaaggctgcatgtgtgagtggttgagtcatgtaatggcttagttaaaaagaggaa

SEQ ID NO: 12002 - DNA, 2070 bp, Zea Mays
gtgacacctagtctctccctgctgctggaatctgttcatgaggaaagggagaaatggcaagttgctggagcaaggggcctgtcctttttagctggctctagtactgctcttggaggattgtagttgtttcagccaggattcctccattggctccagcagagggggaggaacacaaaaccagagaactccactcccaacatagataaaatgtctcctctactaatatattatatatttgtctcctgacagcatacaacatccacctgaaaggtgtcctccatttctctgacaacatccttcctaacagaagaaatgagccctctaacattccaaataagaatctttgaaggattcgtaggaagaacaaaaacaacaaacaaccacagggggaatgctcctacagatctactggtattgaccagccaaacaaggcagcgagggcctccacctagatctggttaagagggtggttaaaaagaacaccatatttctgcaaggcttccttattcatatcttcactttctgtgatgatttgcaagaccctcatagcttttctggaagtcctgcttctgcaatcatacatttcaaattccacactaatgccggcaactcttctgctgcgcctgggagcattaatcacctgagatgatgcagtcttcagggaaggcttgggagctgggagaagccctgccgtcttcctgctgatcttgcagataaaagcatcaatgccactatcgatgcagcagtctgaagcttggtcctgattggtatgagtttgagaatccagggcaaagtccacgctaagattcttgcccaagtcattgcatcttcctcctgtcaagccaacatccacatcttgatcctgaagggggttctgttttcttcttgtatagactttggttatggaggtgtgtgtctgcatgacagggagtgggggggtggaggctctccactcttctcactgtcgcatgcgacttagcagcaggtcaaggcgagacaggagggaggggcacaagtgtcaactggggcgagacatgccccaactcatgcatttctagcgacccagcaggctgaggtgagacgacatgagggcgggccgtctccggcggcccaggaaggtggtccaacagtaaagcatcagagggctggggcgattcccgccagctggatccagcgacccagttgccgggtattaggcatatatctatagccggctgtcttaccttgtaggcatatatctatagccgtctgtcttaccttgtataggtgacagccttcctagtttagccttaccttgtataggtgacagccttcctagtttaggagattgtatccttgtacaccaggccacttggctatatatatgagaagtcacccacctgattgggtgtgcggtgctttcccctaaaccaactctctacatggtatcggaggaccaggatcaattcgatccaggccttccttccgctgccctctgcttcctctcctctcctccatgtctgagccgaccttaggcgccagcgccgaccttgacgccatccagcagctcatggtgccctcgtatgcacggttttcggttcaatctcatgtaccgaccaagctggagatgaaggcctccaactacccccggtgggcatccttcttcaaatcgatgtgtggcaagttcctccttcgccaccacatcgacggctctgctcccccacgcccgcaagacccgatctgggatcaagcggactgctgcgttcgcagctggatcttcggctccgtcgacgactccatcctcagcctcgccgtcgacggtgacaaccagaccgcccgcaacctttgggtcgccatcgagggtctgttccgcgccaacaaggccccgcgggcaattctccacctccacgacttccattccatgacccaaggcgactcctccatcgacgagtacgcaatgatcatgaagcggaaggccgtcgatcttcgggacgtcggccatcccgtcgaggactcgcagctcgtcctcaatcttctccgcggcgtcaatccccgcttcagcaacaccgcagacgacatcgccaactccac

SEQ ID NO: 12003 - DNA, 527 bp, Zea Mays
ccccgccacaccatcctggcggcgcatgaatgcggtcgtgttgtcctgggtgctgggcacactctcccccgagctgatggagtctgctcgcacctctagtggtgctgcgcgtcgtgcctggctgaccatcgaggagcaattcctcggcaatcacgaagctcgtgcccttctcctcgacgccgagtttcgtgttttcatgcaaggcgatctctccgtcggtgactattgtcgcaagatgaaggggatggttgatgctcttggtgatcttagtgaggtcatccacgaccgtaccctcgtcctgaacgtgttgtgtggcatgaatgagaaatttgcccacatgaaggtccacttcaagtgctcgaagatgttcccctccttcgccgacatccacaatgatctcatcctcgaggagatcgactccagtgagccacctccacctccggccaccgctctcatcgccagtaccactgcttcctccatcacccctccccctggaggtgtcacggtgcccgctggtggtaccaccc

SEQ ID NO: 12004 - DNA, 429 bp, Zea Mays
tgggggaacttgtggctggctgcagctgctggatgcggccactccgcctcttgccagcctcacgtttcccctcaccacttattcctctccaccaccaccacgaccgcctgcctgcctttgggtcctacgaatgtatagcaaaactctgttgaggttggtgttaagtaggcttctacttctaatggctggataaagatgaactcaacagctacgctacgccctcgggaaggagagaaaagacagggaaggaatgtccagctggaggcttccgcggccagtagtgggactgggagcgaagcgcatccgcacttccgcagaggatcctcggttcggttggagttggaggcccaaaagacctcccgcacccaacaaaactccagcctcacatctctccctctccctctccctcttcctctctgcggtccaaac

SEQ ID NO: 12005 - DNA, 437 bp, Zea Mays
tcctgatgtccacaaccttttcagctgctttccgtgtctatagaatatttttgaaagttagtattagcataccccgcgaaggcaaagacaaaggtgatagagtacataccttttccctattctttatagattcttcaatacttaattatttcccacccctcttctaaatctcagttaagaattttttggaccactccgaagcttcgacagttgatcttcggacatggtcagcagaaactctgaaatcgaggtctgtacaagccctcacatgattgcatcctactttcagcagaaccaaagcaatgcttctggctcctatcaagcacaatagtcttctcgagctgagagaacaccattgaaagcacgggtctcgctaagcacccacctcattagaccctccaagtcaccatctaaatttttttctctttagatagagc

SEQ ID NO: 12006 - DNA, 593 bp, Zea Mays
gtttaacgttttacacgagctatcaaaacttgccgtgcacttgcacggcacaatatcccatccccccgtcaaagtgtggatggatgcccaaggatagagatgcgcctcgggcctttttgcgtcaaaagtacccaggcctacggaggaaagaatatggacggatgggactgggacgacccaacgggcaacggcaggtctcctcattttctcactgctgccctgtcgacctatcctgctactgctagtaaacctaggttcttgcaacggtgctagtgctactgctaccccattcttcttcctcctctctcagttcatggcctggcccaaggaactgtggcttttttattctccttctcctgcatgttttagttcaaaataataataaaaaaagaaacaaattggctcatcagtcgacggccgtcaccctgcatcccatgtgaaagctggaacacctgagctcatctcagaattcggaccagcgttgcggccgatcttgcttccctcccacctccctccgtgactgcattgtcattttgtcgcgtgggcgcatgtgcaggcggcaatggctggctccccatccgggtttggtttgc

SEQ ID NO: 12007 - DNA, 743 bp, Zea Mays
gtctggagatgcgccgcggaaggaaaacgaaatatcttgatattccgcttaaggacaacattaaggggtggcgtcttgagtggtttattgtggaaaaccatggcaagtccctcccccctcggtcgggaagacaaccagatgtgcacactccaagttggattgagtctcctactgccttggaagtgtcagaagctagggttctgcttgctgaagtctgtctgctgaaggaaagaggtctgaccgtcgaagctgtggttgctgactttgtttttaagaacatccagccctgaaggacagagcatacccagcttacttgtacagtggtgttaccgactcaactcgggttactaataggagaattcttgctgaggatttagtgagccggctagacatgatcttgagaggcaaagtatcaaatgttggtgctcctgttgcctactctgcttggaatttgccacctcctaagtcctttttcaatttcgtgtccaatcctcctgctggtgacagtggtctgggtcttagagtgtgaccctctcccgaatatattgaggtcttggttgcttctctttgtgatcttctcaatgatgagaggcaagttcattttgagatgccaatgagtctagatgatgtagaaatgaacgttgtgctcgacatgttggctggagaatcttctgattcggacccttctaaaacaatggttgttgtggttataccaaagactgtcaaaacagtggatacccgga

SEQ ID NO: 12008 - DNA, 834 bp, Zea Mays
ggattgccgccattgaaacaaccgacgagaggagccaagacatagtagtcgtggggcgagggagtatccagccgcgaagggtgagctcgacggagggtctacgatgtgcgtggagttcgccgctttcgttcttcgcgctcgacggcggggttctgggcatgggaggtgaaggaccgtgccttgacaactcgccaagaggattcgcgctccgccacaagtccaccagcgaccatcttccccgtcaccatccgaattctggtgcgttaacctccccgtaagtctcataaccgcgtaacccgcgcctagctactacagtagttattgcctgtccgtcgtgggcctagtcaccggggtactcatcgccgtggaggggtgggggcaaccggcgagcatacaaccatgaggagagagaaaaggggatagaaggatgcagagaggaagaagacagccggtggtccgttgagtggtagatggacggtggagagagtatacggtgtctgggccgttggattcacatggagcggtgatgatttggttggtgcgtaccacttccgggcgcccatccgagccgttgattgagtgacgggtggtagagattagatcccgggggtgacgacaccacatccgtagatctgggatcggccggtccgcaatgcataccagttcacagttgatgctgatctaattaggaacgctcatccatgatccatcggccgaaactaaaccatactgtttcgaccccccgctttgcagaaagacccccgaagaaatcactaaacaacccgcggtcctgggcaagctcggtctgattctactaaagttttatagttttac

SEQ ID NO: 12009 - DNA, 650 bp, Zea Mays
gttccgtcagggtctgaagccttctatcaggcatgcactgggggcctttccattggtggacttccgtaccacggtggagcaggtgctgggtgtggaaatgcaacaccagtataccatggagtcgcagaagtcttcgggtgttgatcagcctcgtggccaggacacgaggaggggcaacactggaggtccagctcacaagaggggcaagtctcagcattagcgccaccatccttaccgtggcaaatcttctgacgcgggtacttcgggaggaagtactcagaggtttcgggccgttcctaagcccgagctagggctggtgtgtttccgctgtggagatgcgcatcgccgtgtacagtgccagtggagtggcaggtgttctatctgcagtcaggaccacaaggacgtggtgtgtaggaggaatcccaatgggaagctcagatgggagccggtgacttcctcctcttctcagggcactatcaacatgatgtcaagtgctgagcagcagttttcagttcctcttcctccacaacagctttatgtgcccgggacttctcagttcgtgccgatgcagggtttccctcagtatcaggtcgcgcctactcctgcaccgtctacccctgtgctgactcagtttggagctccgcgctagc

SEQ ID NO: 12010 - DNA, 305 bp, Zea Mays
tgatcgaacgcgagttgacgacgcaatcaatggccgaatcccgttctgaaatctcatattgcaagcggctgacgtcagctgacaattgagttatacgttggctgtcctgcgcccatgccctaatccggtgacgtagctctgaccgaagttgttccaccttggcctccaggtctccaattgtgtcattgctgccactactactcccttcatgtctgggggctagctgatggcgaggcacgccaaaaggtccagtagatttgcgtgatgttttccttatacgcgccatgtctccataagaggggaag

SEQ ID NO: 12011 - DNA, 295 bp, Zea Mays
ctgacagttcagaaaaccccctagggttttgctaaacctaacccgaggtccttctcccaattaaacagtacccgcggcggaggaaagggcggaggggcttaccggcggcgagattgctccagtgaggtggccgagggtgtaggggaggtcgtgacggtcacgccgatgtgcggatcgtctccggggatggtcggagtaggccggtccacgtgcgcaggccggggagctcgtcggtggtgagggttccggcctatccagggtggtagagttcaattaaaccggttagtgagcttca

SEQ ID NO: 12012 - DNA, 799 bp, Zea Mays
caacgggggcaacaatggtaacaagagtactgggcaccctgggccttgtccaggcgcgtccataccactgcctggctacgggaacccctggtccggctgcgtccaaatgtggccacatggctacagtgtgttcccagggcacatgtcgcgcccgccgctcgaccagcagccttagccgggcctgcacatgatgtcagcctcaactcctggtttcagctatggtggtgcctccacccctggttttggctatagttgtggaccacctacaacaccgtctctttcggccagcatgcctctgcacgccccctagaatcccatggccggcgggtcttaagaccaggcgtccctcactagcaacttcaacaccatgtcactgacgccgccgaactccgtcgagtggtatgctgactctggtgctggttcgcacatgaccgcacactctagtatactctcgtcccctcgaccaccctccctgtctgatccctcctcgattatcgttggtaatggttccttgttacccattacctccactggctcatactcatttactactccacggcgttctcttgttcttaatgatgttctcgtgtcccctagcattattaagaatttgatttctattcgtcgttttaccattgataacaattgttctatcgagtttgatccctttggtctttctgtgaaagatcttcaaactcggaacgtgatcgccaggtgcaatagcacgggtgacctctacccgttcttcccgcccaccaccagcagcacacccgccattgctgtgacatctaccctgtgg

SEQ ID NO: 12013 - DNA, 398 bp, Zea Mays
gtcgatgaggcacgggatgctgcccgggatgaccccaacccggtgtcgaacacatcagcacaaacatccatcgcatcaccgtccgccggctctgataacagatcctctggaaccatatcttcaagagtctgatcaaagttcgccagagacaattcttgtagaccaatgagggcagacagagcaggagaaggaactccactactttccccactggctacgtatcgccgactgttcttccgagtcaaagggacctcatcttcttcctccccctcgttttcatcagcaacacagacagcacacccattgggatcagcgacagatggatcacacccattgggttcagcgtcggtaaattcaggcacaggcacttcctcagcagcaggaaccgaaggaccagc

SEQ ID NO: 12014 - DNA, 1044 bp, Zea Mays
tttgatttgaaagttttaattctgaagctgagtttaatttaatttgaaatgtgaattggaaatttaaaatagaaaagagaataaaaagaaaaaaaggagaaactcttccctgcacttgggccgaaattctacctggtcggccaactcgcgcgctatcactccctctcgccccgcgcgcgtggcaacatttccagccgtatgggccatccaagctctgtcaccgacaggcgtggcccgcttgcctgtctcaccaaagcaaccatgcctccgacacctgcagccacgtcaacaggaacacccctctctccggatggcggcgagcctggtgaccgaatcgtcgtggaagccgggggaaaatctcaacaaacttactcgtggatcctgggcttggagctatacctgtcacggagagccgtaatcccttcttaatcccagtcgagtgagccaattgcctctcgaaacaacctcaccgtgagacaccaaaaggacatcatcgctgtcgccaaggtgagaagtgttgttggggaagaagccgcgtcatcgggcatctcatcacgagacgcgaaggggtaatccatggtggcgcaatccagggctgagaggggttggtgccacgccgtgaccgctacgccactgtgaacctcatggagtcgacgtcgttgaggatctccacgttgtcacgtcgggtaatacctcacttctgacaatcactactcactctgcgtcgtgcaacatcgtcaaacctgggggattggcacgacgggtgacgggaattgctcgtcgtcgggggtttgtgatatggtgccaccaaggcgctgtgacttgctttaccgtcgccatagatcatcgacaaggcatccagggtgttcacttagtactgccaggtgtataagagtagtcgtgatgggggatttcgcctcggtcgatggatcggcgtaactccggctagcctccgccgcggttgggggcatcgatgtcgttctgtttagctgcggcgagaagaggcacgtcggtcgtagatctctagttgatcggcccggatta

SEQ ID NO: 12015 - DNA, 506 bp, Zea Mays
gaaaaatctgttggttcagtgaatcggtcgtcggcgacccgcgcatggattcacgccggtgaggtgattcatgctcaccggcgcccggataacgtttcacggtgaaaagatcattccccccggatgagcttaaggcactgttcgtccggccaccgtgtccgctctaccaccgatcgccttgaatcaaccctcgctggagttagacacctcacggtcttgtgccacgtgcctcagcactttaaccacgccgccgtgactcgtactgacctatccggagattgccggtgagccgccacggtagatgccaccaagctctcgcgacagtactcttctcactctccggccgccaccatgccaaaccaaattcactggccaccgcttagcgccactataaattgatggcacggtctgctgcgttaagttatcaccaagcctgagcacccgctcctgcctccgattagccaccacaactctccaatttcccatttcccccaattctattttcc

SEQ ID NO: 12016 - DNA, 687 bp, Zea Mays
aaaaaaatgttttcgtataccgaatgaaccggtgtaatgactgttttcaggggtgggggcctacaatattccctctgtccaaggttcggcaagtgctgtgctgtggggttgtacaacgtttctgactcgagactttggatcaaacctttagcgcgtctgctgagaaacaggtgcctacctatctaccatcgctgtcaagatcaagcatagtcccgaacttaactttgttccgaatgcgcgcgcgcacacacacacctgtgctgtgctacattgggtttcgtgggcaagtattgtgtgggtactgtgtgggggtgggtccgtactgttgcgttggctacttccccggccggagggagctcgtcagctccctccctcccttcacttgggagttgggacatggcagcagcatttgattcgcgcctctcgcgggcagaggggacgggaggggagccattaaagcggcggccctggcaaactgttgcctcggctcagcctggtcctctcgtctccacgttccggttctgattggcgcggaagatctggtgggagacggacggagagcgtactaaaaatccttccccaccccatggctcaggctcaggattcagaagaaaaaaaatcacatcactcttaacaactttccatatacagccagccatacagggtactactacttagtcttgggca

SEQ ID NO: 12017 - DNA, 537 bp, Zea Mays
ccctaaactacacgaatattgaccaaccaccgccccaaagaaattcacataaattgctcgggggctcggggcatacatctagtagatgcgcttgtgcgcgcccgagattttagcccacgacggaagcctctgtgcaactccaaaggagtgacatgaaggcctaggggctattgtcgggtactcaggaacagggtagccaaagcaagcccatagcctcttaggaaatcacccacatgctgatcagggccttgccgagcaaccctgcaaggcagagcggtcgaccgagtccccgccaagcaattctgcaaggcggggcgactgagcaaccctgcaaggcagagtggtcaaccaagtccccatcgagcaccaaccacatccccgtcgagcaaatctacgagatggagcgactgaccaagtccccgtcgagcaccgactcgatcctcgccaagtaactcagcgaggcggaagtcccagtcaagtactctcgacccgcatcagcaaggacaagacacgttacccctagaccccttggacgaa

SEQ ID NO: 12018 - DNA, 647 bp, Zea Mays
gcatttgagtccacatgtctttgaagcctttcttagcctcctcccaaaaatccgaaatggtcgatcgcgtttcctatacatgtcttcccactgcggtccgaatccttctttccatccttgtttggatgagatcccccttacatgaccaggatgctcggggttacccagaccagccgtaaagatgtccctctccctttgcggcttgaatgttccttcctgttgtttagctgctgcctcaaaaaagctctttgttacttcttcgagcaatgggtcatcaaaggacaaaccggtgtcggtttcttttggtttctgagcacgaatccaattagtggtcctttcgccaacttcctcagacagtgccggcaaccctatggctttcttcgcagcctcttcttgcctccatttcgggagctatcgttggtaaccacctgtgcctaggtggtggtggtggtacttgttcttctttgcgagttctgaattggcttcgcttttagctaggaactctgggttactcctctgctctaggaaaaccgtccaccgagctgccgaaattttgtaccttttggtcagatccaagcctttcttcgcccacttggtgttcatctccgacctctagtttcggaacatggtggcacactgcttcattg

SEQ ID NO: 12019 - DNA, 583 bp, Zea Mays
gttccggctcaggtgccgctgagccgtagtggatcggaggaagggccggcggttcagtcggtggcgtgccggcgaacttcttcaggaggcccacatggaacacatcgtgtaaccgcgagcgtgctggcagctcaaggcggtacgtgaccccgttgatgacctcagagacgcgataaggcccgtagaagcgaggtttgagctttcccttggttggcaaatttagggacgacgcgactcgttgtcgaaggcgaagccacacccaatcgcagatggcatactgaacatcacgatggcgtctgtcgtagtacgacttgtagatagcttgtgcctgctgcaagcgatagcggacgtcatcgagcagctcgtcccgctccgccatgctcttggccacggccgccaccctcgtgttgcccggctcgtaggatcgaatagaaggaggtcgcgtccgtacacgagcttgaacggggtctcctagatcgctgtctggtaggtggtgttgtagatgtactctgcccatggaagccaccggagccactgcctcggcctatctcctgtgagacaacgaaggtacataacaatgacc

SEQ ID NO: 12020 - DNA, 516 bp, Zea Mays
tctcgggttctctcgccactcgcagccgccgccgcggctctcgccctcgagttcactcgctctcgcctctcgggttcactcgctctcgcctctcgggttcactcgcagtcgccgtgctcacgggctcgccgccgtcatctctctccacccgtggtgacgacaccacgcccgcggacgagctcgatctgtcgatctactttcatctacttcgcaaggtaagcccctttcttggctgctcatctactttcatctgctttatcttctcatttgatttcatctgcttcgcaaggatcgctctcctacgacctcgatcggttctcagctgcgagcaaaccctagccgtgtggtctccctcttctcagattagatcgctctcctacgacctcgatcggttctcagctgcgagtgaaccctagctgtgtcgtctccctcttctcaggttagtacccatctagatcttctcttctcgtttgtcctcctagttccctcgattactgatctgtgatcttctcgttt

SEQ ID NO: 12021 - DNA, 341 bp, Zea Mays
ttgggcgccatttcaacctcgccggcgaacggagcagaagcgatattgcaggaaagcagagaaagcctggatgcaaaaagctaagcaaaaactagggaacggagcgtggaggcgcgcgacagtgcagtacatatggggttttcccgggccagatgccatttccaaaaagtgcccagtcatcacccagcggttatttctaaaacattggcgtgccatgtcatcactcagccgttatttctaaaaaagctggcgtgccatgtcatcactcgaccgttatttccaaaacggccgacgcggctcaaattgactcagctgttgtttctaaaaacgctgacattatc

SEQ ID NO: 12022 - DNA, 868 bp, Zea Mays
agcaatccgcaatgcatcagtggggaccaattcaatgtcatcagcagaaatcaaaactctgtcatcaggagcgccggcctctaaggcgacttgctgatccaaagctcgtgctgctgccatgcaaccagaatgcggaggagaagaccctacgtgaacatccatggaagtatgagagggagaaccaactcggacaccctcgagggctgggtcatagctcgcgctacccatccgagctggatcatctccggcaacaccctcaggggctgggtaaacgctagcgccatccttgaggaccgagccctctgtaacagccacctctaaggctgaaggaccttcaaccacttccatgggaacagagcaatccagaccagcctcctgactcttaagaccacgctccaaggtcgatgaggcacgagacgccgctcggaataactccaacccggcatcaggcatatcagcacaaatttccatcatcccaccatctgccggctccgacaacagatcttctggaaccatatcttcgagagtctgatcaaaatttgccagagacaattcttgcagaccaacgagggcagacaaagctggagaaggaacaccactactctccccgctggctatgtagcgctggctattcttccgaattaaagggatttcctcctcctcttcctcatcttcatcaataatgcggatagtacacccattgggatcaactttggccggattacacccattgggttcaacatcatcaaggtcacacccatttggttcagcatcagtcgggtcacacccattgggatcagcttcagcaaaaaccggcactggcacttcctcagcagcaggagcagaagggccggcatcctgattcaag

SEQ ID NO: 12023 - DNA, 895 bp, Zea Mays
gcggggtgatctgcgaagttgtgtccggggcgcaagttgtggtcggcgcgaccgcttgtctttgttgggattcggagctcgccgctgggtcgctgcccgctgtgaaggaggaaattaggggccgccactagtggggaaatcgccgccgaccgcctggcgccgtgttcgtgcccctctatgtcttcccctccggtaattccctttccctaaccgaggcaccgcccttggttagtagatgttcataccacgcttgaattggactcgcgcggcctcagttaatgctcgccggtgggatgaatccgccatggaatcgtctttccgcggccggggccctccactacgaatcgcgacctacaaagccatccgtgtagctcccaatcacccctatttcattttgcgctactccaggctggggattcgtcaccggatgttggggtgtgggattccggcgagctgcgcggccgagggtgggcagctccgccgtgtagaggcattggatgtgggacgataaccgctggtcgttgatctccaaacgtgcggcttagattagtctctggcatacactcttgcgggagcaatccggtccataggatggtaaacagatggacccgattaggtcagtgcgttcccccttgatccgttcgatctgagcccttggatcaagatctcacgcgtaagaatagatcgcgccttcattaaattgtggacgtcgatctttgatccaacgggtacgattgtgtactggttcagagtgggaaagatttaatatgggccgtccaaacctaatccgaaggccagaaacgaatgataccctttcgctatgaccactttgcaaaatagaccccctggtatatggaaatcaacccgctatcctgcatattgcgctctgtgtcta

SEQ ID NO: 12024 - DNA, 508 bp, Zea Mays
gggcaatggcgcaagtattcctaagacacagagttacagccgcatggatggcgggtttatttcagtaaatcccaggggctcttttataaaatgggatcggcgaagaggtatcatgcgtccagggccgatggattgtcttcgcacggtgcagattagatctatctttaaatgaatcggtacggaatgcaagccctcggatctaagatcgacgcaccagatttaatatggctgcgattaaatccctgctctccatctgggatccaatggtccccgctgcactcgctcagccccgctcgcccatcaacgatccgtccatccattttcgaatcaacggtcaaactctacctgccccctgatctaatcctaaccggtcatcaccaaaatccacggctgccagactttcttcactaacccagcgcaagccgacggcgcaagcacagcggtgcccagacccgcggcgaaggcttcgcgcgcacacacagacggtgacctatcttctacctttccg

SEQ ID NO: 12025 - DNA, 302 bp, Zea Mays
cagtgctctgaccgggagaaggttctctatgcttctggtcgtcttactggtcctgctgctgattggtgggattcctacatcgctgcccacgacgctgctgatactatcacatgggcggaatttgctactcagtttaggaactatcacatacctgctggactgatgaagataaagaagaaagagtttctgtcgctgaagcaggggagcatgtcactcagcgagtaccgcgacagattcattcagctatccagatatgcaccagatgaagtggctgaagatgagaggaagtaggaacacttcat

SEQ ID NO: 12026 - DNA, 731 bp, Zea Mays
gcccagtgcaattgtatgaacatggatgcaagagtcaccaccctatgtgatgagttgtgcaagctgaacctagaagtcatttcctccggtgctttcaattatatttcagtggagcccacattacaagagcaaatagtcatggcacagattggagacaagggtgttcaagtcattaaggaaatggtcaaacaaaaggtggataaatacaaatgtttccgtcgggacaacaaaggaatcctatggtttggagaccgattggttgttcccaagaaccctgagctcaaaaagaagatattggatgaagctcacctttcaaaattctccatgcaccccggcagtaataagatgtatcatgacctcagatccttatactggtggaccagaatgaagagggaaattgctaagtatatctccgaatgtgacacctgccagagagtcaaggccagtcatttgaaggtagtaggcactttgcaaccccttcccataccatcttggaaatgggaggacatttgcatggattttatcgtgggattgcccaatacctcccgacaccatgattccatttgggtcattgtggacagattgaccaagacagctcatttcttgccggtacacaccacccacaggacggaaaagtatgctgaaatttacattgaccagataattcgcttgcatggaataccaaggactatagtatctgacagaggagcaccgttcgtggcacgattttg

SEQ ID NO: 12027 - DNA, 329 bp, Zea Mays
agtattgaatgagtttattcctggtcaataagttcaatgatgttcaactagttttgtacaaatgctcatcctttgatcattgaagctatttatattgatcaaaagtagcattcttgtgcatgtacttttactgattctgtgaattagagagggtaagattagaagggattgtttctgttttgtcttgttgtgcatacatttgttgagtttttttgtggcgtagggtgactgtgtgagattcaggctgctcctgtccccttcccctcaatataaaataatctttgtatcttataacttttttgtgtatgcatctgtctgacgtacaattt

SEQ ID NO: 12028 - DNA, 323 bp, Zea Mays
gaacagtctgcccacgtgcacggtggaaaccgtgaccacgagctcgcgttcccgttcaaccctggctgaattgaccaaacagtggccacgatgagcatccattgcataccaagttgtgaaaacggcaccttgagaggcgtagaaccttaccagagtgggctggccatggacgagctatccacggtggcttagagacccgagttgggggaaaatggtgtcgcgacggctctgggtgaaattgggggtggagattggggctacatggccgttaggaattgtagtttcaccatgcacactcaatttgagtggagggggcggaggct

SEQ ID NO: 12029 - DNA, 709 bp, Zea Mays
gaatagcacaacaagtgcgttaatcgaagtcttttattaaaaagacactccatgcaaaaggcgcctaagggtgcagccagaataagcacaataagtgcgtcaatcgaagtcttttattaaaaagacactccgtgcaaaagacgcctaagggtgcaaccggaataagcataataagtgcgtcaatcgaagtcttttattaaaaagacacttcgtgcaaaagacgcctaagggtgccaccggacaagcgcaataagtacgtcaatcgacactccatgcaaaagtcgcctaagggtgcaaccggatcagcacaggtgtgcgaaaacggccaacaggccacattacaatacaagttgcagttacatacacacagcaagggcaccatatactatatcggctcaaccttcgggatgatacccaactccctataattgaacaacattattctgaattcctcaccctcaaaaagatttcgcagatccccctcacctatgcttgtcccaatcggcgaggacaatagttctcgtttaccaaaccggtccactcgaacacggtcccactccatctccatacgacggcgcctaccacttcgcaaaaccttgcccacactatgcttcgacaccacccttcaccgccggcacttggtcctcgcactaggaagatcagccgcctcgccaacctccacacgcggcgaggactccgccgcggccac

SEQ ID NO: 12030 - DNA, 1092 bp, Zea Mays
cctcggctattttctcagtgtcactgacaagttgcgattacacccctgtacttctatctcttctccgaaggggtccaaatcgacggcgcgcacgcagatcgtcccggacgtggtccgtaccggccatggccggcgatgactgctcgaaataactaacggagaggcttcaccggcctacgacggcctcggaacacacactaatttgatccgaacagcccgagaacgaccggtccaagtgcacggcggaaaccgagcacgggagtacatgttcccgccagaccatggttgatcaaagcaaacaggcgtcaccatgaacttcgcaagcatacagaggcatggaaacgacacttgaattgaataggaactcaccagagtgacccagccacgggtgggctgttctttgcgatgcgacggaccagtttgggggaaatcggcgtcgcggcagctcgggttgaaattggggttggggattgaggctacagggccgtaagaagttgtgttttcattgcacacaatcaatttgggcgaagatggagagggcagcgcgaatttgacttcgactgagcttcactggtggagatgaaagcacctcaccgtggctccctgctcaatttataggcacgacggcccaacagatgagccctggccaaggatagtagcgcaagcgcatgcctaccacgttggaaagaggtacagtgagggagatggaggcatgggcgacaccgcgacaaaattcaatggtcgcggtggctgccggtgaagtctccggctggactcagggaacggtgccacgtatgcgctgtttaactccgactctatccatttcctatcgcgcacgaacccggacggcggcggcacggattttggcgcaaagaggtcgccggcggtgagcaagctgcgctggcgttctgatcctatcaggctactgtaccatgggatcgccatttagtccatctgacagcccaagttggagcttgatttccttcggttttatgtggcaccagaaccagccttctgcatcaaagttgtagtgccacctaccagctacaagtttgttatggaaatcattcacaaatttgcactggatctcag

SEQ ID NO: 12031 - DNA, 342 bp, Zea Mays
cgatggagacgtgcatcgcgcttgcgaaggttcctccccttgtatggtgggctcttcgtcagagatgggatcattgtctacccccttgatgaataggacgtcggggtagtagaggggaggctctgcctccactagcttgatgattggacccgcgggccgagtgaccatggagttaatcaatcgtgttctaggggtcttgatggtggtagggcccttgactcctttcctcttccaactgatttgagtctagacccaagttagggaggtcaatacagagttcaccctgttggagttgccgtaacatatggccgagatggaggtgctggtgcagttctacgtccg

SEQ ID NO: 12032 - DNA, 372 bp, Zea Mays
gcccggtgggttagaaccgtcattttcttgcctttcggcacagcagtggtggccgaagcggcagttattctctgttttccttgccttcgcaatgggtagcaataatcagggtatatgaagccaattgcatcaaacaccctgttcaatcttttcttgccctgacccccgaaggccgaggataaagcatcatcttcggctctgctatatgtcccaagtagctcatcactaatagccttaatacttttcagccaatcgccatttggcttgacaaactggtccctgaacctgaagttatactttaatcgaactaatccaccttcggcggacccgacagcagtatccttcggcatctcccagttatctacaagtggc

SEQ ID NO: 12033 - DNA, 559 bp, Zea Mays
ttaaatttcctaactcaatctctggttatttcctaatggaaaacgaaaagagtgttactgcacaagtattaagctcctttctccgtgtaacatggtaatatcttagcatttcggcagcattacagcattattggttttgttattaacgaaaaacatttagaattactccacattttgcaagtagaaatttcaaacgacaaaacaacatggtagctttactggcacagcctctaggcagctatagattatctgacataccaataaaattgtgttttgtgaaccaaaaaatatcattatcccatagctgggtgcacatgatggcatgttctatagagaaacaaacctgtcacgtctttagatgatgcatggaattgactgaaggactcctttacttcatacgtcgcagctgtggtttgggatccagttggtgatggtttgtttgattgttctgctttacctattgtgttatcactatgcaatggtgtgttctcttcaactgaagttatattgtcagtcctctgcgaatcacttactagaggttcctccaatgaatctgcaa

SEQ ID NO: 12034 - DNA, 382 bp, Zea Mays
ctgggtaaacgcaagcgccatccttggggaccgagtcctctatagcagccacctctaaggctgaaggattttcaaccacttccatgggaacggagcaatctagatcagcctcctgactcttaaaaccgcgctccaaggtcgatgaggcacgagacgctgcttgggataactctaccccgacagcaggcacgtcaccacaaattccatcattccaccatctgccgactccgacaataggtcttcagggaccatatcttcgagagtctgatcaaaatttgccagagacaattcttgcagaccaacgagagcagacaaagctggagaaggaacaccactactctccccactggctatatagcgccgactgttcttccaaattaag

SEQ ID NO: 12035 - DNA, 421 bp, Zea Mays
gggtattatataaactacttacaaatcatatatatgcacacacaaattaaactactgtaaaccacttgtacacgactacaagcacatataaaatgtacacaattaagcctgctctattaataaggagaggagaaagttaggaagtttctgctcttggaactgtgtgaggttgccttccgccacagttcgaaggctactatttggagattgagcagctagcagaacctgagtggtatccatggttgtatcgtacatagaatatataggttttgtcagtcagaaaggaatcaaagaaaatcaacaagcaacataataatcaacaatgcagattactaaaagtcagtcagacactgagacaattgaagatatattaaagtttttgcattcaaaacaacttgttcacaacacagatattagccaa

SEQ ID NO: 12036 - DNA, 454 bp, Zea Mays
caaggagcggaggagtgggcgagcgacgcaggacgcataggccgacgagatgcagaggtcgcgggggcgggttggtcgcgagcgaggagggacacccacggcgcacgaaggcggctacacacgaggttgcaggttggacgaccgggaaggggaggttgtgatggacgatggtggccacgagcgggggttgcgatggctcgggagggcaaggatcgatcaaggtatacactgacgacgtaggcaggacagggagtcagcctaccccttgcacacaattgacgacgtgggggcgccatccacgacataggatctccaactgccaaatcggtggggaacggggggcatttccaaatgaggcctcggcgacccgtggatggtggcgacctatgtcgagcgcatatggtgcacgcaaatggcagtatgggggcaccaatttccaaatcggtggggaacg

SEQ ID NO: 12037 - DNA, 672 bp, Zea Mays
cagaaagctcaggggtctcggtgcaagtgtttccaagactcagaaaacccacccagtggactgcgggttgttttgacataaaccgaggggcccaaatgcaaattagacccgcgaaggggtatcgggccgttctggccgtccgattaggcgtggacgcgcgagattagatcggccctggataaaacctagctttcactcaccaccgtaggatccatgatcgacgaccgagagtcgcctgtgacatcgattccctcctgaccgctcaatccctgatctatggcccagatttaaaaacgataaaggataatctaagatctaatcgcggccattgttacggggatcaacggcccgagactaccccatcacttcccagctgagccgcgcggcggcgctacacacccgcggtggccgaccaccggcgaggagtgcccgggtattctaacggctgattcccaaatagaacaggtgatacgcgcgattggaagtgtaacgagcttgatgaggtccgttaccgggggtagatgtggcggtgaacggctatccccgcacaagtggctccgcggcggaggtatggattccgacgaggaattcccccgcactttgccccgattcgccccagggatgtcgctgaccaccctcgccgcaaccgaacgaacccaatggagtcgcccg

SEQ ID NO: 12038 - DNA, 1005 bp, Zea Mays
gtatttttagcatttttcttcaattttctagaaattcttaaaccctgacagaaaaagaaaaggaaaagaaatgaacagtgttggatctgaactggcccaagccggcccaacctgaacagaaaatggggacgcgcccccgtgcgcgcccacgttggcagttttgcgcagagagccctgacgttttgaaattccttaaagagtccctcccactattcctctgtctcgctaacacttgcagaaacacccctgcgcttttctctcttcacaacctccagtccatgacggcgaacggtggggaaccgagctctggtgagcttataccagccgatttactcggtgactggcgttctactttggcagagaccaaattcaagccctaatgagagtttccccccaactaatttcactaatgacgcactaacacgccctatccacagtgacagcggacactacgggcaatcaagcgcgttcccggcgatctaaggggtcctagtccaattggcagggtcggggagtatcaggagaacctaaggatgctgaaacaagaaagcagagggcaagatcggacctgaatcgagctggccacgacaagacctctttcacggtggtggaaacacagtttgggggaaatgagcaattctttgtctctggtgaacgattggaggcaattgctggtgctttggatgcgtaattatcctacgaagctcacggcgtgctcaatttatagagtccgtgagcggtggcgtccaatttcacgaagatgcgctagcggccggaggggaagaaggttactagcgcgcaagcttagtggctttcactgtggcaagctcctcggtgaccatcgaacatgcaagacgcgattcacagcgacgtggttcgaagcttgagcacgtggtgcacagcggtaagcgaccaacggcggcgaggtctatcccggttgatcggcgagcaagtgggtacggtgaaactcatccgtgattcatactccgccatgattatcccccc

SEQ ID NO: 12039 - DNA, 426 bp, Zea Mays
atcgaagttgagccactgatccgcccgggtgaaggtgatcgggtgttcggatcatcgatacggggcaagaggaccggtggctgccaccagtatctgatggtcgttgagcttctgttgcctcttactttcttgcgacccatgtccactgagatgacgttgacttctccgtcgacgcgcgggaatgctccgcctcctcccccttcctgttgttgaggctgtcgaggttctccgggtcctcctcgtggtgggggaggtggtagaggttggaagggtcgaccgttcccgacggagtgcttgaagtctctgcagttccggagggtgtggtgcatgtctttgtggtacgagcactgggcatcgaggatgttgtccattgtacgttcgcctccacgaggtgctcctcgggcgcgagaggcgggtggtccagcg

SEQ ID NO: 12040 - DNA, 286 bp, Zea Mays
ggttggtaggctgcccgtcgccgtaccccgtgcgacagagcgtgcgtgctgggttgaaaatcaggcgcttgcctgctcggttctctctctatccgcgtgattggatacctggccgcgtgcgtctgggctctccacattccgttgaccgcatttaaccagtgattggtgggctgtatgtatggagacgagcttgtacgcaccgatgcaacttagtggctttttattatgtcaatttgcatgtgtggagatacggtgggggagcatccctgcgcatccaggccaccgc

SEQ ID NO: 12041 - DNA, 936 bp, Zea Mays
gtggtctagttcaattgagcgggttggtgagcatcaccagtatacaaggatgctaaaacgagaacagagagggcatgatcagacctgtggagggctggccacggccagggtgctttcacggcggcggagaactgttttggggaaaacaagagattctcaagctctagggaacgattcaaggcacgaatggctccactggttgcgcaattacctaacagagcgagtggtggcggcaatttataggaggcttaggcggtggtgctcaatttagccgagcaaagctggcggccggaggggaaaagggctctggcgcatgacacaggtggcctttcaccgtggcaggtgctccggtgatcaccagacatgcaccgcatgattcaccatgacgagagctagcgcataagcacgtggcgcgcaacgacgacaactcgacggtggtgagagttatccgagcgaccggtgagctggggaggaagtacggcaggcttagtcgccacgaggctcaatccaatccgggcgccagatatttacctgcccgagcttatctattgaccatggtgcacgaatcgcggtgagcaatcaaccaccggcgacagatcaccagcgagagggggggggaatcgtgatcttcttcagtttgggacttactgtaccatggcgagtgctccttcattaagcctgacagccatagtttagggccagatttcttccaaatttctgtggcaacacatccagatctctgcagcaatattatagtgctataaaccagctacaactcgactatagggattaaacttatttgagcactggatcaaggttgaatccaagtccaaagttagctctgttacactgcaattctgaatttcagagttccatcagcctgacagtccaactttgggcttaattatctccaatatcttcttaacaactatgctt

SEQ ID NO: 12042 - DNA, 403 bp, Zea Mays
cttgatggtggttctctggcccctgttgggattcagcacccttaccgttcgtcgccccgtggtcgcttcgactatggtaccctagactgtaggacccgcatagatttagattcatagatcgatgcagtcagagtctataataatgcttacttcagtgtcttagtctagtcagtcttagttagagttagtttggttatcttttgttggatgcttgtcatgatgaacatgtaatgaagttggatctttgtaatgattgtcaccaaggtgtgggtatcccctgcaacttggtgtagttattaataaagtcaatcatttagttaggtaatccatttatttccactttcctatttatcagagaagctgtcagtgaagatgatcaattgttcagtgctttgaagatttc

SEQ ID NO: 12043 - DNA, 1073 bp, Zea Mays
ttttactgttatctggactggccacaattttctggaaagtgcaggggctcaaacgtaaaagtaatcaagacacagacgcaaccccgcggtggatggcgggttgataaatgtaaaagacagggtctcttttgcaaggttacaccaccaaaagggtatatcgcgatatcgtccgcccgatctagaatcaagggctctgattagaccgagccctatacgaaccagtacgtgcgcggtgtcgttggatttacatccgatggtttagatctaatgtacccgagttctaatctcgcgcatccgatccgaaatggacggctctcgctaccctaacccaaacgatacgccatttctaatctggaccgtatgccctagatccaacggtacatgatcgacgtcgtctacccggctcatggccacggcggcgccattccttgcggcaataatcccgccggcgatcgccgtcccggctattccgagcacatcacacctatttctctagcgcaaaaccaagggaatgaccgcacgaatacggaggttgggtgctcaccggcgattagggcacggaggtcccaggcgacggcgaggtgtggctctgcggtgaagatcgactccggcgacaaattcccgcggtagatcagcagttcagctccccgtatcgcccccgtgtagacccccgatggctctaggaacaccacgaccttgcccgacagcttctacggcgatggttgggaaactccacggcggcggcaattttctcccgtgcggtgcgcgacggcgtactagtggcgaggagttggggataagagaggagaggagaaaataacgcgtgcgctacctacttgtatcccgttcgggaggccgggaagtgggcgcgagctggtcaagcctccggcgaagttgcggcgacagttgcgcgtggatttggtggaagggaggagtccgacggcttgggcccacgactcagagacaggtagccagcgcgtgcggtggagagtggtaggggctcaggtatcagtgttgagcaggcaggccgcgtgggagggctaggtcaattgggccggtagcgcggatttggg

SEQ ID NO: 12044 - DNA, 534 bp, Zea Mays
gcaaaagtcgcctaagggtgcagccggaccagcacaacaagtgcgtaaattcgaagtcttctcaaaaagactatccgtgcaaaagtcgcctaagggtgcagctggaccagcacaacaagtgtgtaaattcgaaatcttcctcaaaagtctacccatgctaaaccctacaccaaactgcccgcgccaggaccgaccacaggcgcgccggaccggcataataaacatactagaccaagcgcacaacgcctttacaagcacagcgcaggcgcataacctcatcatacaaattacaattacatatgtacagcgagggcatcacaccttacatcggttcaaccttcggaatgatccccatctccctatagttaaatagcattatcctaagctcctcaacctcaaaaagacttcgcaactcaccctcacctacactcgcaatggccggcgaggacagcaactcctgcttgccagctccgtccacacgaagccgactgccgtccacctcactcaccctacgattcgcaaccgctcttcgcc

SEQ ID NO: 12045 - DNA, 443 bp, Zea Mays
cagattcgccagctgtttggatttcccgaatcatcgactcgtcttcacagcttgtgctacggtacctctaatcctcctcaacgccctcacgacggagttgctccaggtacagctcacatcgcggctttgttccgaccacccttctcagatgggttgcgatgttctccggcagacttcaccacagcggccaagtttctatatcatctcatgaggcggatgcttctgccacggatgggttatagggaggctgccactcatattcagctttggctcctaggtgccctagtctctcactccgagtttgacgttgtggatttcctcatttgtgagatcgaggacaccgtgttggatggactttgtgcccgacgtcagctaccgtatgctcactatctctgccacatctccgcacagctgatctggccaccgcagtttcagggactctt

SEQ ID NO: 12046 - DNA, 602 bp, Zea Mays
gtctcatgtcctgcctagattctctccctctctcgtgagatttctaggtcattatccattcttttgtcatcctatcggctgctatcttctcgtgcttagtttttctctctcatgtgcagtcttcaggtcaggatggtgcgcacgaagaatgtgtcggcaccaggggggagacgacgaggaccctcctttcccctttaggtaggtcaagggcaagaccatctatttggagcagtaggaaggccgcaagaagcagcgtttggatagagcagcccgagtagctctatcagcagcagcaccgctgaacaggcagagagaggtggctagctacagatatcatcagatcagattgcttatagagttcgtcgcctcgcctctcggcctcgctcctccgcaccttctactcccgccactactatcactccacctcccacttcgcctgctccagtcactcctgtgccatccaccacctcagccataactaccacctccaccactcctgcttccactactcctcccgctcccttttccgctccactcatcccacctgcccgcttcagggagcgagatgagaccgaggtgcgaccactggctgccgatccccg

SEQ ID NO: 12047 - DNA, 384 bp, Zea Mays
ctaactttggagctctgtaggtcgagaaattcaaagaatttgccctgggacaatgtaacaaagttgtagagccattgtagaagaacaactttgctacaggtattaagtcttggagccatgaggaatttggagataatttgatccgaagatgggctgtcaggcgaattttaactgaatctggcgcactgttcatcggacttcataaaagatctcaccggtgataagaaagccaccgcggttggggatgggtctgcagccacgctaaagatcatccgcgacgtggcgttaaaacgctgcggtggcaccgcccggttaatcagcggtcaccggaccatcgccgtggctctgcccgtgcgggtaagctcgccagcgcggttacagctc

SEQ ID NO: 12048 - DNA, 300 bp, Zea Mays
gagaaattcattgagggattctttttccacattggaacatgatagttgttcaccttttgataagtcaactggtagtgcaagtggagctacaagttgttctacagggaagcaaagtaggctctcaaggtactacaagaatacacaagatacctctagaggtccttttgacattgacttggcacgcagtaggacacaagtgcagccacgcatagatgttatgctagagaggggtcacaaagagaagcttgggatagcattggcaaaatggttccatgcttggtgatggagtaccaattccac

SEQ ID NO: 12049 - DNA, 520 bp, Zea Mays
ttctggcatagctagtatcggagcaaattccagcacagagaaggacaataaaccatgaataccaattttcaaaatctaaaacttgcctagaaactgctacggatcgtcaggactagaccgctagacctaggacgaaaggccttaggcatagagggagaaataggtggctaactaattaggccccgtgggccagtacttatatttctaaggatgccctaaaaagcaccctatttttggagaggcaacgttacttccagcatgcatgcattataaacacaaagaggaattaaaaatttgagctaacccactttctttagaaccatccgggctctctttttctttttccttccaccataatctttacctttggttcccttccacagatgaattcacccacccccgccaatggaggagacactcgtttcagttccgactttctttctcgcgatggctttccttccatcttgtgggaagtgcttaactccgccggttaccctacgccccctttgtacatggtgca

SEQ ID NO: 12050 - DNA, 305 bp, Zea Mays
ctccaaccctcacaatagacatatcacgaaagtaccttcccctcatggcgtcaacctgactttgtttaatggtcgactttccaaagatagtatggcttggccgccagggtcgatcttcggaatcttcatctccactttccacatcaaaatcatcactatcatcagaatcttcagataaatccgccattatctccttggtaatcttctctgtatttgtttttgccatagattcataaaacccatcaataaaagggtccacaaccttcttctccttggccaccttcgtcacctcagacaccttcttc

SEQ ID NO: 12051 - DNA, 300 bp, Zea Mays
aaacataccaagtgcgatgtcagcaccatcaggagtagcatgtagcatcggcggtgacttgattaaccctggcaatagaatatcccttgccaggagtctgttgcttgttctgagctggtgtaccagaattccccaccagacaagcattagcatagtgcccaatctgactacacttaaagcatgtagggccagtcttctgtcctgtaggtctcgctcgggtgctagtaggggcagcctgacgagtgggaggtgtcagtggagacccctgtggagtgtactgagctgagagtggtcctcctc

SEQ ID NO: 12052 - DNA, 516 bp, Zea Mays
cgccacggtgaaagccactaatccttgcgccagtgcaactcttctctccgaccgccaccgcgccaactccaaattcactggccaccgcccccggagcctataaattgagtgtgttgtcgggggccgtaaggtagtcaagcacccaatccaccaagccgtgcctccaattgctcacgagagctccctaatttcggaattcccccaaattggtccgaaacactgcgccttgtgacctcgtcgtggccaacatgtttcaggtccgttcatgtcctctggttccttgtttcagtatccttgggtgctcttgatactctctgatccatccaattgagctagaattcattggatcatcgggaacatctcggtcgatccattcctcgcgctgtcaccgtgggcagggtgatgtagagctcgaatccagcaattaagtggggggaaatagtcgtgtagggttgaattcggtgtccaacaaaggagagggctagccgttgcgtagtttggccagtttaagttcgc

SEQ ID NO: 12053 - DNA, 368 bp, Zea Mays
ttcaaacatgcgggagaagctcaccgtagattgaatttgtggggaaggcttggccacagggaggggtggacggcggtaatactagcacgccgccgtgtaaattgagggtggctagagggtcttcgacgacacgaacgggtgagggaggtggtcgtagagctcgcttacttatacccctataatccatccaggtagcgcacgttggcaaggattcgcgcgaatttccaatccacagttgccgcgggcacgacccgtgcgtgggccaaccagggggtgatcggtcgtgtacacgggggaatgaacgatgggcgcggaatcatcgcccggcatgcagaggatcctagaaatgcgcgactctgttcaagctc

SEQ ID NO: 12054 - DNA, 279 bp, Zea Mays
aaaaatttggtacgaagcgccgataatatccagcgagccccaagaaacttcggatttcagagacactagagggtctcttccactccaccacagccgcaacattcttgggatcaaccgcaatgccctgttgattaatcacgtgccctaggaaagccacttcggatagccaaaaggcacacttcttcaacttgccatagaactgattcttccttagagcacccagaatgagatggagatgatgctcatgctcggcctcggtctttgaataaatcataatat

SEQ ID NO: 12055 - DNA, 831 bp, Zea Mays
ctgaagttggactgctgaaggagaggggtctgactgctgaggctgtggttgctgattttgtctttaagaacattcaaccgttgaaggatagggcatacccggcttatctgtaccgaggtctagctgactcgactcacgttaccaacagaagaattcccactgcagatttggtgaaccgacttgaaatgattcttaaaggcaaggtatcaaatgttggtgccccagtggcatactcggcctggaacctgcctcctaccaaagccttcactcattttgtgtcgaatccacctgtcgctgatggcggtttgggccttagagtgcgaccctctaccgaagaagttagcgctttgggtacctcgctcggggaaattcctgatgatgagcggtaggtccactttgaggtgccttcggatcctagtgacgcagagataagtgctatgcttgatttgctggctgaggactcttctgatgctgctcctgctgggacattggtggtggcgcctctcccagaaactgatacaaccttagatattcagagacctgtcagtgttcgcccaagacgcccttgccgagccaatcaacttgatccttctgctgatgagcagaaaaagaaaaagagacgtcttcggcgagtatctagtttggatcgggacgttggtccttcggttcctgctgctgaagaagtgtctgtgcctgaatttactgacgctgaccccaatgggggtgttccatatgctgctgaccccaatgggggtgctccatctgctgctgaccctaatgggtgtgctccatctgctgctgaccccaatgggtgtgttgtttgtgttgctg

SEQ ID NO: 12056 - DNA, 458 bp, Zea Mays
cgattctcaggcaggaattagccctcgtggcgaggtcaatcgcgaagtgtgcagttgataaccagaggagaagtggtgctgcgattgcggggttctagtcgtgttgattggaagccggatcgtctctatgacatctccaccaaatcaaaagttacccctcctgacggaagatccataacccacgtccccatcaagtggtaatcagaggctcaggtattaccgtcaggattaccctagtttagtttatgtttttcttcctataactccaaaaaattgccatacaaaaaaatttcgttgtcctagaaccctcgtttagcctttgcaatttcgttttcagtttggctttgttcagttcgtgtccgtggtcgagtcgtgttgctggtttaggttgtatcttcgtcgtagttcaactgcaccttcgccgctatcccatccaccattacccagatcacaagtcg

SEQ ID NO: 12057 - DNA, 1075 bp, Zea Mays
gcggaacccatctgcaactgggtgcctgatagctgaaataattctttccataaggtactagtgaaagttctatcgcgatccgacacaatcgattctggcataccatgaagtcgatacacagctaccatgaatacctgagcgaccttaagtgcagtaaacggatgacgcaacggcacaaaatgagcatacttggtcaagcgatcaactaccaccaagatagtattgtaagacccagactgtggcagcccctcaataaaatccagcgaaattgcttgccatgcttgggaaggaaccaacaatggctgaagtaatccaggatatcgagacctgtcaggtttagcctgatgacacacttgacaagctgcgacagattcccgcacagaagtcttcatgcgtggccaataaaagagttgcttcactcgagcataagtaacaggaaatcctgagtgaccaccaatagcactgctatagtgctatgtaatgtaccaatcacagtagtctggaggctagtattctatcccaaccaaactctatttttgtaccgaataataccatcctggagagtataaggaggttgagctgacactgccaaaacagtgaggagctttaaggcctcaggatcctattggtaaccggcaatcacctcctgtaaccatgtcggagtggacgcagaaatagcaacacattcaccatcctcatgtggccggcgagacaacgcatcagcagctgaattatatacccctttcttgtaaacaattcgataatgaagacccaacaacttggtgaatactttttgttgccattgagtatggagtctctactcgttgagatgagacaaactgcgatgattagtgtaaataacaaattcagcatgctgtaaatatgaacgccactggtcgactgccaacagaattgccaaatattctttctcataggcagataatcccatatttgtcattccgagggccttgctcacaaataccaacggatgaccctcctgctgcagaacagcccccactccagtaccagaggcatcagtttctatggcaaatggtttatgaaagtcaggcaacgc

SEQ ID NO: 12058 - DNA, 304 bp, Zea Mays
tctctacacggtgcaccgaagaagatcattttggatagaggatcattgttcacctctagattttggaaaagttttcatgagaatatggacacgaagttgaattttagtttggcctaccatcgtcagactgatggacaaactgaaaggactaattaagtattagaggtcatgttgagagcttgtgcccttcatcatggcagtagttgggacaagagtctaccttatgctgagttctcacataatgatagttattaggccaatctgaagatgtcaccgtttgaggctttatatggcaggaaatgca

SEQ ID NO: 12059 - DNA, 394 bp, Zea Mays
ccgccgtgctcgcgcggtggccggccgatttagcccggtctagttccccggcgttagtccctaaggtgcctctgcctctgctgaagctagcccaggccttagcgcgccttaagtcccctccccatggctggaatggctcaccggagttacttcggcccgcccgaggccttctcaccgtcgttctcccctctctgcccgtggattcatggtcccttccccgccattgagttcgtcgtggcgccctcttcctctctgcacaatcccggcgaccccggacccccctagctcgcgtcttcctcaactccggcgacctcaccgccgcggagaggagcagcgccgcccgcagccgttcacccctccccggtctgatcccctccgtccgatcctgatcgca

SEQ ID NO: 12060 - DNA, 319 bp, Zea Mays
aagctaggagtggagttgttaccaatgggacaatccttgcattgatgtccctttttccggcatgtgtagcataggcgtttttgaagtcttgaagatttcttctttccttgtttgttgcctgctacatggttagtaaaaactttcttttctaaccctatgcctctttgtttcaaatggggacaagattttattaagtgtcccttctttgagtatttaaaacaaagtctatcatccttgttaataatcaagccatttttaatgtagggacatgacctaatcaagtgtccctcttcaaagcattcactacacttcttatttt

SEQ ID NO: 12061 - DNA, 885 bp, Zea Mays
accttgtaaacctctccgcacccaccataaccgattattcgctcgtgcgagaagtcatttgtgatgtgttttagaactgataaagatagcttcctcggctcttttctcccgtcaagtatttcctccaggacacctacttcttccttgtgcgtgctacccattgtagctaggatggacagtttgctcggtgtgattatagatagagtaagctatccgatcctgtaggcgaccgagtagcaagatgaccaggtaaccttaattagatgagcatcgcagatgggtccttcctgaagccaaacattacaatggttcaccgattaaaccttcttgcaggttacagaatgcaactgatcaatatttcacctaaaaatccttaaccgttagaggctaataaaaaagaaaagggaaacgaaatcgaaatacacaggatgtggacactcaaaactgtgatattagtgtagaccatgcctgtttcagtgattctgaaaatataaagcataaatttctgaaaatataaagccagcagacgtttacgtccctacctcaaaacccagagaagaaccttggcctgctcgaggaatggattgatcgccatggatgaattgactgacatccggctatatggggtcacaaccctttgaagacatgcagaacaaacagggccgaggaaggcatggaataaattccagagttaatttggccggccgaaaggagtggtcagaaacaggcgtcatcaataataatagtaataaactacaaaaggaatgaacgataatcgattgggctatcaccatgctaataaactagaaaaagaaccatcagcatcggtatcagcagtggagatccacccaaacatgggtggccgtttttgagagtttgttttta

SEQ ID NO: 12062 - DNA, 760 bp, Zea Mays
gggcgggtccagagccgccatgtgtctagagaaggtgatatactccaaggcatcaacagtggtccggacccccacgggttggtcccggaaccccagatatacagtccggacccccaaggttggtcccggacctccacgtgtgcaagccggacccctggaatgggacctggacccccccccggtatggggtccgggccgcccacaaagggcccccaaggtcctaggacagagcatacctggaccttgaacaagacccaggcggggtccggtgccggcacgtgtctagacccagtctggtgtggacctctccacatacgcttctgctccccgcttaggcggagacccgatgctgccacgtagcctacttcatgtgacgtaagccagcaggtggagcctgacgtaaggcctccaggttacgcggcctctgcatttattgcggataaggcgcgccgccagacaagcgatgtgctgcctcggcatttaatgaggcctgcccaccctgctgtcaggcggcgaccagtccattccactggcaagcagtgtgccgcctcagcatttaatgagacctgtccattccactggcaggcggcatgcctgtctattccgctggcaggcggcacgcccatgttgtcacatgcactatactcatcattactcgtacgtaccaaggaagctaccgttgtgtatcagcactgcgcgggctgcggacatctgggcaccagaagatctctcaggcgtcacctgcattagttgctccatg

SEQ ID NO: 12063 - DNA, 718 bp, Zea Mays
ggaatatactccgtagaagaccaaaataagaaaggtgcgcaagaactgttccctttttctagggaaatattgcaatcataaaacagaaacacagctttgctaacgcgtgagcagcaaaaggcaactgcaggtccacaatacctgcccttagatttagggtttgcaatatcctaagaaaatgggaaaaagtatgtgggtttgcggctgtagacgtagagcgcattgcaacgtgagtttggagagcgatgaggaaaataaatgtgtaatttgcagtaagccacgaatggcggaaagcgaacaaaaacatgaaaaacatttctttacctgaaaaagtgacaatggccgaatgtagacgctgacgacggaggaagccgcaagctcgcagtccctcgaaactgggcggaggtggacgtcgacgatggaggaagccatgggcttgctgtcgccctcgaaatggatgcgggagccatagtaagggacgaccagtgggtagagaagggaagcatatgaatctttttttacctggaaaagcggcgtcggagagtgcagcggaagccgcggagtctctgtcggcggcggcgtcccctacctctctggcaggttctggagtgttcactcggcggcgtcatcgtttcatttttttaataaatgtgaagggcaagcaaaatggtaaaggaagagtagcaccaggctgagcatgcgtcgtgatacgaaggag

SEQ ID NO: 12064 - DNA, 449 bp, Zea Mays
acccaccaacaaatccccaaaccaaatcctgtcaggagattcaaaggttttccacaaaaacacaagagaggccaaatgaagaacaagagaccgaaacaactctaaatttcagcaaggatgcaaaaatgagatggagaagtgaatgaacgttgtgggctgtactagcgaccattcctctaattaaacttgcagatcaaaaacacagtcgtcgattacaaacgtagtgggtcgtactagcggtgaagtgtcagcaaaatcgcagccaagagatgactgtaacaacaaccctcttctccatcgggggtgaaatggaccaactcctaggtttttgattcgacgaccacgtgctccacacgaagttacttcgccttgacgcacccttcactgtgatgccacatgttgccaccgattcccactggaacctctacgccgagttttgaggcccaaac

SEQ ID NO: 12065 - DNA, 536 bp, Zea Mays
agcccgagtgagtcgacttcaagcagcgctgcaacacaggaccgatgcttgggtcgcagacggagatagaatcaatgaactaagaagggacatccgtcacctgcaggatcagcttgctgatcgggacttagcacttgactgggcagtacagtctcgtttgctggcatgtgctaaggaagcaagggctcaggcccgaattaaagaacttagctcaactgtcgacaacctgcaggtctactgcaatacgttgcatgaggaagtccatgtactatactcacaattacaccctagtgtgcctgcacaccctgctgaggcggaagccggaccatctcatgttgcgggatgcgcgctgggtggggagttagacctttttgagccccctccttccttgaggttggttgatgtctggactcccacacctgacgatgaggccgccaagagtaatgggaagcaggactaatggtgtaatagaagtggagtagtgtattgtaggttgtactgttgtataatatgttgaacttttgtataatgggtaa

SEQ ID NO: 12066 - DNA, 1208 bp, Zea Mays
ataagccaagaagatggcccatttcttgaaggggctaagaccagaactcaagactatccttgccagccaagatttcctcagcttctcgcacctctcaaacaaggccatacaagtggaaagggctagggaagaagaaaagggtcacctcaagaggaaattccaagtccttcgagctcagcagcaggacaggcaccagagagttcgatcttttgggtttccacccaagggaccaagcttcaacaagccagctagatccactctgtcacgtttcagttaggaggggcaaagttccctccaggccccctccgttgcaagcaaccaacctccagcaaatgcctgttggcactgcggagaccctagtcactacaagaataattgcccccagttgaaggcatctgtgcctacttactccaactcggtgaatggccccaagaatgccccagcaaccgcctccaaggcaccctcctccaacagccagcagagcaagagccagtatcatggcagggcacgagtaaaccaagtcaatgctcaagaggctcagcaagcctcgggagtcgtgctcggtgagttcctagttgaatttactcccgctactgtactttttgattcgggagcatctcattcattcatagccactagttttgtggaaaagcatggcattcccactacacacctagaaatccccttggtcacccgaaccccagggtcagaccttctatgccatctcaaatgctcccaagtcaggattcttttaagtgggatagtgttttggcagacttagccgtcttgccatcctaaggaattgatgtgatcttaggaatggattggttaaccaagcataatggcgtcataagttgcgcagataagaccgttcttctcactgaccaccaaggaaagttagtttcatgtcaggctcagccactcgcccaagatccaatggtgtttaatctagcagcagaaagcatatctgtagtagaagaattcatggatgtattcccagaaaaattgccaagaatgccgccagaaagagaagtggagttctacattgatctaattcccagcaccgcaccaatcgcaaaaagaccataccacatggctcccgccgaattagcagaactaaaactccagatcatagaacttcaacagaaagggtacattcgtcccacctcatctccttggggagcaccagtcctattcgtcaccaaaaa

SEQ ID NO: 12067 - DNA, 682 bp, Zea Mays
catatatatatagtttaagtattaggagccctaggctctctctctaagaagatagagccctaaccacccaccagattagtaatttgttataagaaaaaaaactacaaattgtgatgcggctgacctgtcccgcgctcacttggtccaccacgacctaatcaccatacgccctccaatcatccctcacgcccacaactgcttgcaaccctaatctaatcatgtgtcatccctttccctcccctcccggatcaccaatcgccatcatcccctcgcccaatccaaacccaccgccatcatccccggatcaccatcatcccagaccgccagccaccatcatccgttcaggaggagggataggtggttccatctcccacgacccacgcgtcgagtccacaccaggccagccaacgagctgcggcagcgacaattctttcctctgctcgcccacgtctgcgtctacttggattcgataggatcggcaagctcctggccaatgtcgcaccacagagcgaggatgccaacctcgtcaccatcaacaacccctccatcaccacagattacatggtatttttcttgatctgttgagtttattctgtgccatgagtagatctggtggtttacacgggtttgccttgggtataacatggatctataagccaacttgctcgatttgggtaatcat

SEQ ID NO: 12068 - DNA, 434 bp, Zea Mays
gagtggcgacatatcatgctatatgtattgaccaaccttgaagaggtgacgccatacatggaacaatttcttcatgaattctggtgtcgatcaagggaccccactccacaggaatataacactcttcttagaaagggtgcgagaaacggattgcctgatttcatttcctggttaaaacgtaaggtacatgcttagtttgtcaaagagatccgtctatgaactcaatttagcgtcttttaacttgcgaatacttgcagggccaaatagatccgtctatgagtgctgagttgagacaagtagcaaacgactttgcttatagggtcaagaaatattctgggtatgacgtcaatggataccgttttcgcacaacaaactacgaccaaagtcggcccaatcggaaaacaacgtgttctggagtctttacgcccggcctt

SEQ ID NO: 12069 - DNA, 511 bp, Zea Mays
gaataccatgagatccattcttttaggtagtgtagagtgagagcacctgttgtcaccaatttagggctccttttgctcatgcaccttataactcaagaaggtgcattagtggcacaacatggatttggtatacacacagtatcataattgggtaattatgtgaacatggactaaacaagatgtcatgcttgcacataggttaatcattaaagacaatagcatgtcttacaaaaggatacaagtttatccattaacacaaaaagagttaatcatagtgaatatatcgattgaaaagctaccattgaacgattcaaaagatataacatatagaacacacaatcatgattaagcaagcatcattatgaaccattgataacacaggcaatctcaaaagcataactactccaaggataggtagcacaacaaaccaacttatgagcaatactgatttgcaataatgtacttaagatacccgggtaccgtcctttggagagcaagttgcatattctca

SEQ ID NO: 12070 - DNA, 539 bp, Zea Mays
gtgcgatcgtggaagtgagaacggttctgttgcgtgcctatatctctttggagggatcagataaaaatttggaacaaaacgagttttttatgtgggacatgaactaaataacgacagtgcgttctctcgttatagcacccaagttttcaagtgtcgactagtcggcacctagtcatcgtgtctgccctgagatctcgattggtgaggccggctcgacttttctagcaagtcggacgacttagagacgactggaaattctcagtcgactaatcgtcgacttggtctggtaagtcggccgacttgtgtcccagttcggcgcaagcaacccaaaggcacattatacaacataaaccctacctccaacacctctggccacctccagcccctcctctgcacgtcacccagccgcttccagcccctcatctccacaccgctcctcctctggccgcctctagcccctcctatgcacgccgcctccagcctctcctctacacgacgcccctcctttggccgcctccagccccacctctccacggcac

SEQ ID NO: 12071 - DNA, 707 bp, Zea Mays
gacgatgagacattcttcgtctgcatgatcctaacctgactgctggataggatccaggcaggataggagacgggcacgcgggtaggcgagatcactgaaatggaagaagaggtgagaacatattagtaacatagtcataagtatatgaaatgtgaataaatacatacacagagagttaagacacaaaaactgagtgatttggaaaaacaagggtcaaacgacgcgagaacggcgtttgaacgatgaattatgccataggaagtttgaaattcgaaatggagcatgaaatgacttggaattgagttgatacttcacaaatatgtatatatgagtgaatacgggtgaagtgtgtgcttagtttgaagttttgcgaagaaaacggaattttggcactcggctcagaaacgattgctataaatggaaaacagtggaatacccggtgtctggggtatcagataagtgtgaattttggcgagagtgttactagaaatgtcatgagggtgctggaaaaagatggggtcgatttgagcaattttgcgtggtttgaacatttcaccgagcacctggcgtggtgcttttgaaatgacggtgaaatggctattttaaggtgtggaacctcccaaagggagagggtaacctacagggaagctctagggatacataggtacacaaggattcacaagatttcacagagaattgaagatttg

SEQ ID NO: 12072 - DNA, 522 bp, Zea Mays
caaacacgagggaagtagtagtggcagtaatgacctaattggagacctggaagcccgggtagagcaacttcggtcagagttacgccacaggaatagggcacatgagtaggatagtcaccgtatagcaaaattgtcagccgaagtcagtcgccagcagtacgaaatctcggaataggatacgaccattgattgggccgtcaactcgcgttatttcgcttgggagtgcaaagcgaaagctctagctcatgtggcatggcttagtgcatccctcgaaagcctgcaagtgtactgtaatactttacataaagaagtgcatgtattgtatgctcgactgcacccggacgtgcctctagacgttgttgcattgggagccagaccatcgggaacatcaaatgaaggacctgatggggatctggaccttttaggccccctccttccatgaaccttgctgacgaacggtctcctacagcaggcaatggagcaacgaagaatgaagaagactagaattgtatagtctaagta

SEQ ID NO: 12073 - DNA, 851 bp, Zea Mays
tcaagccgccgagcagggggctacgacggtgagtcaccggagctatccccagtcgtcgagctactacctggcagacttatctagttactgacgacatgaatcgcaacggcggcggcgtgaatctttgcgcagagaggtcgccggcagtgaggatccgacgctggcagtctgatctttatcgggctactgtaccatcgaagtgggattcagttggcctgacagtcaatatttaggcttgatttgctcacaaatccctatggtaacatactctatgctctgcaacaaagttggagagctatataccatctatatttcgactatagggattgaactcatttgatcactagatcaaggttaaattcaaacccaaagatggctctgttacactgaaattctgaatttcagagttccattagcctgacagtccaactttaggcttaattatctcccaaattctcttaacaactatgcttacactcttaagcaaagttgttctcctttgtttggtcaacaactttgatgtggtgccttagggtaaaaaccctagtacttgaaagttacaagactccaaagttgagccaatcacactgatttcagacttaggctatatagaggttaagtggtactttttgcaattagccccaaaacttagggtttcacttgcaaatcttcctaaatgtgaaccatgtgactttatatgctttaacatagtatttttgacactttagtccaaatgtgcacagtttttgcacataggcccctagggtttggacttagggttttccagggtttcaattgaggtttctggtatcccaggggtataaatgtaatgtagatctatctttagtaat

SEQ ID NO: 12074 - DNA, 705 bp, Zea Mays
acacccatgatcgtcgattggcatgggtggaaacggttccacccggcgacgtccaactggaggaaatcacgaagattgatgacgccgacggaccacaacaccagggcaaccacgacagcaacaatggtggtcgtcaggccccacgtcgcgggcgcagtgatgggggcagcgaattctatagccacccagatcgttatggctgaccagatggctatggtcgtggtcggggtcgtgacgaggagggcggcggccgtccaccgtgacccaactttccatccttcgacggcgaatcagatccattgacatggatcaacaagtgcaatacctatttccgagggatgcaaaccatggcggaagagaatgtttggctagcatcattgcacttggagggcgtagcagccgagtggtactatgccctggaacgtgatcatggcattctgtcatgggtccgatttgttgactacatccacatgagatttggagcacccatccgatccaatggcctggcagaactgaaagccctttataggacaggcactgtggatgcatatcagcgacagtttttagtcttgctttgtcactatgatgacttgtctcctatgcagcaggtgaacatgtttacagcaggtctcggagatcccctccacaccgatgtcgagctactggccccgacaaacctgcaaaccacaatgagtctggcccgtg

SEQ ID NO: 12075 - DNA, 417 bp, Zea Mays
tggccagccattcccagaggccttcagcctctaccaagcccttggatagcttccccaagaccctgtgaagcttctccaagcttgagccgaggcattgcctcaccggaggagcagaatctccctcgccggacttcggtctcccgccaccgcgcgtgcaccgagctatctggtaagccattttccaattcctcgcgcctacgtcttccctagcatccagtgaagctctccgacccgttcaattgaactctaccgccatggataggccggaatcctcaccgccgacgagctcgcccgcctgcgcacatggaccgacctactccgaccatctctggagacgatccgcacatcgtcgtgaccgtcaagacctcccctaccccctcgaccacttcatcggaacagtctcgccaccagtaagcc

SEQ ID NO: 12076 - DNA, 343 bp, Zea Mays
ggaaatcagaccgggggaaaacagatggctacggccggcgtcgctcctctccacggtggtgaggtcgccagagttgaggcaggcgcgagctagggtggctccggggtcaccggagttgggcagagaggaagagggcgccacgacgaactcaatggcggggaagaggccatgaatccatgggcagagaggggagagcggcggtgaggtggcctcgggcgggccagagaaactccggtgagcgattccaaccacggggaggggacttaaggcgcgctaaggccttggctaacttcagcagaggcaggggtgacacagggaactactctggtaaactagaccgggc

SEQ ID NO: 12077 - DNA, 525 bp, Zea Mays
caccagtaggaggatttgacacaaaactgatgaaggccttggaaggaggcagattccaggctgagtatgcaacaggagcaccaatattagacaccttgcctctgagtatcatctcaagccagctcaccaaatccacagcaggaatccttctgttggtaacccgggttgaatcagcaaggcctcgatacagataagctggatacgctctgtcttttagtggctgaatgttcttgaaaacaaaatcggcaaccacagcctcggcagtcagacccttctccttcaacaatccaacctcagcaagcagagcccccgcctcagctacctccaggtctgtgggggattcagtccaactcggagtgcgaacatctggttgtctccctgaccgggggagggaattcccgtgattctccatgataaaccattccaggcgccatcctttgatgttgtccttgagtgagttgtcgaggtactcggttttcctcccacggcgcatctccaaacttgcacccccacaagctggtgctg

SEQ ID NO: 12078 - DNA, 989 bp, Zea Mays
ggcgtcgagctcacccacgagccaggcttccaccaggtgcctgcttcttcttcgtactctctcccatacccataccatatgctgttgttctgttctgtcatcatgaaatgttcgattacattgatatcagcagtgactaccataaagatgaatgttttgatgctctttgagtaaaattgggtcaagagctaggggattgtctcaggaattgtctgaaaaaaatggacaacctacctcgtaatgacaatcattcctcctctgtcttcccacatattttattgtggcagagacatcgaaataatctacctgatggaggagacattaaagtattcgtggcataactgttctttctcgtcgaatgtctgtagtacgtacggtgttcaggttgtttcgataaggcatcttgttgttgttaatatttaattttatgatgatattttgtggctgagatttataattgacttgtactagatattggtatcatctggctggtgtggccacagcaagtaggaggcatgctgccaaaaaggcaaactttaggctaccgttctggtggtctccaaaaaatggaaccatgacattcgatgaattggtctgcattttccttgttgatcctcggatgaaatcatgaaagcttatcatttgcaactctctacgttcaaaaaaaaaatcatttggatctctcactaaatgaagcacacatcgtgatggctactggttaacctctgccactttgtagtttgtagtgctgaatatattcaaaggcaatctgtattggtagtctagtacatcaacggatgttgatgtgagggcacttggaaaatggttatcatggtccacatgcggctaggaccacagtagcacacatccctttcagataacttgtaataaaccattggtcaatgctagtgcttgttgctgaaacgtgtggcatttcaatcttttatacagcagtggtcatcgctgtggtgtgccagttcatactctca

SEQ ID NO: 12079 - DNA, 385 bp, Zea Mays
ctaagcccgtctataaatgtagtggtgatcatggtcggggttagctggttttcatgggcgagcagctggtggaccaattgatcgaacaactcaatgtactcccccaccgaagagttctgttggatgtgatagaattgcctgataagtataatgtgttggtccctcccaaaccgagtggtcaaggctgggcataactcttcccagttcatttccctgattctagactcaatagactgcagccaaaacaatgctgagccctcaaaatgcatggttgctagtccgatccacctttccatgggcacaaagtaaaactcaaaataggtctcacaacgatgtttccataatttaggattggatccatcgaatactgtaaagtttatcccag

SEQ ID NO: 12080 - DNA, 434 bp, Zea Mays
ggatcatataggcttactcaaatggatggcacgtaaatagggaattcatggaatatagagcatctcaggaagttttacccttagcaagatttcaaaagctatcgggggagcattgtattctgtaattggaaagtacctcatcaataaaagatttcattctcaagggcactcgaactgtttattatcaatcagcacgcttactcgacttagggtgaccattataccctactaacggagcaatcggcttaagtcggcagtgacttaagacggtgcaacatgctcacacttactcgacttagggtgaacactataccctactaacagagcaatcggcttaagtcggcagtgacttaagatggtgcaacatgctcacgcttactcgacttagggtgaccactataccctactaacggagcaatcggcttaagtcggca

SEQ ID NO: 12081 - DNA, 683 bp, Zea Mays
tttccaaacagcattcacctcgaggaagtggtcagtttactcctaagtttgatcaaagatctggcttcccagcagcatctccatacagcaaagggagacagaaacgtgattactgtcgggccaataacttatgcttttagtgttctgaaccctttgacgccaaccatctgataaaatgtctcaaatgccccaaaccagctgtaaatgccatggtagttaatgatctcgatgtgaatttaactgatgaggtgctccatcagttggatctagaggatgctctaacatctgaattttgccagttctctctcaacgttgtaactggaactgatcatggtcaagcgttgaaacttcgagccttggtccagaacaaagtcatgttaatattggtggacagtggtagttctcacagttttgtcagtgcatcttttttggcagcttgtggtattcagtcggtgtccatggcacctaaacaagtacgagtggcaaatggagaaactctcgtgactgacaatcaggtattccagttaagttggtggattcaacgacatagtttctgcaatgatatgatggttttggatttatgtgcttttgacgccattctcgggtttgactggctctcccctcacagtccaatgacttaccattgggagcataaaactattcagttttgccataaaaattct

SEQ ID NO: 12082 - DNA, 658 bp, Zea Mays
taataggtgtctggactgcgcgctaaataaacagaaacatggggtccacaacgcaaaaggtactaagactcagaatactgtactgcggaccgcgggttgatatctaaatactttgggggctctttagaaagatttacaggctgaaggggtactggaggatctgagccatccgatcaaaatctgaagatccagattagatcgccatcacacccaaccggtatgcatccacaaccctaggatcacgatccgacggcagcggttttaaagaggtaaggagggttctggaccgcccgatcccatccaacgactcacgatcgatcccgaagagagtatcatctgcgcgatcacgatcgtcggacatcaatctaacagtttagattaggtgcacgaaggaatgcattcatattggatcctaaccatcagatagagatctaacggttagaacactgtcttctatccccagcacccaaactcgacggcggcctggttatcacggtggagcagctccggccgcaagcgatttccgggttttaatgccctatacttcgttccgaaaggttctctacacagaggaggatagggcgagcaagttgggtgacgaattaccgaaggtggggcggcgaggtcgtctgaccacagagcaggcgggtccacggat

SEQ ID NO: 12083 - DNA, 568 bp, Zea Mays
ggaaatcagaaaggagaaagcatggaacaaggatggaagctaaaggacaaaatgaatgggggtaaagaagacccaatgtactaggagaactgcttccgggtagtcaccttcttccgagccatcaaagggggagcatgcagaaacgacgccgctcaaagtgccaccctcgacaccgtcccttgagtcagaggaaaggaagacactcacccctagctctgcgcaggtgggttgggaggccttcttctcctccttcgcttgaatgtgaattgaatgctccgctaaggtttcccctcctggtttgtcttccgcttccactccaccttgacgacggtgacctcaggaaggggcaggaggcacgacactaagggccaaatcccctataaagcgtgcattagagggaaaaggaaaaggagaataaggagagagacacaccaggaagaagaagctcaccagggtgctcacaacatccttggaaaggggagggggcaagtcctcgtgcatgaaggacctcgacgataacatcgtaacgaccctgacccaggcttcgatctctaatagagcgagcgga

SEQ ID NO: 12084 - DNA, 307 bp, Zea Mays
tccacggactttaactagtcgtcagcctgtagtgggtctgaggattagagaatataggtggcttgtgactcataaacttcttatgcttgtccctgggcagagctggtggtggtggaggtggtagttgttgtcgttcctgtcgctcttgacacatttcttgacgttcttgacgcatttcttgacgttcttgatggatctgtacttgcatttctatcatcgtgttggccatttgttgtagtagtcgcatttgagcagcagacacatcatcagtaggcgggggattcggagaaggattgatttctagttc

SEQ ID NO: 12085 - DNA, 659 bp, Zea Mays
ggccgtgcgtcgacgggtggggcctgcggggcaggacctttcctacacggacgcggtacacctactattcccgcggttggggataccttgtcagccgctccgtgcaccttcctctcaactctatcactgattagtgggccaccactgtcagcatcttcttctcaaccgtttacagtggacttcgccgtgatggccggggaagggagcgcgaactcgtgctagatcctcgccatggttgtcgtgactgtgctactcccgtccggattccttggccgttgctgggagtataaatatgcgccaccaccccagcttcctccatcctaagccggcaccgaaagaccaagcgcgacagtggagagaaatagtagagagaggaagagagattgccgtcgtggtggccttgcaagcataccaacatcggggtcttggcattgggtttgagtgcttcaccgggatgtggcgagggtggacatggcttcagggcaaggggggctgacccctggggttcactggagcatacaacctgctgcggatccgcctatcaacgtggaccaggccctcttcgccaccctgttcggtaaggtattccccatattcttcgccatcctctcgaatttgcgtagagccttgcggggttgttcaagggcattgagatgtcg

SEQ ID NO: 12086 - DNA, 435 bp, Zea Mays
cacgaaccagcctccgattgtaccattctttgcttgtatttcgtcagacacttgtaagagcttggtaagatacattagagcgtgttcctgtgttccatccgagaggagcatgtagtgagattattagggataaccttcaccgtttgtttcctgtttttgtgtttcgatggcaggcgacgacgaagaagcaaggatccctacagacttcgatgaatgtgttagccgccaagatcttgaggcaaacaacaagctcctgaaggagcaaatggaggagacaatccacaagtcagtgcatgatgccttcatcaacatggaccttggcaggacttacgagaggccggatcaacgattgtcccagatcgtcgacagacttgctgtgttggagacgcaacaacaagcactgccaccaccacctcctcgtccacgtcttcccga

SEQ ID NO: 12087 - DNA, 327 bp, Zea Mays
ctcagcacgacatcagcatggtatcacgcattaaactaatcccacgtgccaggtgattctattctccttctccgcgcggccggatggctcgaacagaccatagttcaggtcttctcatctgcgttcgcgtccatgcggaggggccgtccgcgggacgtctgtttccgtaaaaatctcccgaacagactccacagatttcggtgtcgttacgattcgacgatctggtccctactcttccgcattgacccgcccctaggctatataaacacggacgaactactcccaggaacccatctgctgtagccgtatcgcctagctcgattcgtg

SEQ ID NO: 12088 - DNA, 328 bp, Zea Mays
gattaatcggacgataagaaaacattgtctggctggtggcggcgtgcgaatgaggttggggaggaagtgaacaaaattgtattgtggatccctttttaatttttagcaaccaaatgttgcaaactattggcgcgagacaacaaattggcaagtgtttttaaggaacttttggagatgctttaagagctatcatttgtgttgtcatggtgtgatgttatggctggcctaacctacaacaacctacaacagaagggagaagaggggcactgccaggagacgtgggtgcgcctacgatcttggcaacaacagaactaggaatgggaggagt

SEQ ID NO: 12089 - DNA, 560 bp, Zea Mays
tcgtcagggtcttcagagctgcggccttgatggtgtcatccgccctgaacctaatagtctcggagttaagggaacgccaacccggctgcagagggtgagcctctagagtcaatcaaaccctgcaacatggcactcgatgctcctcatatagctacaccgtatacagagggggtgtagggtaactggcggagtagagcacctcccataagatggagggaaaaccctcatgggaaaggtagtccgaactgaaacgagtgtctcctccattgatgggggtgggtgaagtcatctgtgaaatagggttagacgtaaatgttatggtagtggaaagaaaaaacatgtacccggttgttaaaaggagggggttaaattaaattcatctactcatttcgttattcattattaaccctatttgttacattcctacttagatgcatttttccttagtttctaatttcttcatattttataaggcatggatgctggaaagaacgtctcctcaccgatcaaaggggtgcttctaaggcatccctacaattccaagactggcctatgtggcc

SEQ ID NO: 12090 - DNA, 732 bp, Zea Mays
cgcagggacaggcgtggcagtcggcgtgaccatgggcggaccggcagtaattgcatcaacggacgcgtaggggcagcgagccaattgccaatcagactttggccccacctgcaggctcgtatcctcccctgaggcgggcccgggggccactgtcggtaccttgaatcaggggtaccccctactacagtatgaagacgcggtgcccgtacgtcgtttcctagccacacggtgaacagcacccgaccctaccacgtgggtggctcaaggggcaccacgtggcgagaaaagatgatacatcccaggatgtatcagttggaccggacctccgtgagggagcaccgaacccctgtacgcacaacccggacacccgattacggctcggtactcccaagtaagcatgctgggtcccttggatggggtccagatccctccgagtaaggtctaggccacaacgaggtcccgggacagggtcgaccctggtataagcaaggatccggtactgacacgtgtccaggccttatcctatgcgcttgcgctccccgctcaggcggagacccgatgctgccacgtggcttgttgcccatgacataagccggcgggcggagcctgacgtaaggcttctaggccgcgcgatctctgcatttattgcggagaggacgcgccgcctgtccaccctgctgacaggcgatgtgccccctcagcatttaatgcgtcctgtccactccactggca

SEQ ID NO: 12091 - DNA, 469 bp, Zea Mays
aggggacggtccagattgttccaaagactaatctctcgcaggggcggtttggtccgtagaaatgtaatcggagggctgggaaactaacggttgcgatggcgcccagcgtaccgtttgggttgggtgatccgcgaccgtcggatcgtcaacgcaggggcatgatcggatcgagcccatttaaaatcttcaccgttggtagttgatctgatggattagattgcataccggttcgatgtaatatggaattaatctcagcccttcgaatctaatcggacgatcacgataggtccataccccttcaaccacaccatttttcttatgagtccctcggtttaggttaaaataacccgccatccgcctccactgttcactgagtctggggattcttaccccggagcccctggactttctagaagttgacgcccagtccagaggataataaaaaccgagaaatgattatagaatttag

SEQ ID NO: 12092 - DNA, 611 bp, Zea Mays
gggacaccaattttggtatagaaaatttagatttctttgatggtcgtggatccattgatgactgtggagaaggtagatcccttgctagtggcgtagatagtgggtcactaagaggatgaggaggagaaggtggtggagccctaaatggcgatgcttgtggtgaagacaatggatcagaaagaggatgaggagcagcatgtgaagtttgaggaggtgatgatggatgtacaataggaacgacaagtgatgactcttgcgttaggagttaggtaggggacaacaacgatggtggaggatcaaccaaatcgacatcccttctaggccaaaggatacaattcttagtagcttgtccaagtgtctcaatacctttgggcctagtgatgtctagcatgtcgccctcggatccttggacgaccatagtcacttctaccctacaatactcttctggaatgttgcttccatagaacttgtgtcctgagatcacaaggcatgtggctactttattcatatgatgattgttaatatcatatcttataactagtgtgcatgccataggccttgtgatatcatcaactggatagcgaaccttatttcccattggcgtgagagag

SEQ ID NO: 12093 - DNA, 729 bp, Zea Mays
ggagatggttgtccacggcgcggcgtcacacggtggcgcggacgaccgatttgggggaagaactaaattagggcgctacggtggctaatcggaggcgagggttggtgctctggcttcgtaacaacctagtggagctagctgtgcactcaatttatagcatccgagagcggtggctctgaatttggaagaggaaagctggcggccggagagagggggtgagtcaccagcgcgaactaccgtggctttcaccggggtaatgtctcaagcgatggataggctacctacggcgatctactatgatgtggtaactcttctaagtacatggcacggctacgaagggccgcgaactccggcgaggacacttcggtcaatcgcgtggcaagtggcacagtgaacagtccagtgataaggctccaactcttccctgtgatgagatctttcaccgccagccgttatccgcacactagggcgcatgaatcgtgacgccgacaaggatcgcggcgtggagttcaccggcggcacgttcattgtatctgaagatcttttcgttcactgtaccgtggctatcttcgtcactgtgtctgaccgagcaacttgtagggctttgttctcaaatttttgtgtggaaactcactaatccatctgtaggaaagttgatctcctacaaaccagctttgattttgttatagcaaccataatcaaacactcactggatcctactcgaaattg

SEQ ID NO: 12094 - DNA, 455 bp, Zea Mays
gtgatttctacagatgtctgagaacaggcgcagaggtgcgaggcgtgctcagccagaacagcaggcaccccaagaggaagcagccccgtagcagcatttgccactgccaccaccgatgaccatcgagcagatgttcttgatgcagacccaagcagtctaggcaattggtcagacattagcagccatgcagcaggtgcagcagcagccaccaccacctcagcctccagtgcaagtccagatgccacaagtgcccagagacaagcaggcagagttcatgagggcccatcccatagtctttgcccattctgctgatcccatggacgctgaagattggctgtgtaccgtggagcatgagttgcacactgcctagtgcaacgatcgtgagaaggtgttgtacggtccccgacagctaaggggagcagcacagtcttggtgggagttctacctcgccaccc

SEQ ID NO: 12095 - DNA, 735 bp, Zea Mays
tggagatgtgatgaaatatgatggatcggaatataggttgggatcccagtcccacagtggagaagctgtttccaaataccaaactaggaaacatcggtaacgctctaatcagaactggtacaagcgcatagtgactagcattattcttttttttctccccaagcgtctcgtcatttgattcttctcgagacatagatatctgactccacctgccttcttccttgagcatatgatgactggaagaaatcatttatctctcctctctccactctcctctcactccccctctctctaccgaccatgacatacacaggtactcctatcattcatactaccaaattttccaactaagaatcatctagcagttgccactagctaggaaactagggttcagcttttgaagagaaaagctaaagcaaagctgcaaaggtgtgacacacacacaggagtagtagaaggaagagggcagtagtactgtatatacttgagcaaatatgcgaagaagccttcttaagccccaacattctatatatcttcctgacaccaccagggggacagcatcatcacgaccattgaacaaagatgaaaggatgaagaagcaatgacaagagcatcaatcaagattacctaactgtcaggttttaaactttgaatcatgatgaacacagtttcctagctagctactccaagctttatatttacttctagcaacaacctgatgggctagctactgcg

SEQ ID NO: 12096 - DNA, 610 bp, Zea Mays
cggggatggatggacatggaccccgacctatatgcatatatgcttgctggatgctagctgaatagcatagtacaaatgctcatggattggatccacaggttcacagatctactactggtaggtatcatctatactacgtacgcatgcagaggccgggctgggctgggctgtttgtatccggctgattggttgctcggttggccacatccagaaccgccagatgcattgaccgtcgatgagcacttgattggtaaactgcatgtcacggttcgaatttgtatacgcgggtgcagctcaggattaggtcaccgtgcattcggctgcatcagcgggaaagtgagatgcgcgcgttcgaaccgatgcaggccctcgtgagccaggaggctaggctgccgccaaccaatcacgcgatatgtgttgtgtgcagctgcagctgtttgttgctcgtcgatctccagtcagagaacacaaacaggtacggtacggcgtaaagaaagaggatgcagagaaacggcatcatcatggtacccccacagatactaaaatgatgcagggcgagagattcctgatgcagcacaacgtagggtcgagactcgagcggagtcagcac

SEQ ID NO: 12097 - DNA, 339 bp, Zea Mays
agaaactcacccataacgaaaagttcggcgtacttctgccgcatcagctcctcaagttcccaagtagcctcgcgctcagactgattagtccacaagaccttaacatacttaattgatctccttctcatgacacgctccgaggactccaagatacgcaccgggcgacactccagagtcagatcctgctgcacagcaatcggttccaattcgatttgatggtccggatcctgcaaaaacttcctcaacatagagacatgaaataccgggtgtacccctgccatggaatccggcaattgcaagcgataagccaagctaccaacccgggccaagatagagaac

SEQ ID NO: 12098 - DNA, 378 bp, Zea Mays
gaggaagttgctgtttgggtagctgttgagggcctgaaaccgtctagctgggggcgacccccctcgctgtggcattggtgggaaaaattagcttttttgccgggatgcaataggaaaggcatcagatcattattgatccttgtaaactgggagatttggcgagaaagaaatgcgagaatctttgatcgcagattctcgagctgccaacaaatcattgccaaaatcaagagtgaggcggcagcctggaatttggcaggggccaagcacctagctacccctttaatagctatttagtgggatctgtttttattttctgttaaggttggacctttgcctagtacttcggttactgtattgacttaaacctcttctattctt

SEQ ID NO: 12099 - DNA, 299 bp, Zea Mays
gcccgagccgctggggcaaccgaagacgtgatgaccgcatacttgcctatcgttcttgggcaggttgcactgcaatggctgcgacacctaccccgacactgcatcgacgactggagcgatttcagtcggcgcttcaccgccaacttccaatctctctccgacaaaccggcacagccatgggacctcaaaaccatcaagcaccgaggggatgagactctccggtcatacctcaaaagatttcagaccatgaggaatcgtatccccgaggtcgcagaagcagcagtgatcgaggacttcta

SEQ ID NO: 12100 - DNA, 296 bp, Zea Mays
ttcctttccaaataaatcctcttcgaatcttgtcaatagatttaatcacccacttggggatattcatggcaatgagaaggtagaccgggatggctgaaagcacaaagcgcaccatagctgtcctgccagcaagactaagcaaccgagccttccaattaggaagccgatcggcaactttctcgacccaaaccatgagatcattctttctgagcttcttgtttgaaatcggcagacccaaataagtgcatgggaaagaggaagatgtgcactgaagaatattgcagcccacctgcacc

SEQ ID NO: 12101 - DNA, 740 bp, Zea Mays
ggcatggggtctcgtcgtggagcaccgctggaggtcgcggaagtcaatccgggagctgagggtgcctgcaatcgtctcgcgtgcgaccaatcactcgtcagagcccatctccgccgcggatcccgctcgtctcgtggaccggccacgccacgggacaagctctggtgagaaaccaattcgctactccctatgttcccttgaatgcgtgggaccgtgaatcgtagctcgtgatttcttttggacggcgtatcgggtggccggagttatggcgccgccgccctgttccgtccatctcggctggaggtgggtgatggcgtgccagccgttagatccatggtggatgcgtgcgattagatccgggtgggtgatgatcttcataccgttggttttccaatgggcgtatgggatcgaatccagggcgtatcgcttcaggatgtgatctggaccatgaatcccggatcctgtggcccggattgattacgggttcacatatgataacgatctaatccgagccctcaaatgtcgatccaacggttgaattctacccgtaccccttcgtcttggacgatttacttaagagaccctgcctttttcacaaatcaacccgtcgtccccgcgattgtgggctatgtctggtagattttacagattaaaccccggacttctctgtattagtatgcttagccagggacttaagaaaataggaaaaacaaaatagaaaatacttttctagtacaaaa

SEQ ID NO: 12102 - DNA, 1122 bp, Zea Mays
agcttgacaaaactcccgtggaactgagccaggtaagcactcttggtagagtattcgccatctgatgtccagcgccatctgattttgtctacttcctcaatatttatatggacttcatggatggcttcccaaagtctcacaaattcaattatttcagtttccccagaaaccatagaaataagagaaatccatgtattgtcgagcagggccttttgtaccttaatgtttttgcgctttgccttaatgaagagattgggggcaatgagacgcgtcgccgtgccattaatccaattggagaaccagaaagaagcaagggtcccattgccaactgtcaccgaagttgaagcatgaaaaaagtctctatcttctttggtacatggggtgtcaagccccgtccagaccctgtcccggtctctccattggaaccacatccaacggattcgaagagcttgagcaaaacgttccaggtctaccactctaagaccaccaagatttttagggcgtgaaaccgttggccagttcataaggcaaatgccaccactcattacttctggttccttgcctttccaaagaaactctcgtctaattttgtcaatttgcttcagtaaccatgtctgggcgagaaatatcgttaggtggtagattggttgagaggacaaaactgtgttaacaagagtcaatctacccgctttggagagcaattttcctttccatcttggaagccttgcacgaattttgtcaaccagaggctgcatctcaattcttctaagttttctagtgtgaaggggcagaccaagatatttttcagggaaagaggcaatctttccggggaagcagtgaagcagagcctcaacttcaccaggatgacaccgaatagggtacaactctgttttactcatattaaaattgaggccagaacattcactaaaggtctggatgatgcgccttaaaacatacaggttagtagccgacggctttgcaaatagtccaacgtcgtcagcatagagtgagcagtgcaaagtagccggtttagtcgaatatatatagctttccataggtggtcctaacaataagagtgtatgtatcatgatggattttaacaatccattctgagaggggacc

SEQ ID NO: 12103 - DNA, 480 bp, Zea Mays
acatttacgattcaatagcgactaaatttaacgtaatacgggagaacttacgtggctttgaagaatatgaggtgtgtcctgttcatgtggcccaatatgtctcatggggatgtgcttctctgcgccgaccacatctgttgtttttgtgtgctcttcgatatgtccaggtgccctcaatgcagccggaggagtaacagatacaccctctgtgtatggggcgattgcagacaaaacaggttgcatgtccattgaaactgacgtacctgctggcttatgcacagagggtacaggcaggatgtcatcgccagcgccggtggtcgacatattcttcgccggcctgacctctcacttccgccgccgctaaccgccgccaataattcagatggacgagcgaacatggacgcggctgtaaagttgtattagtttcctgccgtaactgcgcctttattttcgcgcacgaaaatcacgtcttgcctcatc

SEQ ID NO: 12104 - DNA, 518 bp, Zea Mays
gatcatggtgcgccggcacacagccatgacaccaggaccgagtcagcagtagcctccaccaatagtctggccccgggtcaatcgaggcgacacgacacccgacatcactcgcctccctgggaccaccgacatgatcatcaccgagaggaccgagggacgtgtggagtctccgcccttacccccagctctgagcaatccagtggttgccaaacttcaaggtctccaacgtcgacaaatacgaatccaagcaagacccgggcggctggctggctgtctacatgaccgccagtcgggccatggggcgatgaaagacgtcatgaaagtgtacctacccattgtcctagggcaagacgcactgcaatggctctgacatctacctcaagactgcatcgacgactaggatgacttcagccgtcagtttgtcgtggattttcaatcccttttcgacaaaccggcgcagccctaggacctcaagtccatcaagcgccatagcgacaagatcctctgctcgttcctcg

SEQ ID NO: 12105 - DNA, 550 bp, Zea Mays
acagaatggacttgttgagtccttaattaaaagaataaaatccattgccaggccacttctacaagatagcaaactcccaaccagctgttggggacacgtagttttgcacgctgcggccttaatccaatatagaccatctgcttaccactctgcttctccccaccagttaacgcgtggtcaacaaccagtggtttcccatctgcgaaaattcggttgtgttgtatacgtgtcaatatcaccaccccagcgtacatctatgggacctcaccgaaagttggggatctatgttggttatgaatctctgtccataatcaaatatttagagcctagaactagggatctgttcatagctcggtacgctgatagcatcttcgatgaagagcatttcccgacattagggggaggattgtaccttaataataaagaatgccgagaaatagaatggagtgctagtagcatccaattgcttgacccacgcactagagaaaccgaacttgaagttcaacgaataatacacctgcaaaacttagcaaatactctgccagatgcc

SEQ ID NO: 12106 - DNA, 435 bp, Zea Mays
cgtcgtctcacgcacgtcggggatgccaaggttggccttattggtctcctctattggctacatatctaaagttggggtcgcctccagggtcaggatcaagaggttgtgctttgggagcatgtctgcgtccgtcacaagtcacttatgtgccaccaaggtgcccgccgcgagggccatctgaatggcccctcgatagcactctacggcgccctgaaagttagccctcatggcaatgatgccctaaggacctggcatcttgagcatcatataggagtaatgcgagacgaccatgaacttgggcagtcccagtctctcgatgatggagttgtaggcgcggttgaaccgagccacctcgaagtacagaaactcggtgcagtagatgttgggcgtgtcgatggtcatgggcaagtaggtatggcctagagggtactcccc

SEQ ID NO: 12107 - DNA, 796 bp, Zea Mays
gaagtagtctgggccctaaacacgaccaaatgccgggcaactggattcacaccttttcgtctattatatggatcggaggccatgacgccgtaggaagataaagcatgggtcgccccgaacaagcacattagcagtgctcgacgtcaacgaaccaacgtccaaagacctcatcgacggagaccgcgtcttcgccctgcaggccctcaacaaataccaagctcaaaccaaggccttgcgcgacaacgcggtcgtcccaagtgagttcaacaaaggggacctcgtactcgtccggaccacccggatagagtcacggggcaagcttgagccgaaatgggagggtccattcatcgtcaagtcaaaggcatcccccagcgcgtacaggcaatcaacgccatccggcgaagacttagagcactcctggaacattgacaatatgcacaattttttgtttaatcctcagggcccacgcgcccttgtaatccaccaaacaatactattccggcccgcactcttttcctcccggggggcgaggtttttaacgaggcggagccatgtaatatacctgcaaaagcccccgcaaaaacaaaaactcagatgcaacatgtcaaaaaagaccgcatcgacggtcttcgacattcgaccactccgaagtcaccgcgacaggtagcgtagactaccctcgcgtgcgacactccgcgcaaaagtcgcctaagggtgcagccggaatagcacatcaagtgcgataatcgaagtcttttattaaaaagacactccgcgcaaaagtcgcctaagggtg

SEQ ID NO: 12108 - DNA, 284 bp, Zea Mays
gccggcctgctcattccccttcctgtggcaacgatgacctgggcagaaatcggacgggacttcgtcgagacactcccgcgtataggcgggaagtccatcatcctaatggtggtggaccgcttcagcaaatactgccacttcgtcctggtcacgcacccatacacggtggagtccgtggcccaggtcttcttcgcctagatcgtgcacctgcacggcatgcctcagtccatgttctaggatcgggacccgttttcacattcatctcctggtaggaattgatgcgg

SEQ ID NO: 12109 - DNA, 616 bp, Zea Mays
ggtatgtctgttgcaagctcctagatatatggagttgctggcaatggcaagcacattttaatcactgaaaattacaatgtaagcactacactagttactgaactggttagcatcagtagttccagaaaacttggtttctcctatgctgcttcctgaggtagacgccgagcagcttgtagtacgtccagcgccgcttcccgccggcggtctccagcagcacctcggagctggcgtggaagccgcccttgccgaacgcctcgaacacgatggggtccgtagccacgacgggctcgccgtcgccgtcgaggcggtcgaacgcgaacgtgaggttccgcgcgaggcggcgctcgaggtaggcgtcgacgaagcagccgtgagtgacgaggtccggcgcgacgccgtcgcggcgcatgtggtcggcgctgaggtggaggtcccagaacatgcacatcttggagaaggccgcggtgcggatgttgaaggtggtgaggtccggccggaacccggcggccaccatctccaggaacgcgcgctgcagggacttcatcttgaagttggccgcgaaggagaggaggtagaggttccagagcaggttgccgacgtcgcgccggcggag

SEQ ID NO: 12110 - DNA, 1353 bp, Zea Mays
gtttcaaaacctcgggttgaaaatctgggatgttacaaacctaccccacttaaaggaatctcaccctcgagattcagacggggctcgagaaaaggtaagggtattccctcctcagagagtcctcactttcccaggtagcttcctcttctccttctctgctccactgaactttacagagtcttacttctaagttgcgggtcttttggactgctgagtcaagaatctttatcggcttttcccggtactggagatatttttgaatctaaattgtctctgcctcgatgtggttttctggtacttgcaggcacttacggagctgggacacatgaaacacgttgtggatatctgacatggattctggtaattcaaggcggtatgctgcgggtcccactctgcaaatgacgggataggggccgacgaatcgcggtgctagctttcctttcatttggaaccttttgacaccacgcatcagggagaccttgaggtatacgaagtctccttcctcaaatctgagttctctccgtctgttgtctgcataacttttctgtcgactctgagcttcaagtaacctcttgcggatcagggcaactttctcttctgcctctttaacaaaggcgggtccttccagtgtcctttcccctacattggaccacattaggggggtctggcactttcgtccatacaatgctttgaacggtgacatcttgatactggcctgatggctgttgttatatgagaattcggcatacggcaaactggactcccagtttctgtcgaacgtcaacacacaggctcttaataaatcttcgaggaccttattgaccctttccgtctgaccatctaactgggggtgataggcggtactgaaatctaacttggtgcccatagcttgctgaaggctcttccaaaattttgaagtgaactgcgtccctctatctgacactatcttccgaggaataccatggagcctgactatctctttaagatatatccgggcaagggtggctcctccaaaagtggtttttactggaatgaagtgggccaccttggtgagacggtctattattacccagatagagtcatttcctttttgtgtctggggcagtccggttacaaaatccatgcctatttccttccacttccattcgggcactgggaggggttgcagtaggcctgcaggtttctggtgttcggcttttgttcattggcaggtgtcacaccgggccacatactgtgctatctctttcttcatccctctccaccagtatcttgttttgaggtctaggtacatcttggtggttcctgggtggatggagtaggctgagttgtgagcttcattgagcaagatttctc

SEQ ID NO: 12111 - DNA, 537 bp, Zea Mays
gcgacagaggcggaggaggatggttgcaaagagggagtgggcgaggacaacctcacacatggaggagcgaagcacgatgcagcggtgggaggaaaagaagacgatggtggaaagggcggtgaaggggagaaggaggtggggacagaagttttcaaggaagacagtggtgtcatagtcggagggggcgaccagtggcgcgggcaggtgcgaggcgcaactaatgaggaggtcgtcacattcgtcggctgcgaaccacgagtttagtaggcggcagttgcgagtagggtgcaggagaagaaggggtgcgtaaggactcacgatgacgcacgatgaaactcccatattaaggagtatagaattttgtataaagcagaaaggggtgggtgatgcacgacgaattatggaactgtggaaactggtgttttatatagtagggagggtgacacgatgactataaaaccgtggaaactggtgctttatataataggtagagatagagattaaatgttgactgctaattactgtctccctccaaat

SEQ ID NO: 12112 - DNA, 465 bp, Zea Mays
tgtgctttgacttcaccagtcaaaccaaagataacatgaatgcaagaagagacttagctgaactttgtgattgtccgcaccttgagcttagaaaaaatccaagtggatctgagagtcggccacgagctccttattgtctgaaacggcaagagcgagaagagatatttcaatggttgaaaaagttgaggttcccagatcgctatgcggctaatataaaatgggcagttaacctcgacactggtaaactcattgggttgcagagtcatgactatcacattttgattgaaagactcgtgccggtaatgttccgtggatacttcagtcctggtgtgtggaagatatttgcagaactcagttatttttataagcagatatgtgctaaggaaatctcaaagaaatttatgctgaggtttgagaaggaaatccttgtccttgtacgtaagatggaaaaagtattcccacctg

SEQ ID NO: 12113 - DNA, 929 bp, Zea Mays
gccgagcaagtccgtgagacaggacgaccacctaggctctaaccaagaaagagaagcaaggtggaaaccaagtcaaatgttgcaaagttcacgccaactaagacaagacatgacataacatcccgggccatgaccagtcatccgaacgtcagaccgaaggcacgccgagtggctgctatcgacatgaccgcacctctctaagtacgccgcccaaccacgctcccacaggctcgagggcgggactaacctatacataaagtaccttagcatcagagcttctacagtaacccgaataccaggtagtgcgcagcagatacaccataccgagtgtactcctacgcacgtcaacgagtgaaacaatctcgtgatgacgagcaaggccgcacgatgcacgactactccatacgactgacctgcggggcccaccacacactaccacaagaatgtcagcgaaagaccacgaggacgggacagtacgccatgatgcaagtacagctacacacgaccctacggacaacatcagaggaaccatgcttcccaagggccaccggccaggcccccccagcagaatacaagtcctgactgtaaaatctagctcttggactataaaaggtaaggacaccctcttttctgaacacacaagcacaccagctagaaacacgctccatagcaatactacgatcaacactacactggactagggtgcaagcctgaaccagtataacataccctcttaaatcattcgcctgagtcccgatggatcaccattcgaagtgagttcgcgctaacttcccctccgaacataaatcttactatcccctggttttcaaaatcacgacaaaggtccaactactcatttcttaccataggtgtgatagtacatgattgcacaccactggttcgccgcattggcgagtgtgatatgccac

SEQ ID NO: 12114 - DNA, 1202 bp, Zea Mays
cggtaggaggcctaaaagaagccaacatctcctagcaaagttgcacctgaagaagagatggataggtgtttcttcaatctggaggatacaattatcgcaggtgtaggagtctaaaggcattgcgcgacgtctgagaatggagcgagtattcaatctatttttgagcagcagccagaagaagactttgtgcttgggctgacatttagacttatataaccaaacaaatagagggagcgtttgacgggtgccagtcaagtgagcataaactgtctgagaggaaaaccgagtggaggaggcactgcatctccaaatatcattgtgatcaagcaactgaatattaccaagggtgtcctgaagtgagagaagttgctcgaacgcttcagcagagagggggatatggaacatttcattcggggaagctaatcgagcttgatggatgttaatttctttgacagaggcaaaagaccagagctccgggaacttttgagataaacattgcccattccatcgatcatgccagagaagcgtagatttaccatttccaatttgcacttgggcaatttccttaaaagaatcatggattttgagaatatctttccaccaaaacgagccaactggtttagttgagggtagagaattgctgtaatgagtgtcccagataatgttaacccatgggatgttgactctattaaagaatttgtggaggcacttcataaggagagctttattctgccacttaaggttgatgactccaagacccccttgaatttttggcctgcaaacagatttccaagcaacttggggaggttttttgcatttatatctgcccctctccagagacaatgccgtcgaagtttatcaatctgtttgatcacagttattgggagcttcagggtgcacatgtaataggttggaagagaagaaaataccgcattgaccatttgtagtctgccagcctgagatagaaaaatagaggttgaagctagtcttctttcaatcttctgaatgagaggaaggaaagcttccaagttgggtttttaagccccaaaggaagacccagatacgtgaagggcaaagccccgaccttgcagtggaatgtatttgctagcaaagccattttttgctccgaaacattgatggggtaaatgttagatttgttataattcacatgaagcactgtagagtcagcaaaagaattaagc

SEQ ID NO: 12115 - DNA, 574 bp, Zea Mays
gcatcagagatccgcccaggaacctccaggagttgtatcagctgttcgaaaaatacgccagatccgaagagctccactagcgcaaagtcgagtctcagaggaaacccaaagaccctccgcagtccagccgtacgtggacgaggccttcgcaggcagactctggtcgggacggccgcagtcagcaacaggtacacaacatcgccaaccagcaccccgctggtgaggcccctcgctgacaagagtatccccccagggccgcggaaacgaaactagtggtcggggccggggacgtgcgcagcagccgcgcagattttactgcttgttctatggcgaagactgcgcgcaccctacaagagactgcccagagacgaaggccaccagagacaggatggcacgggcgcaaccagccgacaaccttagagttgtcgcgcacacatatcaacaactcccccaaccatacaaccacggccccgctcagcatccacctaaccacgcataccaacaccaccaggaggtataaatcgtacctcccccactaccacctccacacccacaatagcaaaacatccaccac

SEQ ID NO: 12116 - DNA, 791 bp, Zea Mays
cccccccggagtcagagggggcagtccgaggcgtgctgtagagcgccgtggcgggagcggaggccagagtggcggagaggcgaagctcctcgagaaggaggtcgttcttcacctccgcaaaggtggcaaacggcttcatgcgggtgaggatgggcgtcacacgatcgaagcggggctcaaaccacgtaggaggttgagcacgaggctctcatcggtgatggaggccccgagggtgcggagagtgtccgccatcgtcttcatctggcggcaggactcgtccacagagagatcgccctgagcaagctggcgaaaggcggtctcgagatacagaatctgggtctggcggttgccgaaaaactgggcctcaagggcaccctagatccggtgagccgtatcgtccgacacacgaacgatgtcctgaagttcgcccgtgagggtgccatggatccaagaaagcaccacctcatccatcaggagccaatcctccgtcgggtcaggaaccggggagagaacgtggtcggcgagggcgtagcgacggagggtctgtaggacctggtcgcaccaccgagggtactaagtggaatccggcgcgagaacgtcggtaacggtggcccggatactggtgagggcggccgcctgagcgtgaagagaagcgcgaagagtggaggcaggagcgggcgcaaactcgaaggtgtcggcgcagtgacgagcagacgtgggagaaccatccgacacgcccttgtcggcgagacggcggtaggtctcggcgtactgacgctcgatggcgtcaa

SEQ ID NO: 12117 - DNA, 719 bp, Zea Mays
ggaaagacaaaaaggtttggatgtgaatggggtgaggtatcctctcagggatccgaaaagcggtcaaggctagtgatccgtcccttcaacccaaatccctcttttccccgtccatcctcttatcctttcaagcaaccggtcttcatccgtccaaccactgcccctactcaaaacattcagccgagtgcccctagtactcgtttcccagccctacccagttcatccaacaactgctacaactgtgggaatctggacatttcatcaaggattgtccctatctgaagcaaaataaatcaaacttccaaaaggcttctggaagcacatctcaaggcaggggaaatgtggcaagcacccaggcgggcaaaggtgaaaggagaactggacgggtctactatactcaaacggctaccacactggaaggagagcctatgatgatgggtacgctttctgttgtcaatcatcccgccgtcattcttttttattctggtgcatcacatactttcatgagcaaagcttttgttagaagcattgcatacctagtgttgaatcaaagaagggtcttattattcaatcacctgggggtcaaatttttactaaggaagtagtcttccacgtacccgtgaaattagccggatatgacttccccaccaatatgatagtttaaaagggcaagatgtagatgtgattctaggcatgaattgtttaacccaaaataaggc

SEQ ID NO: 12118 - DNA, 417 bp, Zea Mays
cggcggcccatttctatacatcttcccagctccttcaccattccagacgagcccccctgctccctctctcttggctttgtccgagcatggcggcgattggtgagcccagggccgcggatcgggtacttataccggcggccatgcctacattggcggcagattctgttgcgcccggagcttcacgcggcggagaagacggacccgcccagagcagtggacgagtacggctgggtcacgcaagggcagaggcgacgcggtgcagatgaagaggagacggggtcgtggaaggtggatcggcctttatcaccccgggtcacggagtcggagttcagctagcgcggaaggtgggcgagatccgccacgcgacacggtctgtttgttggtgccgcgatgaccgggatgacgggcgggacccag

SEQ ID NO: 12119 - DNA, 916 bp, Zea Mays
tgacattttcatcagcatgaaaaaatcaccaattctactcaaatcaacaaatgaaaccaagggtagtgaatttgcatatacaatcccaagctgtcaactgaggctaccgatctaagtacgctcggaatgaggctaccgatgccgaaatggaagccgtacgagagtaggaagctcttgtacagtcgtacaggttctccgcagtgtgaaaaataacatagaagaaaatgaggtcaagaatgctacctagcaatgctagccacttgttcacaggtctattgaagccaagttaccttgtcctgacatgacaaatagctctctccacatccatcataagtaagctcttttgacaattaattgtgcttatgtcacattaaatccatggtgaatcagatttcaggacagacctgcgcaggatagcattactcgagcagcccatgccatgctccttccactgattcccctcctggatgaaccggcagagcttcaccttcctgcacaatcaccaagttagatcaaaacctagccaaagcggatcagagctggggaggattaaagatgaaaatgctacatgtagtagagatataccaactcgtcccctcttttgtccgtcacccaccacgcatcatcgccctcgctcgctccgcgatttcgggcaaaagagaaatatgaatagccaagaaaataagtcgatcggtcgaccctgcaataatgtggtgctcagacccatatgatgatatgaatacagacaaaacatctagatttatatcaaagtgcagaagcagacaacaaggtgtacttacttccataatccataattccatacgaagttgtatgtgcactgaaaggaagaaggttgccccccacataccagttccttgctgatgtcagaagtgacaaaggtaatttatgcatgcac

SEQ ID NO: 12120 - DNA, 349 bp, Zea Mays
caaatgttagcaccctctagaagcctatagaacagggaagagaggaagcagtagagattggagacgtggggaagaagaaggtctcgcgatggcaaccagttgatattccgttcattaattcttcgatgtccctttacaaaaccacgacacatgtttatatcgtcacacggtcggcccaccaggctctacggtcggcccaccaggctctaaatacacgacccaatcggcccacttgctcgccagttgctttgcttcagctgacgcggtctctttcctggctgcttctccgttgagacaagttggcttgatctccatcgttgccgctggtagtattactggctttcggatc

SEQ ID NO: 12121 - DNA, 640 bp, Zea Mays
tggagggttggccgtgtttccctttccttgatttgtgttcccagaagtctgtggaaagttggatttgttctgcttcgggtaggggcagtccttgatgaaatgtccggacttgccacaattgaagaagccactcaaggaactgggaaaggcagggaaacgagcaccaggggcactcgactgattggtctgggcgggggcaggagtgggacgaatgaacacgagttgtctgaagggatatgtgggcagacgaggagaagaacggtttgaattgaaaggtcggattaccaaccttgtcctcttttcaggtccctgagttgatctttcacctgcatatccttttgactttccttgtcccgcatttttggcttcaactgacagtgttgtgctgacaaccctactatatgtgaggtccagacacgtggccatcttgcgctggagtctgtcatttagtcccctcatgaagcaattcttctttttcaagtctatgtccacttgatcaatgacgtattgggagagatgattaaatttgttgagatactgcatcacagaatctcccccttgcttcagacgtataaattcttccagcttcatctgtagtactccttccagaacataatgttccctaaatgccagtttgaac

SEQ ID NO: 12122 - DNA, 799 bp, Zea Mays
cacctgatgcttcgacttgcctaattgcgaccacgccagcctccgttgtcatgcacgcgtcgggcagtttggagtgctcagacccaacaaccggtccagattatggcgtatccacaccaacaaaatcatcttccaacattattgtgagtatgtaacattgattactttttgtcatttgctcctgaactcatgtgttgattagtcttaagattgaattttaaccttgcagtgttcctcgtttattcctgatgttgatccaagtttgaagcccatggtagggatggcatttgacaacatcgcagatgtggagaaattttacaaaggttatgcacatgatggtgggttctcagttcgtattggacaacataagaaggttaatgatgaaattaaaggcaaatatttttattgtgcaagagaagggtatagagtacagaagcgcaaaaaagatattgatcaatctggaaaaaagagaaagaagagacataacgtgatggaaacaaggtgtgggtgtgcggcacacatctatgtgaaccttggtaccgacaagaagtacacgatttcttcaatggttgagcagcataatcatggtcttgtatcgccgctccaccgacattttcttcgatccaaccgtcatgttacagagagggcgaagagtactttgtacaattgccataaagctagtattggcacatcccttgcattcagattgatgcatgttagtgatgggggatttcaaaatgttgggtgtacactgagtgatctcaaaaactattaccgtgacctaaggacaaaaatcaag

SEQ ID NO: 12123 - DNA, 681 bp, Zea Mays
accggattggatcgccagctcagagacctcgccgccggtgaccacgcgcgcggattcgtgctaccgacgtgattcacgctgaattaaacgtggataacgataacggggtgaaagatctcgccgcggatgggctagaatgtactgtgtgcttgatggttcatcagtgcacaccgacgacgtggccgagcggcaatcaccggcgtgttcgctgttcatcgagtggacgccacaccttaggaggtttatcgcgtcagtatgagccgaagtgaccatccaatgaccgtcgtagttcagtcgctctgcggttgccacggtagatcgccgccatgactcattcccctatcggccgccaccgcaattcgtccaaattaagcaacaccactcacggactctataaattgagcacgccatgagctccgtagggtagtcaagcacaaagccaccaagtcgtgccctcaattgatcaccagagctcgccaatttcccatttcccccaaacctgctttccgccaccgtgaaagaggcctcgccgtggccagctcgtctcaggtccgctcataccctctgccctttcgttttagtgttcttttgtgcccctgatgctccccaaccccgctaattagactaagaccccttagatcaccgggaacgcgtatgattgttcgtcgtgccctctgccac

SEQ ID NO: 12124 - DNA, 284 bp, Zea Mays
tgtatacaaagaatggcagctaatctagccttcgaactccggaagcggtctccactttttgcataaccatcactatcactcaggtctgagtctgatgagctcatatcataccaagaatactcactatctgaattttgaccttccagtgaatcattctctcttctctccttgttcctcaaatgaggtggtctatatcgtccacgtgaagctctgggttttgaatctgttctagtttcttttggagctagtgtaggaggtgaagatgacctcagcccatatacgaa

SEQ ID NO: 12125 - DNA, 688 bp, Zea Mays
cgcaagctggggtcacccagaccggcggttcaggcgctgtcgcctaggacgttgtcaagaagaaaaagagaaacaagggtcgcggtcgcgagaatcaacgggttgctgccccggtcgtctctgccgcggctaggggccaaggtaagcgcaacaagagctcacggccccaggaaggcaacagcaacacatgaccggtgcaccccaacagtcgccacagtgtcgctgactgtcgggagattatcaagctagcaaagcacgtcagcaagcggcgcgagcgatcccccagggacggctcgccgcctcgtcgctggcttcacaaggaaggggccgacgataaggctacggctgtgggaggacaggacctcacctaccagtcacccgagaaaaacattagagacattttcaccaaagaaaccgtctccggcaatgacgacgaccgccgcaagaagctgtatgtcatgtacggcggaagctgggagctcgtctcccgcaggagtgtcaagaccctacgatgggaggtcctgttggcagtcccaggaatccccaaagctgccccgcaccaacgatggaggggcaccaccatctctttcggggcactcgactgccccgacaacatggcgggggccggtgtactaccgctcatcaccgcccccactgtcgccaatatgcggctgcatcacgtactaat

SEQ ID NO: 12126 - DNA, 662 bp, Zea Mays
gtcgaaatgaagttgagccggcccagacagcgctttaacctttttctttttcttctcttatttttctttatttccaaattcaatttgaattcaaatttaaattcaaaaggatccgagggcggtggctccgaattttgaaggagaaagctggcgcctggagagaggggtgagtcaccggagtcgcataacttggcatttactggggtagaggcttaagacgatgacgggccacttcacacgacaccttgcaatgaggtaaggctttgaggcacgtagccaggccggataatggtgaactccggtgatgccagcgcgattgaccgcggtgggacacgacggccggtccggccatcgatcggattcaccccgcactggatattttcaccttgccccgacgttatctactcttctcgtggaacgaatctcccaggcggacgcgaattgtggcggtagatcaccggtgttgagctcacgacaccggagatctttatggtcactgtaccatggcgatcttcatcagacattctgacagcgcgatttggagagctttgttctcccatttttatgtaacaactcggtcccttgtctgtatgaatattgttgtccaacgaacctactacaaatttgttataaagatcttactctgttactcactcaattcc

SEQ ID NO: 12127 - DNA, 669 bp, Zea Mays
caagaaccagcgcccgattggaggaagacctcaggacagaatgggagagttcctaaggcttaagcctcccacgttcgctggatctagcaacccgctcaatgctgatgattggctacgcacagtgaagaggaagttagaagccattggatgccctgaaaaccagcgtgttcacttagctacccaccagctcttcgggatggctctatcctggtgggacaccttcagtactacattaagagatgctacctgggcagaatttgaggctgcttttagagagcatcatgtgcccttgggaatcgtctagctcaaggaagaggagtttcgagagttgactcaaggaaggcaatccgtcagtgagtgcatccataaattcacggaatttgctcgttatgcacctgatgacgttagcacagaagccaagaagatggctcgtttcttgaaagggttaagaccagaactcaagactatccttgccagccaagacttccttagtttctcgcacctctcaaacaaggccatccaggtggaaagagcacgagaagaggaaaaaggtcaccttaagagaaagtttcaaattctccaagctcaacagcacgagaagcaccagagggttcgatcttttgggttcccttccaaggggccaaacctcagcaagccagcaggatccgc

SEQ ID NO: 12128 - DNA, 473 bp, Zea Mays
ctgggtagtgagactgactgaacgtaaacttgcacttgcacggatgaagggatcagatcgccagtatcttatcttgttatcgtctaggattgctatagcgatagtataggctagcgagcaaatggccggtgcgctatgatagggaggagtggatggaaggtgcggtcagtgatagcacgaacactgaacaccaatgcgacacgactacccgatgatgcgtacgtccttgccaaacgggtgcaagcaagttctgatggacaggcactagactgatgtcctcatcgcaagcatccgctaccctatctggctatctctcactcagtcatgtaacaccgcttcaagttctgtctcaagagtcaccgagaatgaaatgacggagaattaggcaatcagcgagcgacggcaagatccagtataggataaattccttgctaatcatgactagctaaggattataaatccgctgtttcttt

SEQ ID NO: 12129 - DNA, 275 bp, Zea Mays
tgcgcatagtagtaagctaatgtactccttgatttatgcccatcctcgacgcatctgatgtgttgggatcatcaacccccggctccctcaatgcaatgctgctggtggagtaattgcccctcctgtagtttctgtttgcccgtgtccatctgcatccgagccaaactggtttcctcctggttgatcttcctgcaccattgatacgatctccaagcatggatttgatcgatgaacacttgccagcgttgtgtactctctgatgggctctttacccc

SEQ ID NO: 12130 - DNA, 342 bp, Zea Mays
aggcgtcaaaaggctaatggtatatggcgactcgctagtggtcatcagccaggtaaacaaggactgggactggtcaaccgactcaatgaacaaatactgcgccgcagtgcggaagctggaagataaatttgagggcttggaattccaccacgtggaaagggatcgcaatacaacagcagacacattgtcgaaactagggtccagtcggacctaggttccacctgggattttcatccaagaagtacaacaactgagcgtcattgcagggcatgctgaagaatgcaacgctatagaccaggcagaaacagaccccaatgactggagggagccaattatcaggta

SEQ ID NO: 12131 - DNA, 1124 bp, Zea Mays
gttagaaaagagattgtagggcatcataaaaactggccaacatgagtaagaagtggaattattgtagtaaggagtgaatccatccgtcgataaaccaagatgaacactcctagggtctcttgcaaattctagatcaaaacgatcgagagcctgccaggcctcgccatctgagggatgcaccatgacatctggatcttgaccctgatgatccccttccttatgccacctcatttgctttgctgtctcttgatttagaaagagacgcttaagccgtggagtgataggcatgtaccagagttgcttgatcgacacctttgtcgtaacctcttttccatcctcatctagcaccaccgcctatcttgacttactgcagtggatccaatgtgtggtattttcatgctccttctagaacaacatgcaattgtcctcgcaagcatcaatcttttggtagttcatgccaagaccagcgatgagcttcttgcaatggtacaagtccttcggcatgttatgattcggtgggctgatatcaataatcagtttcacaaaatcgttgtaacagttgttggagaaggtgtactttgtcttcatcgccatgagacgtgttaccacccgcagtacgctcacattggttccttcatacactttagtctctgaggcttcaagaagcttgtagaactctctcacatcctctagaaaagcttgattattctgtagttctgggtactcattcctaatatcatccaacatctcttccattcggtctacatcctggtccccattcgactcaatagtatggtccacctctcctgctcatgccataccagatagttcggcataaagccatgtttgaaaacatgatatgagagctccacttttttcaactgaaccaagttccgacattttatacacgggcacttcgctaaacaagcatcaccagcaaatacgagtgccacgaatttatctgcaactctcacccatgcattagagtgcccatgagtgacactgtcgaatcatcgtacatcgcccttcttcgatcatcactcacattcaaagctaaagaaatagcacatatttaacaacatatggtttggcacatattcaaagctaaagaatgtaacaataac

SEQ ID NO: 12132 - DNA, 542 bp, Zea Mays
ccaagtgattcctgcaattgttcccaaaatcgtgccacaaatggtgctcctcggtctgagactatagtccttggtatcccatgcaaacgaactatctggtcgatgtaaatttccgcatacttctccgtccggtgggtggtatgtactggcaagaaatgagcggtcttggtcaatctgtccacaataacccaaattgaatcatggtgcctggaggtgttgggcaaccccacgataaagtccatgcaaatgtcctcccatttccaagatggtatgggaaggggttctagaggacctgctaccttcaaatgactagctttgatcctttggcaggtgtcacactcggatatatacttggcaatttccctcttcgttctggtccaccagtacaaagatctgagatcatggtacatcttgttgctaccagggtgcatggagaacttggaaaggtgagcttcatccagtatcttctttctgagctcagggtccttgggaacaaccaatcgatttcctttactgtcctgacggaagcacttgtatttttc

SEQ ID NO: 12133 - DNA, 1869 bp, Zea Mays
gagacgacactaaaatcctttagtgtcgatgtttaggtttagggtttagggataggatttaggctctaggtttccataaaatcgtgtgctatagctcacgggtggcaaaaaatgccataacggcctccccggtctaaaacgaaggtggcatgtcgcatacataaaattggctgtttggccacggaaatgtgtgatatagctcgcgggaggccaagaaccgctttaaggtgctccggggacaaaaacacgtgtggcggaacgcggacataaaaatggtcgctgggccatgaaaacgtgtgctatagctcacgggaggccaaaacagacttaccagtctaaatggtcaaatcatgggtggcggacgggaggcacgaaattgctattcgacgacaaaaacatgtgtcacgggaggccctaaaacctaaaccctaaaccctacagctcgtgggaggccaagaacaactttaaggtgctctggggaccaaaacgcgggtggtggaacacgtacttaaaaatggtcgctcgaccatgaaaacgtgtgctatagcttacgggaggccataaacaaccttagcagtctcagtggccaaatcatgggtggcggacgaaaggcatgaaatcgttgtttgacgatgaaaacatgtgtcacgggaggccaaaaatagccttactggcctccggcgaccaaaatgtgtactattgtttggacactaaaattctactatgtcaacaaagttgatatggttgggagactcaaatttcattttaccatggtttcgacactaaaatcctttagtgtcgatgtttaggtttagggtttagggataggatttagggtctaggtttccataaaatcgtgtgctatagctacacggtggcaaaaaatgccataacggcctcctagatataaaacgaaggtggcaggtcggatacataaaattggttgtttggccacggaaatgtgtgatataactcgcgggaggccaagaaccgctttaaggtgctccggggacaaaaacacgtgcggtggaacgcggacataaaaatggtcgctgggccatgaaaacgtgtgctatagctcacgggaggccaaaacagccttaccagtctcaatggtcaaatcatgggtggcggacgggaggcacgaaatcgctgttcgacgacaaaaacatgtgtcacgggacgccctaaaacctaaaccctacagcttgtgggaggccaagaacaactttaaggtgctctggggaccaaaacgctggtggtggaacacgtacttaaaaatagtcgctcgaccatgaaaacatgtgctatagcttacgggaggccataaatagccttagcagtctctgtggccaaatcatgggtggcggacgggaggcatgaaatcgttgtttgacgatgaaaacatgtgttacgggaggccaaaaatagccttaccggcctccggggaccaaaacgtgtactatggtttggacactaaaattctactatgtcagcaaagttgataaggttgagagactccaatttcattttaccatgctttcaacacttagatcctttagtgtcgatgtttaggtttagggtttagggatagggattagggtctaggtttccataaaatcgtgtgctatagctcatgagtggcaaaaaaatgccataacggcctgcccggtctaaaacgaaggtggcaggtcggatacataaaactggcagtttggccacggaaatgtgtgatatagctcgcgggaggccaagaaccgctttaaggtgctccggggacaaaaacacgtgtggaggaacacggacataaaaatggtcgctcggccatgaaaacgtgtgttatagctcacgggaggacaaaacaacctt

SEQ ID NO: 12134 - DNA, 323 bp, Zea Mays
ctcgttctcccttgcgggcagagtagccagaatgattgtcggcggtgctccctggcccctgtttggagcactcgtttctctccgtcgagcgatcagtgtccacaccttagtgggcgaggtggacaacggagttcatcgcgtcggggaggccatggccgatcgagcttcagctaaccggggggtcccgggcttggccttgtgtgggaccacgccctgttgctccaatggcggggttatcgttggtgtagtttgcggtctcccatggcttcctttggcgatcccaagggaggctccctcccgagtggaacttctatgcgatgcag

SEQ ID NO: 12135 - DNA, 445 bp, Zea Mays
aatggattgggcctaccactgttgcttgggtaggaagatgtaccatcaaatgtacattaatggtaaaaatgatggagggaaaataatctctaaaaggctcaagatttcagctatctcagattctatcctttgcatgtcacttattcgaataacaggagagtacaattttctaaagaacgtgcataaacgaatcagcacagcactaacttcttgagggagaactctccgcacagcaagtggtagtaaatcttgtagaagaatgtggttgccgtgagtattaagattaactatctttttttcattgacaagaacattatgtcgtatatcagcggcatatccatcaggaaacttgaccccttttaatacttgacaaaacaatttcttctcaacagagctcattgagtagggtgcaggaggcaaataaaattgattagcttctagttca

SEQ ID NO: 12136 - DNA, 532 bp, Zea Mays
ttgggtccatcccttagctttgaagggcctagatgaagatgctgagtctaacgataacgttagaggtcggctgatgaagatagatttcataattatccaaaacttctccaatcatttcattcagcggaaactgtaatcctgctctgaaaaagcttttgaaaactactacttcgtcatccttcggtgttggagtggtttcttctcctgcaaagcgaatgagcttctttttagcatctccaaagtagcccagtttcatcatcatgggcacgtcggcttcaaacacagtagatttctcaaaatccaagtggctgggttttgatggatcagaatgctaaaatcttcctcttcttcatcagcattctcttcttcaatatcaacctgctcagcttcggtggcagaagtaccttcgtcaagaatcccctctgtcacgactaagcccgattgtctcatgacttcggaaattggggctatctcggtagcttcagtctcctctccttcacgagtcaccctcgcagtcgagcgtactctggcc

SEQ ID NO: 12137 - DNA, 298 bp, Zea Mays
ctatccaagagcgacgacaggtaagaccgattgggtcatctcaccaatcggaggaattagcacatcacaatatccatttaagacccaacgtacctatagggacacctccacccccatacccacctatgccatatcaatatgcgtacctaccaccaccttatatcacaaatcaaatgtggggcatgccaccaaatccatatgggatgccacagtatcccacttggggggcaccccaaacttctgcatttgcatgttggcacctccagtgcaagaccacaagttcatacatgaatcaaac

SEQ ID NO: 12138 - DNA, 1107 bp, Zea Mays
aactactagtacgggtaaaattgcttcctcttttatctgacgcctttcagctgctccggtttttcatattgagagatgtaagatgttcactttttggtcattcagaaagcttatgcatattttcaggtggtgtctgtcttgcacagatatttatcagtattcatctttctttattgatgccgacctcctacccatagccctgtccagagtcctgacccatatactaatcttgcgagagatattaccattacgactttataataatatttacagcacttggatatttcaggtgcctggattttccggtaatttttaggcaacactttcatacaacaaactggtacagataaattattacttcatgatttattatctgtcttcgtatatccttgtctgactatagaaataattgtagattgttaattatcttcgtaccgacgtaaataaaattttgccgggtttatggtcttgcctaacggatactattactacaagatataattattcaaaatgcagggagctgctcagctgcctatctagaagcaatgacacacataacttgttttacgtttcgaccaaagttaacaaaatctagatccctgcctttatttgtaaaaacagaattatgtctgcgaatttaaacagaataaggaacacagcaaacagaatgttacacttactgctgcttctagctcttgccgcgcacgtgtaattcaagagtttacacaaatgaaaactccatatccaattactctaccactaaggtgtcttggatcaactgaacgaaaacaaccaccaaagtttcaccgtttgcacttaattttcttgcattgtcttccttgcgcgaggtttctttttgggcaaatttcagtcgagcggagcggagtgttccttgttatttcggcaggatgtaaaacttctgtgctttgtgtttctgtttgatttgatgtaaaccagtttagccttgctcaaaactgacactgtcttttgttcgttgccatacagggccaaaaagtaaaacagcagttattgccggtaagcactacgccgcatttatctacaaaatgtttggtccgctgttggcttcctgcataaataaaccccctt

SEQ ID NO: 12139 - DNA, 612 bp, Zea Mays
tgatctcactttccctttttttttttgcttgcttaacaaaggcaaaggcgaaagcagatgcagcaaaagccattttatggcacgtaatggatggcatcatagctagcactagcagcaacctccacagtcattactccccagtccccacagccagtcatcagtccccccctggtcctgtgcttgtgctgttgcttcactactccctggccggccggctgtcgtctgggctgctctcaaagttcctgcactgtagtacgtagtgtaccctctacaagggccataactcccatgtctcactactcccacaacacagccaatgcaagagatcgacctgcagcggcagcgccatggcctactacaacgtcctacgataacggatcctccttgatgggtctcatcgtcgtctactcccagtgcctgtgcctctgaaaaactgcgaacctgcaatgcaacgacagagagagagagatagagagagaggctcagagggcaggtgttgtttatgacttatgagcgaagaagcaggcagctggtcgggtcagggcaggcccactgctgcaagcctgcaactggctagtgcagtgtagtcgtgtagagcgagcgccgtagcca

SEQ ID NO: 12140 - DNA, 495 bp, Zea Mays
agcatacatatgcggtaacacaaaatgttgtttctctgactaatttatttgcacaatttttacaaaactactcttttgtcctttcagtcaaacaaggattgtcaaaggatatgtcagtcgaaatttggcaataatatctctagatcagcaagctgaagtctatattagtacatctgatgttacttggagtttttccatagcacatcttcatcattgatctgaagggcactaggctctaggctggcagcaaagtactgcattgtctgcacaggctaacttgcatacatgggccatgtggtatatgaccttagctaagaatatgagcgggagaagaaggaagcagatggaacaaaaggtcatggtcttgttggccctttgcaagctactgcttccgccactccaatggcagtctggcccaactagctcatcatgcgtacctggggccacctagcccgcccaattgaactagacagcacatggctagttggcatccag

SEQ ID NO: 12141 - DNA, 941 bp, Zea Mays
cgcgaacctgaatttatttaacaaaaggcaggcataggcgggggcagcgagaggtgttgcaggagctatctgatagcgcaggggtggtagggagcaggaagaggttggtatcatcatctggagcttaatctctactatctattaagtcaatattgtagatcatggtactagcatgacttcaccctcctcagactccaccggtagatatgtggctcgtcgcagcctctattggtcattccggccttgaggctcaagcatggcggccttacatcggaggcacaagcccaacacaactagcttcagttcggtacacatggtagcatgatagtttgataacacttactaacaacggcatgtagaagtggcagttgagtttaagtgcagaaataaccctagccccagcagtgtgtaattggcatcaagtctcccggccagcgcaatgacttttttattacctctcacttacaagtacagttgtagtaattgttcatgtacacacactcacaccaaaactcacatcaactcacccctaccgtacacaagcagatcatggctccaccctcctcaggcctgcacacgctcgctaacacccgcgtcaccttccgtaccctccgcacgacacaccccagccagcctcccgcttctgtgaacatatctaatcttctctggtttgtgtattgattttattttgtgatttatgaaacttcttttattggtttgaggtaacatggtgtcatttagaaaactaatgcacaaccaaatttatactcctgtaaggtgatttctacagttacactatacaattatatcaagtatagctgccaattggttgaggtgagtgattgacacaagctgcctcccaagccctactccaactgtatcaatctacgctaagcaacaccgtatattactattgctataatgatgtcgtagtttatttc

SEQ ID NO: 12142 - DNA, 548 bp, Zea Mays
agtagcctcagcttctgctatttttcaaagattaacctcggtgccccaaacttgagatcagcgggtagcactgcttccgaaccatagaccataaagaaaggagtgtttccatgcaaggcccggctaggttgagttctcaggctccaaacaacatacgacaactctctgatccactttcctgcgaacttttcattcttgtcgaagactttctttctaagcacctccaatatcatctcattggctctttctacttgcccgttggctcttgggtgcgccaccgaggcatatttgatctgaatgcttttttgttcgtagaaatcgaagaactctgagctcgtgaaattggatcccaggtcggttatgatgctattcggtattccgaacctgaatattatgtccagtatgaattccactgccttagctgaagttagagaagcaatgggtttgaactctatccatttagtgaatttgtcgatagcaaccagtacatgagtgtatcctccttgagctttcttgaagggtccaatcatatccagtccccagcatgc

SEQ ID NO: 12143 - DNA, 394 bp, Zea Mays
gcaagctggagccgaaatgggagggtccattcatcgtcaagtcgaaggcatcccccagcacgtacaggctagtaacgccttccgacgaagacttagagcactcctggaacattgacaacctccggaaattttttgttttaccctcagggcccatgcgcccttgtaaatttagcaaacattattttggcccgcactcttttcctcccggggggtgaggtttttaacgaggcggagctatgtaatataccagcaaagcccccacaaaaacgaaaactcaggtgcaacatgtcgaaaaagaccgctccgacggtcttcggcattcgaccaattcgaagtcaccgcgacaggtagcgtagactaccctcacgtgcaacactctccgcgcaaaagtcgc

SEQ ID NO: 12144 - DNA, 446 bp, Zea Mays
aagcaccggtggaagagcgccgctcccacaaggtcgcgcacctccaacagaggaaaaacaagaccggtagcaccggcccgctagagaggacaaaaggcacaaactctctagcggcaagctcatcggggcagatgatgccaacacaagtcctcccggcaaataccggcgcattccatccaagcaggcggtataccatttcgagcactcactcagtctgggcgcgctcgggatgaagtcacaaggccatggtaaactatggcgacacaaagcaggaaccttgaaggcaaaggggcgcagagagctcgaaggcggaagggcgtcgcgagtgggagagaagcaatacatggcagctactcgaagggtgaacacctttttaaaggcagatttccccgctcgcgccccgaagcgtcacgggcaaggtctccccggatgcacacgagggttcc

SEQ ID NO: 12145 - DNA, 790 bp, Zea Mays
gtcgtggtctcgagcttggcatgagggcggacatgtcacttggacctcctgcgacggatcaggtccatcccgtgtggagtcatcggccagggcaagacggaatcgctcgtcggggcgaacctgccaccgtgtggccgctggtcaccatgggcggggtctgtgctgcatgtgtaccggtaggacatccatcctctagttcttctatgtctcatttatgtatagcagtcataggatcagagtttcgggcttaggttcgatgggtggcgaggtccggccatggcctccaccgtgggcgcaccatctccgccgctctggtggtcgtgaggtggaaggccgcccagggtcgttggatcctcgatgaagggtggaggtgtggcgatagttttggccgttggatcaggattgcgcgatcgcgattagctatagggcgacatctcggccatagttcatcctggtcgtggatcagtcagtggacggcttcgattaaatcgcctggtacccctttgactcattaaatcatagccatagattgtgagataaacggtggatccggtttcattaactcggggccaacagatcttgatccaatgctcctggttacctaccgattcaacttctaatctgggcgcttgatgagtgatcttgcggctcagatcgtccaataccccttcgtcgtgcgcttcttttaaaagagaccctgagaaattgacaaaacaacccgccgtccgtgccctgtgtaaagtatttatatctgtgccctggaaattcataaaacagcccctgaactctg

SEQ ID NO: 12146 - DNA, 409 bp, Zea Mays
ggccaccgtaccgaattgccacggtcgtttcggatgagctcgccggtgacagccgattcacggccttgcgccacgtacctaggcacattcaccgcatcgccgtgactcactttgtctgtctgatcatcaccggtgagggttgccacagtagatgccacgaatcccttgcgccagtgacctcccactcctccgaccgccgcgcgtcgtcgtttgattcaatggccaccgctcttgccttctataaattgagcacatcgtctggtccgtaggataatcacgcactaagccaccaagtattgcctccaatcgtatacccaagagctctaattttggatttcccccaaactgagtttccgccaccgtagagacaccttcaccgcgaccaacttattccaggttcgttcaagcg

SEQ ID NO: 12147 - DNA, 795 bp, Zea Mays
cccacaccgagccgatggccatcacgactgggcaagaatttggtgaagaggtggagattcagaaacctgaaggtgcccgcccaaagcgttcgcgccgagtgaaccgcccgactacacctatcgaggagaaaaagaaaaagaggcgacttcggtgactctcgtgcttggatcaggatgccggtccttctataccgatccctagcgatgtcccggcagacgccattcccaaggttgatgccaaaggctgtgataatgcgcaggctactggcggcatgtttgatgagaatgaagagaaagaagaagaagaagaagaaatcccactgatccgcaagaacaaccgttactatagaagcagcgagggggtagcgatattccctctccagctctgtcggcacttgtcagtcttcaggggctttcaaaattagattttgatcaagcgctggaggaggtcattcctgaagacatactatcggagcctcctgaagctgatatccctgtcgtctgttcagaggtcccagatggtgggctttcattgtttgattctgccgggcaagaggtaacccgagtggtgtcccgcacatcgtcgaccttggagggcggtcttccatgcaaagacactgatccgagttacccgactcccatggaggtggctgaggggccttcagccttagatgtggctgctgcagaagacccagcccccgagggtgttgctggtagcgatccagcccctatgggtagtgcaagctgtaatctagcccccgaggatgttgaggcatgctctctctctaatgcttc

SEQ ID NO: 12148 - DNA, 778 bp, Zea Mays
tgccgacatagcacaaagcaacacccatgcggtccagatctgcaatcaaaggcatggccacttttggaacaccggtcctgctaagggcatcaaccaccacatttgccttccctgggtgatattgaattgatagatcataatcctttatcaactcaagccaccgacgctgcctcaatttcagctctttctgagtgaaaatatacttgagactcttatgatgggtgtaaatgtctcaagattcaccatagagataatgcctccacgaatttagggcaaagacaacagcggccaactcgaggtcatgagtaggataattcccctcatgcttcttcaactgcctcgagccataagcaatcactctgccttcctgcatcaacacacaaccaaggccaatacgagaaacatccatataaactgtgaaacgcttaccactctcaggcaaggctaagataggagcattcaccaacttgttcttcaatgcctgataactgacctcgcaatcgttggaccagacgaaaagaacacccttctccaagagtctagtcaatggcttagtaatgctggaaaaatttggcacgaaacgccgataatatccggcaagccccaagaaacttcggatttctgagacactagagggtctcttccactccacacaacattggcattcttggggtcaaccataatgccatgctgattaatcacatgacccaagaaagcaacttcagacaaccaaaaggcacacttcttcaatttgccatagaattgattcttcctaaga

SEQ ID NO: 12149 - DNA, 415 bp, Zea Mays
aaccgctccaatctctgaagtgatgcaacggtcagggctcgtagtatcggaggatgcacctgccgctgaagctgagcaggttgatgctgaggaaattaaatctgaagatgattacagcgccgtgccatctaaacccagccacctggagtttgggaaatccaccattaccgaaggtgatatgtctaagctgatgaagttaggctatttcagtgaagcaagagagagctggtttgttttggcggagaggaaattactccgaagccggaaaaagatgaggtggtagtgttcaaagctgttttaaagcaggattaagatttcctttgaatgggatgattgctgatgttttgaagaagtttgggatttatcttcatcaactaactcctaacgccatcgttaggcttagtgtctacatctg

SEQ ID NO: 12150 - DNA, 483 bp, Zea Mays
gaaatctggggctttacccaaactaatctgagtcttaatttccttaatcttctcatctgattcttgccctttatgaatttcttgctccaatgtagattccacttccatgattgttgcctctatattattaaccataccaacgttaagttgttccgtctcccaacataactcttgctgcaacagatatgcactaacactattcacttgacctttacggctcaaagcatctaccatgatgttcacttttcctggatgatattggtccaaatcataatcttttattaactcaagccatctttgatgttttagattgagttccttctgagtgaatatgtattttaaacttttgtgatcagtgaagattttgcacttatttccaatcatgcagtgcctccaaatcttcaaagcgtgaaatatctggcattaccaaaactggtgcagtggttagcgtttccttgagttcttaaaaacatttctcacaag

SEQ ID NO: 12151 - DNA, 829 bp, Zea Mays
gccccctcccctttctgtttatttacaacccgagatccccgaccgtgggcggcggagcagcgactccggtgagtccataccggccggaaaacacaacgactatgcttctctgttgcacaacacctaattctacccctaacaaccatttcccctcactcaattgcaaggttctagctcacaatcactcttgtccacggtgacggcgcaaaccgacgataatccaagatgttcccggtgatctagcgtgatctagttcaattggccaggttgctaagcatctacagcacacagggatgttgaaacaagagcgaggaaggcatgatcggacctgtggagagctagccacggtgagctcactcacagcggagttttgactaaattgggggaactttgaaattggagcactctggtggacgatctgaggcacgggctggtgcgttgggcgcatgactacctagcggatctcacggcatgctcaatttataaggccaaagggcggtggctcatgtatttggaatggcgcgctggcggccagagagaggggagagcactagcgcaagagatgtgtggctttcaccgtggtctaaccaccggcgatgaccggacatgctagagcgagtcactgcgatgaagtactatgtctaggcacgtggcatccgagcggcaggcggctaactccggtgagcttatctgaaccgaccgtgagtcaagcggatacggcggccgggacggaacagtgcctcaagctcacccgcggtgaagatcttttcaccccgaggcgttatccaggcaccagtgagcacgaatcacctcagcagcgcgaatctag

SEQ ID NO: 12152 - DNA, 1522 bp, Zea Mays
ccagagtcaacagcttttatttccctaagtgtagcatctggggacatcaatggcttgataaaaaattgggcaaacctaagattagatggcacaagcataagtgaaatttctcacaaggaaaataaggttaaaaaataaagaatgcaacaggacgtacctatctaaagcatcgtgcaggctatcactgttcacatcaaaatagaagtttgtgtgttcagaagatgtgaaagcattcgttgaaccaccatgctacaagaaaacacccattatccaagcactttaccataagcaacacatagcgacataaatttagtgtagaataaaatgcatgggtagtccctaaacttgtcctagggtaccaaccagatccccgaactctaaaaaggtatttttagagtccctcaaaatatcattgccaggttccaaacttatcatatggtgtcatccaggtccaaacaaaggtggtcccacatgtaagcctctaccgtccacctccatgctcacacatctctttccctcttcctctctccacactccaagcggcactgcatccccatccaaacttctgccttcatcatcatccacatcgaaggtcacaacatccacagtagtgaaggtggctaggccgaacacctaggcggatggctgctttgctagtgagttctcaccgcagtcaataatgaggtgtggaccaaacctccatggcatacaactcagggcatggagatgatcagggcccatttggacctagacaacatactatggcaagttaggtgacctagatgacactcatgacaccacgagacaagtccgacctaacaatggcatgttaagagcttgggcccttatattggcatgatatattatcatcttttggtcttaataatatcagtcctaagagaagggatacttgttttgtggactggtggaggaaagctcctcacagggtccataaaaacaagagaaaggggttcagtagtattatcattcttggagcctggaacatttggaggcatagaaataagtgtgtttttgaggggaagcatcctcgcttttcttctctggaaggaggatatagggatgagctccatctatggcgcttggcaggggctaaatacttaagagccatgtttgatcctggttagatttgaggatctctcttcttctgcaccgcttgtgtgcgtctgcggtgtgctggtggcctggagtgtgtgcaggcctagtatcttttgggtgtgtgtgtgtgtgtttgcgggtgtgtgtgttggttttcctttttgtatgattctggccatgtgcctttttttcttctcctattaatacaaagatatgcagctctcctacgtattcgagaagaaaaaaagagcttgggccctagaagacactcaaggacaagtttaggaacctaaaaataaacttatgggtgttcagggacctaaatgaaacccaggacaagttcaaggactgctcatgtattttacttttgagtgtatgaaatctgcaagcgcaccatgatagtata

SEQ ID NO: 12153 - DNA, 386 bp, Zea Mays
ccgcgatagggggccgatggccaagatgactccactgctgcctcagggacgcacttgtctacgtgtcggtcagcatgtgaatgactgcaagatccatgacaaccatcgccaccacatgactagcaccacaatggcgcatgtgatgcttgaccaagggctcgacacatgttcagggtatcagctttcaccctgattgcgtgcagtctagtggccacctaatttcaaggtctccaacatcgacaagtacgagaccaagctcgaccctaggggctagctgggcgtttactcgacatcggctcaagtgccagggccactgaagacgtcatggcggcgtatctcccaatcatgcttaggcaggatgcactccagtggctctatcatctccc

SEQ ID NO: 12154 - DNA, 663 bp, Zea Mays
gagatgcaccagaatcaaacagaattaaagcaggttgattaaaaactgaaaagatatcggtcatgatggaggctccctcaggtaactcctctagagtagtgaagttgagcttcccttgcctgacttgcaccttctgcttttaagaatagtggcaccttcccttgcctgattgaggctccctcaggtaactttgtttttaagaatattcatcctttgaaggatagggcatacccagcttacttgtatagtggcattactgactcgactcgggttaccaacaggaaaattcctactgaggatctggtgagccaactagacatgatcctgaggggaaagtatcaaatgttggtgctcctgttgcctactttgcttggaatctgccacctcctaggtcctttttcaatttcatgtccaaccctcctgctggtgatagtggtctgggtcttagagtgtgaccctctcctgaagacattgaggctctggttgctactctttgtgatcttcccaatgatgagaggcaagttcattttgagatgccgacgagtccagatgatgaagaaatagatgttgtactcattatgttggctggagaatcttctgactcggcccatgctgaaccaatggctgttacggttgtacaagagcttaacaaaacaatggaca

SEQ ID NO: 12155 - DNA, 291 bp, Zea Mays
gagccacggcgaccgccggtgggatatctccggccatgcacgactgagctcgcgggatggtgccacgtccaaagttacttctctacgatcaaatccccaccgattcatccgagctcatccgattcaacagtgcccagatctttgtttcagatatttcagtgcactggatcttcaaagtttgtctgaactgacccccttccatccactcaatctcttgattcttgttaaggacagagcaaacttcattaataaagtttgttcacctatcaaccgtcttcaaacttactatag

SEQ ID NO: 12156 - DNA, 466 bp, Zea Mays
ttcacgtcgccgatgacccgataaggccgccaggtaaaagccatgccctagggataactccggtgactcaccgtcgtacttcccccctgctttgcggcttgagcagataagctcgccggtgaacccccgccttccggccatgtgccacgtacttgagccctccaccgcatcaccgtgaacccttgtgcctctccgtggcttgtcggagtgactgccacggtagatgccacagattcacgcgcgccagtgctcttcttcttcctctggccgccgcgcgtcaccgctaaaattctcggccgccgctctttctccctataaattgagccccccgccagccccgcaaggtcattacccacctagccaccggaaatcgctagcaatcgttcatcagagagcttgaattttagtcttcccccaaatcaagtttccgccaccgtagaaccgagctcgtcgcggccagcgtgaa

SEQ ID NO: 12157 - DNA, 756 bp, Zea Mays
ctaagagggaactgagtcctcttaaacttgaaaagaaagatctcatcatcagaaggacataaaggaatgcgtggtagaaaaactctcttccctacatgttgtcctaaaacaatcttggcatcaattgtatttctgtgaaaatcacgaattattaatcttgtgccattgcacaaaccgttgggaggatcaagatttcggagcaaaatcactggacagttgacctttagtttaaggatgtgcggaggcagtccactcggtgtgagagagtttaagaactcaggaggatagttgttgttaggatcatcaacagcaacatcgaaactatggtaaaccatctcttgccctaagaagcgatcgatgaacctcatatttatcttgtcaacattttcattttttgttgacaagatcgctcgagatgtgatgtaatctcgattatgcatgttcgtctctagcgatggaaatatttcttcaattaatctatcaacatcatcatcttcaccggtgtaaggaatgcatatctcgtcaggtaatctcacattatcatcgttgcatgtctcttcgatcccattaccaatacatagtagatagtctgaaaaccattgatctgactgtgccctcatgttgcgcacaagtctaagatgttgcatgctatcccatagagaagatctacgcaacattgagtttatgatttgggcccttgtaccttttcgtacaaccggaaggacctgtctaaagtcgccaccaaataccactgtt

SEQ ID NO: 12158 - DNA, 926 bp, Zea Mays
gccgatggaagccaccgctggctccagctagggcagcttggtttatcttaagtacacttttcgattcagaaaccaatttgatgagccaaatgatgattggttggacgctatagaggcaacaagtgatgaactacttggagcatactaagggtagaagatgaagctatgatggctaccttcggcgctcacggaaaaaagaggttgaatagagttttcgatgttattgggttcgtttacccagactactgctatcccgtacaaaagcaagggagaaaaaggaaagtcgttgcttcgacatctattagtgcgccgaaaacaaagaaaatcaagatcttaacacgtagactgaggcgcatcaagacggccgatgtgccgaagctaattgaaagggcgaaaactgccccctagtcacagagactactcctgctatgcctgccgaagccattgcagtcccagccagagagacagaatcggtaaaggtaacagaaaaggtaccagaatagcataagatgatggtgacagcgctgccgaagctgtcagctactacaggaattccgaggaagaggaggatgtctagtcttttggaagctgttttagaatccgtgaaaatgccgcctccttcttctgccgaagctcctggcggcaaaactgaagatgccacagagatgatcactaccagtacttttgcacatgccgaggtgggaccttcggaaactacaccagaaaatcttgtggaagagagccttccagagaaatcctcggcacctgctcccgaagcaccttccaagagtgatttgaattttattgtgcgacatgcttcgagaaaacaactatcagcagagcagattgacgaaactgaacattatgctaaggagatgaagtacccccggggatccttggtatatggaggagataacgatgatgat

SEQ ID NO: 12159 - DNA, 770 bp, Zea Mays
gaattatttacttttaaatatggttattcacatgtcccaaggagtagagggaaaacatggaaggagatcaactttcttcaaaattttacaaattgggtattacaccgacacgaaaatgaaataaggcaccgggaggaatacgaccgagatcatggtgtaccgacacacatccgcgcaacccagatcgagtcagcagcagcctctaccaccagtccggtccggggacggtcgaggcgacctaatactcgctcccctccccgggatcgacgccgtgatcatcgacaagaggatacgtgcggggtctccacactcaacccacgcctctgggccatccaatggcctcccgatttcaaagtctccaatgacgacaaatatgaacgcaagcaggacccactgagttggttggccatctacacaaccgcggcctgggctgctagggcaacagaggacatcatgacagtgtacttgcccatcgttctggggtaggacacactataatggctccgacatctgcctcaacactgcatcgacgattggggagatttcagtcatcggtttatcgtgaacttccagtccctctccgataaactggcgcagccgtgggatctcaaatccattaggtgacacaatgatgaaactctttgttcgttcctcaagaggtttcaaacaatgaggaactgtatccccaaggtcgctgaggcggctgtgatcgaagacttctataggggatccaacgatctggctttcgtccaagccataattcaaaaagc

SEQ ID NO: 12160 - DNA, 445 bp, Zea Mays
caaggccgggcaacaccagcgaggttggggaatggcgccgccgtgtggagacctggccaccgcgcgttggggaattaggcgagggggagagtctcctgtccgttcgtccaggatcgaacgacgtggattagatgcagctcgacggtaggctgttttgctctacttcgttggatggggatcaagtgtatgaggagccgtgctggattatgtgtgaccggttccgtccaaatccaatcggatggatcagatgattctgagtaaaaacaagatctgcgccgtcaattttagatctggtggccaggaacgcgtaccgttcgatatcaacctagatctaatctgggccaaccattcctaatcgggcggtccggattggccgataccctttcgtccaggcacttatacagaagaaaccctagatttgtagaatatcaacccgccgtccata

SEQ ID NO: 12161 - DNA, 730 bp, Zea Mays
gtcggatgtctcgtcggatctcggtggcatccgagcggggcccgtggagcgtgacatcgagcaggtgcatgccgctaacccttctctgggtggatcgatttttcctccccagtccctggttccactgcgtgtgcaactgagatgaggattggtagatcatcatctaccacttacgtctcctcccgcgtggcgcggatcgatttcccttcccacgagtggattgaaagatcatctatcacctacgtgctctccgcccgcggaacttcgtgcgagctcgtgctctttgtgcgccgacctgaaatggtgcttgattacgacggaattcatgggcgttgtgctgtttttcttcttcttatgtgctacaatggagctcagtctggatattccaggccgctattcccctttctctactgaaattccgggagctagaatgggtgtttagagatcaagctgggactattatacttcccattccctgttttctagagctgaggggatcagtcatcagtgggatgctttggtgaacagaagattcattctgggagcaagggctcttagttgatagtttagttctttcacttgcactctcgtgtgttctcttgatgtgttggctttggtgttgtgcttgttcattctgttctagctgctacatgacactgaaattgggcgagatttgatggatgtcgcattgggtttcatggatttgtgaagaattgtatgaggatgattg

SEQ ID NO: 12162 - DNA, 489 bp, Zea Mays
gggatattgaagggcgcccaagtggttgctagagcacctcaaaggcgtttccgacacattggagcatggggaaggaccaaggcgatcgaaattacctcgcggccaacgatacgggtaaggagtgcatcagatagttcacggttgtcttggctgcattcgttaccggtcgttgtgcatggaggtgctgggatggctagatcggggttacgcctgttagcgtccaccgtggcgaggaggcgccgtcctgttttgttggtgaaaggagaagaacgactgtgcgttgttacattagacacatgtggttcaaattagaggaactttgtgaccttcaattttcttgcatatgagaatcccggtgtttggtttgctgttagtccatctctgacgcgaggtaagagaacgcctaacaaggggtccctgctgttagccacattcgagtgtggtgtgggtgcgaggaaacgtgcaggtgaggacgcgcctaaggatgag

SEQ ID NO: 12163 - DNA, 684 bp, Zea Mays
tggtgtggatgcttcctctgtttctccagtgtcttctctgcaagactggattcaggaaaaagggctgatgactgaccttatcaagcaacatttagcccgggctcagcgtcgtatgaaaacacaggctgacaaaaaacgttctgagcgatcctttgaagtgggtgagatggtgtatttgaaactgcaaccgtatgtccaatcttctcttgcaccgcgcgccaatcaaaagttggcgttccgtttctttggccctttccagattctatgcaaagttggcactgtggcttacaagctggctctaccttcctcatcggctattcatcccgtatttcatgtctcacaattaaagcgggccgttccagcatccactcctcttgctcagctaccagtcagattggagggtcttcaagtgccagaaaggattcttcgccgtcgactggattcagctggttctcttcagattttggtcaaatggtctggtatgcctacatccttggcgatatgggaagattatacagctcttcatcaggcatttccaggtgcgcctgcttggggtcaagcaggtttccttccagggggaatgtcagcactaccattactacactgggtgatcaaatgtcaaaggaagcaagctgtcaggctcctgcggacaaggaagatggtggaaagactacagaaccaaag

SEQ ID NO: 12164 - DNA, 419 bp, Zea Mays
gtcggcctcctcctcggtctcaccacgatcgcaatggtgtcctccttccacaggattcataatgggtgcaatgggtcaacataaagaacggatctacacatgtgaaacgatgaatccaaacatatcacattctattggaaatggggataagaactcttacgaattagcgacggatagggagtaaccgacgacgttgggtgagaagcgacgacgtatggcggaggcggcaaatggtgggggcggcaacagatctaggaattcctccttcgcggtttccactctcgcagtacactagtggcggggtgcaggggtggaaccgtcgaatggaggtatcggggcaggttttataagcagccaagcctaggcccacctatacttgaggtggcgcggctaaacctaatcatatcgttggaccggct

SEQ ID NO: 12165 - DNA, 442 bp, Zea Mays
tgcgacggttcgctctttccgcacccgggatctggcacccaaggagtatgacccgtgggcctaggcccccgtgtcatagactgggttgttgtctcttgcggcggagatgaagaggcgcgctaccgcgtgcggcggttcgctctacaggcttgcgcggtagttcgctttttccgcacccaaagttcagcgcacaatccgtatgacttgtggacccgggcccccgtgtcatagactgggttaccttggtgcgcgtcgggcgagattttctgcggcgattgaggggcgcacgaaagggttttcctaacaaggactcaggtttccttgaaaaaggaattcaccccacgagcaacagttaccttttcgcattctcttccaatcgattgcgccctttcgccttcatgctccttcgttccacgcccgcgccgctggttgtgcccttttg

SEQ ID NO: 12166 - DNA, 595 bp, Zea Mays
gttgccacacaaaaattggagaaccaaggcctttgatctgctctgtcaggtgctctgaatggcgttctgatggtacagtagactgaaaaagatcttcaggtgcatcacccctcgccgccggtgacccacacgctcggattcgcgctggcgccacgattcatgcccagtaacgcgcagataacggctcctggtgaaaagatattcgccggggatgaacttggggcactgtttcgctctatcacctcatccacttgccggcgacgtggccgagcagccgtcgtcgaggtgtacgtcgttcgccgtgatcatgccacaccatgaccctttcaccacgtcgttgccagccgtaatagctcaccagtcaccaccatagcttcttacccagtgaccgccacggtagatcgccgcgatgactcacccctctctctcggccgccagcgcaatttcttcaaattgggcgccaccgctgatggacactataaatcaatgccctagtgagttctgctaggtattcacgcacccagcacactagctctcaccgctgatcacccaccagagcctctcaatttcacgtttcccccaaattcgttttccg

SEQ ID NO: 12167 - DNA, 1355 bp, Zea Mays
caaaaattctcccatcctgtcctgtggccttccaccacctgggcgctggttttccagacttctagtgaggacttcaatgagtcgggtttgattggctagaacttgggctaggtctagtggtagatccggaggtgcgaggaggtgggtctcactcccttctccgccagcttctccttcggctctcagagggcaacctgctccgatcccggaggtggtaggcgtggttttatccgaagccatctgccatgggaagagagtcactatcatgcacatgccatttttttaactagttattttattcattacatcaagccattacataatacagcacacagctaccataagctcattacacacgagtgctatctagggcactcccgaactccttctctaaagtgtccccaaattccttgagaagatcatcaaggctggctagggacatctcctcggtgtcggacgagttccttaacccggcagggggtagggttggaggggcttcttccttctgctcagtctgacatccttggcttttggtcttcttgcggatttttcttgcaggggcgagcttctttagtttcttgtcatagtccatctttagggtgcggtaggcctcacgggtattggtttcctcgccttctgctattgcgaggctctcttgaagggacgccttttcccttgaaagttccctgactttttgctccaggctttccacccgggaggttaggtgggtgcagtggagggtgaggtcatcatattggttatcaagggtgtgaaggtatccagccatgtagacgatggtgggatcatcctcaataggatctcctcctgacagggcctgaagtcttttcctctaggtgggggtattcttgttgctgggtggaaagtagcgaaggggggtttcaaagatcaccttgttgtagttctggcatagttgtcagagggctgttcgggcaacattctggcaagtatctggaaagcggtatccggtaaaagtgacttggaaagaaggatggttcggatagtttcggctttctcccaagtagactgccatagagcatttctccattccgctctcgagatactccttccagacgtattccggcttcttgtggattcccatgcggagcgcacagcttcgcaacagatgtgggaacccttccacctctgagcagtaggatgtcctaatggccagatagacttccatctggaataggaaaagaagggtctgttaaaatcggggatgaggagagaagacttttcttggggaaagaggtattttctttttagggcaagttttagggtcagggctgcaaacctacggccagtcctacggctctgataccacctgaagcgtc

SEQ ID NO: 12168 - DNA, 294 bp, Zea Mays
ataaagtggtcctgcttcctctcatcttcagtaacttcatcaggtgcatatctggatagctggatgaatctgtcgcggtactcggtgactgacatgctcccctgcttcagcgatagaaactctttcttcttaatcttcatcagtctagctggtatatgatagctcctgaactaagtagcaaactccgcccatgtaatagtatcagcagcatcgtgggcagcaatgtaagaatcccaccaatcagcaacaggacctgtcagacgactagaagaatatagaaccttctcccggaga

SEQ ID NO: 12169 - DNA, 715 bp, Zea Mays
aatgactaaaggtattcatccggatcctgagtgcactgaaataaggcttgtgtagtgttgggcttcgactggaaaccttggaagctagtgagaagcatttctttgggcttcggccacgaagtgatagtccttgtccaaagagatgagtaccacgtctgggccacacttctgatcgccatgacgaaggacttcgccatgactactaagttgccaccatatgaggatatggtagcttcgtagatcattaggaactgctttaggtcagacaatccatcattcataggaaatgtaggcggcctatacaaaggtgtccaaggtgtggcttgctgctctggtgtaagtggtgaagcttcatcatacaacaaatcatgtatgttaaactcttccaaacaaaggctatcatgttcttggttcttgttgtactggttgtcatgcgcttcgatgttgctcatcccttcggctgcttcgtcgatcttcttctggagcttagagagccaaaacattgtctccttgcgcgtctcgatttgttgatgtgtcactttgaggttgttgatctcctcatcaagttcctcttctcccggctctaggctactggtcttcctcttttggttccttgcctccctaatgagagctttgtctccttgattaggtattacttctccaaagtattagcttgagcacaaagaaactgatgagtgatgaaggtaaaatagag

SEQ ID NO: 12170 - DNA, 1083 bp, Zea Mays
attttagatacacagttcatacaaagttgctatcttttattcatccattgatgttttccacatgtgagcagtgaagcttgggattggcggtttcagcatgggcgccgccgttgcccttcactcagcagcatgctatgctcatggcaaattcacaagtggcattccctatccaatcgcactcaacgcagtcatcagtttgagtggctggctcccttgctcaaggtctaactttgacatcctctccatagatcatctgtgtcataaaacttgctacgttactaatacttttcatggatcctaatgttaactcttgatatttgcaggaccctgaggagcaagatggagggttcacatattgctgtaagaagggctggctccttgcccatcctgcttagtcatggaagaggtgatgatgatgctgattcaaaagaaaaagaaattcagtacatgctactactagacagtaagtttcctttttttctctaaatgacgtgtgttttttgcagtggatgaagttgtcgtctacagggatggcgagagatcagctgaggttctgaggaactcaggattctcatttctgactttcaagccctacaacgggtacagatgaggttctgagagtttcaatttcctctcctcccccagacaaccagattgattaggtgacttgtgacaacgcaggttgggccattatacgatccctgaagaactggacgacctctgcaagtggcttagttcgtcgcttggcctcggccgatctcgctaaaagaatagttttttttttttggcgtatgcgcaatgggtttggtgacagcatatattttgaggggaggtttggtttgatagcttgtaaaacacttgatgctagctgctctcttcgcatgtggcttttgtttccgtcgtcctaatttacgtactctatgtctctatgtaatgcggtactttgttgtctgatgtttgctaataaaaagaaaatgccgttgaggcctctgatcaatggaaacagcatttgtactgtatccaggcagcaaaacaacatttgtactcatcactgcagaaaacagaaaatctggagaggtcctg

SEQ ID NO: 12171 - DNA, 438 bp, Zea Mays
acgccagcgttatgagcaggtgtttgctccgccgcgggacgtctggaggtagaagggaggcctctgacagttaaatcaactatcgaacccatggtgggcggacctctgtttcaatccggtcagtggcgtggtcagtacgggagtcctcgactcgcgtgctcgccggcgagctatgccacgcggggcggccgactttgttatgttcgaggtctggcaattgaagacgatggatattcaccgttggatccgcgatgaaggattgaggtaaggggagttgtatcggtcgtacatcggaaatccaatggctagagcggtttaatgcgggggagaggtttctgaccgtagatttcggatcggttggtcgccagcgcataccagttggggcaactaaggatctaatcagaaccatcggttttgaatctgacggctcagcccgtc

SEQ ID NO: 12172 - DNA, 295 bp, Zea Mays
gacattctggcttcccagtgacgtatgctcgggtcaaacagttgttctattggccacatatgaagcaacatattcgagatttcgtggctgcatgtgttgtgtgtcaccaggcaaaacctgatcggtctcgttatcctggtctgttacagccactgcccgtacccaactatgcgtggcaagcgatttctctggattttattgaggggctgccgcagtcaggccactacaactccattctggtggtcgttgacagactcactaaatatggacatttcattccattgcggcacccatt

SEQ ID NO: 12173 - DNA, 831 bp, Zea Mays
gccctgacaagcaaaggatgggttaagacccgtcggcatgataaatagactaatggaaaaaaggggttacactcacttggggccctggactttccagcgaccctggaagcagggcgaccgctgctgttgctactactgttgttgttgctactgctagtgcccctggaggagatcacccctaggtggtggcggcggtgggaccaatggtggtggtggttgtggtggcggcggacccggtggtggtggtggcgtaggactgacacgcctctgcacgccctgggcctaggagccggcctccttggccccaccagcagtcctctaacgcttctagggggtccgaaacaaatgacccgtcagcgcgctcagccggcgtcgcctctcttcctccgaccccccccccccccccggtgccacctagggcggaggaactgcttgcagcccattgcccttgtccaaggggtgggggctgcagcgggggtgctaggagccacggcggggcactaggagccacgccagcaagaagggggcctccagccggtgcatcggagatccggatcccacggtgggggtcccggccgccggtctggtgaaccgccacgccgctctcgtcgagggtcggcagcgtggccaagatcgccgtcctcaaccctaggtcgtcgcagagtgcagggatgccctgggggaggattaaggactcagggacaaaggactcaccattaatccccttcaccagaagttccagctcctcctaggaaaagtcggtccccagcctgcgctagatccggttgatgtcgttcgggccggtgaaccagcaacataggtgtgccctcc

SEQ ID NO: 12174 - DNA, 670 bp, Zea Mays
caggacacgattctagcgcgtaaactctcagagtatcggtgttacatgcgaaggagacgatggcgaactcaagagaggggcacttaccgactgtggtgatagagacgaggtcagccacgacgattggcggcacccgagctacggcgagcaattcaccgagacttggctacgccccaagttccgatgcccactgtaaagtctccacgaagctcgagggatgttcttaaacccgaaagcgagaacgcgacgaccgtgtaagcttgattaccctacggcggatctatggtggcggcggcgctctcgagggttgatggaggatggctcaggggagatgccagggcttatatacaaggggtgatcccgcagcccgcccttcaacaacccgagcattgcgcgagagatacggaaaatccgttgggattgggggcgcgacatacggagtttgagccatgaatacacgcgttcggttgggtttgacggaaggaagaagatacaccggacagacggggcccacatgtaagcgccacaaacgaaaaagaaaaggggagagcgtggagtgggctggtgcgggtgaaaagtaagtgggccggcgggcgcgacttagccgataggtgggccgagcagaggaagaaatcggcccaggagctggaaactattttctttttgtttt

SEQ ID NO: 12175 - DNA, 879 bp, Zea Mays
caaggggttgactcacctgaaggttggagaggaatgagggcagacccaaagcaaaagaagttacgtcatgacttgacgagggaagaccaacaggaacaatctaaagggtatcatcaagggtgatccccgccccaccgacagacagtagtttcctcgcatctaggtcgccgacctctaaggcgactggttcgttcaaagtcggggaagcatgcaccgtcatcaccccctcagactggggcggggatgacccgatgtgaacatccatggaggtatgggagagagagtccacctgaacaccctcgggggctgggttgcagctcgcactacccaccagagccggatcactaccggcaacaccctcgggggctgggtgactaccagcaccaccctcgaaggctgggtcttccgtggtggccgtctctaaggctgagggctcctccgtaacctccataggaatcgggtaactcgaaccagcattctagcattgaagactaccctccaaagtcgacgatgcgcgagacaccgctcgggatacctccagtccaccatctagaacctctggacgaacatccatcacaccatcggcggttagctctgacagcatatcctcggggacgacgtcctcaagtgcttggtcgaagtctgatattgatagtccctgaagactgacaagagttgatagagctggagaaggaatatcacctcctccctcgctacctctatagtgcctgatgttctttcggatcagcgggacttcttcctcttcctcctcttcatcttcatcaaaaacgaaaacagtagttggcgcatgatcacaacccttggcatcaactttaggaagggcctccaccggtgtctcatccggaatcggcgctgaag

SEQ ID NO: 12176 - DNA, 551 bp, Zea Mays
cagcaaactatttgggtatgacatggaggtggatataggccagggaagatgaacggaacggctgacgccttatcaagaagggatgaagaaccagcagcagcagtgaatctgttgtccaccccaactctagaagtctttgatacactcaggaaggaagcattgatagatccacaagtccaggaactaaagacacatttggcggcaggaactgcaggagaaggatgggctgaaagagatggattgttggtatgccggggcagagtcttcgttacagataattcaagtgtgtgggatcagttgctgatagctgcccatgcagcaagtcatgagggagtagagaagaccttgcatagatggaggagctcattccacaatacccatatcaggagacgggtacaaaaatttgttcggggctgtgcagtctgccaaagaaataagtccaaacatcttcaccctgctgggctattacagccaccgccagttccctctgaagtatggagtgatatctccatggacttcggggaagggtttccaaaggtggggggtaaatc

SEQ ID NO: 12177 - DNA, 691 bp, Zea Mays
ctagacatacccaagtagttaatccattctacatctttactgctctactgctcttgcttgccttttctcattatcgtgtagcgtgtcagtagtaagtgcaagatggtgcggacaaagaatgtcacaccgtcagggggaggagatgaccaggaccctcctcgccctttcagacaggacaagggcaaggcagtctatcttcaacagcagggggcaagaaaaagagattgttggacagagacactcgtgcaacagttgcagagtagaccaaacagagtagggtggtcagttgaggatcgcctctgatcagatagcttgccgagttcgtcgactctcgtctcgagctcgctcctctcctgctcggttcgacccctaagaccaagtcaccactccaccttcttccactatgctagctcttgccaatcttaagccttccaccacacctgttgcgcccattacctccaccacaccagcttccactgctcctgctcccgcttccgctccacctattcctccaccttgcttccgggagcgtgacgagactaaggtgcatcctcttgatgtggacctgcacctgctcgacctttggagagccacagcttctagggtgcgtcggttcagacacgtaccagtggactcttggttacctgctcagtgggatccggcagctgcgctactcttcagcaccaggact

SEQ ID NO: 12178 - DNA, 405 bp, Zea Mays
tgccctcggcctccaagcgggcgccaagaatatgatccagacgtcgtagggggtcagcaacggaatccagtaccgggagcgcgtcagagatagacgccggccgcaccaacgtcgggatgggactcacccccaacggcactaacgtcgtgcttgcctcgctagcctaggcggcgatgcgctgggccccagcgcgttgctcagcccggaggtcatcgagtgtcttcctcatcacctccaccgcctagggggccgaggccgtctgcgtcgcctgtgcagcttgcgctgcctggaactggcggacctgctcctccagtgcccacactttcccctccaaacgcttccctttctcctctgcctcgagctcaagctcatccagcagcttgttccgccttgcccacatctcct

SEQ ID NO: 12179 - DNA, 534 bp, Zea Mays
gtggtcgaggtcatggtcgcggtctaggagctcgggtggctcatgggattgcagcctttttctccatgtgtcgggatatctctactgatgtgcatgagctggctaggcgctagcgggagactgatgacaatttgcgccgccagtcagtctccatgggtcaccaatttattccttgctcccctaatgtgtcccttcatgcaccaccttctgatataaatgaatggcaccaacaggcctatggtgtcccatttatgtctgccgatgatgaagaagttgaggaagattttcttgttgatgatgtggatcagtttgcccctcctccttaccaagctcagccgggtttggctctagtccacccacctacttagccggctactgaaccgaaaaatagattgggagaaaccggttcagtcggttttaggaccggctcagccggttttcagtcagaaaagtccaacggccaccagcttttggggatcctttatatacccctttgccctctctctcttcattcactcctgcccatccacgaat

SEQ ID NO: 12180 - DNA, 444 bp, Zea Mays
atcttttttgttccaaatttgtagcactctctttttttccttatttttaaaatgaacttgcactgtcttagcccactggttacctgaacttataatagctaagctaaaactatgcagagttccatccaattcgatactaacatgatggatttatactgaaccattcaaattgaaagttttttgcttgtttattcaataaatggtttactgagattttagttgcttatgtgttttgatcacttttgatcattcgttccttgtaattctattataccttctctgtaacaaagtgccaatggatgtgttgaaagtcatgttattgacaataatatggtgcataccatctcaataggtttatatgttcacttctgtttgttgactcagtgctacatcagatgctgcactaaatcacatatgtactcgtggatttgctattagctggaa

SEQ ID NO: 12181 - DNA, 766 bp, Zea Mays
ggccaccgccgcaccgggcgtgtgcgccaccgcccggggtcgagctgggagtgagttggcgggcgccgtcgatttcctagcgcacggctgagattaggttaagtgctgcctattgaatcagggtcgttggatgcgtagccaacggctgggatcggtggcggaataccgtttcgtggcattggatcgtgaccgtccgattggaaactggcggatggatccggccccgcgttgcatgttgtaacttaattgttttcagaaataaagtttgttcattgcatgttgtgtttcaggttataggtagggaacaagatccctgattgagccttcacatctagcatttcccatcgcttcagaatggcccaaacaacattagatcaggaagtcaattctctctaaactgtcacagaacaagaaatctctcgtacaaattaatgcctaaggaacaaaggaaataaattgagattgaggtggtgctgttcatcggcacttagtccacgaaaagtgggggagtgcgatcttcgtagctgcacgttctcggagcatagctgagcgagaagggtggtcggtgtgcgacgaattgtgggccggagttggagaccgccgctcgatccctaattgacgtggtcaggtcgcggtgagcacaggttctgtatggtgtatcacctttcgggcgaccccccgggaactgaaatctcggaccccagctggaaaacccacaccctgaacccgccaacatatatccgcatctgaaaagagtccaaaacaa

SEQ ID NO: 12182 - DNA, 458 bp, Zea Mays
ttaaagaagcttttgaacaccactacctcattcttttccggcttcggagtagtttcctctccgccaaaacgaaccagctccttttttgcttcgctgaagtagcccagcttcaccatttttggaaggtcagcttcagagatggtggactttccaaagtccaaatgactaggtttagttggtaccccgcagctgaactcttcctcagaaccaacttgttcaacatcagcttgtgttgcttcggcagcaggtgtgtcctctgctgtaactagcccggagcgctttatcgcttcagaaatcggaacagtttcagcagcttcggcatcatctccatcacgctcaactctagtagtagagcgcactctggccatttgattttgaatttcttaaaaattccttgcaaattaataaccttttttccgaagctcttcttctgacgaagcagagactaaactggagct

SEQ ID NO: 12183 - DNA, 687 bp, Zea Mays
tctaatcgcgaccatccatcagcatatggacgatccggagatcttctccctccccacggcggtctggacagcagcgccgcccacccacggcggagcttcaccggcggacagtcgattcgacgcccaggtacctaatcctcccaccggaagcgagaaccacccagagcagaggacagggaacatcctgggggcgactactcaccgagaaggagctgcgacgtagttggccacggaaacaggcggaaccgcggcgacgatgcatccatggcaagcgattctaagagcttcgtccacgatgaggccacggcggtattccgagcgacatgatgaggcccgtgggtccaattctgaagacccgccatcgccattagctcaaatgtcccgcagcggcatctcacgttttctctctctctctctctctgtcctcggcggggcgcagcgaaagctcagttcaccagagggcggaagcaggggagcgacggatttatagtgccgcgggttccgcaagggctggcgggcgaaccgcgcccttcctggccgagttcgttcgatccgcacggattccacgccaccggtaccgaggtaaacagagatacgcgcgtttctgttacgaacgacgcggcggagaaggaggagctgaccatgcggccccactggtcattgggttggagcacactgactccacgc

SEQ ID NO: 12184 - DNA, 897 bp, Zea Mays
ctagtgatgctataacaaaggtgaagatggtttataggtctacaactttggtgcagagggaggatggagtcgtcacataaaatttggtgaaaatccaccctcaaggtgctcggtcagtcgttctgaagaaactaggcgatggtacagtatcccgattagactgccagcttggtcagctcgccgctggcgatccgcgtccgaatttgtgctggtcgctgggattcttgctttacatgcagaagatttctatgagaaggtaaagatctcacggggggatggataggatcgcggattggagtttatcaccatgcctataaccgttgcgacgtggccggactaccaacgtcgccgtggaagcgtcggtgacctcggttgcgccacgccgtagcttgttactatgcggtagtaatcgtggcacccttaggagtattatccttgcgccgttgcaccggtgaacaccatggttacagccaccatgttcttccctatctccggtcgccagcatgccgtgatcaaattgagagccaccacccccggagcctataaatcgagtgcaccatcggcttcgttatgtattcacgcatctagcgcacccacctgtaccccagatcctccaccagagagcttcaatttgagatttcccccaaatcactcaagaactcctcacggtttgccctcgtcgtggccagcttgctccgggttagttcaagcgctttgatcgtttgttctagcatccctaagtcctcctcaagcttcatgacccctctgattgaactagactgccctgggttgccgtgaacgcccgtgttcatctgttgcccatacggtcaccatggtcagggcgttttagtgtgccattggtgaaattaacttaggggaaacttcgtttgaggtgtg

SEQ ID NO: 12185 - DNA, 551 bp, Zea Mays
gcccgcacgtcatcgcccacctcgcgcgctacccatggagctcatcgggaaaattggatcgcgtgtgctacgctggtgtctccctgactatgggcccgagtggcatactcgcgttctccgcgtggtgactgacaggtgggaccgctcagtcagcatcacccctaacagaagtgcccgcgtctttaggacggccgtcgtgtgcgggcgagatactcggtcgtggccgccccagctctctggcctcgtcctgggtatataacccgacgcgccgcgacccccttttgaccttactcagccatctagacagctagagcataaccgccaccgtgtgaaattggtagaagcaattggacacacgagccagcgccatcctcctgctttccccactgctcgaggtactcggttggtcatcgcgaaagtgcgaaaggtcgtcgggggagcagaagggcaccatgactccggcaattgctcgtcggaagtacagcgccgccacggatcgccttctgtcatggccggacaccaccaccagataatagccggtaacctactcc

SEQ ID NO: 12186 - DNA, 494 bp, Zea Mays
agcagaacaggtactcctttgcaatcacacccacgctcgttggacagtcacaccggtcaccgtttgccacctgcagtgctggtaagaaccttgtaagagcggggtaagacgcttcataatttgtattccaccaccctgagagatagttatagggttcacattgttgcatttttgtctctgttttgtgctaacaatgataggaccaaagaatcaaatggacaaggataaggggcctaagcttaacgacgatgagtgtgtctctcagatggaattgaaggagatgatgcgcgcgatgactgaagcttttaaaaaataccaggactctgcggcgacatcctatgagcagcttgatcgacgagttgctgaacttgttacacgcatggacgtactggaggctcatccccccaccaactccagccccagctcactctcttgtggatgacgacgacgatgacgacgatgactaacccagtgttcttccaggcaagccccgg

SEQ ID NO: 12187 - DNA, 752 bp, Zea Mays
atgttgggctggggggttgttcggcgcgagtcccctcggggtatttaaccagctcgggtcggagtttccccgtcgtcgcctggtgtccatcgcggtaaccagcagtgagagggagtggagagaagagaggaagcgagcaaggagcgccatctgagcgaattcaaggctacaacattgaccctaccccgattagtggatagaaagcttcatcgatcgactttgggggtggctgaggccccggtttgctgagaagatcactaggagcccttcaatttctcgctgtcgttctggtgccaccgtggatccgccattggcgtgggcaagggcttctgcgccaacgacgttggttacaagtacttattcgagcttgcattattcctatcttcatgtagcaccacttgaatcaaaacttcatgcacgtgaataagcatctggtgaacgctggtggcgctccgtcgcggtgagctccgccgcttggtgccaggcgtggggaagacgtctctgggtcgttggatctcggcgaacggtggaaattagaacggggcttacctcttcggtgtttagatctcgaccattgatcttgctgctggtggcccagattaaatgttggctaatgcttcggctagagtaatctagatcattagatatggatctggcggtcacggttgcataccggttcagatttatgtggatctaatcgtgaccctcagtgttggatccaacgaccagaattttcacgtacccttttgaat

SEQ ID NO: 12188 - DNA, 692 bp, Zea Mays
cttggatcagccacatcctaaggaggtcgacaaccacttgccagttctctttcaaaccacttgcttaaatgccctgctccctcacacaacatcacctcccatacacctgcattgccctacccccacctctacacacagcctatgcactgaagtgcatgctgatctcgctatcgtgcccaaagaattgtcgtcgatcctcacatacatgtgagttctctcccttccacctttcttcctactgtcgagtcacccaagcgtgatgccactctctaggcgcgacctcctcttatcgtaggcctctgcgtgcccgctgcactgttggtcgtccacaggtgagaatggacgcccgaaatccccactgccttcccatgtcatgtgcttcccttgtgtgcaacactaggtttcccatcccctcccctcgatgcggcaaggcgcagtcgcagtagatctgttgctgctgccatggccccctcacgcaagagtcccttgtacacctcagtaggctggggccctccttgtggcaagggatgacgagcaatcgagcttccctactgttgcatacagagcgagccaatctctcccctctgctgcttgctgcgcgcgcactccaccgggctatggccatggcgtccaggcgaagacccacccgcgagtgccccttccctcttggtcgatggccacctcactacttc

SEQ ID NO: 12189 - DNA, 282 bp, Zea Mays
tgcccctaggccccgccggtcagcgcctgcgccccctagcgccgggtccgactagtcagcctgtcttcccccttaggtcactgacaccccacccccacttgtcagtcgcgctcactcgctcgcgcccacgtgctcactcaccgatctaatcatggtcgtccatctgcgatctggcggttggaaaggcccgataccccttcagtttttagttttgtaaaaagaacctccaattctcaggtaatagacctcgccgtccctggattttgcgtgcagacccctgac

SEQ ID NO: 12190 - DNA, 470 bp, Zea Mays
cggagagtgaaacagtgaagaagaagagaaagaagagagcaaatgatcaagagcaagtaaagtaaacagccagggcaagcagactatttaaaggggccgaagggtgaccgtccacttcctaccctgcttgccgaacagtcgcaagaattcaataagcaattcaagccgcttgaaaagaagtcaggcaactggcgccgtttcgcgtaacacggcatcagttggacctgagtcaaatgttcatgcaaatgattacacctctacgtcacatcaagttactacttcaggacaacatgataaacactatgcgtaccaagagacccattgggtgtgtcacccaaaattttcaagtcttcgtgaaggaacaatatctacaaaatatacgcaatgaatgtaccatgacaaaaggaggagatcggctgagacaggaggaagtccaaatgtggttactgaagcgcaagtccaatcaacaa

SEQ ID NO: 12191 - DNA, 1444 bp, Zea Mays
ggggggcaaagctcagcccaggaggagaagcgctttctggccaagaaatcatcgtaggcagggtcctgagagggctgattcaggtgagtcatgaagcccacaatgatgttatcatcagcattcagattcaaattttgcacgccctggtcgttctgatcgttatttccctccaaaaatgggtccgctggggggaggggtggaagagcaagcacaacaacttcttgatcaagggcatcctcctgagggaagttgacagcttgcgggataacgatatcgttgaaaagacccacagattcatctgaaggaaggtcctcaagaccggagaattggtaactgaattgttcctcttcattgttgactaaaggaacaggagcaggcggttgttcttgctggacctgttcaaccggccaaggatcccaaccatcatcagcattattggcattggcatcctctaattcaatttcaccattggggggatgttgaggtcaaaatggaaattgggcacaggttgccccaatccaaaaaattccaccggaagttgatgcccattatgagggtacggaggtacaggttcttcatcctcaggcatgttaccaagcatgaactgctgcactacgtcgcactaaacagtccaggaaaccccatgaaaacctttagctactgaaaacacaataaactgtggaacctcctgcagagaagtcacccgtgctctaacaagcaatctagtagcattagaaatatctggatcccacatgagcacccgaccaaaagaaccaatagcattctgaatgtgctcgtgtgaccagaaatccaagggaaacccaaggagcagcaaccaacattcatgattaaaaaataatgctcgttgattccaagccgcattgtgcctaatcacagtgaaagtaaagcccaaagcttgctgcggacccatggccacgagattgtccctatcaaaaatgaatcggaacctcaccaaagcctgacccaagtgggagcgctaaacactcctaatctgaacatgtctaatctccaaaaggtactctcggacaatgtcagcaaaaaattggaaattgacctcatgctcaggtagtggttggaccaggacaattccccaatcatcatgagcggacggttgcgggcgagtgacagtacgtaccataatctcccgatgatcaatgggttgcgccgtgaagccatgagggagaaaagggcccggatcaacacgatggaaagccattccctccgagaatccagaggtcgagtccttttggctcaccgcacactcaccacgcaggcgagggcaaagcaatggtgggattgaccgcggcggaggggtggaagagggttttgcgcacagtgcaagttcggtggaaggcgaagagccacctcttggaagaaccgcatgagcaaactcaccaaagttattaaaaaaggcgggtgagag

SEQ ID NO: 12192 - DNA, 607 bp, Zea Mays
actagccctcctgagtgcggaaaattgctcgcaccaatgtacaagttgactagctacctcaattggctgacgaattccctgaattattgcatgccacgtctctttcagcctgaaagctacagccactgaaaaatatgcccgccgttgctttcattcgtctcagcaaagccacactaaaacaagctatacatatactatgcatgccgtgcttgactttttcatcgttctgatctgatggaaggatggacgccattgacacacaccaaacacgcgtccgtttttcttctctcatttctagctaggagcatcatcatcacgccgatatataaactagaggccactatcttcctgttgccggcaagaaattggcctagcttgcttcttcttcttgtccaagtttcttctgcccgacgacaaatatctctacttaatttattcttacaataaactggtggaggagatgctgttatgggcccgacgacaatcatatatggaggccttaactgcggcctgacaaccaaccaaatgggctcgctccacgcatgatggaccttcttacgacggccgttagtaatactccgatcatatgcagacacaaatgcatcct

SEQ ID NO: 12193 - DNA, 761 bp, Zea Mays
agtgcgcttacgtcgtcgtcgtgcgccgtagcagagagggagagagagggaattggagagcccagcgcccccaccaacgcctcgccttgtggaatcaccatcgagttcgcctggagaccaccggcaacgaagacaattggaaggctgagcggaattccacgttgtcctcgcccgccgccgtacaattccaccgcagccgggcactgcatcaatcaggcaccgattcatggtatggatcacacccatcacgttcgccttcctctcaacgtcgtataggatcgttcggattgagtcttggtggtgaatttgggctaacagcgtcggcacggctgcaaatcgaggcctccgccatgggcagggatctgtgctcgatggcggatgcaattggttgaggaattagattcagggagtcatcgatttggcaagggttgagctaattggagaatggtgctcgggatggtcggattcgcagtcccgacgatctcgccgccgcgcggtggctttgctctggtgctctgctgctcggggtagacgatggattagagccgcccgtttgatgatgtgtggttctgattagaacacgtgtacccgttgcgcgattcgatcccgaccgatggatcgagatcggatgggttacatcagaacgagcttaatccaatatgggtcgtagatctcgtatcctgtggtcataaatagatatcggttcagcgcggttgtggatttaatctacgccctcgattttggatccaacggctgaaaac

SEQ ID NO: 12194 - DNA, 334 bp, Zea Mays
actagtccaggcttgcaccctagtctagtgtagtgttgatcgtagtattgcctgggaatagagttacaacttgtgcgtgtgtgcagaaagaggaggatctgcccttttatagtttaagggtaataccttatagcggagacttgttctctattgggaagggggcattctattgccccgggttgaggtagagttcctaacgtcgtccgtagggtcgtgcgtagcaatactttcggtatggcgtattgtcctgcctcccgccatacaggtccatgtagcgagtccaccgctgatgtctttgtaatagtgcgtggtaggtcttgtgggtcaacctcat

SEQ ID NO: 12195 - DNA, 499 bp, Zea Mays
gaaagatctcgcgcggaggatgaacttggggcactgttactgctcagtcgctgtacccacttcaccgacaacgtggtcgcgcgaccgccatcgccatgcccgccgttcacctcggtcacgacacgccataggccgtttcatcacattgtcgtgagtcatgaagactaagccgtgaccgccgtaaaccctttgcccagtaaatgccacaataagcgactctggtgactcaccttgctctggccgccaacttgcctttcccaaattcggagccaccgcttgcagacgctataaattgagtgtgcggcctgcttcattagcctgttacaaagccaggacaccaactctcgcccccgattagccaccgtagaccgcaaatttcgttttcccccccaaatcggccaaaatcgccgccgtgaggcatctcgccgtggccagccgatttcaggtccgttcatccccttccgtgccatgttttagcatccttgatagttaacgttgc

SEQ ID NO: 12196 - DNA, 393 bp, Zea Mays
gaaaaaggtccctggccactgatgttgatgccaacagttgtgattagatccggacgtgggggatctcagccattgatcataattccagtggctaggattagaaggatggtaccggttcgggtgatccggtgtgagccgttgatctggccggagacggatatgattagattgggggcttaccacttcgttggatgaatatgtgtcgttgatctcgagattggtggcttgggtgagttggatggtttgtatttaatctcagcccccgatatcagatcgtgcggccaggatgctcccgtaccccttcggccagaccaattcacataagagcccctggaaattttagttatcaacccgcggtccactcgcgctgctcactgagtcttagagtttttg

SEQ ID NO: 12197 - DNA, 515 bp, Zea Mays
caaggcgcagagagccccgcccatggtgaggggtactctggcggcgaggatggaagtgcagcgagaaattgcccgtggtctaaagcttccctacgttcaactaaagtccaaatctatgtggagcaaccctgtgaagcccactggcccaatatagaggctaggttgtggttccatgcacgagtccacggaaccatgcggctccacggcagagtacggtcgtccgacgatgaattccgcccgctccaacccgctccccgtcttgccagagtagctcccatgttcggcgtgacctggggatgcaccatcggtgggatccaaaggccaaacaccgcccaaacacggcgtcaatgccatcgtcacccccttgttcttcgctcgacaatggtggctctcaactgctggcctcggggtgaaactcgaatgcgagggagacggcagagtggagttgacttatatggccccgagaagccgagatgagtccgcaagcgagggtagctacgagttttgtgcaacgg

SEQ ID NO: 12198 - DNA, 368 bp, Zea Mays
ggcttttgtgatgcgaggctgaggccgaggccaggcggaggcggatcaagaggatggcgtcgtctcgtccgcctacagcgacctcgtcgtcgcatgctacgatatgacgatcacatgcgagtatgcgacgcgcgacgagctaccaacatggtgcttatccgaaaccatccgcgtctatcttgggtctgctttgctttcgcttcaacgcaatgcccccagtgccagcagtctgtgaaagcttagctgacacgaagcatgcagcagcagtactcatctaccagtacgtttccgatgccaacgggatcgacctttggtatttggcagccagttagctttgaggaaccagaggcagagactttgtgcttttc

SEQ ID NO: 12199 - DNA, 378 bp, Zea Mays
gacatcatcatctttaggcacaactatgcggttattaaaccatactatgccttgatcatcctttctgaaacagtttgctttaccagcctttattttctcatgaatatgtctcatacccttatcacttctttgtgcatcaataatcttttgcagaagaactgactcaagcttcaattggtttaaggttccatgttgaatcattcccaggtttaatttctccatttcttggcataatgtgatgtcataagtctttactgtaagacaacgacaggaagccttgtgacttagtgcatctgccaccaccttggccttgcctgggtgatagtgaatttatagttaataatccttaatcagctcaagccatctcctctgccttat

SEQ ID NO: 12200 - DNA, 502 bp, Zea Mays
taccacctctaccggtactactactgcctccacagaaaaggggaacgtgcgaaatacacaccggccacgacatatctagacttgtcgttatcagagatccgttccagaatttccacacacaggccggtgggcgggtgattgctagcttagctacaatgaatggcgtgccacgtgtgtacgtacgtgaacgcgatcggtggtggctgctgctgagtgctgaccagagagagattaaccattgaccacacacatcctcctgatggtactacgtacatgccgcgacatacagtactactcagcggatgagatagaggtagacggaagctttagatccgatagcaatagcaattccacgtaatcgtcgtcgtcgtcgccagtgcaattactaccagacaccagtgcatctcatccatgcatcaccacgatctcagccggtctcgcggttgtaggatagccgccgtcgccattcccgcggtcgcctctgcacggtcgtacgactgcg

SEQ ID NO: 12201 - DNA, 356 bp, Zea Mays
gcgggtgtacatcccgtgttcatccatgcaacgcgtgaacccgagagccagcagttcggcgtccagcttttggttccacgcgcgtggcgcctgacggagcccgtagagggccttgtggagtttcagcaccttgttcttgtgcttgtcgtcgatgaagccggggggttgctggacgtagacttcttcttggagctccccattcaaaaaagccgacttcacgtccatgtgatggacgccccagccgtagtgcgctgcgatggcgaggagcagacgcacggactccagtcatgcgatcggcgcgaagacctcatcgaagtcgacgcctggctgctgcacatagcccttggcgacgaggc

SEQ ID NO: 12202 - DNA, 1028 bp, Zea Mays
gccggagccgttcgtttcggtgggtctgcgccggggggattgaccgaggggcggaatcttcagcgcgcataaaatgcgaacccatcccctctaaatctagaccctattcctccactcgaacccaccgctgtcgtgaacaccgagcgaagaaccgaaagaaagtcaccgccgccgctgcgaggattgagattaggggcgactctacccctgaaccctgtctcgggggcctcgtcggaggttggcgaagctcgggatggaagcaatcacgctaaggataaccgcggtactgagaattcctcaccggagcgggcgagcgcccgtaatccgcgccgcgtcgtggatctccgtagctgcatctccacccctggtaagtgacccatgcttagtttcacctctcgctggacatcacgtaggtcttggctcgttcggtttgggctgctaggttgcgaaatcgccataccggccatggcaccaccgcacggcctggcggcgccgctgcaacggggctcggttggggaagacaggtttgtagctgtcggatccttttgttgcggccgagattagatgatagacacccccttcgcccaattgaagcttagccgttggatcgcgggtgtggggtttagatcgaaccaggacgttaccgtccctttccgttgatgtcggatctgatggtcagagcgggttgcaacgtgttcaagcgtcgatctaatcttggtcgtccagagaggatccgatggccagatttctcccgtaccccttcggacttggcaaagttcataaagagcccctcgggtttcgataaataaacctgccgtccacccgggcgctctctgagtcttaaggagttttatagcaaaccccctacatttctctgtttttatgcgcgcagtccagaagtcagtaaaaaggataaataattaaggaaaatgatttttagtatgaaattaattgcaagaacttgtaaaattcctagaaatttcctttgaagtccaaattgacccattccagttcctataattttgttt

SEQ ID NO: 12203 - DNA, 278 bp, Zea Mays
tgatgaaatgtccagacttcccacagttgaagcaaccactggaggaactgggaatagcagggaaacgagtaccgggggcactcggctaattggtaggagcgggggcagtagtgggacgaataaagataggctgcttgaatggatatgaaggtgggcgaggcgaagaacgattttgattaaagggtcggatcaccaacctggttctcttctcaggtccttgattggacctttcacctccaaacccctttgattttccatgtcctgcatttttggcttcc

SEQ ID NO: 12204 - DNA, 969 bp, Zea Mays
atttgcttgaggttactataacaacattatagccagatcttagggctataactttgctaaagagtggcaatcgagttactacacaaaactggaagttattggttctgcaaatcactctgtcaggctgtctgacgaacactggccatggtacagtgtcccgagatgatcaaaccgccagcgctaaaaagatctcaccgccggtgactcgccgccgcgattcgtgtcgccggcgtgtggattcgtgcactaggattggggataacgcttcggtcgtcaccccgtgcgctggacgccactccggtgactcaccgtcgtacccccccgtgctttgcggctagtgctgataagctcaccggcgacagccgtcgtccgaccttgcgccgcgtgtccaaacctcgccactgcatcgccctgattcactttagcctcctgtcaatcaccggaatgaccgccacggtagaggccacgaatccactgcactagtgaagcttcctttcctccggccgccatgtgtctcgtccaaattcgcgaccaccgctcgcgatgtgtataaattgaccccgccgcgagctccgtaaggcagtgaagtatccagccaccgctaattagccacgatcgttcgccagagctcgagaatttcttgtttcccccaaattggtctccgccaccgcaaagaacagctcaaccgcggccagcccaactcaggttagttccagtgtctctgttgcttgttctagtgtccctagaccctcctcaagctctacgaccccttcgattgaattggaccaccacccatcgccgggaacacgagcatgtgtccatgaccttcgctatcctcgtgggcagagcggaatgggtcaccaatcgtgcaattaacttaggggaaatgctcgaagggggtctgatttggtgtctgccgctcgagagcgccagtccttgcgtaatccggccgatctaacctcgccggtg

SEQ ID NO: 12205 - DNA, 808 bp, Zea Mays
gcaaaggaacagagccaagtatcacataaaagctcaccagtagtaacatggtgcagtactagatcataggcatggcaacaaaataagctcagatctagggaccaaatcataggcatggcaacaataagctcagattaattgctataaaatcacaggcatgacaacttaagctcagatctagtgctaatcaatcatagacacggcaacatataagctcagatcattcaagaaatgaagggggggaaggggaggggaaggaatgtcgtctgttataccgaacagcaacaggaagaaggacgaagcgccgagaggaagcagctacaaggcgtgaggaagcagcaatccggatgccctgtcaagaaatcgaaagggggttagaaaccctaggtcgtgaaatagaacaaaaaacaaagctccaaacctacaaagcacgaatccaccacgaatctgaaaagagaagaagaaatagggggaggatgggaggaactcggcaccaatcaccggcggcgatagcagagcagtgcggtggagaaaggggagggaggtgaagcagcgttatataacagcggtcacgacgggaaagagggaggtaaccacagcgttcgcaccatctcctgccatctcccacgctcacgcgcgcgctcgcccccgcgctgcacgccgccagcctacatccggagaaacgcccgattcgaccgcatcgggggagctaggttcgagggtagggtttgcatcttgggggcctggccgggaaggaggagaaggcaaccgaacaagcccacttgcatctcgggggcctggcccaggg

SEQ ID NO: 12206 - DNA, 1608 bp, Zea Mays
tactagctttgcatttgttgcataggatgaatattaattttgaccagtgaaatctagtacgctaagtgataaactccctttatggcatagtaggtggtaaacggttttacagtccataaagaattaaatgacactgaatagacccagccaagtgcatggtagtatcacagtgaggaaagccaacacggatctcatctagggtattcttactactgcatggtagtatcacagtgaggaaacccaacacggatctcatctagagtaattcttactgggactattttgtgctcactatgcaaattcagatggaacaaacaatcacagtagagtttgagaaggtcatttcatctctcatttcaaactccacactgtaaacagcaaaacagtgttttgcatggtctgctggccatagccttaaacatgaatgagaaaagtacagtctcaggcaaatggagaaaaacagttaaactacccccctccccgagtaatcatttttttcaacgccaaattcagcagtgcctactgacaaagcactaggaaaacacatcgatttttttctattgtacctccaacgcagttcatcggggtagtactactactagaccactttaccatgcttcattgttctcacaaggacggccatgtgactatgcccatcgatcttatgtggtgaggccgtgaaagtgaaacatctaccaactgtcctccaactgggtaccccatgtagtggtccaaagtccagagcactatagatcatggcgtggatgtgtggtgatgaaggtacgacataaaaagataggcatggacctccacggcactgggccatcctctgaacaagttatttgaccctcgcgaacagggttcaatgagcgctctgcagcagtatgcaaaggtcagctgtgccttgctgctccctctagatctgagtttactacagcagcccggatttccttttgactttgatctcgccctttagcggtggtgccataaataaaacacctattgaaagtgagtaggcgcgtgtttcaactttaaaataattaaaaaaaccatggatttatttgtgtaaactacgtttgtatgtgtgtgttgcattgtttcacatccagcagaacgtctttctcagcttgcaaggcagctcactttactgtcaccacccattttgaaacacaaaaatacatcacatgattcgcatcagcaagtgcgagccttaataagtggatgaactgcaagagcgagctcatgcagtatatagcagagagagatgaaagatttggtccacttccgttttggggcagagctggcacaagcaacagggcgcgaaatttttacagctcagcggttcacattttttgtctgaactcagtatgcccataactgcactgtgtttgaagctacctagtatctggttgatcctcgctgcctgtgaacaaccatttagaaagatgttactgtgcttaggaaaggaggaggatcatcgctttgcagtttgcggagcgcctcccccctaaggcctaaacccaaccaagtgcacaaagtaacgttcttgtactacatcagacaggcaaacactagtgccaacactacttttccgctaccctcctaaaa

SEQ ID NO: 12207 - DNA, 942 bp, Zea Mays
tgttacgtaacttgaaccagaccgtggggctttgtaatggaacaaggatgcttgtaactgaggtcggacatcgtgttcttaaatgcatagtactaaacgccctccggagtcgacgaagaggttttcataccgaggattgcgcttaacactatcgatgtcaaatggcccttcacattgcaaagaagacaatttccaatacgaatatgctatgccatgacgattaataagagccagggtcagaccctctcaaaggttggcctctaccttgacaggcctgtgtttacgcatggccagctttacgtcgctgtttcaagggttacatctagaagtggtcttagaattttgattgaaaatcctgatggttcctgcggatcacagactcgaaacgttgtttaccaagaagtgttgcaggccgtagatgcagccccccctgcagacttcttagtgcataatcgactcaaacctgtacataaccaatgtgtaaaataaaaatgtatataccggcaacgcgtttagttatcgtacctattatgttctatgactgcttccccaccaaagaatttttggtctcctatatcgttcgtctagcggcctaccgacaagcgagcactatacgtcgcaagtttacaaagggaaaccactatgtctgcgtgctccaattgatcttgtcatacaacatccgtggtagatgcctactcaatgatgttgacctaactttaccgggcatgtttctcctatcctaaatattttttttgtaagcatgctgcccttgtcagcatcgagtgtagtgtttattggttacttatttcgctggaaatgactgacctctgcttcattactgcagatgggggacatactcattcctagccttatggttggagactgctctcgcaccttgtgtttgcgtgtctctaggctttgggaattccttgatcctcagga

SEQ ID NO: 12208 - DNA, 564 bp, Zea Mays
tatgatcgaatggggaacagttcatacaaaatttggtgcacagatgcttgtcaaggaagaggggctaggagaggaaataaaatatgagatgcctaaggcttgggtgcagttactggtttacctaaggaacttagagagtactcagtaatctgggtggttggttctatgctaggcatctcaaaagaggtggatatgttgtttactcgaaagtttgacagggcaaggttgaaggtggccgtgcttgacccgaatttgattccgcaagtagttgatgtggtaattggagactacttatatgaactgaaattcagggtggagtcagaagctgaaggtgaccagcctttgccgatggatatggatcattttgggggaaatgatgatgatgaatttcaggatcaaaacaaggatcacaaattgggtgaaagagggaataaggggtcgagcttgaagggagcatcaaaggattcaacaggggcagttaacaaggtgtcagattctgtgctggacagcaacacgaccagcgggaaatcagtgtgcggtctccctgatgttgttcctggccat

SEQ ID NO: 12209 - DNA, 676 bp, Zea Mays
tgtcttagttgtgtcttttactaaaaaatcgcaccatagtgtcagggttgtacatgccctttgccagggatcggatccctaggcccacaaaagatagagagaagctcgtccagacgagtccaccttcagaacacctctgtgcaccgcgcataggatcggatgaggcgagactacgagggggtcagacaaaccactagggagccactcgagtggatttcgcatctagctgtaagaccactctcgccatcgatattgcacactctgcattaactgtgtatagcacagagcctaggcatgggaaagagtcaatccacctcccactcatgaccgacgggacctaggcctgagccccgctcatgacctacgggccataggtctaagccccactcataacctacgagccttagacctgagtcctctgacgtcctactaagcacacaagatgacaaagggaagccaaagtcagactatgaagaccaaaggtcggcacatacataggtggacagaagaagcaatgatgacgctcggactcacgtcgcaagcacgcttcaccaacagtcttgaagaggtgcaactagatatttatacggggacgaataatgacacacaacaagtcttttaccgaggaagaaatattccattttacctagcgcaacggtcccttctaagtgaagat

SEQ ID NO: 12210 - DNA, 537 bp, Zea Mays
ggttgacccaaccttcaatagaacgaagcagtgcttcggtgtctatccatgcgtcatagtcatctcgagttgagagaacgcttttgtatgcatgagtttcgttgattatctaccgcatcatcccctctaggtcgttgatctgttcagcaacgactacgattaggttttcaagttttggctcagagggtgttgctgggtcgtcgaacgcggcgtgggtgatccagatcaaaatgggataccggtccgtgctattgtgatccgggacgtcggggtcacaatcaacaaacgcgatgaagactggatttgtgttgtctgatctaatctagacggcgtagattagaccaatggagaccccttcactttagtagatcgtgaccatagatggtgaatctaacggttcaggcacgcgcatatccttttggtcagccgcttttacatatgagcccctctattttcgatgaatcagcccgccatccacccaaagacatagaataatacgcataggtcccaaaatttacaccgggctccctggaaaac

SEQ ID NO: 12211 - DNA, 689 bp, Zea Mays
gcctggggcagcctgtaggcagcgtcgtgccacaggatggccgggtccagcccgacaggatcgctggcatcgtcggagacccgcttttgtcgtacgtctgaggtagacgaggctggcgcggggagtagatcatgtagcagaaaatcaaaagagtctggtcgaggctgtgaagccgcaaacggaaagtgagtctcatcaaatacaacatggcgggagatgatgatcttgcgagtggatacatcaagacaccggtagcccttctgagaaggaggataaccgagacagacacacgccgtggatcgaggggacaatttgtggggggtcgtggcactgaggtttggatagcataggcaaccaaaaactcgaaggattgagtaatctggcatcttgcgattaaggagatggtagggaataccattatgtatggacgacgaaggccgccggtttgtgagaaacacggcggtggagagagcctcggcccaatagggaggaggcatagccacatggatcagaagcgtccgaacgacattgtttagagtgcgaagcatccgctcagctttgtcgttttgggcggatgtgtaggggcacgaggtgcgaagaaggatgccccgggcagccaggaaggcggcggtggcactgttaatgaactcagtgccattataggtctgaaaacagcgcacagaagagtt

SEQ ID NO: 12212 - DNA, 668 bp, Zea Mays
tctgttgcaaccgtccgctacgtccggctcctcactgcataaatataggagattttcccctcagatctcaaccccgtcaccttcgtcgctaagaacgtagagggagagagagagagttgagagcagggagcggcaggaagggagaaaagcggaggagcgccgtcgacggcttacgtccagggtcgctccgtcctcaatagatggcttgtgagggtcgtagaggtgtcccaatggtgtcttgaccttacccccccggaacttgggcggtcgcgcggcaatttctcgccgaagtggaggaaccaccgcaattccgcccttcatcgtggcctggcctgtcgtcatctccaccgccggtgagtaccctcctggattgtccgccatactatcctttacgtgaaacactgttcagattggagattctagcacgagatcggaggttggtaatttccggccatggcttccgccgtgggggtactgtgcggtgccgccggcgcagtgtctggtaggggatgggtttctggccgtcggatccaaacctgtggttgagattaaacgtcacgtgccggtccggtcggatgtggcgtgggccgttcgattccgatcgatcggacgtgagtgggattaggttatttaaatctggaacgtccaagtttgatcgaaaggcttag

SEQ ID NO: 12213 - DNA, 645 bp, Zea Mays
tctcagaggaaacccaaagatgctccacagtccagccgcacgtggacgagaactccgcagccagactccggtcgagacggccgcaatcagcagcaggtgcacaacatcgccaaccagcaccccgctggtgacgcccctcgccgccaggaatatccccccagggccgcggaaatggaaatcgcggtaggggtcggggacgtgcgcagccgccgcgccgattctactgtctttttcacggcgaagactgcgcccaccaaaccagagactgcccagagacgaaggccaccaaagacaggatgacacgggcgcagccaaccgacaaccctagagttgtcgcgcacacttatcagcaaccccctccaccatacatccacgcccccgccccgcatccaccgcaccacgcataccaacaccaccaggaagtacaaatcgtacctcccccaccccacctccacaccagcaacaacaaaacatcccccacccccacgccccaaagcaagaagacttcgccgatcagccgtatcgcggagtcattcatatgatcactgggggtccagtaccgacttcgacacaaagcggtagaagcgggaccactaccgcagcataaaccacgtcaccatcaccggtccagtcgtgcagacgaag

SEQ ID NO: 12214 - DNA, 392 bp, Zea Mays
cgggaaggtcaccggagtggagcccagctcacggcggtgaagatctttactgggcgatgcttacctgctggccacggcgcacgaatcacgacgagcggcaatcgacggcgacgggccaccggcgacgggcagggggaaaaaccgtgatctgtttcagtttggggtactgtaccatggcgagctcgttttagacagcgtgacagtcaagtttggaaccaaatttcctctcaattcctaatgataatccatgtcaagctctatagcaaaattgtagagtaatgtaccatctacaatgtggccatatggtgttgccactgaaaatcattggatcatgtctgaaattgggctagaagttggtggtagttcactgttagtctgaaaattcagaccaa

SEQ ID NO: 12215 - DNA, 447 bp, Zea Mays
atttgaacgaagcgagtatgggaaagtgggtcgacgggagcgcgctctcagacgtgttctgcggcggcgaggtaaggttctcgatgtcctgtcgcggtaatattcaatcggttgggccgacaagctatgttaacattcaaggacgctagaacatggcacagaggggaaggaacgaacctgggaatggttggtcatggctgggtgcctcacgacggcgtaaatgacgacgatgggggaaaactggaatttgtgagctctggtgggtaattggaagcgaggaagggtgcgctaggcgcataaccagaaggcgtatcagggagagcctttaatttatagtaactacatgagtgcttcgcaaatttgggatgagaagatctcacgaccgaaagggaggtgagtcaccggagggcaactctcgtggcgctcggtgaggtaaggcccctggcg

SEQ ID NO: 12216 - DNA, 935 bp, Zea Mays
gttaaaacgtaaagattctacagactcagggttataccgtgatggactgcgggttgattagtccaaaaagcaagggttcttatgtaaaacggatggccgaaggggtaccagaggatctgagtcatccgatctccaattgatggtgcagattagattcgtgcagggttatgtatcggcgtgcgctcactgcccatggatcaaggatcgatggcccgaaaccgtccacgccacagggcaagcaagggcacccagatctatgatctacggtctagattttataacagcttgattcgctccgcacccacggatagaagatctacggccctgattcaatatcgcgaaaaggtatgctaagatcagatcctgaccgcccacacagggatcaacggtgggtatcggatctagtcaagcaattactccgacctaatctgagccctacgctctgcatctaacggttggtgcatcatcttcctcctcaccctggctcacagaagtggcgctagcaccgcgccgcagtgaacgccggtaaacaggcacatgccaagccaaagcaacacacgtgctccgatgtagacacgacccatgggtagataaggagcgatggagggtagtttaccttgaacgtccacggcgacgacctgggtcgcggtccgtgcaaacccaaggcggattgccgaccctggcggacgattcaaaccacgacacgcttgcgtatgccggaatccaaccatgtattggtcccttccagcgtcgacgaacccccggacacgacgccactgcctccccccaaccggtccgagacttcctctctctctctctctctctctctcttcaagtgcggcggtgctcatgatcacctccctggtcgaccggaacggcaaaacaccaggccaacggctttatggggcaagcaggatggtcttgccgacgatccc

SEQ ID NO: 12217 - DNA, 724 bp, Zea Mays
gaggaaggctgattacctcgacatcccgctcaaggatagcatcaagggatggcatctggaatggttcatcgtggagaatcatgggaattctctcccccccatggtcagaaagacagccggatgttctcactccaagctggaccgaatcccccacagacaaggaagtaactgaagcaggggctttgctagctgaagttggattgttgaaagaaaggggtctaactacaaaagctgtggtcgctaactttgttttcaagaacattcaaccgctaaaagacagagcatatccaacctatctgtatcgaggctttgctgattcgactcgggtaaccaacagaagaattcctgccgtggacttggtgggccggctcgagatgatactcagaggcaaggtgtcgaacgtcggcgctcctgttgcatactcggtttggaatctgcctccttccaaggcctttaccagttttgtgtcaaatcctcctgctggtgatagcagtttgggccttagagtgcgaccctctcccgaagaggttagtgctttggttgcctcacttgaagaaattcctgacgacgagaggcaggttcattttgaggtgcctttaaatccaagtgatgcagaaataagtgccatgctggatatgctagctgaagattcttctgatgcagtccctgctgaaacactggcggtagcgcccatcccagaggctagcgaagctttagacattca

SEQ ID NO: 12218 - DNA, 354 bp, Zea Mays
cgccacctccctccccggcttccggcacgatgccttctcctataaccgcatcctggtcctcctcttcagcaaccgcgccgatcccgccgaggccatgcggctcatcgcggagatggagcgcgacggcgtgcccggcaacatctccaccgtgaatttgctggtcgggatgggcgtggaggtggggaggtgcctggacctggcaagtaagtgggggctcaggctgaacgggtacacctacaagtgccttgtgcaggcgcatctgaggagtcgggaggtgtggaaggggttcgaggtatatgagaagatgcggaggaagggctacaagctggacatatttgcatataacatgctgct

SEQ ID NO: 12219 - DNA, 1156 bp, Zea Mays
atcttgctataaacttgcggtaatacccagtgagtcctaggaaactgcggagtgctcgtatggtcctcggtatgggccatgattcaactgtgtccaccttggaagggtccatggcgaccccctgcgcagagacaatgtgtccaaggtaagtgactgcagatttatcaaatgagcacttggacttcttaagaacaaggttgttgtcccgcagtaattggaatacttgcttcacatgttgtaagtgttctatccaggatgagctatatatcagaatgtcatcaaagaataccagggtgaactttcggatgaaaggcttcagtatatcattcatcagagcttggaatgtggatggcgcattagttaggccgaacgacatgactagaaattcaaagtgaccacaatgtgtacgaaaggttgttttgtggatgtcatccgggtgcatcctgatttgatgataaccactccggagatccagctttgtgaagaaacttgcacctcggagttcatcaagtagctcgtccaccaccgaaattggaaatttgtccttgattgtttttgcattcaattcacggtaatcaatgcaaaacctccatattttatctgccttcttgaccaatagtacatgtgacgagaatgccgatgtgcactctcgaatgatgccttgtgccaacatctgatcgcactgacgctcaatctcgtctttaagcagttgagggtatcggtagggtcgtacaaccactggttctgtaccagccagcaaccgtatgtgatggtcttggcgacgtgatggtggcagtccctgagggtcctgaaacaaatcagagaaagaggacaacagttcttccatacaatccccattcttgtccatggatgcaaatcccaacactgagtccccaacccctgtcaatttaccaaccttcccttcctccggaatgccattgtgtgtgtgtcaaagttgcagaccaccggtcctagagatcgcagccactgcactcctaatacgagatcgaacccatcaagaggcaaggaataacatgttgtggtgaatttctcaaggccgatggtgagggttgttgtgatttgacccttgcttgaaatgcgttctctattggcaacttttaccgataggcctggctgggacaacacttgcaatcca

SEQ ID NO: 12220 - DNA, 598 bp, Zea Mays
gggtcctgacagaatcgatggcaccactggagcgtgaagcggaggaggtggagcagactgaaccggaggtactgagataccagagtgctgaagcataagagccatgaatgccctactctcagcccgatcctgaagaagctgctgctgaagtgcatcctgcctgtcctgcatgttctgaaacatcgagagcatcctctcggataaccgggcttgctcggccgccaggtgggccagaatcgaagcaagagcagggtccatagcctgaggaggaggagggacagcactagaactcccagcctcatgatcatgtgagcgtggaggcataggaggcggaggcggaggcggaggaggaaccccaaagtcatcatcatcatcatcatcagctgctgtaccctgagtgtcaaactgtcgaagagctgcatcctcggcctgagcgtcaaacacagaagcagaagctggcacaggaatctcaggcgcaggacggtaggatcaaaaaacgaggcgtgaggcctcaagggtgctctgaaatcgagggggttgaatcagctgcgcaaagatgtggcacaagtagtgagcataaggcaactgccgacgagca

SEQ ID NO: 12221 - DNA, 532 bp, Zea Mays
ccagcatgcatgcagttgatgccaggtacctgaactcaatgaacgatccgcgtgggtacggggtggtcgacgacggacggtcatgcatgcaggaggcaggagcacgatccggcgccggcgctggacacgcacgatttcgaatttgttgctaatctttagaggccggcggggggagaatctgcttggtcaaacgaccccaaggtgtggctaaataaactaatccgtgccggtaccgtccttgccattagatcgagggtatacatgcatgcagcatacggtgtttggcaaacaatcaggtgctggtattggtaaccaaggtgatggtttgatggatgaggtgcgtgggaagaactgcacgctagtggtttctcttccaagtttcaatgtactatacaaataaaaaatgagattctatcgtgtggaaaggacccggccggcaggccacagtgacctacctaccagggagctattaatgaagatgctctaccatcattaactgctaatgattagcttatgacaaagttaacacgcc

SEQ ID NO: 12222 - DNA, 577 bp, Zea Mays
gtaggtttggacgaactggattcaaaatcgatgaaaatttcggccgataaataaaaaaccggatcccaccgataaacgtgattttcggttttctcgaaaaattttcgccgagaatgttttccctgcctcgtggagcatagcccactggcgcggccggaagcgcgtgtcccgcggcctgctcttggggtcggcagtggaggagcgccagccacggcacacggcgcggaggttcatgtagtagtcgaggtcgtcggttgccagcagaatgtcggcgatgcggttgacgaggtacgacgggagcgacgaccagttcgccattaccgctcggttgttggagcgcaactgcacagtgttcaggcttgtaggacgaattagatcggatatttcagggacttcagagagtgggagaatggctttatgtagaggatgacttcagagagtgggagaatgacttcagttcgactatggatcgaagaaccgccgttgtctcaacctcagccttgggggtccgtcgctgccgcgcgctctcgggaaccgtcgatgtcgcacgtgtctgggtgggcaccgtcgctgctcg

SEQ ID NO: 12223 - DNA, 531 bp, Zea Mays
ctgcgatgacccaaatccagcgatggttagggtttaggggttggcgagagcaatgtggatgggggcgtgttaggtggaaggggcgagagaaatgcggatggcaatgagatagagcgggatgcggcgagtgaagtcagcgatgacgcagctcatcgacgcgatgagaggtaagggggcgtcagtgaggtacctggtcgagggggcaggtcgtcgacggcggatgtgtcccagcggcggtgaggtacctggtcgagggggcaggtcgtcgacagcggtcgtgtcccggcggcggcgattagggttggagaaaatagtgggggagaaagaagaggagtgggggagaaagaagaggagtgggggagatagaggatgagcggcgtttgttttagtgacgacggcgaaacatgttttttggcgcccaacgtgtttggcaatgcggatgctaatacgtttaaatctatgagcgcttggtatatatcataaacacatgaatagctcaatggtttgacctactaactatgagattgagct

SEQ ID NO: 12224 - DNA, 459 bp, Zea Mays
tcaaggtaagatatagaggtgacaagggtaaagatgataatcgtgaaaagcataaccaaggatagagttaaggcaagactcgcaaagtggcgaagtggagaaaataatcaagggtaagataagtatggttccaacagaagggttgaagtaaaaaattcattaccgagggaagttataaggaagcaacgagatcaccaatcatgtgtgagataaaatgatcgctcatggatcattaggaaacaagggtggtcaaggatatgttaactgaaaggtcttggacagtcattggggaatataaagataagcatatataaaataagagtatgtaagaatccaatgatacgagcatgccccgacaagggaatagaaagaaaaaaggcagaggataatgacttaacagtgaaataggaagggatctcaaaagaccagaagttcctggatatataaactagagtgttt

SEQ ID NO: 12225 - DNA, 413 bp, Zea Mays
gaatcggcggtcagagctcgccgatgtgctcgccgccgtgcgtgggttctgcgccgccgccgtcattagcatttgggaagaaggcgcgcgaccgtccgatgtccaaggaagggccctgataagatcttcgcgtaccgcttcgcggagttactcgtggcccttggatgttgatcgggcagatccgatcgaccgcgcccgtataaaatcctgggccgttgatgcgtagatggatggctaggattagaagaggtgtaccgcttcggtgcattaaatctggaccgttcggatctaatccaatggccagaattcatggataccctttcgctgtggcgattttgcagaagagaccctagaagacttaagaatcaacccgccgtcccatgctacagccctctgagtctcggggatctttt

SEQ ID NO: 12226 - DNA, 945 bp, Zea Mays
gtgattcgtgcaccgtggccgtcagataagcatagcccagtaaaaatcttggcgtctgatccacttgtgctcggattgtggctaagttcgccgtacccccctagccatcggtcgaccggataaatctcaccaccgtcgagctgccgccgttgcgcgccacatgcctcaacgcgggacttcatcgcggtgactcactggatgcatgtccggcgatcaccggagccactgccacggtgaaagccacttttcccccacactgagctcgccttccctctccagccgccagcacccctcggccgaattcatcactgtcgctcgatgcgcctataaattgagtgcgccacaagctccgtagggcagtaagctatccagccaccacgaatcagcctcgaccattcgctagaatccacgaattttgaattcgccccaaatcagtctccgccgccatgaagaacagctcgctgcggccagcttgattccggttagctcgtgtccctttgttgcttgttctagcatccgtaagcaccccacgaacccctcgacccgttcaattgaactggaccaccacccatcgccgggaacatcttcatccatccgtaaccttcacggtcaccgtggctagcacaaccctattattgatcattagtgaaattaagttgggggaaaggtatgggatgagtccaatgccgtgtctgtcgctcgggaaccctagtcattgccctatccggccgatccaggagctcgccggagttcggttgcgtgcgacaccgtcggggaccttcccctgcgaaggattagaaaccagagggcatttctgtaatctgtcagcgacacagtgtaatagtaatagaacccagttaaggttagccaaaaccccagggtcctttctgtaaagacgtcggcgcgggcgcggaagcgcgcgtgattccgtgcggaactgggccg

SEQ ID NO: 12227 - DNA, 342 bp, Zea Mays
ctagccacgacgaggtgctcacgcggcggtatttagatcgatttgggggaaatgggcaattgggcggctctggtggacaattggaggcaagtgctggtgtgttggacgcataattacctagcggagctccctgaggcttcaatttatagcacgcaacggcggtggtgctcaatttggaggagaagcgctggcgactggggagaggggtgagtcactgcggagatcaactatggcgatcgcagggcaagttgctatagcggtcactgggcagtcactatggctcacgatgaagcgataaatgtcctaaggcgtggcgcccccacggtgaatggcgaacacgtc

SEQ ID NO: 12228 - DNA, 473 bp, Zea Mays
tggagcatgatagcctatagatactttgattcactgtccatttcagactaccatgaagagagttgtgataatgacatgtttttcaatatccgacagctagagaatcagcggacaagaaatcaactaccataatcctaagagcagcaattacaagattgaagaaaataaatgatagtggcaaataaataaaaatatataaaacatgaatttacctctgattcccatgaaaaatacccattcttgatagaaatggctggaagatcaggatcaataggtggatttggcagaagtaatctctcttcagccaacaggagatcttccagacgcttcaatgacaccttacaattaaccacctgttaaattcaaaagaaaagcaacactgttaagatactgtgagtaccaaacataactgttgaaggaaaaacaacaccaaaaatcaagccatcaatggttagaatcaaaatcccagaaaa

SEQ ID NO: 12229 - DNA, 621 bp, Zea Mays
gggttcctgtcctcctaatatgtcaaactaacccgtcaactctgagtggtagaggaaacggtggatgcaagtaaagggggcactccgtagggagttgcatttggatcgggagctggctctaattccttgggatcctcctctccctcgcttcctgcctcatttgcctccatgtcatggtggtgcatctccaggtggtcattagcttcctcaagttcctcctgcacatcatggagctagatctctaggatatcgatggtgttatcccggatctccaccttctgctttagagtcatgatgcactggctcaactgttccacctgtaggtctttttccaccaattccgaagacaagtcgaccatgaagtcctcttgactgtcgagagtgatcttagtagtttgagctagatcggtaaggtgtgccatggcgttgctctacagggcctgtaggcggtacagtgcactcatacactaaacagtgattctcccaacctggtcgggatgaatggcccacacgtccttcacgtggctcactcggttgcaccacatggggtcatccctcttctcggcggggaagagtcccagtgggtgcatcatcatctccaggggatgatatctgcagaag

SEQ ID NO: 12230 - DNA, 363 bp, Zea Mays
cgaaggcagcgctgacaagacctagaatgcgcgagctctctacctcctcttcagataaaatttcttggcccttcgaagatttttcgccttcgtagaatcctttgaagttggcataaaccaagtcaatgttggtccaaagggacttaaaggggaaaatggtagcagttgagtcattatctcgagaatccgggtgcagttatatgacgaagtggtagtgatgctacccttttcatgctcttgggcagctgtggtcttctttggagccgaggtcttcttcatagttgtatctttctggacagacattttagccttcttctttaccagacccgaaggtggctcttcatcagcctcactcttagcagc

SEQ ID NO: 12231 - DNA, 416 bp, Zea Mays
aactaggacaagtcttacatgcacccaacaagaaagatctagatcaaagatcctggcatagttagtctgcaatgtggtaatattcgacatgtgaagagcacacccatcacatccagtctcgtcggacaccacaatagaagctctagcagactcaagctccctaagcgtgctctcatacttgcatttgtattatttcctctcatgtgcatcaagtctaagaaacttgtcctaactagccaaagcagccattagctcatctacctcaacaacgagatcatcagtgaaaattgatacctccaaggtggagtcatcgtcaatgtccttgtcatcactgctgatatgaccatgacaacatcatcaacatcaccgacaaccttgctaaccactatggtaatatcaccgacttatacaccgac

SEQ ID NO: 12232 - DNA, 741 bp, Zea Mays
ggactatgaggacagcaaagagctcaccgggttttacgacatcgcgaccaaggctgcgcagatcgggtcggcgcacgcgacgaggagggggtctcgaggctgctgctcgctgcgacactgcacatgtcgacggggcttgctgcgacattttgtcgaacatgtcgagggctcgttgcggaggaagagacggtgtggccgctgcagctccgcgaactaggcgagggtacacaggggagatgctcgggtatcggccagggacgagttgtaggcatccttggaactagggaagcgcggtcgttgatggtgaagatggtggtcgaggaggaaccgttgtggccggagatgcagagcgcctaagggagcgaactgggtgccatggagggggctcggctagagctcggccagcagaaagtcgaacgccatggctgggagagatgttgtgcttcccggggaagctgctcgtaggggagctcgtggcaaggcgccatgggaagagaggccatgtgagggagatagccagcgtaggaggagccgagagagataaggctagatgggagaggaacaaggtgtggcgactatgggagaagcagctggcggaggtacgaggaagatgagaaggttgtgcagatgggaagggtggatgcaaaggggaaacgagggattttcccaattgagacttatttatacttggaaattagggttatggtttctagtgtgctcaaatgggcgggaacggacttg

SEQ ID NO: 12233 - DNA, 330 bp, Zea Mays
gactggtgggggctgcaggtcgacgaccactgcgcgctggccagatgccccacggcgccgggagtccgtgcgcccggctgccccgttcactagacacactcaggcaccacccagggtattctataccggaagcagtagtaatagtagtatagctaatctcatctcatcagacagaaaaatatcattatatcactgaaacaaaactcggaacaatgattgcgaaggcatgctaaaatcaaatgcgcctttgctcagacagttggcatgcatgccctactccagaagcaattgtacaaaagacaaacgtttcctgaatatgcatgaataacg

SEQ ID NO: 12234 - DNA, 650 bp, Zea Mays
ctacaaactgactatagagacctgactcatttacccactcctttgagcttgaatcgagtccaaagttgatcaaatctcactgtcaataaaaattcaggctataggggtgactgacagcagtacttggagtccatttaactccatcttttgtacagaacttatgtctgatgacttaaccaaagttatacccctttagtagctctataattttgatgtattgaccctggacaaattccttgtagatttagaaatatagagctctaaagttagccctattcaactgattttggacttaggcatatgagaggtatagggtgtctttttgcaaataagcccaaatctcataatttggtttgcaaatcctcaaatgtgtgaaacatatgatttgaggtggcctaataccttggtttttgcactttggtccaaaagtgcaccaattttacacttggccccctagggttccaatttagggttttccaggggttttttcagggtttttacatatttagggttttggtgccatcaaagtccattatatttgacatcttaatgatcatttctcatgtcttttgaagtttccacatatttgggcttcctttatatccataagccctagtctagggttaagcactttactctagggttaacca

SEQ ID NO: 12235 - DNA, 684 bp, Zea Mays
aattggaccacacaggtactcggtgctccccatggatgttgaatgacatagaagccatgagtggcaggcaagttgtaatgcagggtattattgccagaactgcagacagaaccttgattggagtgtgatgatactgaaaatcagctgcttgcacattggaaacatgatgacatatctgaattacctgaaactgacaggtttgcacaagtccttgttgttttgtgcactctttctgtcagctgatcagtaactctgacgatcaaaaccagacctcatcctgtccaatgtctcctgcaaaaattaatatcctctacgtcgatctgaagatcgtttggttagcttgataggggagatacgtcgaggtttagcccaatctcaagattggttgcgtagcttgacaggttgatgttctgcgtttacggccatgaattcatgatcctttttgatggtccgcgatgccaaaggaggacactgcttctgaagatcgcttaaacaagatagctatgacaaactgcaatttcggcagttgaattcttttcagctcttcgattcttgcctcaggaaccaacgaaactgaactggtaaacagagcgcgcatattctgagaagattgtttacgcgagcttagaagatttaacgagtttgagtttcgctacattgttttccgttttccgagctttttag

SEQ ID NO: 12236 - DNA, 670 bp, Zea Mays
gggatgtagacgacggtcggatctggcctcgtttggaagtagtaggcaccgatgtggtccctagtcttcccggacttgaccagcacgaagtagcggaagagggaagtgtagggggccacacctacgaacatctcgcagaggtggacgaagatggctgcctagaggacggagtggggcgtgaggtgttgaagctgaagcccgaattcctccagcagcagcagaaagaagggcgaaatcggcaacgccaacccgcaagagatgtaggaggtgaacaacatgaactcctcggcagcgagatcgctaaggggggcagcgccggcacagattcttccagcgagccctggcacgctccacccaagcaggccacacaccaggttaagcgcttcctcagactgaaagcggtcaggatgaccaagcgaagccatggcgggtgcggctgcgtgggcatggagcagagaagcatgaaggcaaaggggcgtagccgattgggagaaaatgcgaaaaggtaactgctgcacgcggggtgaatcctttttcaaggaaacctgaatccttattcagggaaaccctttcgtgcgcccctgaatcactgcaggaaatcccgttcgacgggcgccaaggatcaaggcaacccagtctatgacacgggggcccgggtccacaagtcata

SEQ ID NO: 12237 - DNA, 609 bp, Zea Mays
cagttagcaaagactgggccttgttgtcctgactgtaaccctgaaccaccttggacagccattgtggactagcagccgacacatggaatacttcgagaccttcttgggggcggcgagacaatgcatctgctgcaccgttatctaccccttttttgtacacaattctgtactgaagaccgagcagcttggtgaagacgcgctgctgccaaggggtatggagccgttgttcggacaggtgcgatagactgcgttggtccgagaaaataatgaattccgagtgttgaagataaggtctccactggttcactgccaatagaactgcaaggtattccttttcgtaagttgagaggccttgagtcttggtgctgagtgccttactgacgaacgcaagaggatgtccttcctgtgtaagaactgcacctatgcccttgccagaagcgtcagtctcgatagcaaactgtttggaaaaatctgggagagcgagaaccggtgccgtggacaaagcagttttcagtgcctgaaaggattgctcgtgttctcccgtccagacaaacggcgtgttcttcttgagaaggccggtaagtgttttggcgatgactccaaaatgtc

SEQ ID NO: 12238 - DNA, 601 bp, Zea Mays
tcgcttcgcctattacttggtctcactaggcttcgtcaaagctaagttggacacgtccctgttcatcctccggcacgacgctgacaccttctacttgctgttgtatgtcgacgatattctgctcacgacgtccagtcccgccctccttcagcgcacaatcgcctcctggcagcaggagttcgcgatgaaggacttgggtcttctccaccgctttctgggggtcgacatggagcgccgtccatagggcctctttctccatcagcggtagtacgtactcgaaatcctggagtgggatggcatgttcgactgcaagccttgctccacgtctgttgacaccgaggcgaaggtctccgacgatgccagtgtcgcggtaggcgacgtgatgacctaccagagcgttttcgaagccctccagtacctcaccttcaccaggcccgacatcgcatacgacatccaatatgtgtgccttcacatgcatctccccgcgggagcaacacctcaccgctgcaaagtagatccttcgttacctccgcgacaccctcgaccacgaccttctccttcgcccctctctggcctccaagctggtcgtctacatcggcgc

SEQ ID NO: 12239 - DNA, 402 bp, Zea Mays
cgccagttcgctcccccctccctcacaaagtctcaagacgtctgatggcccctgagtagtgtaaatgtccaagaaacaaacattctctttcgagtcatattctttccgcggaaagcaaaggggtgacagtgaggggatggcgaggcgcaaggatggctggggcgacggcgacaagatcaagattggtgtctgcgtcatggaaaaaaaggtgagcggttggacgttggagaaactaatgattcgatgcttgtgtttcttcttgctaatttgattggttttccctgtggaaacttcgtaggtgtcgtgttctcccatggaacagattcttgagaggctgcgtgcgttcggcgagttcgaggtatggctcagaaatgtgttttcccggcggattatcctttgcgt

SEQ ID NO: 12240 - DNA, 599 bp, Zea Mays
ctcgaggaaattcctgatgatgagcggcaagtccactttgaggtacctttggatcctagtgacgcagaaataagtgctatgcttgatttgctggctgaggactcttctgacactgctcctgctaggacgttggtggtggcacctcccccagaaactgatataaccttggatattcagaagcctgtcagtactcgcccaagacgcccttcccgggccaatcaacttgatcctcctgctgacgagcagaaaaaaaaagagacgtctccggcgggtatctagtttggatcgggatgctggtccttcggctcctgctgctgaggaagttcccgtgcctgagcttactgacgctgaccttaatgggggtgctccacccgctgctgaccccaatgggggtgctccacctgctgctgaccccaatgggtgtgctccacctgctgctgaccccaatgggtgtgttgtctgtgttgctgatgaggacgacggggaggaagaggatgaggtccctctgactcggaagaacagtcggcagtacgtcgccagtggtgaaagtagtggagttccttctcctgctttgtctgccctcattggtctacaagagt

SEQ ID NO: 12241 - DNA, 537 bp, Zea Mays
cgagatagtgtactgtgtgcagccttctgggtttgtggactcctctcgctcagatttggtttgtcggctaaacaaatctctatatggactgaagcaggctcctcgtgcatggcatcacaggttcacctcatatctctccattgggtttattgaaaccaagtcggatagttctttgtttatttgtcgccgagggtccgacactgcttatttgttgctctacgtggacgacatcgtcctcactgcctcctctaccgagtttcttcgtcatgttattggggctctccagcatgagtttgcaatgacagacatgggtcagcttcaccatttcttgggcatctctgtcacacgctcagcacatggcctgtttctttctcagcggcagtacactcaggatattttggagcgcgccgggatgagtgcgtgcaaaccttgtagcacacctgttgatatccactccaaactatctgcagatggacctcctgttggtgatgctactcagtactgcagtctggcaggagcccttcagtacctgacctt

SEQ ID NO: 12242 - DNA, 481 bp, Zea Mays
tgccccgaaatccgggtgtgacatgttccccatgccttttgggccgtagctctaggcactgccaggtatctcataaacatcctacccaccgaaaccctcaaccattccacgcctcacttctatctatttggtaaacatccttcatatgagcatctctgtgtttttggttgcacttgttatcccaacttgtcagccactgccccccacaaactttcaccccgctccaccctctgcgtttttctcgggtattcccctcaccacaagggaacctttgtctcgatcgtcaatccaatcacataatcatctcacgccacgtggtctttgatgaagcctattttcccttctccaaggcttcttcctctcccacgcatgctgcacttgatttcctagacatctcacctaacacggtctcagttccctttgaactgtcaccggtttttcttctataggtactgctgcaacaaaggaccgttcacctggc

SEQ ID NO: 12243 - DNA, 616 bp, Zea Mays
agcagagacgaaagcgaacttcagagagggtttattagcggtgatcacgcaacagtaacctctatccatgatgcaatgtgctcagcaacattcttcgaactctagcaaggaatgcacgcggctccaagatctcgcacgctcagtaactccctcctacgcaacccacactctctagtgatctccctcatatgcaccatggacaccaaacattgttgtaggcgagaggcaatggtggtggctcctggcgacggcgctctctcggcaagaacatgattgtgaggcttacataaaggtatgtctagttttgatggctcaaggggatcacagggtaagtatttgtatgaccatataagatcttaggtggtgcagctagctcatctacatgatccgactcgatcatggtggtggtgttcgaattaggggcggaccgagaggggggaaagtgggccatgccccctcaattttttataacatgttatatctagtgttaatttatggttaattaaagaagaactaaagttttgggtgggatgaaacaatcttgtctttggactttttgttgaatggatccgactcccctactcctctcggtccagttctcgcatctatctgtccg

SEQ ID NO: 12244 - DNA, 2095 bp, Zea Mays
gatatcccatgggtcactaaagcacatatgcactctgtgggccgtcggagaggcccccaatatgtcatccagtagagcgtactaatgggcctcgttcacgcggcataaaagccaactgaagcaacaaagcattggataagcggagaccccaaagaatattgcacgagtgtaacatccatgcatgtataatacggaaggatcaccagagttctgaagattcgtcccacaagcgaccagacgacgaattactcagaagataactcggagaaggcaaccgaacactagaagattaggcacacttgtagggaaaggaagtaggcttgagtaagactcaaagatctgtaaaggatatctctctagtcggctatataaggctgcagaggtacccctacaaaaaaactctccctagatggctcaccattagattaattggagacctcatcttccacctcccacaaaccatatgttatctgtgaactcaaggcaattcaatactcagcaccacacatgacgtaggccggatattacgcattcacgtggcccaaacctatataaatgtcttgtgttcaaacgtgccccagcacgtaccatcgagctgcgatcgacgtcgtcgttctcccaaaagcgctacgtgggtaccctatagtgcgcagtcggggctaaacaccgccaatagctggtgtgctaggttggggatgcgacgtcgattcatgacagtgttcaacaccacgatcgtcttcaacacaagagaggttttccacttcagaccaaatgggagtcctacaccgtgttgcaaacatgagaatggaagcctcaaggaaccacaccatcgtctcggctaagaaggagttctctccaaagccaaaggcgacccaagttgcgaacgtggaccggccctgtccaactacggcacggatcgagtcgacaaacaccaagattcaggggattcgatatgtccacatccggcgacagcccaacgcagcaccgcccgcggctagaaccatgcatgcacctacgcccggactgactgatactgctgcaccggtgcgggggcctccactgtctacttgacccacccgggtatggacccggatcactcggaagaagaaagaagaaggccttagtgctcctacagtggttgggggtagctaaggaccatctcgactatccagcccgcaggggcagaagctaggctacggggagcggcaccacacccctatttctcggacgtgctcttcatccacggaaggatagaggatgtcccatccccgatgacgaacccaccttgaagggaggaaccacccaacgcgaggcacgccttcgccggaatcaacgttagaacgtttggcatcatcacatggctgaggtataatgggaccccacatagcccatctctcgggaggaggcgtccaaagtgagggaaactgtggacaagcaagtgttctgcgaagagcgaaactcctgacgatgagaccgccgccatgcacaggatcgtgaacgagagatggcggaacaacgagagctctggagcaacatctatgcttcacgcaatagctgacacaaaagcgagttaaggcgtcaggaggagtacaatcagaaccacgacgctccatcgtggggtcatgccgcaagagcggactccacgacagctctaacaaatggcctcgtcccaattcgacccgtgcaggaaaggcgcgagacctacagcatgcattgccgccacgggaccaccaccgcaacaatgcccaggaggaccgcctgggggctgagggatcttcggggtaccccatggctctggggtggtctagtggccacccaacttcaaggttttgaatgtcgacaagtatgagcccaagcagcaccttggtggttggtcgatcgtctactcgacgaccgctcaaggtgcgagggccacgaaggacgtcatgacggcatacctgcatgcccatcatgctcgggcaggacgcgctccaatggcatcaacaattaggccgacttatgtgactggtttgttactaacttccaatctcttaaccacaaatcgtcccaaccctaagacctcaaatccatcaaacgctagaacgatgagtcccac

SEQ ID NO: 12245 - DNA, 530 bp, Zea Mays
ttccgccgccgtgaatcgagctcaccgtgggcagccctccacaggtcagccccggtcctctgctagttcgtttgagcacccttccatctccgtaatgcttgccgaaccattgaatcgaactagaccgacgcccatcgtcgggaacacgatcacattgtcgttgtgcttacggccaccgtggccggagctccctagtccaccattagtgcaattaggttaggggaaatgctccttaggggtttaattccgtgtatgtcgctcgagagcgccggtcactgccccaattggccggactgcttgctcgccggagcgtggccgcgcttgagcaccgtcgaggactccaagttgtgaatttacagaaccccgagggccttttcgtgaactgtcagcgacttaacacaatagtaaatggacataattctgtttagccgttaagccgagggccttcgtgcaaagtcgccagcgcggagcgcgcgggcgcgctttcctccctggtcttgggccgctgggctgaatccggcccagttccc

SEQ ID NO: 12246 - DNA, 1059 bp, Zea Mays
gcttatatgaatttcctatgatttattaaagttctagcacttatttatataccaaaaatccctttataaattaatttctctgatttttcttctctctggtctgggcgcaacaatactgagaaaggcagggacctcggggtaaattatccaagacacagggcacaatacactggacggcgggtttatttttaataacgatggaggctcatatgcaaatgcgtgaccgcgaaggggtatgcacggtttctggccgccagatcgcgaatcaagggccacgattagatctaggttatcatcaaccagtacacgatgaccgcccacggattgaggatctacggcccggatctactcaccccatcttcctctctacaccgttcatcacaaatggatgcctcagatttaatcacgcgaaacgatatgatttggtctaatctagaccgtcgatggccatctaacggctgagcgtcgtctcctacatcgcccatcacccgaccgaacacccagctgcggcgtccaccaaacacgaccaagccatagccggccgcacctagagctcgagtctcgcttgtaaacttcactccgacaaccgcgaaacgaagagcagtggatcgcgagactggtacatgagttctcaccacggttggtagcgcagacagccctggccacgggaacctgcggattcaccaacaccggcaatgtatttcacgatctccggtgatcttccccttcaattgcgcccacacccggcttcaacacgaccaacacttccaattcaattgaccctgaccacccagcagacctcggacgacgatgcaacacacgacgacaggcccgaatcgctccctcgcggtggtgtctggcggcgggatggtggagagtttggctcggcgcatgcgcgagagagtagcagggggagaacgggtttcgggaaagcttttatgggtgggcggtcgcgcatggataggatcccgggacgtggccgccatgcgcggagttggttgacgggggtggtggacggagtccgagcgcgtggaaggagctcctggccagtgggcccga

SEQ ID NO: 12247 - DNA, 1347 bp, Zea Mays
accttcctgataaagagcttcttagattgataaatttggaaggtgcttgggttggatgtgatataacaacaggctcctaggaccagaaaatcatttcaatagtatgtagaaaaaaaatagaaaagcaaggcatctataaaaggaagtaattttatccatacatgcatcagttcccatcctccatgtggaaccagggataagtacaaagggtttcttggatcaacattgtgaacctttacagcctcacccggacttaaggtgccaagggagcaacttgaatcttcattatcgaggtggctagaactgacagtataatgtgcagcaatgggaagatagtatgtcaaacacaacggggacttaataatgatgcaccaatcatatattggttccatctgtacatctttgcctatttccttgccttctatgctcaagcaaaaccacagtccatgacaagaattcgaggtgccatctacctgtgagcagaatagcaagttttccgattcatacagatctgatatacataaatctaggatctcctcctttctaaactcggtttgactgcgcctctcctggacatcactccaggagtaattttcatgatcatgatgttttgccggccttaactgcaacatatagggcataagaggatgtgagaggcctgatagtgggactggaatagtagaattgggctccagcgttccaatcaggatttgatcctctttaccaaaactgtctccctgttcatctgcccgtgcactttgagaaattcttccttttagacgtaaatcaacaatgaaattggttgtattagtaactgacacaagggaacgtatgctaacgtatctgttgccttccttgactgttgcttcactagcaatcacacaattaccaaacctccaacatgctgcaggtacagcatagttcaacttcatgcttgtccatggcccttcttttgaagggctaatctgaatatatccagtcttgctttcaggactggctctgttcccttgttgtacactagctctaccagaaacaagtaccgcaaatcttatttttccactaggtttaacagtttcctgttcctgcaaagaattgtcaatataactttataaaatattgtaagtatatttcgcagaagcacactttgtgtggactctattttgcaaaagtgactcaatacatgattctccaaatgtcagagttctcaccactgtcttagttgacataaggtctcctaaagccaaatcaaatttgacagagtccggattagaggtaggagggagcttttgcacaacttgctccaatggagcagagtatataccaactggttgacctgttctcaacata

SEQ ID NO: 12248 - DNA, 406 bp, Zea Mays
ttgacactggcgtatctcctgacccgaagcatatcttagttcgggacacacatagaaaagcaaggatttggagcagggaagagaccctacatgggatccttgccaagataggcacgctagggtagctaaacaagcgcttggataggagcagaagcgataatccacgtgttcgatcgcggctgacactcaggagcgtgctctgaccgcgcacgccacgagctacggtcggctcgactgctcgcctagcctcagccctcacctataagaagccccagcccttagctttgccctcctgcacgccccatactttttactggtgactggacgccggtaatcgctagaacaccgagggtggtgccatctgcaagctcgtcgacgcatcgaccaccgtagcctagccactcca

SEQ ID NO: 12249 - DNA, 539 bp, Zea Mays
gctaattaatcaacctttaattgcagctaagcagagagtgttcagctcgtttaatttcttctgtaaacataatgacatgcgtatgtatgtctcttcaggtgagcgcgatgcaggaggagatggagaagatgaaggaggagaaccggatgctccggcgagtcgtcgaccggaccatgcgtgactacgacgaactgaagaagaaagtagaagcctgctatcagcagcaacaggcagatgagcctaaggtaataatagaggagtagctagctaatgatcctacgctaatcgattaatcttatctagcttagctagtagggtgcgtgttatccaattatagcctacgattctaccccatgttccaccatctaggtagcgctaatctcgtgccgcttttaaaattcttccacgtgacaccataattaccatgccaatttgattctctaattcgatcgatgcgtgcgcgcaggagcccgaggtgttcctttccctcggcgccaccgccgccgggactggcggcggattcgcggagccgaagcgca

SEQ ID NO: 12250 - DNA, 405 bp, Zea Mays
caacaactgatgatgatgatgatgatgatgattttggggttcctcctccgcctccgcctcctatgcctccacgctcacatgatcatgaggctgggagttctagtgctgcccctgctactcctcaggctatggaccctgctcttgcttcgattctttagactctctctcagcagcaggctcacctggcagccgagcaggcccggttatccgagaggatgctctcgatgtttcagaacatgcaggacaggcaggatgcgcttcagcagcagctacttcaggatcgggctgagagcagggcattcatggctcttatgctacagcagtctggtgtctcaatacctccggttctgtctgctccacctcccccgcttcacgctccagttgtgccatcgattttgtcaggac

SEQ ID NO: 12251 - DNA, 495 bp, Zea Mays
acgataaaactctcctgtccaatctgctattaaaaaaagacataaaacaacgtcaaaatcagtggattcataggggaggctgccaaggctacgccctacccgcccgtcgtgtgttaaaggtagtgatagatctttagaccaacttaaatgtcccactctataagccaacacatagcatgtctgcatctaacatgacaatctatcataaaatgctatgttaacgactcagttgttactaactaattatttagtttcatctgtaaagacaacataagattaaatatccttatccaacacctgtgcaccataactacagcctcgtcctagtcctagcatgcgtcctaactctagtcatctagtgtccgagcctacaatgcgtcctaactctagtcatgtagcgtcctgtgtccgcgctaaccgctagtcatcggcccgctattgtctcaccagtgattgccctccattttctctatgccacacctacggttgacagcc

SEQ ID NO: 12252 - DNA, 407 bp, Zea Mays
ctgggttcacccctttccgcctattatacggatcgaaggccatgtctccgcaagaaataaaacatgggtcgcctcggacagccgcgtcggccgtccccgacgtagatgagccgacttcgaaggacctcatcgacggagaccgcgtcttcgccctacaggctctggacaagtaccaagcccagacaaaagcatggcgcgaccacacagtcacctcgagggagttcagcgaaggagacctcgtacttgtccggacagctcggacagagtcccggggcaagttggagccgaagtgggagggccctttcatcgtcaagacaaaggcgtcccccagttcgtacagactcacaactccatccggcgaagacttagaacattcttggaacattgataatcttcgcaaatttttt

SEQ ID NO: 12253 - DNA, 648 bp, Zea Mays
cccgtctcggctagagacggtggcgctagctcctagtgcggtggagcatcgtcggcggaggaccgagggggcgcctaacagccctatgcatggattaaatgggtctaccacgaagttaaggtggttgcggatcagctaaggcaattcgtaccggcaggggtgatggcggtggcgttgtcctcgatatcgggcggtacgacggtggtggaaaaggcatggcaagcaatcaacgacgtctccgtccacgatttggtctcggaaagctcttattctaagcggcgtgactaggcgatcttcgcagcactagcgtagatggtcaaacggtgtcgaccgagagtatcaacagcggtggcgcgagctctctctcaccctcggtggtttcggctgtggtggcggcgactgttttagctcgcgagcgagggaagatggggaagaggggagaaccacagaggtgctcgagcttttatccctgagtcatcggtcgaggaggaacggaaatcggccgggattctcgccgcggcggtgatttcgcgcggtggtttcggtggagaagaacgcgccgacaaggggggcccacatgccgtcgagtatgcgtcgcgaggagacaacgaagtggggcacctggcggtgcggtctcgccagtcagcg

SEQ ID NO: 12254 - DNA, 316 bp, Zea Mays
gcgggatgctaatggcatgacaagcctttgcccaagccctactaagaatctctttcgagctccttcccttacttgtccagggaccagtattgccttggtccagaggcttgagcaagattgtagtctctaacacgctaaggtacttgttccctactccttcccatcatcctatcaagtggcccttgagataccctctagctggaggatccaccacccatgtcataacttccaccagccctctgactacattcgtgctccacatgtgattgatttagagccacttaaggttcatcctcgtactgatcgtcccaaaaat

SEQ ID NO: 12255 - DNA, 433 bp, Zea Mays
atatccaaggcttttgactcggtgtcatggccgtttctcattgaggttttgaggaagatggggtttgggcagatttggtgtgatgttgttagtgggttgttggctacttcctccacaagaatcttgctaaatggcgttcctggggagatcatttcgcaccaaaggggtctaaggcaagcgacccactctcccctaggttgttcattttggttatggatgttctgaacttgctcattcaaaaggcttccgatgaagggttacttcagcagctatcatctgggactttgcatcacaggctttctctctacgcggatgacgctgtggtttttcttaggccggtggcttcagacatcaatttggtcctggagatccttcggttttttggggaagcctcggggctcaagaccaatgtccagaaaagtagtgtgttccc

SEQ ID NO: 12256 - DNA, 467 bp, Zea Mays
cagtgtgtgcagtccaaaacatcaactaataaatttcagctcctatttacttcaagaattaccatgttatacagacatgaattactttaacactttaccatttattagagttgaaataaacaaatgaggaccaacaattcgactaactaatttttatccaagtcatttcgtgcgctagaattaccgtacacatttaacaaacacatctaccacaataatcgaacccggtatatgtgtgtatatcgatgcgcacttcacacaataatttgcattttaacttagacaccacatgatcactactacttttcatccgcgaccataaccatgtgcatttaggccataacaagcaaatcaccgtgattacgagcttaaacaaagccatctaacaagtcggctaaccagaggaacgtcatatcccgctatacaacatacacgtcggcttgcctattattatcgtaatctgatac

SEQ ID NO: 12257 - DNA, 305 bp, Zea Mays
atagaataagtaatataaattgttggtgtcttcttctcatgattctgtttttacttggctacagctccaaaggttgtaggattaatatatcattttggtgtcaaataattggagttagtcatttatttgtttgtgtcagaaatctggagtcttttattgctctgaatgcccagcagctaaataagggtattgttctgaatttagtcacaccttttcattaataagaccaaaacatttcatttcataaatgtcaatgaggtttggagaagagaagaaacttgtttgttgctgttattggtcgacct

SEQ ID NO: 12258 - DNA, 478 bp, Zea Mays
gaaaaattagagagctatggtggctaatcggaggcaggagcgggtgctctggctttgtgattacctaacggagctagcggtgtgcttaatttatagtgttcaagagcggtggccttcaattttggaatggcgcgctggcgttcagagaggaagaagatcactggtggcgcaatcgtggcgttcacaggtgcagtggttcagagagggtaagcctaagtgtgccacggttactaccgcgtagtgaagagtcacggcgtggcataattgaggtcgccggagtgtccacgacgacaccggcggtccggccgtgtcgcaacagctacaagcacggtgataagcttcccctgtgaccacatctgcttccccgcaagatcttttacctccccatggatatccactgcgtgcccggcacgaatcacggcgaccgacgcaaatccggacgcgtggatcaccgacggcgagggggactgaaccctgg

SEQ ID NO: 12259 - DNA, 434 bp, Zea Mays
tttgagaagataaatccatgtgaaacgactgaaatcatcaaggaaactaacataatatttaaaaccaccaacggatgtaacagctggcccccaaacatcggagtggactagttcaagaggggaagaggttacatgcattgatttttgaaatggcaattggtgagccttggcgcgttgacaaggatcacatactctagatgactgacgcggtgtacacgctaacttattggacttgacaataaagtcgacgacgctaaaggatggatgaccaagctgacagtgccacagatcagaggaaactgagtggctagacagagcagcatggtgggacacatgtgatgaagacttagagcatggcaccgcgtacagaccattgaagcttttaccgcgtagaagggttctccgtgatttttgatccttgatacagaaaaagg

SEQ ID NO: 12260 - DNA, 429 bp, Zea Mays
gtcggatagtgtccaggaccgaaggcagtcgactctgctctgtctcggtctgttgcacttcgcgggaattggaggggcggctggtgttcattcttcgcaaacctcctcgtttctcggtgctttgggacgacatgaacattcattgggacagccgactgttgctgccttggtttgtggggctgggggcatcgttccaactgccgcaatgccctcgagcttggggaagacctgggggtcctgctggtgttctgggcccaccttctgcagcacgcgtggatatggcggctagcgaggctatgtcgacagaaagcgtggatggcgtgcggggacccgaggctgttctagttgtgccatctgtggagaagatgaacaatcctcaagttttatcctcgttgggccgtcttggcttaactgggtcgggtactgtgg

SEQ ID NO: 12261 - DNA, 1011 bp, Zea Mays
tctttctgagagcatcatgtgcccttaggaatcgtccagcttaaggaagaagaatttcgagagttgactcaaggagggcgatctattagcgagtacatccataaattcacggaacttgctcgttatgcaccagatgatgttagcaccaaagtcaagaagatggcccgtttcttgaaagggttaagaccagaactcaagactatccttgccagccaagacttcctcggcttctcgcacctctcaaacaaggccatccaggtggaaagagcccaagaagaggaaaaaggtcacctcaagagaaagtttcaagttctctgagctcaacagcaggacaggcactagagggttcgatcttttgggtttccttccaaggggtcaaacctcagcaagccagcaggatctgctacatcatgtttcaactagcctggtcaaagctccttccacacccagtccgttcaagcagccaaccttcaactaatgcttgttggcactatggagaccctggtcacttcaagaataattgtccacaccggaagacatccgtacctacctactccaactcggtgaatggccccaagaatgtttcggcacccgcctccaaggcactctccaccaacagtcagttaagcaagactcatttccacagcagggcttgagtgaacaacgtcgacgcccaggaagctcagcaagcccctagagtagtactcggtgagttcctagtcgaatttacccctgctgccgtgttttttgattctggagcatctcattctttcatcgccactagttttgtggaaaagcatggcatccccactacaccattagaagtccctctggtcacccgaacccttgggttagaccttctctgccacctcaaatgctcccaagtcagagttcttttaagtggggtagtattcctggcagacttagccatactaccatcccacggaattgatgtaatccttggaatggattggttgacccgatgcaatggcatcatagactgtgcagata

SEQ ID NO: 12262 - DNA, 534 bp, Zea Mays
ggcggggcccaaacttggtatcaaatcctcctatctactcaccccgatgaagcccaactacgctccagaggataaagcccagcccacactccgcatttagcaatccgaactgcttgccgccgtcagccaccacctcgtcggcgtcggaggccaccgcccaccgtcctataccctccactccatccaaggaggagaaaacgaacccagcctcacccaggctcgttcagacgccgaccaacgcgatcgcttcctccgacgcctcccgcgctctccacgaacaactggtatgagcttcgttcgcctcggccgctcgactcgccgtcgtccagccgcggttctctttctcctcaaaggcaatgtatctcctccggtccccacccctgtgattcaatcgtttcgtattaggtatcgctgcagtgccaaacggtgatcggccggggccgcctggttcaaacttcaaagcaaacttcgattcgcatctcgccggttgagtttcataggcgcgttgcctgatgtatcctagttggaatggac

SEQ ID NO: 12263 - DNA, 538 bp, Zea Mays
agaagcgtgtgggctagatcagcggaggaagaagattgccgccccaaccgcgtctatctttggtttgttgttgtttttacttcaagagtctacacaacaatactccaagatctaggtactgattttctaattaatggtcaaatggcaaagagggaggcaaccgtggtggaccggatacgatctccatggaggaatcatctttcagacggtgagtggaagaggatggatccggtgtgtccacggaagcttgaaaaaggttcaggcacggtgaagaaaaaagttctggtgcgtccatgcccacctagaatcttgcaaacaaagaagccaggtgtagtgtctccttaaaatcttgcagtaggcggctaggcaccacgaaggtgctagatgcagtccctccatgaaagcctgacgaaggcctaaaaaggtgcacatcaagattgtttccagttgatgtcagaaatgtggatatgaggattgccggcaacaactaagtatcggtaattttgaattctttttatgataaatctacaatattatc

SEQ ID NO: 12264 - DNA, 949 bp, Zea Mays
agtgtttgaaacctattttccatcttcctgttgtaactgacatagaccaatttattaagcctctggtgttctagtcggttcctcttttttgtatggatctaaaaatgcacaattgcaagacatcagattcagcaaataaagggctgacccatacaaccactcaaacaagtgaacaagaacaacaatacttactgctacaaaatctgaccaatttctctcacaacctgaagctgcacaacataggcttataaccctttttgctaagatttgtagttcatatgccagtcctccatatgcaccccaccataggactgttatagttatacaaaaattagatcagttctagtgccaaacagaaacaggcaaacaaactaactaatgctgcaatagtaaaacttactaggactttttctctctctttctcttattgctccagcctttgaaaagcattccccttctgatctttcgtagtcatctgcttgtttacttatttttgtttgctcatcctcatcactgatcattttccacaaaacatcattgaacatagctcgaagtcttgcagcttgcctcctgtctttatccctcaaggtaaagaatttacctggattcaaataaagggctgccccatataatttttgctccatctgagtatcccacctcttctcaaagcatgagattacttcaacaagtaatcgtggcttctctttcaaagactcctgtatggtagcttttgatttgtccatagctgccattatctctggagctgctggcgtctcatcgccgtcagcaatccttagagcaatgagtagtggttgtgaagcccgaagacaattttcaagagtttgccaaaatgatactgaaaggacaatattttcatcttgttcaccttctttaactagggaaaatttagacccgttccattcatcactaacaaacaagccttgtaatt

SEQ ID NO: 12265 - DNA, 887 bp, Zea Mays
cagcatacgaggggatattcagcgacggagaaatgtcaaggcaaaattagatccttgcgccaataccttcgaggctggtctaagatcttcgaaaggagaagtatcaacttactcggaagcttgatgagttggacaaaaaggtagagacttctcaattgtcacctaatgagttaacaatgaaaatttatatggaacaaaggcttactacaatattaagggaagaggaaatccgtctcttccaatgggcaaaagttaagcatcttcttgaaggggataataacactaaatacttccagttagtggccaatggaaaacatcaaaaacaaagaatttttagccttgaggatgatgagggtaactgtatagaagaaggagatctcaaacaccatatcactaattactataaaaccctatttgggaagacagaccacaactcagtaataatggaggaatcaattacttatgatatctcccaggttccggatattgaaaacgcgattctaactgaactattcactatggatgaggttcgcaagactgttttccaaatggaacgtaataaagctcctggtccggatggttttccggcggagttctatcagactttctgggaagtaataaaggatgatttactagccttgtttgtggattttcacaatgataccctgccagtttatagcttgaattttggggttattaatcttctacctaagaaatgtaatgcctcaaaaatccaggagtatggacctatttgcttacttaacgttagttttaagattattactaaattcctaacaaacagaataggggtggttgcagataagcttattaatccctcacagactgcgttcatgcctggtcgcaatatccttgaaggtgtaatcatg

SEQ ID NO: 12266 - DNA, 452 bp, Zea Mays
ggggggggggtcttcgtactgtatatctgcaatttcttgctctagcactcttgttctttccttctcgtccgtgatcaaattgtctcactcttgggatatggtggatgagaagggctgaatgagggtgggttggcgtgtaaaagatatgcggagtgaggggagtgctcaatttaaaggaaccgatcgtgtgcttcatgaatttgggcgagagtgttcataacgacggtagaatatttccacagagacccaaccatcgtggcacgcggtgaaacaatggcctcgggcagtaactatctacccagcactactcctagcattgtggtagatcggctcatggcatggtgcaaccgaggaagccagcagctaccaagggggacgactgttcagccacgtcgccggtaagtggacacagccgtgcagagcgtcaattctaccccgctgcgactttttca

SEQ ID NO: 12267 - DNA, 770 bp, Zea Mays
gcgaaattaataatcaaatatgccttgcaacactactcaaatattgatattccctacaaaaaataaatgtagagaataacacatttaaattcccattgtccatatggtagtgttcttaatcacttttatgctttttcttactgagaggttcagaagaacagggagaaacatgagaggtataaattatatgggtgttccttagtctattatcgcttaatctcaggaggtgatcagaaggtttaaaacagatgcccctaacaacctaatagaattaattcattgctaacctattagctaataaacttggaaagaaaccaacttaaaggtacaacaaaccaatcaaatctgtaatatgtaggcttatgttgaagccatgctaaaagtctattattggaccactggctcacaattttcagataccatacaagataaaagaagacataagtgattcaaataatcgtgcacctatttcattattgtagtagcgcgatgatacatgtatgattttatcttcttaaagctgtaagactttcggctcagtgtaaaattcgggtttcattcctcataatatgttgagtatgagaatgattaattcgtttttcttgtttcgaggtgaatcccgggaatggttcattggtagtgagacgatcccaagcatctgggacaccttcactcaccaaggttcacgaatttaagtttttagttatgctacttagaagacaagtgccttgtacaggtctgacttcatgaactaatctagcattgtttgt

SEQ ID NO: 12268 - DNA, 328 bp, Zea Mays
cttcaatgacttcgtcaaccgcagtagagtcctcaaccacaccaaccaaagcaccgctcgcaacgactgggatttctcatgccctcccaatagcatccgaagatgccacaatggccagctcgatactcgatttatccccttccattgctaatggaatgaacctggcaaagcatgaagattatgagaaagcagaaggctgaaaggagtttcggaggtagagaaagcaggagcagcaggtcagcaacaacagcaaatattgtacctcattgtcaggtcatcatctgacgcgagattcgaggaatcacattcattttttataatatgagct

SEQ ID NO: 12269 - DNA, 2290 bp, Zea Mays
acagcgcgagcgcgcacccgcgcagacgagaagggaggagcagcgagtcccgtccgtccttgcacagttgcacagcactgcctggctgcctgcagcccccttctctctgcgccatctggtcatctccctccccagggcttcaaatccgcggccgcgccacccgctgagctgctgctcaggtccttgcattgctcgaggcgccccagcgctggtcgcatccgtgccttccgccgtgttcccgggggcagctcctaggctcgctcctgttctgcatctgtggcgtttctttattggcccggagcagcggcagcgcttaactgtttccgccattgatccggcgacctcagctctggctttgcccttgtttgtggaaccggaaagccttttctcagcgctcaaaatcccgcatatgatctggtgctgggggttgccaccaacaggttgttgcccctgcccccgtaatccttgccccctttgctccttgctttcttctctgtgctgcctttgaagtgttgccagatcgctcttgggagatcactggttcgttagccggcccatagtttgtggacaaacaagggccagttcggtctatttcatttcacagaaggggaaaaaattaggcggcgggatcctgctctttcctgcatggtcccttttggagatactgtttgggttgggaggaagtaaaagcggacaagcttggaggttccgaggagggaggaacatatccctttgtagctgcatgaggaggcactgagacaatgagagatgacaactcaagcaagaacaaggtaagcgtgtttgcacctccatcatgtttgtagtcacgtttccatgttcgtctctgatcctgttttggttctgattggtgctcaaaaagctgtcctggtccaagacccttgttaggaagtggttcaacatcaaaacaaaggcgaaggatttccattcggattatgcagccgaggaaggtacattcatttatcctcaacccccaacaagtcttttcactatctgttctaacagcaaagaaactgcacatttctgtcattaaacatctctttaccacagtaggatcagaatgcctactcttttcatgtgctaattggcctcatacttcctgacttcctgttctcttcagtcaacctcccccctacggttggtcggttgcagacacaagcagaatatgctagtgactccaatacactagggttctctttttagtttttactgcatctgtgctaaaaaccccttctgaaaatttcagccggagtgcagtggaggaccagcttctcggatagagacgcatgtaaatccaagaaaagcaggacaggtaaattttgattgtcccctgacagtaactatggcatcttcctatgagtgtgactgagttacttaactttgtctacttacatagagaggttgactaagaggaacgtggagcgagatggtagagtagaaaacggatttgatggtgcttatattacaaacacgcaggactacaggtaaaattcttgaccagtcagctaatcgttggttaaaggaaaacccctgtgacatgacaatccacatacttgtgtgaatagggtcttcgttgctacatggaatgtcggcggaaggtcaccatctagtcatttgaacctggaagactggcttcatacttctcctgctgctgatatatatgtgatagggtatatttctgcattttgctaaatcagattgcttctctctaaaccaagaaacatcactaaaaactatttttttataaaaaaaaactaatacaggttgttatgccaggtttcaggaaattgttcccttgaacgctggtaatgttctgttgaccgaagacaacggtccagcgaagaagtgggtttctctcgttagaaaaactctaaacaaccttgaccaacaaggctccggtgtctataattaccacactccctcgccggctccagacccaatcgtggagctcaatgttgacttcgagcgatcatcaaggaggcaacggaactcgtcgtttttccatcgccgttcgttccagtccttgaaccgcagctcaaggatcgacatgatggatccgcactcgttagtggaccgtcgattcagtgtctgcgaccggatcagcttcgggagcaggccaagtgacgttgacaccagcgtgaggtgtggtgggtcgtctgatgatgagactattgacgaggaatcgcctagcggtatgttcttcccaccgatgccgtgtgcgtatggtgctccactatgcgatggttctaggtaaatagctcactgaagataa

SEQ ID NO: 12270 - DNA, 532 bp, Zea Mays
cagcctgcggcacttgttttccgtagcttacttgtcccgaacaacatccacatgctgcgctcagaggcgctcgatcctgccctcgagtcgttgcctctcggcagcgaactccgaagtcaaggcgcccgacgcaacatggtcgacgaaggcggccgcctgccacgaaaaaaatcatcagattcacaaccacatcaaaacaacgaaccaacgaagtctaagttgacttacatgcttcagctgctgggacacaaagcccgccacgtcccttgcggcggcggccgatgaaatctcaccgctagcgcagaatttggaccatgggtcatgtgaagtacccttcgctccacctgccgtcgtaggcgaagtggccgccaccgaacccgggacaacagccagctgccccgcattcgaccctgcaccataaccttgtccatcattgcaatccaaaaaaactcaccaacaaggtaatcatccacacagatgtccgtgtcaaagtcggcaccacctgctgccgctttgtcggtgtgcaccggcg

SEQ ID NO: 12271 - DNA, 753 bp, Zea Mays
gctgatcctagggcctactgcgaaccccctggactcaatacctctaatctttcaccaccatccttctcaaaccgtgagggagagattgagtgggtggccgccgccgtggctaagcgcttgcatcgccactcctgggccaacaagtggtatgggcgacttccctggtgacgtggatcgcgatcgtgggaaattggtgccgggaggcctagtgaattcctcgccggaatccgtcgttcgccgcacagcgtggtcggccgatccagacaccgtaataattggtatgtagcctcggactaagttcgttacctacttctcgttgcgtagtaaccgtcgcggtgaggaatcatgtgctgggggcgagaatcatgcgttcgccggcgatggcgtggtgcgtattgggcggtgccgccgcgtttgggcgcatacgggggaaaacctttgccagtcgttggatcgaaaggtgcggtcaggattagatcaaagaatatcaattcgctagattagatcggggtcgtcgatccgatgacaaagggtttagattagagtagggcgtggttgtttgtcgtccatcgatataggatctgacggctggggcaattgggagagtcatatgcccgcgcgaatcaattctggtccgtcgggccgagatcgaacgaccagattgctcccgtaccccttcggccaagaaattttgttaaagagaccccgcagaagatagaaatcaacccgtggtcctctcgactgtagtctgag

SEQ ID NO: 12272 - DNA, 449 bp, Zea Mays
aaataatacttatagctagaaatgttgattataggcgatgtccatacatcatagagtatcagataaaaaatgcctgctgccctagaagaggaggtggggaatgggagcctaacatggtgacctaaccgacaagcatgacataggtgctcaaaagatcccctacaaccagaaacagaggtactactggagagcttggacatcacgtcacgcccagggtggtcgagatgatgatgccaagtcacaaaggaggcggccgctgcaagaacaggcggggcaaaggtcgatgtaggggaagcaggcaggcgaagcgtgtagaggggcccgaggctgtcacaccaagcgagaaggttcctggtggcaagatccttcacagacagacaaaacgggtcaaactccatagaacaagagttgtcagtagtgaactgatggacggaaagaagattttgaat

SEQ ID NO: 12273 - DNA, 796 bp, Zea Mays
gagaaactgatggtacaatatcgaaaatatctcaggttcagttcatctcgccgccggtgatcccgcgccgtgatcggcgatgtcgctgcaattcatgcttagtgaagtacatatagttgctttggatgagaaatatcgcattaaggatgaacttaggccactgttcaaccccggccaccgtgtccgcctgattcgcaggcgattcagataagatcgccggagttggccgttgatcgaccgcgcgccacgtgcctaggtgtcttaccatgtcgcagtaactcgtgttacgcatgtctgttgatcactggtgagctcaccacgatgaaagccaccaattccttgcaacagtgctctcccttctctccggccgccaccgcgccaactcaaattcacgagccaccaccccaaatcctataaatggagcgcaccatcggctccgccaggtagtcaagtactcaacgcacccacccgtgcctccgattagccgccagagagtcccaatttaggatttcccccaaatcggtccagagcgccgtattgagtgagctcggcgtgaccagcgtgctgcaagttcgttcatgccctctattctcttgttttagtacacttatgtactcctgatactcctcgacccatccaattaagctaggacccaaaggatcaccgggaacatcttggtttgtccgttgctcgcgttgtcaccatgggtagtgtgagtaagagcttgaaccatgcaattgatcgaggggaaatgattgttagggatcgaattaggtgtcaaccacttctaagcatt

SEQ ID NO: 12274 - DNA, 400 bp, Zea Mays
cagggcataaagtgttgaggttggaggccaagcccctccagcagcagcacgaagaaagatgggatcgacaacgctaacccgctggggaggttggagacgaagaacacaaactctccggcggcgagatcgccgtgaagagaggcaccgacacggatctttccggcgaacgctgacataccccatccgagcaggttgcgcaccaagtttagtgcaaccttgggctggaggcgctcgggaggatctagcaaggccatggcggctacaacggcagaagagcacggagaactcgagggcgaaagggcgctgcgagcagtgagaatggctaccacgctcgggggagtccctttttaaagaaagattcccccactgacgtcccgagacgcgcagaagatctcgcccg

SEQ ID NO: 12275 - DNA, 329 bp, Zea Mays
cagacatacttcgctagggccaccacgacattaggtgtcaattggtggatctgcacgtcatacctctgcaagacctccgccacaaaacgatgcgcaggtaggcgaaggccggcgataaaaaacgcctcgaacacaactatctcaccctccggctcaggaatctcttccgcccccggaactcgtccaactccattcccaaaataccccaattgctgcatgtcttgcacgcgaaccgaggagatcctcgaaacaccgaactccaccgtgtggcccgggtgtaactccaccgccgccaaatcgctcatggtatcctcggacgacgattcgcc

SEQ ID NO: 12276 - DNA, 453 bp, Zea Mays
ctgggtccaggcgggggcacgtgaccatgcccgcctggtgtcgaaggaggcgatccatgtgatgtcgcaacgtcggggggtggctgcttaacatccgagggggatggagtgaccacgggcggcgaggaggaagtcccacctgcaacaacagtagagcaaagcaccgaaaccatatcgtcgtcgatgagaaagtcatgggaggcgtgggaggaggcgtctgaggtggctgcaaaggggaaagcggtcttgtcgaatatgacatggcggagatgatgcgacatgtcgataggtcgaggcagcggtaacctttgtgcgaggggggatatccgaggaagacgcatgccgtggagcaaggggcgagcttatgtttggaggttgcttgcatgttggggtaacagaggcacccaaaaacacgcagatggttataggttggcggctgattatgcaggcgag

SEQ ID NO: 12277 - DNA, 750 bp, Zea Mays
ccatttctttgggcaagcgttgacaaaacagcgaagaaatgtctctaagcattggtttacccgtttggtttgcccgtcggtttgcgggtgatatgaagaactcaatttcagctcagcaccaacagacttgaataggtgttgccaaaatgtgcttgtaaacaccgggcccgatctaaaatgattgccactggaaacccatggagtttgtagacatgattcataaacagcttggcaactgaactggcagtgtaagggtgtgaaagtggaatgaagtgaccaaactttgtaaacttgtccacgaccactaaaatacagtcgaaggatctagactgaggaaggccttcaacgaagtccattgacacagtgtgccacgcagaagacggtactggtaggggctgcaacttgccggggtaagcagctctgtcgggcttagcctgcaagcagatttaacattgttgcacaaagttcttgacgaatgacttcatattggtccatgcgaataatcccttgacatggctgtaagttactggaaccccggagtgaccccctaccgctgaagaatgcaatgctgacacaatgcggactgaatggttgtgtcgtctcccacccaaatacgacctttgtatctgaggatgccttcggtcagagtaaaattggaaacagcggatggatcgatggcaagcttagccaacatatattgagctattgggtcatggttgtagttgttttggatgtccagcaaccattgtg

SEQ ID NO: 12278 - DNA, 972 bp, Zea Mays
gcactaaccagcatttgtcattttcaaatcagatatctgcctctgaagcagcatcagattccaatgcgtcagagacagccctttctgggacagaggcaccttgtgatctcagctgaccagccagctcgtcgaccaaagcctgatattgaaaacaaatgagtgcaaagacagtattttgcctagagtataaccagatcgggaaaagccaaattacctaaagattggagaagaatgaaggaaaccacaaatcatgagaagccaggtggtggctcgacgaaggaatatcaaccggggcaatctgaagagcatcatcagggatcaactcaacatcaccagcaggaatcagaactctagcgtcaggtgcgccggtctctaaggcgacttcctcgtttaaggcatgcgctgttgccatgccatcagaatgtggaggagaagacccaacgtggacatccatggaggtatgagaaggggagcccgctcggacaccctcgggggttgggtcgcagcccgcactgcccatcagagccggatcaccaccagcaacaccctcgggggctgggttgcagcttgcgctacccacccaagccggatcattaccggcaacaccctcgggggctgggtaaccgcttgcgccatccttgaggaccgggttctctacaacagccacctctaaggctgaaggattctcagtcacctccatgggaattgaacaaccttgaccagcctcttggccctgaagactgcactccaaggtcgacgaggcacgagacgctgctcggggtaactctaatcccacatctggaacgtcagagcaaacgtccatcataccaccgtccgtaggctcggacagcaaatcttcaggaacaacatcctcgagagcctgatcaaaatttgctagggataattcttgcagaccaacgagagcagacaaagctggagaaggaatatcactactctccccactgactatgt

SEQ ID NO: 12279 - DNA, 508 bp, Zea Mays
gcgctgaccgtccggctcggcgcagggaaccccactcctgctaccaggtcatggaccgtttggacctaggtcgcggatcatccgtggcaccgcagagagcccgccaagcggaacaactcacagtgattgatgcccagatcgacgcgaacaccaactaattgttatctactagtaatgtgcccggcaccattgtagagaagaaggcggaaaagaggcacgtgcggtgagagcgcgagggtgtaggttgatccaaagaacgtcgtctgttggatgtgagtaagagaaagggatgtgagtaagggatgtgactccgcttaggcctatcgattggagcggccttgcagctaccggtagccccctcaaatagttctgcacgagttcaatctcgcaacctatcgtatgtcttcatacatcatcggccacctacacctgtgttttcccaaacccgtcacatgttcttttccctacatcataggccatgtgtgtggtttgcaacctacttccatga

SEQ ID NO: 12280 - DNA, 442 bp, Zea Mays
gttccatccgagagaacaagcaattccaagcagtaaatgggatcgaatcgaagcacttgcatgcatgggtggtgcaggaggagcgaggaaggaagcataagcatcttcttttgaggaaaggcagatggagtgttgctgcgttcctgtcctgtcatagcgtcggcggcgtcggcaacaccaatctggggatactggaatgaaacggcgacgatgatctagctagatagttcatggtctgcgccggccagccgggcggtcgactggtggctgggcgcatctatccgcctatttatagccacagtcgtcaaacggaacagcagtggcagcgtacgtagtagaggcaagcaaaagggcagggatagagcgccgccgagatatctagctagaagagcctagaagccggtgtagaggatcaggaggatgtctgggtcgtccggctccg

SEQ ID NO: 12281 - DNA, 504 bp, Zea Mays
ctgggttctaacaggagagggtagtctgacatgcaagttggcttcagatgcacaactacttgacttgttaaggacatccagagtagtgaagttgttcatggtagtcggtagccgtgagcaaaatgtaagagaggaggagatggctgctgctgcagtgaatataggagacgaggagatgcctactgcagtaaatataggagaggaggagatgcttactatagtgaacatggaagaggaggcgatgcctattgcaatggaccataatttggaggtacatgatagaggatttacatgggcagaagtacctgaatatggggaaacaattggagggccaccaatacttgaggaggaggaggaggagcatttcagaactattgggtgtgatcctgatggagacgagcctgtaggagtagatgaagagtggaggtactttaaacgtacggaacatgtagtcattgatccagtcgatgtacacaaaagaaagagggctgctctagaattcag

SEQ ID NO: 12282 - DNA, 454 bp, Zea Mays
gatggattcaaggacaaagggtggctgatattgcgccaagacttcttcaagttgttccgaaaagaagaatcaatacaaggacagcgcaagatgctctaattggaagaacatggatgtcggatattcgaggggcccaatctatgggggcaattattgattatcttcacctctggaacttattgttaactgctgaattaaggcagaatgttgaagataagcacattttaaggctggctgccaatggaaaatattcagcaaaatctgcctataaggggtttttcattggctcggttccttttgaaccgtatgagaggatatggaaaacctgggtgcctcctaaatgtcggttttttctgtggttagttgctcataaaaggtgttggacagctgatcgtcttgcaaaaagaggattggatcaccctaatagctgccctctttgtgaacaagaaagtga

SEQ ID NO: 12283 - DNA, 883 bp, Zea Mays
ggaaggcgatgggcccacgcccggattactcgtggcttgggcatgatcccatcgaagttgttcgcttttccagcgcccgacatcctcaaacgtcggagatagctcagagcggaggcgccaggttttcctcgggatagcaaagtctattcgctattagctaggagataagctggaagagtgttaccagtgtgtacgcgggaagcgccctacgatcgtgtatataaggccaagggggatccccatcactttcatggcattagcacctcaccacttaatagacaccacttgtaaacacctcccacatacaaagtcatcctagggagtagggtattacgctcctcaagcggcccgaacctgctaaaactcgctcgactctctctttctcgtacccccggcatgaaccattgagttacaatccacgacaccgtcctacccaaaagaaccacgagggtaccctaggtgtgcggtcggacattaaacatcgacacttccactgttcatccagacttcaaagtaaaatttcccaccaagggcagtagcttcagctaatggttccttaatatcatttgctgaaactgaaaattctagctgaattacagcctttgtgtgttcacagccagctttttcaaacaatgacacggcccctcgggcacccacacaggcacagaaatcccctctgcaagtaaggacttcatcaaaagcttcaacttcaccttcaatccatttaattacaccttcgggatcaccgcgtataaaattttgttcaattgagaatgcgccaactttagcaaaagtactcttcagcttgttagaacattgcatagcaacagaaaaacattcttcctttgcttgacaaagctcttcaatattcttttgaaccctg

SEQ ID NO: 12284 - DNA, 542 bp, Zea Mays
ttgtcggtaccctaaattaggggtaccctttactacagtatgaagacacagtgcccacgcggctatctctagtcgcatgatgaacaacacctgacccctccacatgggtggctccggggccgccacatggccagaggagacgatatactccaaggtggcgacagtgggtccggacccccacggtaaagcgtcggacccctggatgcacagcccggacctccaggcgaggttcaagacctccacaggtacaaactagacccttgggatgggtcccggacccctcaggaggggtccggtgctgacacgtatccggaccatactacgagcgctcccactccccgctcaggcggagacccgatgctgccacgtggcctactgcccatgacgtaagccaacgggcggagccagacgtaaggcctctgggccgcgcggcctctgcatttattgtggaagaggcgtgccgcttgtcaagcttacaggtgatgtgccgccctagcattaaatacgccctgtctgatccactgatgagcgatgtgccgtcc

SEQ ID NO: 12285 - DNA, 413 bp, Zea Mays
agactcacttcgaaaaacctgtcaaacactcccgctacgtaccctactgggttgattcctccaacccagctgctcgtacgaagtgggctccctcagggtctggaggccctgcctcctctgatgagccacctcctcagcctcctcatcacccatcctcctctcgcgccgccgctgcctcgcgtccgatggaccgcagcgggagaggaagtggtccgggccagggtcagggccgaggccggggacttttcattcgtctggccaagggccttcttggcgtcttcgccatttgccgcacccgggcggtcaaggagtctgtgcgccgtcgcaggaccgaccggctgcatgaggatcttcgtcgttatgtagccgagactggtcatcctctccctcctgggtcccctccacctccagcc

SEQ ID NO: 12286 - DNA, 314 bp, Zea Mays
caaatctctagtaccgatatgctcagacacaactcggaattcacccacagctgtccggcatggtgacccttgcagcatgtcacaaagaggcctagttaatccgaaggttaggtccagtgggctctgaactaacttctccttcttctcatcaaccttaacataaaaccactcattcttccagccggttgggcatttggtgtggtagctaaccataggagtcttcatgtctttgcggtaagcgaagttatagcagtcgaaattctcgtgcagtccatcttctctagccttcgtctgatagtgaagctcgtgcaccc

SEQ ID NO: 12287 - DNA, 432 bp, Zea Mays
ctcaagttctcctgtatcaatcgtacttgttgttctgcctcttgtacaatttctggcccaaagaactacctttcaccagtttgatcccaatacagaggtgttctgcacttcctgccatataaagcctcaataagggacatcttcaaactggcctggtaactgttattgtaagagaactccgcatagggtaaactcttatcccaactgccaccatgtttaagagcacaagctcttaacatatcttctagtacttggttggttctctcggtttgcccatcagtttgaggatggttggtcgagctgaaattcagtttcctatccaagaactcatgcaacttctgccaaaaccgagaagtgactgggatcctcggtctaacacgatcttcttaggcactccatgtagacaaactattcgtgccatgtacaactctg

SEQ ID NO: 12288 - DNA, 560 bp, Zea Mays
ctgtataggaccatagtagtatctttgtcagggtcaagccatcaaagcttataacgccctgtggactgtagattgcagcttgcatattatcacaattagcgcccaggcagggggagcagattgttggattgtactctctctggtcataattagatgacaaattgtgctccctctgatcataattagatgacggattgtactccctccagtcctaatcatagtacgttttggacagcaaagctggcttgtaattagtgtttgtgctgtccaaaacgccatctaattgtggccaagggtagtaaaaatgtggtctgtgggttcagcttgcaagaaaaaaaaacaggacctaagagcatctttaagagcttaaaccaacatttctttatggcaataggccctccaacagttttgtatgcaactttctaaagatatgcgaatgataaatctcccctccgactcctcacatatgtgcaagcttcttatgtgctctgtatcctcacttgatggctatcttttccatccttagcacggttttcttcatccatgactgttcctgtggc

SEQ ID NO: 12289 - DNA, 1026 bp, Zea Mays
atcccatggtacagtacctggatcagattagattgccagcgcaggactctcaccgccgacgaccgatccctgccgtgattcgcgccaccgttgttgagatttacactaccagtgatcagataagcttgccagatagtaacccttcgccggaggataattccggtgactcaccgccgtaccccatgtgccttgtggcttgcgcagataaactcgccggtgaaccgccgtcgcacggccttgcgccgcgtgtccaagcattgccaccgcaccgccaccattcactttagctccccgttgctcaccggaatagctgccacgacgttgaacacgtatttactgcgtcagtgttcttcttcatctccggccgccagcacggctcggccgaattgatcaccatcgctcgctatccctataaattgaaggccaggactgctgcgctaggtcatcacgaagccgacacacccgttcttcccctcaattgcccaccatagccgcagaattcccctttttcccccaaattggtctccgccaccgcaaagcacaactccaccgtggccagtccgttctggtaaggcaccatccaattcacgcgttgttctcgtgtctttgtatgctggtgatgctctccaacccgtctaattgaattaggccgccacccattgctgggaacacaagcaaaagtccttagccttcgctgtcctcgtgggcagggcggagtatgtcaccaaccgtgtgattaacttaggggaaatgctcggagtaggtctgatttggtgtccgccgctcgggaacgccagtcgttgccccgttaggccggtctgctagctcaccggagctcggccgcgttcaccgtcgtcgtggacttcaccctgcgaaggaatagaaaccggaggactcttctgcaaatcgtcagtgacacagtgaaacaatgaaagaacctatctccagttagccaagaacccgaggcccttttcacaaaacagccatcgcgcgcacggccgcgggcgcgttttccctggacctggg

SEQ ID NO: 12290 - DNA, 580 bp, Zea Mays
ccgtggtggtcgtggtgaccgcgacaggggtcgtggtgccagtggccgctggcgcggccggtagtgctggactttcgtcccgcatcagcgacaatcatggtcgtgctcaaacgcacgaccgccctgccagatctgtggcaaggagggtcataccgccatccgttgctggcactggaatgacgacagctacaacactgatcctcccatggcggcaatggcggccacctcctcgaccaaaattgatccaaattggtacgtcgacacaggagcaacaaatcacatcactagtgatctcgaccgactgatgcttcgtgaacgctatcatggtggtgagcaagtccaagtcggcaatggtgcaggtttgcagatcttaaacactggtcattctacaattaattctgttgatcgcccacttgcactacgtaatgtcttgcatgtcctagatatctccaagcatcttctttctgtccataaatttacacaagataacgacgtgttttttgaatttcatccaacctatttttccattaaggaccttcagatgaagagaaggctcctggaaggacaatctaagaacggc

SEQ ID NO: 12291 - DNA, 457 bp, Zea Mays
gcatgcgggtgtaccgagtccatggctgagctccagtcccgcgtatccgaagccgattataccggggagaatctctgccgtgcggggcccacggtcagggtggtcttcgaccccgtctgttgcgacatgcgcgccgtcttctccggggttgacttcaacagaaatggcgagaaccttgcccggatcctcatcctttcgtcgtgtgcttgggggaaagtggattccgcatgcgggggggcataaaacccgccgcgacctcttgcctcgcctctcgggtcccctagtcgagccatcatcttctcccatcacgcacggcaacgcgccgccgcgactcgtgaggctaccaattgccaaatccgactgtccgccgttgataccgcccttagaaccaccttgtgtgcgcggtgtgggtctcgggagaattctgttggagcgctgcgaacggagctcgactagg

SEQ ID NO: 12292 - DNA, 713 bp, Zea Mays
cgtgaagccgctgagagtcgtcgtcggacctctactttgctcaagcgctggtatgggggttgctagtatattcgccatcctctagagttagtttatcgccattgggatttaagcttgggccattgtggcgcgggacggtcatcgccggccatggctccgccatgggggctatccatcccgccgcgttcctgactggggagatgagcgagggggatcgcgcctggccgttggatatggggtaggtgggtgagattagaggagggaggtcaaagttataccagccgcagaattcctgatctacggctcgtatcagctctggcgtggtgacgagattagtgggcactggaccattgatctggtgtcgtgcggccgtgatcagatcgtaggatggttgatttgggtcggtatctgtgccgtaggttgtgagatggtcggcacagatctaatctcgcttcgtaaaatcctggctgacgattgttgatccggtggacagcatggtgtaccggttcgtttataagattaggatgatctgcgccgtgagcttctgttccaacggttgtgatccgagaataccccttcagtcagataacacatgcatatgggcccctcggttttataatattgaacccgccatcctagccgtgggaaagctcttgtactggggtccctggaatttacagtttacaccctgaactcttctaaatttatggtcg

SEQ ID NO: 12293 - DNA, 517 bp, Zea Mays
ctgctaccctcgacgcaatactcctggtcccccctaaaggcatgtagggtacaagatctaaggatggctgacctatcatcataatgggccaaaggttcacaaaccgccttttagagtttgtgaatcgcttccagagttgcctagtgcacaatcggaaagcgacaagcgaggtcccaaaatgcgtaaatcgaagcccatttttcatgccaaactctagaaggaagtcgaggatagggagaatgggggccgcttcacaatcagtctgatgagaagcgacaacattacaaaacttcagggacgaatgcgtacatgcgatctcatgaccgaagcagcttgcggctacaccctagctagggagatctattgattacatcctccaccgagaggatgtcgaccatggcctcggcgggcatgccgaagtcatcctcaaagtcctccagggtgccagcggtcgcgtcctctgacaggtcactagtaccaagcttgaagtctaatcggaactccacgaacaccagag

SEQ ID NO: 12294 - DNA, 605 bp, Zea Mays
taagtcgattgctccgttagcagggcatagtggtcaccccgagttaagtaagaatgcaagtcaatcgtgaacaaactaagtatctttgaaacccccttttttattgatgacatatttccactttacagagtacatcgtcgtcccgatagctttttgaaatacagctagggataaaacttcctgaggtgttctatgttccaggagttcctgacttctgtgccatccatctgagtgaggcgatatgatccgggccgagtgacttctgctactatgaggggttcttcccataagggcgataacttgtgtcgtccctcccccgttagaattcggcggaggacgagatctcctactgagaaggatcgctgtcgcacaaccttgtcgtgatagcgccttagagtctgctggtaccgtgctgattggattaccgcattcaaccgttcttcttcaagtatatcaatgtcctccagcctggtggcctcgacttctgctatgttttcgaagatcaaccttggcgccccgaacttgagatcggcgggtagcactgcctctgacccatagaccatgaagaaaggagtgtttccatgcaaagctcggctgggttgggt

SEQ ID NO: 12295 - DNA, 773 bp, Zea Mays
tagaaagttggggactggtctcagcctgcccctaggtgcagcaagcgctttctcccaggtgggacccatccggtctagtggctgctagctacatcttcggggatctagctcgtcttccattattgttggcaatggcaactcccttcttgttcttgcctagagccactctcttcttccagcttcattctctgatgacctctttctctcccaccgacagtatgtcgttgacctcctacaacgggtgggcatggccaagtttcattctacatcaactcatgttgacactcgcgccaagttctcttccaccagcggcgtgcctattactaatctgattgagtattagagccttgccagcacattgcaatatcttacactcactcatcccgacttggcgtatgttgtccagtaggtctgtctctttatgcatgatccccgtgagccccatctcgtgttgatcaagcgtttcatttggtatgtcaagggcacgttgtcctatgaccttcacatcggcactggcccgcttcagttcttgactacttacacacatgcagactgggctggcggtccggattcccggcgttctacctccggttactatgtctatcttggtgataatctcgtcttttggtcctcaaaatgccagacgattgtctctcgctccagtgccgagctagagtaccatgttgtttcccatgttatcgccgagtgctactagttacaacaaccgctacaagaacttcacatctccgttccttcggcgcaggggcggacat

SEQ ID NO: 12296 - DNA, 483 bp, Zea Mays
attttgctggcccagagtggcagccgtaacctacacatgcatatatacatgtaaataagaaaggcagagggtatttgatcgaggaacagaaccctgatcccggctgtgtccggtggctggtgctgtgtcgccgtgtacggatcccagacattcataaaccacagataccttcgagagaggaccttgagcaccgggagcggtgctcaaccatcgaaaccctgctggtgcttacaggacgcatggacggggtcaagactcaccggagtgctcgtgtcggcgtgccatgcgtgaccggacgactcggcggaactgaattctgatggctggtggctagggttctgaggctgcgtcgcactgtttgttcgtgggccgtgggctgcgtaacagcgtatattttctattttttttgcccgtgccccgggccgtggcccaggtggccatgggcctgggtccgcccctcactagaagtcctcgctgtgggtg

SEQ ID NO: 12297 - DNA, 692 bp, Zea Mays
atggaaataataaaatttattgcagaaaaatagtggccgagaagactcctgatgggagggagactctgaaaatcaccatcactacctccaacactggggcaggcacatgcaggaaaccaggcgctagcgcctgttctgcgcatcgcggatggtccgacgcatagacgcggacggtccgagacaccaccagacagtccggatcattccagcagacggtccggcaacgcccaggaaccacgacgaccacgcaccttcaaaccacgacaaccggaaataggtacgtggaaaactaacacattcaaggtagctggccggccgatcagatctggcccaacctttgatcaattattgtctaaatatgtaaaaaagaaggccgaccaaagtgaccggccaacgaagcgacctcgctcacgcactcaggagcgacaacagataagaccgattgaaccacctcaccaatcggaaaagacggaaggtcatactgtccagttgagacctaacgtgcctgcatggacacctccactcccacatctacctatgccatatccatatacatacataccaccgccatacgccccgaatcaaatgtggggcatgccaccatatccatttgggatggcacagtaccccgcttggggggcaccccaagcagtattcaatatgttggcacctccagtacaagacccattgag

SEQ ID NO: 12298 - DNA, 522 bp, Zea Mays
aacgctactactactaggattacggttggcttcactagccctggctctggacttcgacgccatgacaggacgtcttctcaccatatctactcacagggatcaccaaatcaaagtctctggcagcctaacgaagagagggtcggttttatagaattgactaactgaaaatcgaagcaacacacacttaatgggaatcgaagcagcactctatcgcgccatttactggacttgaccgagggcgggcgggctctcgtgccatgcgctctgagctgtccgagggagagccatttgttgggacggttggcctatcgtgccatttactagacttgaccactccgacctccacgcagcgatgccatgggccatgggccacgggccacggatccacaggattgaatgttgtattggcctcatgccctcacaggatgtatgcagtatggtgtattggcctcacaatcacaacacgcagcgacacaacaggccagggaactcacctgctgcggtgggcggtggagatatctg

SEQ ID NO: 12299 - DNA, 306 bp, Zea Mays
acaacagctgagcagcactacaggcttgcagcagagggacaggcggacaacagccagccaccaggccagccccctcaatttccacgacgcttcatgagtggagggagacacgatgcttgcatgcaacagcttctcggcttgcatgcaggttctgcagcagcttgtgcggcttgcatgtggcttacatgtggtttgcatgtggcttgcatgcagtggaggttgagcagcttgtgccgcttgcatgcggcttgcatgcagggaggttggtgcatgcgaagcgcgagcgggggcacggtagtggtctac

SEQ ID NO: 12300 - DNA, 743 bp, Zea Mays
atttgctaaggtttagattccatgcctaggttgttgccggtttgagactgcaagacatttgaaacctttgctttggtttgattcagatgactggctgaagtagtgaactagtaattgctatgctagtgctgctgttgctgttttgcttagtatcagtagtttgtacaaatgagtgcagaaacaggaagtttgcctatgagtcattttgtcgatttgagtagctctcggactgagagctccagcttgagtttggtttggtgaggataacacatgtggaaactaccttttattctgagatgagacacgaattgctagaaaaaggaagtgtcttaattggacagacccagtgttgacggctcccatatgagtgaggtttgggtacggaataactgaggcagccttatccatgcattttggcagagaagctgcatggaaccaggatctttgattcggtgggaaggcttctcactactgagccaggcctgtccttatgtgttaagtagataagtatgaacctaaaatgcactctggtccatgcgaaaggattttttttggggggggggggggggagttctgggtgtttgctcttttggctgttgggtgctctccagctcagtcagagcaccaacttactgagaccaaagatggtaaaggcattatgtagtttgtttagttgagttatagattgtcaatccgtgccaaaaccatgacctaggttatcactccactcttattattattat

SEQ ID NO: 12301 - DNA, 674 bp, Zea Mays
tcgaaattcaccagccaccgtccttggagcctataaattgagggcagggctagttacgccatgaaattgtgaagctctagcacccgtccccacactcgatcgcccaccagctcgcctgaatttcgcgttgcccccaaatcggttttccgccgccgtgaatcgagctcaccgtgggcagccctccacaggtcagccccggtcctctgctagttcgtttgagcacccttccatctccgtaatgcttgccgaaccattgaatcgaactagactgacgcccatcgtcgggaacacgatcacattgccgttgtgcttacggccaccgtggccggagctccctagtccaccattagtgcaattaggttaggggaaatgctccttaggggtttaattccgtgtatgtcgctcgagagcgccggtcactgccccaattggccggactgcttgctcgccggagcgtggccgcgcttgagcaccgtcgaggactccaagttgtgaatttacagaaccccgagggccttttcgtgaactgtcagcgacttaacacaatagtaaatggacataattctgtttagccgttaagccgagggccttcgtgcaaagtcgccagcgcggagcgcgcgggcgcgctttcctccctggtcttgggccgctgggctgaatccggcccagttccc

SEQ ID NO: 12302 - DNA, 467 bp, Zea Mays
ctcaccgccgtcgtgtcccgccatgggcagtcgtgttggcatcaccggtgttcaccgttatccagccaggctatgtgcctcaatgttttaccatgtcgcagtgagtcaccgtaagccactctctactactggttcgtcgcaggtgaggccgccacggtagatgccaccgagctctcacgacagtactctcttcactctccgacctccaccgcgccaactcaaattctcgagccaccgcctctaggtcctataaattgagcacaccgtcaggtccgtagggtagtcacgcatccagccaccaagccatgccctcaattgatcaccagagctcactaatttcttatttcccccaaatctacttttcgccaccgtgcaagaggcctcgccgtggccagctcaattcaggtccgatgttgccctctgctttcttgttttagcaaccttacttgctcctaatactcactgac

SEQ ID NO: 12303 - DNA, 936 bp, Zea Mays
ccagaatagaacaacaaatgcggtaatcgaagtcttttatttaaaagacactccgtgcaaaagtcacctaagggtgcagccggaatagcacaacaagtgcgttaatcgaagtcttttatttaaaagacactccgtgcaaaagtcacctaagggtgcagccagaataacacaacaagtgcgtcaatcgaagtcttttatttaaaagacactccgtgcaaaagtcacctaagggtgcagtcggaatagcacaagcacgataatccaagtcttttattcaaaagacactccacgcaaaagtcgcctaagggtgcagccggaatagcgttaatcgaggtctctctttaaaaagatactccgcacaaagtcgcccacgggcgcagccggaccaacacaggcgtacgaatacggccaacaggccacatcaccatacaaattacaattacatacacacggcgagggcatcacacattacatcggctcgaccttagggataatacccatctccctgtaattaaacatcattatcctcagctcctctccctcaaaaagcttccgcagatccccctcgcctatgcccgccccaaccggcgaagacaacaattctcgttttccaacccggtctactcggagacggccacgctccatccccatacgacggcgcctgccacttcgcgaaaattcacccacactatgttttcccaccacccttcgccgcctacacccagtactcgcaccaggaacatccccagcaccctccacacatggtgaagtctccgccgcagctacatccaacgcaacataataatccaagccttcattcgaggactcctccatccatggaaacgagctctcagattcaccatcagactcaaaacattcagacacagaaccaaacaaactatcatcggtaggcactacggttgaagtctccgccgc

SEQ ID NO: 12304 - DNA, 388 bp, Zea Mays
attgaattggggctctcccctgcggtgcccacttgatgacgatgtggccgagcggcggtaattttggtggctgagggcttcctcggttgcgccacaccagggaccaattcaccacatcgtcgtaacggtatagatggcaagttacccctccatgagctattgcgccgctacgcgccacgaagcatagactagtgaaagatctcaccaccgccgtgaacgttctcatccgaaattcacaaagcacgcgagtgatcactataaattgagtgccctccctgctccgcccctattgttacgcaccccgcgcatcactcctcacctcaattcatccaccgtagcccgagaattcggatttttccctcaaattagtcactgccgccgccgcaag

SEQ ID NO: 12305 - DNA, 286 bp, Zea Mays
gaaaaaagtgttatgaagatgtgtattacaagcctctcaattctcaaaagggcatttaaacagttcatgggagattggactatttggcatccaattcacaagacattcaaaacaaaacacaattggttcacacgagcctaagggctctaagactgatgttttgtgctactgctgcatagatgatttggcagcagaaacctggcttacagaatcttgcgaaattgctaactagttgcaaaattgtttatgtaaacatttaggaaccaaacattcaccaacactggaa

SEQ ID NO: 12306 - DNA, 628 bp, Zea Mays
acgatgaaagggccctcccacttcggctccaacttgccctgggactctgtccgagctgtccggacgagtatgaggtctccttcgttgaactccctcgggatgactgtgtggtcgcgccatgcttttgtctgggcttggtatttgtccagagcctatagggcgaagacgcggtctccgtcgatgaggtccttcgaagtcggctcgtctacatcggggacggccgacgcagctgtccgaggcgacccatgtttcatttcttgcggagtcatagcctccgatccgtatagaaggcggaaaggggtgaacccagtcgccctgcactcagttgtgttcagagcccagaccacgtcgggtaaccggtcgggccacttgccttttttgtcgtcgaggagcattttcttgacggctgtgaaaattttgccgttggcacgctccatgactccgttggattgggggtggtacacggaggcgaaggcaagcttggtgccgatggagaagcagaaatctttgaagtcttggttgtcgaactgcttgccgttgtcgaccgtgagttcagacgggactccgaagcggcaaacaatattttgccaaaagaatttctgtgttgtctttgatgttatagtggata

SEQ ID NO: 12307 - DNA, 748 bp, Zea Mays
ggcggactgcggctcgaggaacacgacgcggcgtgttgtgttggctgctgttagtgcgacgtctgttgtcggggcgggtgccaagagcgtcgtgtgttggattgggccagagtgaaaccactgacactagtgtgaatttatgtacacgtgctttttttaaaaaaaactacacgttcgtaaccgcacaaaattctcgtgggtatccctgcagacatatttatagccggagcgagggacctatggtgatgagtgatcgatttgatagaggtgataaaaaagataagggagatccgttgcatggcaagaacactgcaggggtagggcagctctctcaaataaagggtgttcgggtcgtggtctgtgcctgatcaaggtgatgaagaagatgagggagatccgttgcaagggtgttctaacgtacttgaagaatgaggaatacatgtgacgtccttattcatcctctcccaatgcttaagcttaactttcaaggccttgctgatattgtgcgagaatatttggtgggtcagcggaacttggaaattcatgctatccaacgctcccaccttggtcaggctctagtcatatttcgttttgtttttgatcgggacaacatggttgcattgggtccgcagcgagcgctagggtttaccattaaggtaatccaccatgattaaggttggaatcaacgggccttgaacttcaatagggagtgttggctaatgttgctcggtttcccgtaagatttctg

SEQ ID NO: 12308 - DNA, 830 bp, Zea Mays
gaggactagaagcaccgacgttgagcagggtcaggcgagtgagggcgagggggtgctagaggaggagggtgcgatataggaggttggcgacgtgggagggcaccactcagagtgcaattgaacaagatctcgggccgtgaatcaagaagcgatgagggaaggcgagatctataggaagtcgaaggggagcactacgtgtcgaggaggggatccattcctatctcgtggcgcaaggaaggcaggcccagaggcgggcgtaagacacaaaggcgggcacaatagacataaaggtggttggcaaggagtcagtcatatgcgcgacgactgaggcacagggaccatcgttatccgagtagcgcgctgggagtggggaggggcaaagagtggagggctgcaggctgattgaagcaaatttgaggagtgtttttgtaaagtcgtgacaatggaaaccaggaaaccgcgacgggggaggactagaagcgccgacgtcgaggagggtcaggtgagtggaggcgagggagtgctagaggaggttggcggcgtgggagggcaccgctcagagcacgattgaacaagatcttgggccgtgaatcgagaagcgatgagggaaggcgagatctagaggaagtcgaagggaagcaatacacgtcgaggaggggatccatacttatcccgcgacgcaaggaaggcatgcctgaaggtgggcgtatggtgcagaggtgagcgcgacaggcgcatatgtggttgacgagaaggcgattgtacacgcgacagttgaggtgcagggatccatcgttattcgagtaccgcactgggagcgggaggggcag

SEQ ID NO: 12309 - DNA, 824 bp, Zea Mays
aattcatgattatgctcatagtttaccagatcaattcggacggaaataacattctctttagcatcatcgtagatttttttaagtttcatcctagccttgcactgtattcgttttgaacatgtgttacgtatcctttgatttccagctaccctttcagcattctttccttccattgaacaattcaaccatttacaattcttccgctccctatatttcttcaacggaaatccaacctcgtatgcatattgactataaaaattatacgcctcgtccacgttactaaatgtcataccgactttaggtatcaatcttatatcaatattgtccggctgcgcacaaaaatttaacatttacgattcaatagcgactaaatctaacgtaatataggtacaacattacaaaaaagtatgtaagaaaataatagtatcataattgggagaacttacatggctttgaagaatatgaggtgtgtcctgttcatgcgtcccaatatgtctcatggggatgtgcttatctgcgccgaccacgtctgccgattttgtgtgctcatcaatatgtccaggtgccctcaatgccgcggggggagtaacagatagaccctctgtgtaactagtgatcgcagacgctacaggatgcatgttcattgaaatagacgtacctgttgatctatgcacagacgctacatgttgcatgtcatcgccagcgccggtgctagacattttctcgccgttaatcgtcgcccggtgctctcccttccgccgccgttaaccgtcgccaatatcacagatacgaacgtggacgagcggctgtaaattagaatttgt

SEQ ID NO: 12310 - DNA, 572 bp, Zea Mays
tcgagagagattgtcgagcttcatgaggtttgggcgcatcgtcagggcgtgttgaagctgcggctaccagcgaatcggcgtggttggctactgaaccttggcgatttctcgccggtcgccatggagccgccgtgtcacatgggcggcattgcggtcaccccgatacgtggtatgatgccttctctgaggtttgcgcttgtatgaatcacgttttgctcgattcctagtcatgattacctcaccaatgcggctctcaaagttttccggtggtcctccaccgcatgctggggcggcgccgccatcgtgtttgtggtcgggatgagagagagaatgttgatcgttggatcataatcaacggttgcgatgaatactcgagataacgctttaaaccattggatctgggccataggtatataggatcggatggtttggagcagatcttggtgttcaaaatctagacgatcaatcttagatcctacggtctcgattgcgtaccggttcatataagacacgatttaatttgagccgttagatcttgatcgctcggctgtgctacgctcgtaccccttcgg

SEQ ID NO: 12311 - DNA, 1423 bp, Zea Mays
ggactaagtatgaatttcctatgaattaaacgagttctagaattattcatacactagaaattcatttttctaattcatttatcaatttcccatgggtcctggattgcgcgcacaattagcagatagtacagggtcttctacgcaagaatgcctatgactcataactcctctgttgtgtactgcgggtcgattccatttaaactaggggtctcttttgcaaagatgcacagccgaagaggtatcgataaattctggccattggatctcattctgagggtcatgattagatgacgcattaggtgaataggtacgcagtcccagccaccggattttagtcggacggttatgattttaaaagggttcgatctaatctatgtcgttcatcgcaagatcgatggttgagggcaagcacactgccagatctaatcgtgtgcgcccaccatgaatccgacggtcataagcgattggggcgaatcgttttcttatctcaatctcagtcggccatccggagatcgacgactgaggggcatcttccccagtccagtcgcgtgaagcggcgccgccccaccattacggcggaactcgccggaactacctggtttcccaaccccgacgccctaaatcccgattgagttgcttctatacgctgcgaggcacgaaacgagtacgcgggtgggtaacgtacctagcttggtgaccgacgaagaagtgtttcacggtgcggcgcgacgcacgccgacggcgagaaattccgagcttcccaggcttcaagtccacacggcggtgccctgaactcaacccaaggaacctcgtgaacccacaaggccaacccttttggtccgaaaagcttcgcaggctaggttccacggcgacgatggatcacggcagcaatttctccacacggcgaaggagttctctctctcaccgacgatggcgcgaggaacagggagtatgcgagggtatggagcgaacgagtccatggccacattggctttataatccgcagggacggtcagccgagctggcggattccgagcgaatcgcccagaaattcggagtccgtttcctgtagaggagcttgccgcgtctgtttagattgagttggacccgggaaggggataagcgctgacgaaccgggcccacggtcagtgacgaagaagcaggcacaggcgcgcgcgtgacttacagacatggcccacctgtcggcgccggagataggtggtgggctgcgtggaagaaatcccgagttgggccaaaaacgaatacgccggcccagtaaggttccttttcccttttcttttatgttttcttttttttattttctttaattgttttgaatccaaatttgaatttgaatgtgagtttctcatttgagtccattatacacattcacactctaatgttggaataatatatttttcat

SEQ ID NO: 12312 - DNA, 747 bp, Zea Mays
aatttctctatgacttaggctactattcactggattgcgggttgattccattaaaatccgaggactcttaagtaaaacgcccatgccaaaggggtattctttgcactgggccgttcgatcaggaacctagggctatgattagatctcagatgctgtgaaccggaacgcacgagatccacaggatcccagataaagggctaagatttaatgcgtgtgtgatctattctccgccctgcatctgcgatctaatggccatcctttgctcaccctgaaatgatgacattgaccagatctacaacgttgcacaccgatccaatagtcatggttccatctacgaagcagtatgccctggttccaatctggacgctggtttatggatctacggctaccactcatcttctagctcctgacaccgagtcccgatgaccaaccagagcaccgtggcggcgccaaggaccggccacctctaccaactaccatgccaccccaatgccccaaactcaacaaaatcgggtgctaacctacacggaatcgatgatggctaatacgcgggaggaggacataccggcgagcggcgatggcgcagcagagacccccggccacgcaacacggtggatacacggaggagttcacaccctggttgaccaaattctgggctcccgatcgccaaaccttcacagcgagaacccaggtactgtccttggggcgcggcgaggcttctaagctcgatccccacgacgaattaac

SEQ ID NO: 12313 - DNA, 586 bp, Zea Mays
cagtggaacacccaagagataatgggcaggtgaaaagagccaacgggatgatacttgatgcactcagaaagaaggtattcgataaaagcgagaagctcgcagggaagtggatcagggaactaccatatgtggtccggagcctgtgaacccagccaagccaagctctgcatggaaacaccccattcttcatggtgtatgggtcggaggcagtgctacctgccgatctgatctttggggcgcccaggttaacctttgaaagcatagccgaagcagaagcaaccaggctagaggacatcgatgtgctggaggaggaacaactaaatgttgtaattcagtcggctagatactagcagaccttgaggcgctaccacaacaaagttgtgcatcatcgatccttcgcagtgggagacttggtcctctgtcgagtactaatgggggaaggacgacacaaactatcaccactgtgggaaggaccgttcatcgttgcagaagtcacacgaccgggatcctaccggctcacttagatggacggcaccgaagtgggaaattcatggaatatcgagcacctcaggaaattctaccccta

SEQ ID NO: 12314 - DNA, 371 bp, Zea Mays
tgcttgtcctcttcttcctacttcgtgctatagcctatgtatcaacacctcagcgtgatgttgcccacttggagatccagctagcgctagacgacccctacgcttaattgatcttgcactactagcccccggccggcactggtctcagcgtgtgaatgaactgcagtcggaggctgaaatagaacctgcagacgatgaagcacttgatccggcacttgaactacttccagaggaccacgccctgaagctagctttccgatcccaagtccattcctccatcatgtcttgttttgttgatctgtgtattatattgcctgcgaacagtttgctatgtcctgtgcgatacagacttgcttgggcaaacccacggt

SEQ ID NO: 12315 - DNA, 423 bp, Zea Mays
aaacctgaaggtatacttcattcgaaccaagccattttcactggattcggcagtagtctccttcggcatatcccagctctccacaagtggccacaccctataggctatgtgctcttggactatatctcttgtgccaatgaaggcgcaaacattgctaaatgccttctagcatgcttcgacgtcactttcaatagtaaccttcggccttcgaaggccgaagcgagaccaaatggggcgctggataatctccttgatgtcttcccttttaatcaaatcatttttaacataaaatcactcctccatccaggccccgggccaccttttccggtatgttggcaccgggtaacttgcatttgagcgggcaatgaacccgtaacaaccgaagttgttgtggtattgttctttgccggtagccttcgtctc

SEQ ID NO: 12316 - DNA, 367 bp, Zea Mays
tgctatagcaaagatgaagagggattattgctctacaacttttctaaagagagattaacaaggcatcatatgaaaaatcgagattcgggcactataaaatggtttgggaggaaaactgattgtgttgcgccatggtacagtgcaccggggggatcaggttcagaacctcgccgtcgacgaccgatctacgccgtgatttgcgccggggtcaggctgagctatcgacaggcatctcctcgcgacgatattcttgaagcaggataagatcttcgcggtaggggggtgattattccggccgccacgcggtcactgatctttccggccatgcttggtcaccggtgccgctctcctctattcgtccacgcca

SEQ ID NO: 12317 - DNA, 271 bp, Zea Mays
ggatagtgggaatgaagatgtcgaagatcggccgtggaggccaagccatgttgtttttgggaaatcaactgtcaaacaagggcaaattgaaacgatgaaaggcaaatatttttatgatgtttccatagcgaaggctgggggagaaagcatcgttccccttcccaaagctaatgaggtagtagttttcaagaccttcatgaaagctgggcttcgcttttcgctccacaagatgttggttgaggttttgaagacatttgagattttccttcat

SEQ ID NO: 12318 - DNA, 552 bp, Zea Mays
cgagattcagggtgcggggggcgctcgccgtgcgtgcgatcgggccggttctgggtgccgcgcgccggtgttgaacttgtgctgctccgtggtttggattggtgtgccggttgatccggcggagggataggcgcgggttcggatttgtggagggaggcggcgggggatggactgacggtaacatcgagttgtcgcgtactcacgaagtagatctcaaactgattggagctgcagccgatgggttccaacgcgcagcctgtctctatcactgtttgcctgcttatcctcccctgcagcaacgacatattggtactcgtatatattgggccttgggggtggaggtttgcagttttgcacaattgttgtctccgtgcttgctcaccaaacatttactggggactgctagcagataattgcaaacaattggcctttggcttcggtcataaacttctaatctagatgactagttctggtgggcaggttccagtcggagtcctgaaacagcagaaagtagctacattgcttttttgttgcagttcactcagttttttc

SEQ ID NO: 12319 - DNA, 660 bp, Zea Mays
gttttgacccaagaatcctatagtaagtttgtagactgatgtttagtgaacaaattttaagggaagttgctatgttcttaacaaaaatccaaagataaagagggtagaaggtgatcggttcagaagaacgctgaagatcgaaccctgacaaatatctgaagaacaccaaaagatccacggcactgttgatttggaggaacttggatgaatcggtgaggatttgatcgcctgggagtagctcgatacgtggcatcgttccgcgggccgagccacgtgtggccggagttggtcaccggcgaccgccgtgactcgattaacttttgtcgtggtgtcacccgtgcctcgatctacctcactgtacttcacctctacgtggtatacatgcgctagcaaggttatccgcggccgctgatcgcttgtcggtccgctgtggctttaaatagcgtcatgaaccacggcgaggcactcaccgcctcaaccgcaagcttgagaagaacccaaaattcgcactgccttctccacctcctcccaaattgattgtgcacggtgaaactacagtctcttacggtcgtatagccccaatcccatcccccaatttcacccagagccggcgcgacgtcattttccccttttctctgtcaccggtgagcacaagactcc

SEQ ID NO: 12320 - DNA, 469 bp, Zea Mays
cggcggacgagatttaattacacgagattcgatcgtgttccatggatcccgatcggacgtcacatctcgattttggctgagttgatacccgcgaactgatctcggccgcacatagactatcagacggccaggaggttatctctcccatcccatcacaaatcacgacgacgttcgcggcccacgtggagcaccatcgccagagtgaagtcctcctggggctctggtgtcctattccctgccctgattgattttacacgaagaatagatggtggcagacaacatgggaagcttctcacctgctttctagtggcagtgagccctagcgccgtcgtggtgcagatcgactacacccgcgaagtccggcaacgaatcctagccagagtcagtcgggatttggcttgatgatgtcgcacgcatataccccacgtgttgtagaagcttctgcgccatacttctcgaccgtagcgac

SEQ ID NO: 12321 - DNA, 600 bp, Zea Mays
attctaacactttaccattcgttagagttaaattaattaaataaggactaacaagtagacttacaaattttattcaaatcatttagtgcactaaaactactacaaccaatcaacgacgcattctcctcgataatcacccaaccatttgcgttttaaattagacatcatatgagcacgaatacttttcatccgcgaccgtaaccatacgcatttagaatacaacaagcaattcatcgtgactactagaattcgcgagcaccaccatatactatacgcaaagcataatttacgaacacataatgcgcatcgactcgactcgacttataaatatggagaagcgatgactactttggcatgtcaccacctctctatttaagccaatccaattattaaccattacgactaaacattcatgtcgagcacactttattttaccctgtctcgcatacaaccatattgtggcgtgcactcgagacatttcgatcaacgtagcgtaacttactagtatataaactccgacactcatgtattaacaatacatcctccacgcaaactagcattctctaaactacatgtcacatcaataaatatacttcctat

SEQ ID NO: 12322 - DNA, 541 bp, Zea Mays
ccatcatgctggtaccagtagcaagtccattgttgatgtcctagcggtggtgcgtggcgtggcagatctcgcgagtcagtctcatggcacggctgtacgaggcgtggcttcgcttgtcgtcatgagcctcgtgtcaccttccactgtacgcggacacatacgcttggtatgttgcgttgtcccatattttccgatatacaaatcactattgagactccggtgctgaggtcttccatgactgaggttggccgaccccacatggtagtgtgggttcacctgaactgtttgcaagggtgtacagtcatgctagcagtgacgccttggtgcccattttgtatgttgtgcgtgtgtccggatgcggcctggtgatgaagcatcttgtcacaactaacgtgagctcatagcactggatttggattttcatcccgccaagttgctcaacggggacttggtcggtcgttccgccttgcagtcttgctcgacgaggacttagtcgaccgctccacctcgcagtcttgctcggcgagggcttggtcggctg

SEQ ID NO: 12323 - DNA, 645 bp, Zea Mays
gcggggtcggcggcaatggcggcttgaagatttgcgcggctggcgatttctcagggcgacgagcgcacagtttcttcagttggcaaatgggaggcgagcacaacggcttggtcaatttatgggcacgagggcgaagcttaccagaacgtggtcgcgacgggagtgcagaatccccaacgtccgttgcgccatgaacgcaagtcaaaatcagggcacgaggcgacctaatcctgctaggttttgtagggcacggggtccacggaaaggggccgttatgggtctcacccgggtggcgcgattgttgcgcccagttggagtaatcgtaggtggtcaccgcgcgattcacgatgccattctgttgagtcctagcgaagaggacggtcctgacaacgttggcccacgcagcagcgggtgaagggtgcggatgcgcggcagatgcggtacgtgagagcgactgatagatgggcccgataactagtggacggagagatgcgagcgcgaggaaggatggctggccaatggggcctgggtgtcagtaggcggcgcgcgcgagggatctgtagttgggctacatgagagtggaagggagctgtgggaggcccatttagttgggtttgtttttattcttttattttctattccttt

SEQ ID NO: 12324 - DNA, 439 bp, Zea Mays
accagctcgtgggggtgcaagtttagagatgcgtcgtgggaggaagaccgagtacctcgacatcccactcaaggacagcatcaaaggatggcacctggaatggtttatcgtagagaatcacacgaattccctcccccctcggtcagggagatagccggatgttcacgctccaagttggactgaatcccccacggacttggagatagctgaggctagggttttgcctgcagagattggcttgctaaaggagaagggtctgactgccgaggctgtggtcgccgattttgtttttaagaacattcagccgctgaaggacagagcgtacccagcttatctgtatcatggcatcactgattcaactcgggttaccaatagaaggattcctgctgtggacctggtaagccgacttgagatgattcttagaggcaaggtgtcgaat

SEQ ID NO: 12325 - DNA, 515 bp, Zea Mays
ccgcggaacccctcgcgtcatggcccatctacttcaccactagaccaccggtaagaagtacctcatcacctccgttactttttgctctacgtatagcaccggtcggagtgtcgattgggtctctattatgcctagtgggtgtacgacggtgaggttgccgccgtggttggtcggcggggccgccatcccacgttgtcttggttgaggatgcacctcgaccgtgggatctcaaacctagggttgagattagatcttaggtctcgggcaggctggatcctaggaaaccgcacgatcgggatctgagggatgcggatgactccaaacaacattaaatctgggccatctgtttggcatcgggtggatcagcatagttgtgggtagatgaaatatgtgccatcagtctctgatccggtggtcattattatgtaacgcttcatcctatgtaagatctaattgtagccgtccgatgttgatcccgcggccaggataatcccgtaccccttcggtcgtgttca

SEQ ID NO: 12326 - DNA, 432 bp, Zea Mays
gtcatatgttgtatgaaaacttgaattaccatgcataagctatctagataatcatgacccggtgaagatagtaacaaacaggcaataaaacagcatggaaatgactcgaggaacaaactgattgcagaagcagacatcacaggaagagcattatcaaaacattattcagttactactttatctgcagcagcacagctcgatcgtcagctaagtatattaacagccataaattagcaaataatctctgtttttagaaaggggccgtggaccttttacactccctgatttcgggcatcagggatcaaaacccacaggtggactgttccccgactgcttccaccaaacgtgctaaacttggatcgtctaagatatggttccttagacaacaagtagaggttgcttttacgtcaatgtctgtgatgaactaaagac

SEQ ID NO: 12327 - DNA, 422 bp, Zea Mays
caagttcctagagatgattgaagcaagtgccaatatctaagacagagtgagaaggcaagaactcgtcaacgtgtgtctccctctgttgatggagggaccactgccctatttatacacccaggggagcatccatggcgaagttgagtcttgtatttgaaggagcgatgccctggcatctcacgtcacggcgaaccgtgcagtagattcacgcctgcctgctgacttcccgtagagagccgagaacgaggagtcgttcgtacgctcgagctcccgagggagaggccgcctgtgtcgtagtggttgtaacagcgctgggtatgggccaaaggctgcttacggggtgcgtcatcgtcctggcgcgtgatgacgtcgagattctcttcagcacttatcgagatcatagtcctcgcttggttaatgca

SEQ ID NO: 12328 - DNA, 978 bp, Zea Mays
cgagctttgcattgccgagagccgaggggaaagggccgacaaatcctgctcaggctcgtacttgtcgatgtttgagaccttgaagttaggcggccattgaattgcctagagctggggaaaagggctaagaccctgtacgtccctcggtcctcccagcgatcttctcgggcatggtcacgatgacggtccctgtgaggcgagtgacaccgtgcatcatgccgcctctactgggctgactggcctagagctaggctgtttgtagaggcttttgctgactcagctctggtgtcatgactgcgtgccagtgcaccctgatctcggtcatactcttcccaccgcctcatctgctcttcgtgttggcgatcgcgcaaatcgttgatgttgctccacgcatctcgtcgacagttgatgacgtggcacatgtcgttggccagatgggtgaggggaagaagatggttcgccgccttagtgaggacctgccagtaaccttccgcgtctgaggtgcgcggcaagtcattggcgatctgagccagggctccaccgacttcactcggcgtgttcaatgctcgagcaaaatcaagcagcaggttctcatgtgggagcctggcgtcctgctcagcttgttcccgctcgcgctcttgggcgtggcaataatcatggtgtcaggaattgcggcgctcatagagcgctctgtcgttaggggtttcccctacttcagaggcttcatcccaggagacgtgttgagcaggatcccgttcctcggcctcgtgatgacgtcgaatgttacagtgcatgttccgatgtcggcgtgcctcgcgctgcaggggctcctcccccagtaaagtgagctcatcgtcagagatgggtacatcctctattcttccctggataaagaggacatctgagaagaaagagattggtgtggtgcttcatgctacgccatctcccctaagagcggagcgattggaacaatcatcg

SEQ ID NO: 12329 - DNA, 755 bp, Zea Mays
aaaaaacgcaacctagaatcaagccgccccacaccgctgtgaatcctcttcccccgcggtcgcccagaacctaagattgggtctgggtcttgcaccgagccattgggaagccgtccatggcgctggcatgcgggatcgatgatcgaacagtcgttaatcgctcgccggacttgggaatcaccgcggggccacgctccaccgtgggtgggtgatttagtgttacgattcacaggtaagatgcactccactaagtctgccttctcctccactttgtgtagcgtcttttgtatggagctttgggtgcagaatcctagggtggggtggttcagcaatggcgccaccgtagacctttggtcgttgccatcatagcctagggtctggggaagaagacaactcgggtggccatgtgatcgacatcggacggctaggttttaatctggatatcgattcactgcgattgaatcatgtccgttgatcaacgtgttggtggctaggggtggagttcatctgtggtaaatcgtcaccatgggatctggatcctatggccatgatggcatgccagtttcagttttgggttttaatctcgactgcagatcaggatctaatggccctgatgcgctgatgccccttcgttgtggaaactttctaaaagaaaccctgtggttacgcataaacagcccaccatccttgtcagcctaaaaaccattactactaggccctgtaatttatggattaaaccctaagctctcctgaaa

SEQ ID NO: 12330 - DNA, 624 bp, Zea Mays
ccagacaaacgaaagatgttattcgcccaagacatctcacccactagatatgcagagtcacaacctgtaataagctgacacaccacaccactgctgtctttagatatacacttccatttcatacgtgtttttgcaaaagtcaaagtttgcatcatcttaaatgactctttttttctcttctggcccaaaaaatgacaacccaacagatctgtgaaagtgaagttcgtccatgtagttgcaaacaatttcaggatctttcggtggaactttctatatagttgcaccagaatccggactggcaaataaataagcaaataagagtaggtgggtctttttttttctttgaaaaaaatatatacttgagggtaaacaatttagccctcaatttatttcattttggtctgttttgtatactgacatgtcaacgaacccgacgaaacaaaggcaagcacacgataatggactccgcacatgacattgatctgcagcgccagttgggaagaaaccgatccaccaaactctcatccgatgtgtgggggagtcaccgagtcagaatgaatagctcccaccattttggctcgcttgaaacaaggatttgtggatcgagagacggaacaatgttcg

SEQ ID NO: 12331 - DNA, 510 bp, Zea Mays
cgccatgagcgactcgtcgagctcctgcgacggtgttaggcagagttcgctactgtggcccatgctcatgcacgacaactacttcttgtgggcgatggtgatgcaatgcaacttcgaggaattgggtagcgggggtgatcaacccagggaccggtgccaagcggacgcaagactgtcaagcaatgagtgtgctcctgcgctctgtgcctaaggagatgtggcagtctcttagcgaacgcaagactgtgaaggaggcatgggatgcggtgaaggtgatgcggattggtgtcgatcgtgtgaaggaagtgaatacccagaagctactgcaggaatttgaaaacatcaaattcaaggatggagaatctgtggaggacttgggcatgcagattaccaatctcgtcggtaatctctgtgttctcggtgaagtggaagatggacattcttggtccctactcgtttcattcaggtagttgtttcgattgaaatgttctgcgatatgaaagatctcac

SEQ ID NO: 12332 - DNA, 381 bp, Zea Mays
gggaactgaagtcttgctttcatgaagcttctaaaaaccaccacttcatcagcttcgggaagaggaacggtactctcccctccagccctcacgatggaaatatcacgaaagtatctccctttcatcgcttcaatttgcccttgcttaataatcgactttccaaaaacaacatggctcggcctccatggccggtcgtcggcatcttcatttccactttctatatcaaaactctcgctatcgctggagttttcggataacccaaccaacatttcattggtgattttctccatgttggttttctccatagcttcgtaaaatccggccagtatggggttagtgatcttcttctcctcatccaatcatacgatggttgctaaaatg

SEQ ID NO: 12333 - DNA, 497 bp, Zea Mays
aaaaaaatctaaaacttggtgtgttatcttcttatgtgctgctgcaaaatagaaaaatataaaaaatatttgaaaaatcgcaaaaaaagaagggtagcacataaccagaaacgtcagtgttctgtgcacctctgtgattattttgccccaagcctattttcttgctgcacccatatacttgtacctcctttcttgtgccttggtctaactgttctattacattttctaggccagcaactaggacgagtacttggaacacttattcaacattgctatctgttactgacttgtgtgccacatatatatatttagtcagccttcccagaactctagctttctctcgagcagaacaggtactcctttgcaatcacaccacgctcgttggacagtcacaccggtcaccgtttgccacctgcagtgctggtaagaacgttgtaagagtggggtaagacgcttcataatttgtattccaccaccaccaccaccaccaccctgag

SEQ ID NO: 12334 - DNA, 386 bp, Zea Mays
ccacgtgcctaggtgctctaccacgtcacagtaactcatcataagcatgttcgttggtcgccggtgacctcgccacggtgaaagccaccaatcctttgcgccactgctctcccctctctctggccgccagcgcgccattccaaattcatgagcccaccgccctcgggtcatataaattgagtgtgccatcagctccgctaggtagtcaagcatccaacgcacccactcgtgtctcggattgtccaccagagagctctaatttgagatttcccccaaatcggtcaagaacaccgcgtgtgtgagcttgccgcggtcagcccttcacaggtccgatcacaccctcctagctcttgttttagcactcttgtatgcccttgatacttctt

SEQ ID NO: 12335 - DNA, 289 bp, Zea Mays
ttacaaccaacaattaggcttacaagatgtaaactttgttatacaaaagtgacatcattggtttagtatttgaaaaactacatatggttataattttgttgccagaaacattgtagtataagaaaaaatataggtcaaagtatagttttggaaaccacacctagtcaaaccgcaccttatactgaaatggagggagtaattagtaaagtaaattccaggcacatgtaattttctactctccaaagacagagaatgaggttagaagttagagctgtaacctgtgatcctg

SEQ ID NO: 12336 - DNA, 519 bp, Zea Mays
agaaaacggaggacattcttcgttacatacagtccgcaacgggtgtagctccaccaccttcgctattcactccaaatccacctccatctcagttttccactcctgtgagtatgactgttttagtttgtatgttcatgcttagggtcaaaccactgcactaattgaaacctagtagagtatgaaagttttcgttaaatataatatatatttatcttgtctcacacatgcaatgccttctcatttttgcagaatcaatcgacggcatcgaatgatcctcatgtttcaccaactgagcctaattgcgtgcgtcgtttgtgaacttatttgtgagatatgtattgtcggtgatatattgtgatctttgtgaacttatttatgagacatgtggacttatttgtgagacatgtggacttatttgtgagacatgtgttgttgctgctttacatgtgatgttgatgatatgtatgtggtgtttgatatgtattttctgtctgtttggatggaatatatacaaataaa

SEQ ID NO: 12337 - DNA, 299 bp, Zea Mays
atgatactgtttggtgaattacaagggcgtgttagccctgaggattcaaacaaaaaatttacggagattatcaatattccacgaatgctctaggtcctcaccggatggcgttgttaacctgtacgcgctgggggacgcctttgtcttgacgatgaagggaccctcccactttggctccagcttgccccgtgactctgtccgagttgtccggacgagtacgaggtccccttcgttgaattctcttgggacgactgtgtggtcgcgccatgcctttgtttgagcttgatatttgttgaggg

SEQ ID NO: 12338 - DNA, 525 bp, Zea Mays
agcaagttcatgtagttcgcttcgctaagcgcagtttctgctcacatcggcggtagcagaggagaacaacaaagctgggcgatgacccgcctgcgtcgtcgggtggatgggctccgctaaagcaggcaccgcgcgagatgagagagggaagaatggctggagcgcgtgagagggaagatgatgcgattatcgttcgatttagattgagtggatgggattagatctggggaagcaatcaccgtggaccgttgatcgagtatccaacgcgtggggtttgatctcgcgtaaattgaatccgagccattggtcacgaatccatcggcggaaatcgtgtaccccttcggcttctaatctcgacccttgaaacttgatcgggcggttggggtttggctgtaccccttcagcgcgctagattttccaaagagaccctgtgttttattaaaactagcccggcatccagttgcgggggagaataatatgggataggtccctggaatttagaaaaatagccctgagaaccttaat

SEQ ID NO: 12339 - DNA, 881 bp, Zea Mays
cgcggcttcgctccggtgagcaactgtaccggccaaatggggctatgaccggcgctcccgagcgactaacacctaattgaatctattccaagcctttcccccaactcaatttcggaattggagctctacaaccctctgcccacggggacagcgaaagctatggaaattcattcgtgttcccagtgattggtgggcttctagtttaattggacggtttggagagcattactagcatatagggacatgagaacaacgcgcgaattggatggtgccttaccagaacggacagaccacggggaagtggtgttttacggtggcggagaccaatttgggggaaaacccgaattgcggagctatggtgagcgagtggagatgagagtgggtgctatagcttgacgattacatggcgcaactatccctgccctcaatttataggctccaagggcggtggccggtgaatttcggatggcgcggtggtggtcggtgagtgaaaagagtgctgttgcaagagatgggtggctgtcaccgtggcggggtcaccggcgatcactggatatgcacaaggtgaactactgcgacgtggtaaaccaccgaggcacgtggcgcacggtcgcgaagtggctaactccgacgagcttatccgaaggggtcatgatccaagcttggtacggcggccggagtagaatagtgaccggagttcacccacgccgcgttatttcctacccttatgagctatctgcaacccacgaggcacgaatcgcaacggcgacgaggatcacggcgcgggatcaccggcggcgaggggatctgaacctgggatatttgggtggcactgtaccatcgaggaacttgttcagagtgtctgacagacaatgtttggg

SEQ ID NO: 12340 - DNA, 449 bp, Zea Mays
ggccggggtacgaggaggcacatttgtcgacacgatggatatatggctggcttgctaattagacgacaagggaaaaaccgatatccaacttgagtttgtattccagggtgtggtttaggactaaagctggacccgtcaatgtcctttctccgatgatgattggtcgacttacctgccgcggacaagcaaatgacacgcaggacggcaagtgtcagccagccaggtcacggttcgtgctgaaatttggcaccgattgaaataaaaggaaccaaggttgtggggatgtcacgagccactttagcccccatattacttatctctactactatgaagaaggtaagggtaggctgctattctgttctgccctcccctgtccgttattatcgcagcaaaaaaaatgctgccaggctcaggaatcgaaccctgttctgcccctccctcgttctgcc

SEQ ID NO: 12341 - DNA, 812 bp, Zea Mays
tgttctaggtgatgttagcacgcatggtagaaaagctgagttgctgccttctgctttctgttccgttcagatcgacaagatgatgtcaaagttgatttcggactcggagatgaacgagtaagggttgtattgatctcttcccacttaggaaaggaggagaaggtcatagttctaaatttaaatatcgatgcttgttgttatcagatcgctgtggaatccagatgattttgggtgttgcttgtgagaatattctgatgttttgtttttttaaaaaaaattacaggaatgtcttctctacgtataggttttatacaggaatgtcttgtctacgtaacgtataagttttgtttttaaaaaaagaatataatcgggtggaaggctttcaggtttgctgtattagacaaaaacctatcagttaccctgtcatattgtgagtgtgcatattgtcatattgttagaactgtgagaacaagatatgtttatttggctccgccaatattgcttagcggcaaagtatctgtatcgtcagcacagtgcctggtgtcctcttggtcacaacaatctgcactgttcgcagtggtctctcctaccctaacattgctgattccttcgatcaatggccgggagggacacccaatccagcggcggcagcggcagcggcaccaaccactccaacgcattcgcatcgaggaaaagaaaggcgatgataaaaattttaaaaatcgcagcactaactgtcgcaactttccaacatccaaaagcccaacgaaagcgcatagtgaaaggttcagtgtaagcggaagccagactag

SEQ ID NO: 12342 - DNA, 1262 bp, Zea Mays
gtagtatagtgtagtgtaagtagtgaagtaatgtaatgtaatgtagtagaaaaaaggggggagaaggccgactcataatgagtcaatctttgagtttgtataacccctccaatattaatgaaaaacattagatgcttccagtgactgttgcctttgctgctttttctgtttgcacacttaatagttcgcccgtatacctaatgctgtcaacatttttagaaataaccgtcgagcgatgactaatactgccggtgttttagaggtaaccgccgagtaatgcctgacaccgccggcgttttagaggtaaccgctaagcgatgactgatactgcctgcgttttagaggttaccgccgagcgatgactaacattgccggcgttttagaggtaaccgccgagtgatgcctggaactttgctttcccgagtagtgacttggcactttttagaaatagtgcccgacccgggaaaccccatttatactcgcgccgacgtgtgttttttatttctgagtcgtaacttcacttttccacctagaaccactcctctgcttccctgagatctcgatcctgctcgttccgccagcaagactgcgatggcaccgaagcggaagaggcagagcaccgttgctgcaatcatcccgcctatcgaccccaacagccagctgtcatttgcgggtaaccacatgtccatcatctcggaattcgacctccttcatcttgttgacgttggggttttgcttccaaaagagctctgctcttggtgaatttgccacggcatcaccgttccaacagaggatacccgtaaatctgtcgtttacgttccttttcttattcgtggtcttgctcttcccgtctccccctttttccatggtctcctcgatttctacgaattgaacttgacacatctgaaccctaattccattctgcaagtctccatttttgaacatctgtgtgaggcctttctcgggattctcccccatttcggtctctggaagtacctttatcactatcagcccgagatggctgggggacaacaccagcttgttggcggcgcaagtctggagcttcgtcgcgggaggaaaacagagtacctagacattcctctcaaggacaacattaaggggtggtgccttgagtggttcattgtggagaatcactacaagtctctccccctcggttagggaggcagccaaatgtccacacatcgagttggatagaatctacgaccccttcggagataatagaggctaaagtgctgcttgcc

SEQ ID NO: 12343 - DNA, 747 bp, Zea Mays
gccgatataaacacatgtcgtggaacaatgtgctagtactgtgatgtttgggtagcataggcaactgaacacctatactcgtgggaacattgaaagaggcgctcaaatggaatgtagttgctgatgaccgagcagtcgcctattgaggagataggcgacagtgggtagccgataaaaacacaggtcgtggaacagggcaccaactgatgagatgtggtggttgtgaggtttgggtagcataagcagccaaacacctatagtaaggggaacattgaaagaggagctcaaatggaacagagttgctgatgattgagcaagggcgcctattgtggagataggcatcggtgaggacaacctcgacctagtatgggggtggtctatgagtgtgtatcaggagtggacgacagactttgttcaggatgcgaatgggcgaatggcacggtctgccttaccgttatgtggtgatgtataagggtagaaaaaatggaggatgcctaaggaatctagaatagagctgagggcattgttaatgaacttgtgctcattatcaacttgaatggcttttacagggactcagggagttagaattggttcttagtgtaggcgagaaagatgactaggtggtggcgcacatcggattttcttttaaggggaaagagccaacaatagtgtgaaaaatgatcaatgggcaccaattagtagcgataaacgaaaatgctaaaaacaggtgatgtccgaacatcacag

SEQ ID NO: 12344 - DNA, 915 bp, Zea Mays
agaaaatagatcgtcgcggcgtggcgtgacaatggcgagccactgtgtgcgcaacaacagcgagcagaacacgcgagcagcggagatggcacgagcaaagaaataaatatggtgccgcgatagcgttccacaagtagagcagtaaatcgtcgatggtggggttgctacgcgagctccacacggggttggggattcggcaaacggcggcacgcacaactcaacaacagatgcgcgatgcagacgtaggctagcagcagaggagcagggcgtggcgagactgagcagagggaggagaactcgtggctgtgcctcttataggcgagggagagagtgaatcgggttggaattacgtgccttgaaggctatttgcagctcgacgttggtggctcaagaaactgacgttgtaattctccattaataacgccatgaagctgtgcacagtaactgaagagaaaactgcggcagggtggacatggcccgaggcatgcggatgtggcccacaggttggcaggcaaacgcaaggtcagcgacgtggtctggtggaaagggagggctggccggcgccattgatggcagtccccaagtggggaagaagaagagttggaaaccattaatggaggtagaagaaactgccgaacggcatagagaagaggaagaggagaggtctcggctgctatgacgggtgtgcacggcatttgaccgtagcaagaggccaagcgcaggtgggcgcagagcatcgtggcatgcgacaacgacatgcacaggtgagctggtgggaggcgtgcgtgctttttttcagttcttgatttggagaaagagagagatcttacaagtggggtccacctgccatagagagagagggagagagaagggtgtacgtgctgcgagcacatggagccgggcggtagttttttt

SEQ ID NO: 12345 - DNA, 381 bp, Zea Mays
actcagacacgtcgatcagactacgttattaatcgaccgagttatggcattggctgagcactggctgcgccctggcaacacgacgcaatatttgtgtcgttcgaacttggctgcgtcatgtgattgctatgtcgcgctctccattaattggattgctcccgttgagtcagaccgccatcgctgagtcgcgtattttttgcatgccctgtaggcactatctatctgccgcgagccaaaattgcgcctgttgcgcatgttgcgtggatttatcgtgtacccctattaccgagccataattgtgtctgttgcgcttattacgaaggcttgctatactgtcgtagccctgatggccgcacacgcgttgacgccagatacgctaga

SEQ ID NO: 12346 - DNA, 610 bp, Zea Mays
gtatgttagagcatagttagcactttttccaggtgttttaatagacgtttccgcatgctccctgagcatgtcactaggcctatatacgcaatggacataatttcaacacctactgaaactaggtgctcgatgaatgtgtggtcggatttagggtagatattgttacgccttggttggcatatcatgggcccgaacctgttcccagcttgttaaccttcgcggattacgtttagggtctggctaactttcctctgtagtaaataacaataacgaaaccagacatttattaggtcattaggcccgaacctgttcccagcttggacgcgtcattactagagatagcagtcgggctcgtcgtttgaaatagggagaaaaaaaaagaatgccgtcaaatatcaaaaatagatccaaaaagaatctgatcattgatgaacgacggctactaagactgtccgcaaccgttccccctaaatttttccccctaaatgttactatgcagccaagtcagtaagattccatcccctatattcactcgtcccgcaaccgttccccctaaagtttcccctatatatccctctactcattaaataaacatttccatataactaac

SEQ ID NO: 12347 - DNA, 821 bp, Zea Mays
ggtttcctctggaagggcagaaaagatatcaagggaggccattgtgctgttggatggacaagggtgtgtagaccacttaagtttggcggcttgggtattcacaacctggaaatccttggtttgcctcttaatgtgagatggctctggctcagaaaaacacaggttgagaggccatggactgagttcgacataaaagtacatcccaatgctgaagctctcttccaagccttggttcactcttctgtgtgggatggtgctataaccctcttttggacggatagatggattcaagggtagtctattgcagtttttgccccttacctgatatgtcgtattccaaggagggtcaggacaggccgcacggtgcaggaggctcttgctgataatagctaggttcacgatatctctgggagtctgactgctgttgtcattagggagttccttcttgtttgggatctgattcaagatgttcatttacagacaggagttcttgatgtccacctttgggtgccttgcgcctctggcctctattcctctaagatggcttataacagcttttggaccggtacaacatcttttgaaccggctaaaagaatttggaagagttgggctcctccaaaatgtaaattcttcatttggctagcatcactgaaccggtgctttacgactgacagattggcccggtgaggtacggatcatcatgacaaatgcctcttttgcgatcaacacgaagaaacagtccaacatattttgctctcttgtgtgttctctagaaacatttggtggcaggtgttgtgtaaagtggggctgcaatacctggc

SEQ ID NO: 12348 - DNA, 424 bp, Zea Mays
tgccaatgcaaacctttttttgataattgatagaaacgataatactcaaaatttatgtcaaaataagatcgagaactaatacagaatgtagtaccttgagatgccagcaaaataaaatggcacaacaaaatcgccatgaagtgccaggatccagcgtattggacgactaaaaacaatctgcgagtgaaataatctagagtgagtggcatgcacattgaacttgtaatgggatctataaagttcactgcccaaatgaaagaagtaactattgtcctcgccaaagaaaaggaaagaagtaatcattgttgagaatttatgcaagattaaccaaagctacataagtatgaagtaacattcattctgcatattacccttttatctatgtatcattttcagacctaggtgaaacaacagaagagaacta

SEQ ID NO: 12349 - DNA, 485 bp, Zea Mays
gaaagcaagagttccgctgggaagcggcttatcatattttggtttttaagatacttttaagtactacttgtcaagcaacattacaacttatctgcatgctactttccctttgctatgtgtgttgttgtcaacttcttccctggtacttggcccctctgggatgtggtctcgacttgtcgaggctggatgccagtatattgaagaaagagttggtgacctagccctcaggaaattatttcgactgggacctagacctgcacacagccttagctagggagtttcagtagtgcactcatcagacccattaactggtatccttcatcccttgacttacgcaacaggacctgtaggatttagactaggaagccgacccgtgtgtctggaccccctgggtcacggcttctaattactagggtactcgtcgcatggtggtggagtgcgtaggcttacggtatggggccaggctaagcagccacgcagctccg

SEQ ID NO: 12350 - DNA, 502 bp, Zea Mays
aaaatgcggattatgttttggggaatgcatcgatagatgtttatgcgaaaagtgtattggttttatgcatgtgatcggtgattgtgatagtcgatacgattgaggagtatgattggtcctgttggactcactgtgctgttgatgtcttgtgcctaatgtggggacacgtatgtgtgtgtgccgtggtgttttatagtagtggttgtgtaagatatttgattgaggtgtgcgggtatattccgtaatatggttatactcgcaacgaggaaagatgtatgtattgtgtaacacgacgtttaggttgctattgtataatcgtgtgaaggatgctcatgatggtcatgtgactaaagggtggtgtagtggcgaagcgagagataagtttagtattttaaacggttagttgatagcacctatcggtgtcgtcatgatttttgttgtatggtggatcgatgcttcgctttataaattattacattccatgcccatcggataaataaat

SEQ ID NO: 12351 - DNA, 495 bp, Zea Mays
agccgaaactaccggggccgaagccggggccaccgaagagttgaacctagaaactacacttgaggttattgacaacatactgctgaaaatggctgaagaggaagctaccgtggctacagtgaatacggcaactgagaaggggaaagaacaaattgatgaagtttcagaagaagattttaactttcaagatctgctcggacaagaattaacggacgccgaaaaagaggagttgaaaaaatatgccatatcttgcggatacaaatcaggggctatgctttttggtggggtcaacgaagggaaattaagatgccttcggaaccgcaccgaagccaaaattgttagaaccctttccaaaagcattggcttgccgaagctggaagcggacttatgccgttaccaacgacaacacatcgccggaagtttgctttatgctaacttcaaggtaacgaatatttttattattttattactattatcatttaactttttgggtcg

SEQ ID NO: 12352 - DNA, 476 bp, Zea Mays
tgcagataactatgtatggtgaaaaatctggcgctggggatgagcttgggacacagttctgccctggccgccgtacccacttgcttcacggccggtccagataacctcgccgaagttggccgcctgccgctcgggtgccacgtgcctaagcgcaataccacgtcgcagtgactcgccttagcatgtccggtcatcgccggtggtcttgccacggtgaagtgccacggtaaccctgcaccagtaactctccccctccccggtcgccagcgcgccattccaaaatcaagagccaccacccttgggcactataaattaagcatgccatcagctctgttgggtcatcacgaagccagagcacccgctcctgcctccgattagccactagagagctccaatttctttctctccccaaatcagttttccgcacgccgtgaaccaccgcgtcgtggccagccttctgcaggttagctcaagcc

SEQ ID NO: 12353 - DNA, 777 bp, Zea Mays
catcctcaagagcctgatcaaaatttgctagggataattcttgcagaccaacaagagcagacggagctagagaaggaatatcgctactcccccactgactctgcaacgccgactattcttacgaactaatgggacttcttcttcgtcctcgtcaacaatacggacaataaacggcacagggtcacacccattgggttcatctctggcagggtcacacccattgggttcagctctaatagggtcacacccattgggatcagcatcagtagggtcacacccattgggttcaacatcagcagggtcacacccattgggatcaggtccagtaaagagttccaccggtacttcttcagcagcaggagcagaagggccagcatcctggtccaaacacgacactcgtcgaagctgtctctttttctttttcttcccctcggcgggtgcagttggatgactgacctggcggagacgtttcgggcgagtaccctcaggccttcgagtatccatgattttttcaggctctgggatagttgcaacaaccattgtttcagcagagaccgagtcagaagaatccccagcacccatgtccagcatagcacttatctctgcatcacctgaactcataggcatctcaaagtgaacttgcctctcatcattgggaagatcaccaagtgaagcaaccagaacctcaacttcttcgaaagagtgtcgcactctaagacccaaactactgtcaccagcaggaagattggacacaaaatcgaaaaaggacttggaagg

SEQ ID NO: 12354 - DNA, 479 bp, Zea Mays
tcggcccatgcagcaatacgctggaccccggtgcgatgctctgcccagagatcctcaagcgtcttcttcatcacctccaccgcctgggagcccggagccgcctgcgccgtctgggatacctgtgctgcctgcgttgcctagaaccggtggacccgctcctctagtgtctgctccttctcctacagtttcttctccttctcctctgcctcgagttcatgttcggccagcaacttttgttgcctttcccacatctcctccctccaggcgatttccttctcctaccaggcgagatttgtagcccgctcctccagggaggcatccttcgccttgaggttctcctcggcgagagcaatgttgctggccctgccatcgagctcccgccgcagcttttgcagagccacctcagtcgtggtatgctcaacccgttgcttctccagcatcgcattataagctttaagcttctcatggaattccgtgat

SEQ ID NO: 12355 - DNA, 418 bp, Zea Mays
aactccacggccttagcagaggttaaagaggcaatgggcttgaactctatccatatagtgagtttatcaatcgccaccaatacatgagtgtatcccccttgagctttcttgaaaggtccaatcatgtccagtccccagcatgcgaaaggccaagttactggtatggtctgcagttgctgtgctggcatgtgctgttgcttcgacaagtattggcaagcctcgcacctctgaactaactcggctgcatcattcttcgctgttggccaatagaatcctgacctgaagaccttcccgactagtgttctggaggctgcatgtattccacattgcccagcatggacctcctccagaagttgcttcccagtggacgggagaacacacttcatgaggatgcctgatgcaccccttctgtataata

SEQ ID NO: 12356 - DNA, 437 bp, Zea Mays
cgacaagactgatggcaccagattcagacccgtccagggacaggtccgaggccactaagtgcccctaagggggagagcgcaccagattcagacccgtccagggacaggtccgaggccactaagtgcccctaagggggagacgctcaggagctgggctcgtgaatccggaccccgtcgacaagactgatgacgtcagacccggacccagacccacacatggagggacaggttcgaggccgccacatttcctggaggggaagtcgctaagagttgcgcccgtgagtccgtaccccatcgacaggactgatgacgtcggacccggacccacatagggacaggtctgggaccaccatgtgtcctcgagggaaactcatccctaccacgcgcccatgagtcgagaccccatcggcatgattgatggtgttgcagatgaaaac

SEQ ID NO: 12357 - DNA, 412 bp, Zea Mays
agcgagggggtggaataggtggagtggcagagggactagcgatagtggtggtaggagtggcggaggctacgggtgtgatggaagttgtgggtgtagctgcggtgcaggaaagctctggagtagtggaagtggtaggggtaggagtgcaagcggagctgaggctagtggagcagaagttggtggagtaggtgaggggtctaggacagccgggggagtgcgcagacgagaagactgttgttgtatctaaatggaagttgatcagcaccaatgtgaatttgccctccctactttgctcgctctgctgctgcaagcattgctcgagtagctctatccaacatgcgattttcttgcctccttgctgctctaggtagactgccttgctgcctagtagggcaaggtgggtcctaatcat

SEQ ID NO: 12358 - DNA, 393 bp, Zea Mays
ccttttgggactttgtggtggaggtttatctaccttttcattagattttgtctttgttgtgttgggtggctttttcttgtgtgctcgtgttgtcagagctgttatgtgctcctgttactagggtgttgctgttgttggtagggttgacgtagttttttgctatagcggttgttttttgttgtagtcctcttcgggaggttgttgtgtgcctattttgggccttcccctttatctttatcaatataattggtagctcttctacctggttcatttcaaaaaaatgaattatgatatagctgagaataatgcccttggtgtagaagaggatggttctaattatagttattattattcttgcccgtataatttaaagatattaccatcctttaagac

SEQ ID NO: 12359 - DNA, 498 bp, Zea Mays
tggggatacattttccctcgctaggctacaagttcagggcccggaatagtatcgggttcaaggcgggtattgaactccacccacgggttctcccgcggagacccaaatttgataaattatgtagaggcccttctcctcacactgctcccatcctcctcacacacgacccaagctgcagtcgaccccatgccagtacgccacactgcggcgccctcctcgtgtcgccactggcccactgccacccaccgacgctggaaacggatcctctgcagtcactgtagagggggcagttgtgactgcatgtgggtccgacacccacccaggcccacctggaagcctctgtagtcatcgcccctccaccgtggatcgccgcccccgacctcctcatgggagcagcgacacgtccaatgcttcacctccttctcatcgctggcgacccaggtcctctcacgccgctcctccacgtcgcgatctggggccaaggaaggagcaatcacg

SEQ ID NO: 12360 - DNA, 323 bp, Zea Mays
caccgttgcttccctaccaagcacccatcgcagacattctcgacgtgctccattgacggcaagccgcggagcatgccttcgcgccccatcttttgtagagcttggaagtcgaggtggccaaaacgcgcgtgcaacgccactcatcgtcattgtagcttgccgcgaggcacaccggtttcgacggcctgagtggaagtatgtataagcgattcggttaacgttgtaccttggcgaggagttcgtggctgcggtgatcccacaaacgaagaacaccatcatcgatgtcgatcctgctgtcattctcgtcgagttgctcgacactg

SEQ ID NO: 12361 - DNA, 409 bp, Zea Mays
aagttgtggaccatggtggttggacaaggccagaggaggcacgacactatcggccgctaatgcacgagtctgcgcggttgggagctagatgtggcatggagtggtcaaagaccatatgtgggcctaagacgaccaaacataggtcatggcatgggccagcgcggtccaaagcgaccaaaggtggcatgacgcgaccgatgttggttaggggcgaataggcacatgccatggtgcaaccaacacgactggcatgggccaaagacgttcaggtgtagctcgaggtgtcatggagtgactggtgactaggcacagagtagtgcgagtgtgtgactgggagcggtcgaaggccatggcatgggttatcgggcgtgaacagtgaggtgagtagtgaaagttgtctagagggggg

SEQ ID NO: 12362 - DNA, 411 bp, Zea Mays
caccccagggtacaccagttcgcactggcggaggccagcgcccagttcagcaatcacctaagaggactccaccgactcatcaggctacccccactggtaccccgacgaaattctcaggatagagtgtaggcactacatgctacaagtgtgggaagactggacattatgcaaatgtttgcccataaaggattgctactaccccagttcaaaacaagcagcagactccaggatctggcaagggatactctattgctagggttaatcaagtcagcacagatgctactcttgatggtgccgacatcgcacttggtatgttttacattaatgctattcctgcaaccatattatttgattctggtgctacacattcattcatgtctgctcgatatgccaacacaaatgagatacccc

SEQ ID NO: 12363 - DNA, 479 bp, Zea Mays
gaagtaccgaattcacgggctacggtggctaatcgggggccagagttggtgttcaggcttcgtaacaagctaacggagcaggccgcaaactcaatttatagcgtccgcaagcgatggcttcgaattcggggaagataagctggcggccggagaggaggtgagtcaccggagcaaaactactgtggcgctcaccggggcaatgtctcaggcgacagatgggctatctactatgatctactgcgacgtggtaatgcctccaaatacatggcatccttgcggcaagcggcaaactccagcgatggtcatcttgatcggtcgcggggcaagtgggtacggtggccagctcacggtctcatccgtggtcaagatcttttcacccgccacggttatccacttcacacatgcacgaatcgcggcggccggcatgaatctacgcgcggggatcaccggcggcgaggtgtgctgcatctgaagatctt

SEQ ID NO: 12364 - DNA, 359 bp, Zea Mays
gtcaacaggtatgatcctcgtttgcaacacgggaactggagcgctggctgggcctgcgcgtatgtatgctaatggaactcctgtgcgtgctaaacgaacgctgaaactctgattcctgtggccacccactacgtgcaatgcgctgcacgcctgcgccacctcacggccgcccccgcatggcacggttgggctttcggcgttcggaatttcaacgcgcaccactagcaagcagactagctattagcttggagcaagcaactggactggactactacacgagagcgagtgatcaagtgctgagccgaccagggatggatggcgactggaaaaggagcacgacaccgaaccgtttgcttcgc

SEQ ID NO: 12365 - DNA, 330 bp, Zea Mays
agccgttggatcaacagccaacgcataggattagatcagtccgagtgtaaatcccgctttcactactgaccgctcgatcactaatctacggtcctgatttaagaaacgacacagcataacctgatatctaatcgtggccacacacttgggatcaacggttaggggcttatccacttcatcattttatagccaccgttgatcaccagatcaatggactccatgcgtcttcctgctcccgaccgcatgacagggcggcagaaggagagctccgccccgcgacgaccggacacggtgccgcagcgccatcaacgcgcaaccccgacgagcacc

SEQ ID NO: 12366 - DNA, 296 bp, Zea Mays
aagaaggccaacaggccacattacaatacaaattgcagtcacatacactcagcgagggcaccacctacatcagatcaaccttcgggatgatgcccgcctccctataattgaacaacattattttcaattcatcaccctaaaaaagattctgcagatccccctcaccaatgctcgtcccaatcggcgaagacaatagctctcgtttaccaaaccgatctactcgaagatggtcccgatccatccccattcgacgacgcctaccactttgcgaaacctcgcccacgctatgcttcgac

SEQ ID NO: 12367 - DNA, 575 bp, Zea Mays
aacaatactggggaagcccatggagacctgctaggcctaatgaaacccttagccagtagatcatctaattgtcgcttcaattcaacctgctcctttagggccattcgatacggggccttatgaataagctgcgtacccggaatcaacttaatctcaaaagcaacatcgcgctccagaggaatgcctggaagctctgccggaaacacgtcagcaaagtcacacaccacccggatgtcctgtacccgcaaggcagcctcaccctccaccaccatggagaaaaagatccccgacttccttgaccggtaatctggaagcaattgcgccaacaaggataacgtgaactttagggaacttcccaagaataccacctccttacccgacggcgcctgcaataacactgtcttccaaaaacaggatataactgcgcgatactgggataaccaatccatacccaagataacatcgaatgcccccaaggaaatcaccaccagattggccgaaaagacctcttcagcaagaatgatggaacacccctgacaaactgaacagctactaatggagccattagcagaact

SEQ ID NO: 12368 - DNA, 376 bp, Zea Mays
gtctctggtttgcggtcgagaagcgtcgccggggcccggggaagacgttcgtgggtcggcatcggatcggtagcgttctacaccggcgaattcttcaccggagcatcgccttggccgcggatccgccgcgcttcgacgctaggaggcgtcgcttcgtaatcctcggtacagatcttctcctccgtttcgatggtccttcaattcggttttcaccgggtagcgatggcgatttgggctcgggatcgagctcgggcatggtacagcgatggcaccgccgcgatttgggtgccatctgtcgtcgccggcggcatccagggttggggcgctgtgcgccgttagatccaagggcagcggtggagattagatcagatctttc

SEQ ID NO: 12369 - DNA, 804 bp, Zea Mays
tacgtatgggagtgcttaaacaagggagcagagggaaggagctaacctgaattgggctggccacgacgaggtgtgttttacggtggcggaaaccgaattgggggaaattagaaatttgtgagctctggtgatcaattaagagtgggagcgggtgcttcggcttcgtgattacatggcgcaatagacccggccatcaatttatagggttgttaagcggtggctgatgaatttggggcgagacgcgtggtggtcggaggagaggagtttactggcgcgcgtgattgatggccaaccccgtgtcatccacttcggtgatcatcaaacaggcaacgcacggttaactgcgacgtggtaaagcgtcaggacacgcggcggatgacggtggtggctcaacggtggtgagaatctcatccaagggatcggtgaacaaggggagaggcacggcggctagctggagtggcgtctagctcaccgacggcgacacctttcaccctacgacgttatctatccactccgagcacgaatcgggacattgacggcacgaatcgcggtggagggatcattggcggtgagagttctgtgctggcagcctgatccaattctggttactgtaccatcgcgagctcccatcagtgcacctgacagtcaatgtttgggcttaattttctctcaaatttccatggcaacatgaccgatgctctgcagcaaagttgtagtccaatataccatcttcatctttgttttagtattccaagaccaattcttactggattagccacaatttgtctccaaaggtgatccaat

SEQ ID NO: 12370 - DNA, 708 bp, Zea Mays
gattagacgaggatcgacagctagtggtcgcacctcggtcttgtctcgctcctagaagcgggctggaggaatgggtgcaacggaaatgggagcgggaggaggtgcagtgggagcaggagtggtggaggtggtaggtatgactgaagtggtggatggcttaggagcgaatggagcgggcgaagtgggaggtgaagtggtagctgtggcaggtgtagaaggagtggaggagcgaggtcgagacgcgagacgacggacccggtaggcaatctgaactgatgatatctgtagctgtccacctctctctgcctgctctgctgctgctgctgccactgcaagagctgctcgggatgctctatccagacgtcgcttcttgtagccttcctgctgcactaagtagacagtcttccccttgacctgcctgaaggggcgaggagggtcctcgtcgtctcccccctggcgctgacacattcttcgtgcacaccatcctgacttgaaggttggataggagagtgaaaaactaagtacgagtagatagtagcagataggattacaaaggaacggatagatacctggaaacctcacgtgagagagagagagagaatccaagcaggacaggagacgggctgacgggcaggcaagatcactgaaatgacagaagaggtgagcatgtattagtcacatagtcataagtatatgaaatgtgaacaa

SEQ ID NO: 12371 - DNA, 286 bp, Zea Mays
gtcggtccaccttccactcatgacatacgagccctaggtctgcggcccactcatgacctatcaaccctaggcctgagcgcactagacgtctacaaggcccgcaacacgacgagtcgcactgagacccaggctacagaggctagaggttggcgtggcatagagatggtagagctcgagttgcggagttggtagtggtggtgagtaggcgggcgagggcctggaccacgacgtctagtcatccatcgtgatcttggcctgggtgtgagcgagatacggagatagaagg

SEQ ID NO: 12372 - DNA, 651 bp, Zea Mays
attttagaaaggggaatggattaatttggagttaaaatggattttatatgaattatataagttcctaggattatttttgtattcaaaatcaatttctaaacttgtttatttgatttctctgagctctggacagcgggccaaataataaaaagctcgggatctaacctgtaaaactttcttagactcagattactgttgccgaggatggcgggtttatttgacaaaaggacaggggctctttaacaaaaagtacccgcgaaggggtacgggagatcctcgatcgcacgatcctacatctacggttaagattagatctacgttattctacaccagcgcatgattattagccctcggatgcctaatcaacggaccagatcacaaactggccgaggcgcccgacacccgcccgatcacgatccgacggcccatagctattttccccagatccgaacctagccgtcaatctccaatctaacggccagcggcccttcttcaacctcacacatctgttgttccgtcactcggtatgcaagtcagggcggcgctgttcatgtctcccgtctagccagccagcccagcgacaaaagccatccaactgcaacgcgcgcgacgataatccccgcacggagatacggtgaccaaccaccagag

SEQ ID NO: 12373 - DNA, 838 bp, Zea Mays
gggaatcttggggccattcaccgagttggagtaagtcggtccgggtgcctttaactgagggcagttattcttaaagtgactggggtccccgcagtgccaacaggcatttgctggcggttggttgcttgcaacggagggtgcctgaagggagctctgactctgctgactgtagcgcgacagagtgggtccagatggtttattgaagcttggaccccttggtggaagtccaaagggtcgagctctctggtgacgttcttgctgttgagctcggaggacttggaatttcctcttgaggtgccctttttcttcctcttttgccctttccacttggatagccttgttggagaggtgagagaagctgaggaagtcttggctggcgaggatggtcttaagctcgggtcttagtcctttcagaaaatgggccatctttctggactcggtgttgacatcctcaggcgcgtaacgagccaactcagtgaacttgtgcacatactcactgactgttctcccaccttgagttaactcccggaattcatcctccttgagttgaactatcccctggggtacatggtgctcacggaaggctgtttcgaattctgcccaggtggcatctctgatgacctcactgaaagtgtcccaccatgctaaagccattcctgaaagctgatgagctgccagttggacacgctgattttcggggcatccgatggcttccagcttcctcttgatcgtgcgaagccagtcatctgcatcgaggggattgctggaccccgcgaacgtgggaggcttgagtctcaaaagttctcccatcctgtcatgtggccttccaccacctggg

SEQ ID NO: 12374 - DNA, 1891 bp, Zea Mays
gtcgacgagggcacctatggcaagagcggggtcagagacgacgtggtcgaagttggggccgccatagttgccagtggcccgatgggagacgatggggatgcacatggttcgactaggtccgataggatagcctagaggttagggtgcacaaggaagggcactggtgccacatgtgagagcaatgtaggtgaacctgcaagtgttgaaaacagaggtggttggccagaagaagccatagaatcagtctcaagaagaaaatccaaatcgatggtggagtcgatggcggagctggagggggacaagaggaagtttgtcttggcaaaaacatgacaagagatcaagatgcgatgagtggtgaggtcaaggcaccagtaatgcctatgatcatgggagtaaccaaggaagacacatcaggaggagtggggtgaaagctaattgggagcagtgacagaaaggtttgggtagcatgcacacccaaagactcaaagatagtcataggatggagggtgccaaaaagagcaaaatgaagtgtggcggcatggttgttgtactcatggctgcttcgattcccgtaccatcctctcctctcatcggcgcccatctcaacccctccggcccctcaatagaatctgtgtagggttgggcgaccacctcccctactgtgaatcgccttccgtcggccccctctacccacaaagcattggtttaagcatctgcgaagccgttcattcctgaaggtcgtaccaagggatggcattggagggacaccagccatgtctccttcgtcgaaggttcacttttccgacgttgagcggtggtcacgttgaaccgactctaggtgttgtgtcattctataaggccatgctcagcatagcgtgcatatggctggcaccgtttgtagagtagagcttgaaatggggagtggaataaagggtgggatgggaaggttgctagagaccgtctaaggatgcgctgctggtcgcatcccaggcgctggtgccgacagtaattgagatcccagctcctcggtcggtgaggattttgccacataaagaacattctcacatctgcccaggcatgccatggttaatggcaatggttggcatatggttttgcactcgtcgccacgctgttaggcaggtccctcgtcgccacgcctttaaaacaaggataaactctatatagtaccttcaatgtagtctccatcaccaaaaacaagtctcccaacaattccgtaagcaacatcataaaagaatccaactttgtttctgaaccttcagttagctccttctgtgcatagcttctcagtacttgcagacccagcatgtgcacctgattagttaaaacaatttcataactaaccactagcaaagagtgacatgtgggtaccattaataggtgaagtagttatatacctgtatgttggtactacgaaatgaaccttgaataacctgtacgcacagcctgaagctgccccaaaggagcacatcattgttacttacattttcacttcgataaatgatctcaggaacaagttttgcaagagcagtggcttctcccaagcaaaaaagtagtatcttattcaacagcttgtaggaatcagaaatcttgttttcgagcaatgagatctttttatcacactctacatagaagtatcccactaggccaaccatagcaccaaagacaactttaggacttgtgcactcaccatctgattcgactctttctgcaaaaaaaagggggcaccaattctcaagcatcaccattcttcatggacaattattatttcatgttcattagagcttttttatccacctattttctaagtagtacttttaatgggtccaatttgagccttcaactttaaatgtttgctagactcgtgtactgt

SEQ ID NO: 12375 - DNA, 467 bp, Zea Mays
aaagaatcgagtaacccgacaacaacgacagctgatgcgacctcgcctaggctttgggcatcgcttgggatcttcgccgggaaatcacgaatgcggtggtggcggttgtcgtagcggggaactgagaagtgctcgtcggagctcgggtgcatcctcgctcccgcaccccttcgtggtcaggcgtcgccacatcccgggctaccatggttgtgtctgtactgagttcatctccctctccgctgtgtattgccctgccggatcgaatgatagatgagactattgcgcggtcggggaagtacggcgatggcgccgccgtgggcggattccggtcaccgtggggcactcgcgccaccgtacctagtctgccaagggtgggtgatggttgccggtgatcgttgacgaagcgaggaatagatcagattagatcgtgggtatttaaaaccctgacagtagatctaggacccaac

SEQ ID NO: 12376 - DNA, 586 bp, Zea Mays
aaaaatgcacatctagacctccggatgacttaatgtcgtttttggactcttttctcggcgccatagtatacggcgccgaggtacctagtacactggactctttttgctgagctggcatctacgtggctgagttggcatctacgtggccgagctcaaacaattgctacacacgctggtaagtggtcggctggatggattgaatgaaaggcgttactgtgtgtactattttctaattattgtgcgtctctgttcctcttgcagtctcgctctgactttgactctgcgcgcggcgcgtccttgtgaagagttgaagacaaaagcttggcacatgcactgcacgtataaaacaaaaagatacaggatgggggttgagtgaaagacgtaacttttttcctccttcgaaggccacacagggtatacactagagattttcagtaagtttaagattcatttttgtaggcatcgatttatcacatggcgaaaatcttgtatgatctgagttgttttttttctttttgaactactgatggtcacaagtgcggtggctgcttaatcttaaatcaagatagatacctgtttaatgaac

SEQ ID NO: 12377 - DNA, 747 bp, Zea Mays
atggcgtcgctttgcagggcttgtaggcggtacagtgcgctcttacactgaacggtgatcctcccaacttggtcggaatgcatagcccacacgtccttcacatggctcactctgttgcaccacatggggtcatccctcttctcagcggggaagagtcccagtggatgcatcaccatctctaggggatgatatccgcagaaggtggtcagggtcttcagtgctgtggcctcggtggtgtcttctgccctgaacccgatagtcttagaatcaaggaaacaccatccaagctgcagaggggtgagcctcctgggtcagccagacctagcaatgtggcacccgatgctcctcgtacaactgcaccgtgtacagaaggggtgtagggtaaccggcggagcagagcacctcccacaagatggagggaaaaccctcgtgggaaaggtagtcgaaactgaaacgagtgtctcctccattgatgggggtgggtgaagtcatctataaaagatggttagatgtaagtgctatggcagtggaaaggaaaacacatgtgcccgggttgttaaaagggggtgggttagcttagattctactccttatgttatttattagtaaccctatttgctacattcacacttcgatccatttttccttagcttccattttcttcatattttatgatgcatgcatgttggaaggaacacttcctcacagatgggaggggtgcttctagggcatcctggctattctaag

SEQ ID NO: 12378 - DNA, 324 bp, Zea Mays
tgatcttgtgatcaacggctccggttggacgatagtgtgatgagtcgaagaccgtagatctctagtgaacgacttagattataacaccacttgccaactcgaccggatgatagggaccatggatattgggatcgacggtcaacagcgcgtaccgtttcaataaataaagtgtgttgatctggaccgtcggaatctaatcgtgtggttgtgtcgcgatcataccccttcggccatgccattatgcaaaagagaccccgtataactctataaacaactcgcggcccatcgcagaagagtgatgagtcttagaactatttacagatt

SEQ ID NO: 12379 - DNA, 289 bp, Zea Mays
attagcactagcacatttatcgatgttaatcctgtaggttgcttttctatacttccagcaacagaacttgtcccaggagatatagttgaagtaggaggtactgtcaattgctcatctaatgattttcttttagtattaagattagcattttcctgatgttgtttggttgatgcttttttcccctttgtggataagttggttgcaaagttccggctgacatgagaatggttgaaatgttaagccaccaattgcgtgttgatcaagcaattcttacaggtactcctgtttt

SEQ ID NO: 12380 - DNA, 1013 bp, Zea Mays
ccgaaattccttgctccttagcgcgtcgtagccagttgtttgatcggagctgtcagcatctggcctactcttgacactagtcatgtcatcgccgatgactgagactgctggactcctactggaaactgtctctgcaacatcgtccacggtcaccaccgagacggcagtagaaacacctccctcaccgtagtgctccgtgccctctgtactagtatcaccaatatccagcacaatgccttctgttaaagcagcgttgataacatcgtcaacattgctggcttgcatcaactcgctttcagcaggtagggcaatggcaatggaatctacttgatcaccagccacctcccctgtacaaggatccgtgtaaatggtcacttctttcacggccatccccactgttacatcaccttctatcttcctctcctccagcactgtatcatccagcaccgacgattctgaaacattagcgtcgtgcagtggtatctcttcttcggttttgtggccctccatttcatccccaatctctgttgaatgagaatcttggcctgattttcggacagaaattgtttcaccatttcccctctgaaccacaataccttcattgcccggcaccgggaagtcacttgattcagtgatgtcgacgctcagtgacagaatctccttggaagactccgcatctttgcacttgtcgtcctgtgttctatcctcactgtctgatacagataattcttggactgattccttggctgtaagaggagcttctaccgctctctgaaccatatcgtcttcaccacgcaacacaggcactgctgatccgaaaacatcggagcctctcggcggtgcctccatggtaatgtactcggtgtcctccatgattgtgccttccttattgtccaacactagtgactcgtggcccaatcctcgggaaagagactcaccttcagccatcttatcctccacgtctgtcgacgatgatgttatcggctcttcggagaatcgaggttgtcgtgaca

SEQ ID NO: 12381 - DNA, 563 bp, Zea Mays
cctttgtcatctctacatatcaccttgttgcttattgtatacctgccctataaaattttcccttttccatctcaaattgagagttgtattttacccattttcccttagatgtatcctattctttgccacttgaactttcaactccatcatttaatgtgttttgtttgatatcgtctttacccttgtgatcctaccttgatgttgtcgtatgtgtgccacttaaaacctcccttcacccctctcaattcgagagtggtgttttacttaccctacgcttggtcataacctcatctttgccacgtgcaaatcttgccttaacgccattctttgttgtactcgtacccttggttcttctatacctttacctcttatcttacacccttttctgttatcaccttcaacccttgtaatacctgtattttttacaacaacgcttactttgaacctagcctttggagccttctcctttccatcctagttcaggagcggtgttttacttatctcacccttgacaacatcctcttctttactgcgtgtaagcttggacgtgactccattatttg

SEQ ID NO: 12382 - DNA, 480 bp, Zea Mays
tgttgatctacccgcacgaattcgtcgaagaagggttgtagttaatccggaaccggaaatgaatcctcctctgaatcccccgcctattgatgacgtgactgctgctcagatgtgattactacaacaaatggccaacacaatgacagaaatgcaagcatagatctgtcaagaacactaagaaatgcgtcaagaacgtcaggaaatgcgccaagaacagtaggagcgacaacaactaccacctccaccagctccgcccagggataagcaccgggagtttatgagtcacaagccacctacattctgtaactcctcagactcactacaagctgatgactagttaaaatccatggaaaagatgctcaatatagctcagtgcaccgatagggagaaagtgctatatgcatcgggtctccttactggccccagtgcagattggtgggatgcatattgtgctgctcacgccgctgctcacaccattac

SEQ ID NO: 12383 - DNA, 506 bp, Zea Mays
gctgaggccgatgatgcccttctggctgctgatcattacttggcgcaggcgccagtggtgggggtcgtggtaactgagcctaggaagcttgagagtgacttgctgaagcaacataagctatgggctgttgattgcctacgtactccagaatatacagagagtaacacgaagcgatatgcaagacctgcttcggctgactttgtcgtgctttggcttcagcaatttccttctgcttttggatcatgacttggcacgtcctcgttgtgtgtcccttgtcctctccatagaacaggcagaacaatttcctgggctgactaccgtaccttcctccgccaaagcttctcccccgtctgcctctcagggctagtggtctgtaagaggtctattgtatgcccgaagattgtgagctatgatgactgctctaagcattattggccctgtcatcgctggtattgggattgtggattgtcctgacatgcctaggatggagtcttcctctgaagccc

SEQ ID NO: 12384 - DNA, 566 bp, Zea Mays
ttactgaactatttctccatagtgttgggcttttacttttgtattgctcagtcaacataaagttaaaggttactcgtggtcatgtgtggagcaaaacaaatttgatatgaaatatctacttcaaaagctttcggcagggcattataaaacacacaatgaaacatcacaacactagtacacaacaatataagagtcaaataattacctttgagggcatgaacacagtgtgactgtgcatccaacgatccatgatctatgcaattctggcgtgcattgcttggcacaggctgtgcttgaaaaacaagcacctgatgagcacagattgacttatggagactttgctgtgagttatgaaagtgttagttgacaacctattccctggtgggcaattcctctgtcagcattgcatatgtttcatcacttggtttgcatttcatctgttctaacatggatatcatgtcatggcacatatctgcatgacccttccttatgaagccatcaattataactttccatacaatttcatcggtattgtactctttccatctcgaacttctgaaaatttc

SEQ ID NO: 12385 - DNA, 2531 bp, Zea Mays
ggtgggtacacgtacgagccgtgattttagacccaaaaccgatccaacccgaaaaaacttgacccaaagttaaaaactcgatctaaccacaaacagacagacacgaacgatctgacccaacccgatattaaacacggatcaggtattcaggtacgagccgtaataaatcgctcgtcatccgactctactttcattctactgcttgaacaggtctactttcattctactgctatgagtagcaattccccgcgcgcgctctctccgccccggcactaggccaacggcaatcaccactcaccaggtgccaaggtgtcttgtcggccccttcaccaagtgttagtcgggtccttcgccggcgacgggcaccaccaggtatgcgcaccccctccccccttccagctgcgcgaaaccgagcaccgaaccctaactcagcctatttggtatttgtattcgggtctgatcccaccttttatttttgtgtgtgcgtgtgtgtagtttttttttctctagtctcatcccatgattcgcgaatcgagaagggatgatgccatgccattggtgatttgcaatactgtagtcgtgttcacgtcataaacgatcgctccttaaggggaggatcgagggcaaactagagctgcatggggatgatactgtgcaactgtagcactttactcttagtctcaggcaccctgcacatgcagatggacttggttcctgagtcgtgagggacctgcattagttgaagcgagcgagctgtaagctgtatccttatgcatagggtgtgggtactcatatcatggttgttgtctatgcatttcatgattaatgcaagttgtgtgataatgatttgtgtgttgtgtatgtcaatagttttgcataaatgctgttaaaattttgcaaaatttgtcaaaatttgcaacatttaaaatacatgcagccacttgtgttaaatgttgttgccaaaatccttgtcaaatctgcaaaaataatgtcaaaacctttgaatccaaacatgggtaaaagtaaaatcacaaagaaccaacaaaagcgagggcaaatctgcaagggcaaaattgttatctcacgtcaggattaacactgttataatgacttaacagaataggggcaaagtcttgcttcgatttgaaataacaggggcaaaaacacaaagttcaaaaaataggttcaaaatcaccacaaaccctaaaaccgggggtatgaatgtcaaataacctaaaattttttaaggtgcattgttcctctcattgttgtgccacttacataaatgtttagacttagttattggatggtatgaattgaatacaagcaacatctctaagagagggaagcaggtgatccaaactatttgcgactagtagataagctattctgcttgtgttttttgttctgtttggtaagacatgttttattcatcatcactaagatgattttcctccccacttctggattagtttagtatcaacacaggggctgtgcgtggtactttcctgtatccgttgatttggtaatgtaaaaatatctgttgtaacacaattatcttgtatttgtatacacaattatattgtatttaattatattaatttgatggtttctaacgtattaccccctttttccttgaatgtggtctgagtttgttgacagtatggacgaatcacgaaaaagagctgtctctactgcaaatggtaaaaatataagttcatcccttggtatgttctcttgtgagctgtcagtactcgtctacttgatcatctcaggcccttattccttatttatatgctctgcatggactaaaattcactatactactaaaatggagacctctcgttggaaactaccaagggccatgttcatcatatttggcccttactagtactacctccgataccatgttaggagaatgaaaaccctaaacctaactagggttgggctgctatattaatagatagtatcatagtatataagttaggcctaagcccattacagttaagacacacacacatgtctaacactaccttcggaaagtgatgcttgaacagcatccacatttttttgctatgaattgatggaattttctttctaatttgacctgacatatgcttattatatgttggcagatgaagactttggaaatgacttcctttcatcttggaagttaccaaaatcaggaaaagacacgattgacttcagtgttgactcagttcccaagagtagcaagaaattcagctttgacaacctgtgagctaatcccttgaaaggcttgaatccatcaacttttgatgccatcaactgcttcttgttcatgatggttctaacaaatcattcctttgaccagagatgattttgggcttaatggagcctttgacaaattaccgtcctttcaaatgggcatgtctgatctggatttttctagccctgacaagaaaaaagtgaagcacaccagttcaaatgcagatctttttgaaaagaaaaaggaaactgacaaggacaatttctccttttcttttgatttc

SEQ ID NO: 12386 - DNA, 449 bp, Zea Mays
tgagcttcggtggtggtacctccgcctcccgatctcaagaagtggtgaaagtgccctgacagcgtctgcagctcgaacgaactgcgccttgatctccccggcaacgtctgtagtgtcgacgggcctacggggtgtgggcgcagaggatgcagtgttacgttgcgccggcgccacgttacccccgccaatgacttgcttatcgacgacagaactgtcctcttggtcgacttgggcaatgccgctgctgacgccgccgatcgagctgcgccggctgcgtgcgccactcccgggcgccgagaactcgccggccacctgcttgacgacggcgtcctcctcctcgaggtctgggatgccctcttcctcccgcacctctcgcgagctcctgctcggcgtgtacgccgccgacgtggccccgacgccgccggcgtcgtcgtagcagtagttgtcgt

SEQ ID NO: 12387 - DNA, 658 bp, Zea Mays
tgtgcttgcgcgcacctgagatttcgcccaacgacagtagccaaacaaaaatgccccacactcagtgtgtgacgaccaaatcacaggcagggcctgtccctaaactacgtaataaaccccaagcaataattaaaaattgctcgagggcttaggggttgctgtcgggtacctaggagcggggtactcgaagtgaagcctataaacctgttggtcataatggcgtcccagccgagcaggccagcacgatagagtgaccgaccaagtccccgtagagcaagccagcgagacagagcggacaaccaagtcccccccgaggaagcttgcgagggggcgcaactgaccaagttcccgacgaggaagccaacgaggcagagcggccgaccaagtctctgtcgagcaagccagcgaggcagagcggccgaccaagtccccaccaagcaagccaacgaggtggagcgaccaaccaaatccccgtcgagcaaaccagcgaggcagagcggccgatcatgtccccgtcgagcaagccagcgaggcagagcggccgactaagtcccacctagtaagatagcgaggcaaagctgccgaccaactatttgcgcccacgaggtggaaacctgagcccaatgatacgtgcctgcatctgtcgcgacaagacgtg

SEQ ID NO: 12388 - DNA, 452 bp, Zea Mays
ggaatggttgcccacggcacgggacgggttcacgacgatgacgagcaattgccgaggacaccagccgactacccccgattgtactctctcctggatacggcaagacccgaccaacccacggataaccctgcaggaacccaactctcgacgtcgacggaaacctgcggcggtgcctccccgactttcttacaatcccccactgtgcctcgcaagcaagcgcggtgaaggcgttcgggggtggggaagataatccaagcacgggcatggttttataggcacacggcgaggctggcgacccggatagcccgcaccaaccggaacccgcagatcacggcgtgccatcgccatgcacggcgagtcagttgggaggaggagctggtatccaggtcccggttgtctgcgacactatttctccagtacgcgaagtaagtgccagacccaatggtcccccc

SEQ ID NO: 12389 - DNA, 362 bp, Zea Mays
acgacgaccgagggagaagatctctgtccatagtgcatttactgctccatgtagtacatattaaatagtagttcgctagggcccacctgtcgagcctgctcggcaccctcataatgtgccacccttagactataaaagggatgatacatacgatacaaggggacactctctctggactcaagctcattcagactcaccacgctcaagctcttaagcaatacaactcacagtggacgtagggtattaagattcgacggcctaaacaactttaaatcatgttgttcatgtgttcttgcacctctcgacaggcataccctaggcagcccactcttacttaggataaggtgggtgcattccgccac

SEQ ID NO: 12390 - DNA, 580 bp, Zea Mays
atccacaaccagataaccctcctcaccctgatcacgcccgatcagatatcgacggtctggatctacctgatcgaaccggtatggccccattctaatccaagttgttcatccagggaccgacggccaggttgtcatctccagcctcactataggaaccgagcagcaggaccctgccgacggcgacgaggttcaccggtgccacgacacgaaggttcctacgccccaattctagcctcgacgttgctaaactatgcggaggacatgacaagtatgatgaagtttgactcaccggtcgctaggtagcgtagacccgaacccatagagatgagtagcaccacggtggagaacgtattctagcgagcaattccacggtcttcaatggcctcttccgcgcactcgagccacaacgaccttcaccgcgtcccggttcagagtcctggccagttcttgaaggtaagccgatggcaaatgcgaggaagtggctacatcggtggagtttccgaccacgagctccgaagaagaggtgctacagtggcggcgacgtgttcctttatatatccctaggctaggtaggtctcca

SEQ ID NO: 12391 - DNA, 1201 bp, Zea Mays
tttcagtccagtcggcccatcagtacagcgaacagggggggcgcccacgcgcgcccgcgcgctcaggcgtatttgcggaaaaaacctcagggtttgcactaactggaatccggtttctttactgttgcccagggtcacagacaacttatggacaggtccctctactttcttttcttccccacgagtacccctggccatggcgtgcacacagatcaaccctggtgcaacccgtactggtcatggcgggtgttgaatactacggctagcgatcgggaaggcattagcgactaacagggacctcggaacacccaacaatttggcacgaacaccctgagaacggcttgtccatgtgcacggcggaaaccgtgagcatgggcaaacgttcccgctcatccggggccggattgagtagtcgggcgtcacggtgagcatcacaagcttatggagttgcagaaacaacactcaatttaagcagagccttaccagagcggttcggccacggtggggtgggttttacggtggcggagatcgatttgggggaaacttcgaattcgcggatctcagcgaacggtcggggctaattcgaggtggctggttagcttactaccccacggagctcggggcggtgtcaatttatagacgtagcaagcggcggtggcgaattcgaccgagcagtgctggcggccggaggagagacgagctttgtgcgtggaataagtggctttcaccgtggcaggttctccggtgatcaccggacatgcaccacatgattcaccgtgacgagatccagcactaaggcacgtggtgcgcgatggtgacagcacgacggcggtgagaaccctatccgaaagatcagtgcgcaggggaggggcacggcggctagccggagtggagtccagctcaccgacggcgatgcactttcaccccgcgacgttatctacttgccacccgcacgaatccaaacaccagcgacacgaatcatggcggaggtatcgtcggcggtgagagttccgcgctggcagcctgatccaatccaggctactgtaccattgcgagtttcagtcagatgaacctgacagccaatgttgaactcgaatttcctccaaatttactgtggtgactgatttaagtctctatactaaagttatagacctatagttcatcttcaactttgccacggagctcaccataaaatagttac

SEQ ID NO: 12392 - DNA, 397 bp, Zea Mays
ggttaacaggccctgtccgaagctcgctttcaagttttttggtccttacaaagttttggagcgcattggtgctgtggcctatcggtaggagttgccaccttcggctcatgtacatcctgtttttcacatttcacaactcaaaccttttactgctaactactctccggtgttttctactattccggcccaagttgatctcagtaagcaagtggtggtgcctgtggaggtgttggacatgaggctggtgaaaaagggcaactgagctattcctctggttctgatccaatggagttcacttccaagcgatgcggcgacgtgggaggattatcatgtcattcggcgaggtttccacaggcccatgcttggggataagcaagttctgcaggggggcagatgt

SEQ ID NO: 12393 - DNA, 402 bp, Zea Mays
tatgtctgatgggatgggagctgggcaggtgggttagataaaacacgatcagaactggagggtgagaccgtggaacagtaggaaattgctatcatagaggcatatcttgaggggtagttatcctttatagctaatcatgcatgggtgtgggccaacaggtcgggtttatgggggcagaccctaccgggttggcatacccgtgtgcactacctagttacaaaaagggaaaaacttcgacccctcagacttgctctatagataaaacttacagagatatttcgacactgggggaggcattccttcagtcgtagctagacagttgcccttgggtcggggtactcccattaccatgaagggtccttcccagctgggggagtgttacggagccctaatttggtctgg

SEQ ID NO: 12394 - DNA, 297 bp, Zea Mays
tggagacgcaacaacaagcaccgccgccaccaccacctcctcgtccacgtcttcccgatgatgtcgtgtttgatgaagaaggtaattatgatgaagcggccaccagagatttgcgcctacgtcgccgtcttcatcaaaacacagaaggtatgccacaccaacaccgccagcaaggtaataacaatcgttctcctgacgacccttatgctaagactaaattttctataccatctttttcgggtcattatgatgctgagggatatcttgattgggagatgatgatagaacaaaaatttg

SEQ ID NO: 12395 - DNA, 556 bp, Zea Mays
tgtttttgatgctttgcgcgtcgcacgcttatttgctaaccttgacaaatgcaccttttgcaccgcacgcgtatcgtttcttggctatgttgtcactacacagggtattgaggttgatgaggccaaggtgcatgctatttagagttggccaacgccatcgacggtgacacaagtacggagttttcttggacttgcaggattttatcgtcgtttcgtgaaggatttcagcaccatcgctgccccattacatgagttgaccaagaagggtgtttcatttaattgggggcagtcacaagaggattcttttgatcttttaaaagagaagcttactcacgcgccactactacaacttcctgactttggtaagacttttgaactcgaatgtgatgcaagtggagttggcattggtgctgttttgatgcaaggaggtaaacctgttgcatattttagtgaaaaattgaatggtcctgttcttaattattctacttatgataaagaattatatgctctcatacgatctttgcaaacatggaaacattatttgtggtctaaggaa

SEQ ID NO: 12396 - DNA, 355 bp, Zea Mays
agcagcagcagcagcaaaaggaatcaggagaggagatatgatttaggcatagaaaaggaaagaaggagccgcagaaacaaaaggaatcaggagatatgatttagtttgttcctatactagcagattgcttaagaataaatgaggagagtgtttccctcaattaagagatatgatctagtttatttccctgttagtatatttccttaagtaaggtttccttaagataaagaggtgctagctatataaagcaccatagtttgtaataggggacatcgaagaagaatagatctcctagagagggcgatctccttcggtcacctcgactggagatcgacctcctctggttccaccttcc

SEQ ID NO: 12397 - DNA, 770 bp, Zea Mays
ccaggatcaagatctgatggcgcactgtcgtcccttctccctccgcctccccgactatacactccatcggaccatctggaatgtttgtggctcctcccacactcgccactgcggatctacgcatattatatccatcgttccgtctgtctttctaccctctctgatacatcagcaggaacgcttctttggaagcagccatcgaacttagctcaccaccgatggttttggcgagggagactaggatttgcaacgagtgaacacgcaatccttcccgaccatcgacggcagcttcgaacccgtcaggtttgtctttgtagattcgcctcccatgcgattttccctcccttcttccactcttcagtctctgtgtcgccatcgtgcggacgcgcgcggtcactgactacgtgttcaccttcgacgtcgtcgctcgccacccgttcacctgcaactcttacaagcattgtgttcctcatcctctcttttgtctcctgccgctcaccacacattcccctgcgtgtctcacacctcattgccatcattcctgcacctatcccgaattcgtcgcgcctatacaagctgcaccttgcttcacatcttcgtccctcacttcgctcttgcaccgatgatgtcttcgtatatctgttgtatccccatgtcctaacatttttctcatcatctaggactgcagcttctagcagcctttgccgagtgttttcggggctttgccgagtgtaaacatgaagcaagatagagcttctagcagccatgca

SEQ ID NO: 12398 - DNA, 447 bp, Zea Mays
gccttgatgtgtgcgaggagcatcgtggccccgatctggcgtgctccggcgatggctccgccgcgcgtgtgggcggcgccgtcacgctctggcgtcggggggaagaagaatgggtggaccgttggattgtggttaagcggatgagattagatcacggcataggcagttctgggccgtttgatctcgatcgggcgaatctggggcgggttggagtactttaaatccgcgtcgtcggtcgttgttcggacggttatgaatgcataccggttcatttaaatgataggactaatctgggacgtccagattagatcgggtggctgggacatgttcttacccccttcggccctggtcgtttttcaaaagagcccctgcacctgtgttaaaacaacccaccgtcctgcacggatgtggctgtgtcacaaacacttttgctctcttgcccctggg

SEQ ID NO: 12399 - DNA, 764 bp, Zea Mays
ggggcaagtaggggaggcaccatcgccaacatctgagaccaccgccaaccatcagcagaggagcggcagcaagtgccaccacgagtccgtcacccagaaggtgtatgcggcagagcctttcggctcgttggacccctcgtggttgaaaatcccaatcgcgttcgaccgacgcgatcacctaggcagggtcctgcatcccggaacctagtcccttgtcgtcgaggcaatcgtcggcccgaagcgtctctccaaagtcctcatggatggggtgagcggtctcaacatcatgtatgttgatactttcgatgccttggggattgcacgccccgcgctacgccccaacaccgcgccgattcacgacatcatgcccgggcacgacactcgcccgctcgggcggatcattccatctgttacgttctgagacccctctaatttccgcaccgagcagatgcagttcgaggtgatgaacttccctggagccgacttgcaggctggatcggacgctcctaaggctggttccgatacattcaaatccgcaacgttttcgcttgtcgacgacgctcctaagggtcccaatcgacgacgctgacccctccaagcacgttcgaattggggcaacactccccgacaaacaagaaagcacccttgtcgatttccttcgggctaatcgcgacgttttcgcttgtaagcccgcggatatgccggggatccctagggaggtcgccgaacactccctgaatatccaacctatggccaggccagtc

SEQ ID NO: 12400 - DNA, 364 bp, Zea Mays
caggggcctgggcgcaccgtttcatggataggggttagccatgagattcatggtggccgagcattcatgaaaatgtagtcgggtgtgtgaatcggacggggttcaccatagggcgcgttcgccggtgttcttctgccgctctgggtgcgcgccgccgtgtcgtgcgcagggaggtagtacaagcatgccatgaccattggatcttgatcctgcggtcaccggatcacgtgggtgaagacctaatctgagccacacatcttcaatcctacggtcggaatcggatgccgattcgttattgtggccgatctaatcgtagcccttggtgtatgatccagtggcccataatgcaccataccctttcggc

SEQ ID NO: 12401 - DNA, 776 bp, Zea Mays
cgcccgcgcccctgtggattttgtagaaaagaccttggcttatggaataactggaagcaggaccgaagcactatttagatgagtcactgatgtattacaaagaaaccccccacgttctatttcttcacagaccagggtccccgacgacgacgagcgcagaaccgggcttcagcgagctagactagccggagggagccaagaccggtgccctgcttcggcctaaaccaaattcaagacctagaaaatgttttccccaacttattttcaagaatgggtaactggttgactctagccacgacgaccgtagaccatgcggacagttgaacgtgttcccgacgatgggtgtcggtctagttcaatctggtgggtcgatgagcatcacgggttcatgagagtactcaaacaagaaagtagagaggatgaactgactggaattgtgctggccgcggtgaggtcgttttcacggtggcggaaaaccaaatagggggaaacgagaaatttgcgagctctaggggacgattcgaggtacgagttgcttcactggttgcgtaattacctaacggagcggacggtggcggcaatttatagcctctaacggcggtggcgcccaattttaccaggatgtgctggcggccggagagaaaaaggcactggtacgtggaacagatggctttcaccgtggcggctcctccggcgatcaccggacatgcataacacggttagccgcgacgtggtaaagcatttggacacgcggcggacggcagggatgactcaac

SEQ ID NO: 12402 - DNA, 895 bp, Zea Mays
ctgggggcccgtatccagtgaatccatctttttccttcaaagtacctttttcgatagtccttttttaaagacttctcgtttatcccctttcattttcaccattttattcgtaatcttgatttgtttatccctatagacacaaaactccaccatcacaatcttatgttgagagacaatatactcacatttatcaccttacagtccaaaaatgctcgtttatcctcttcttgtgaggaatgaggttgaagtcaatctgactagagtgatggccgatactataagttactaaatgagagtctctctttgtaaagaaagtgttagctatcaataagtcaaaagttatcgtgaagttcaagacttcctctccctcctgattcttactaccatacataaaacctccatgaagtgccttaaaacctgcacttattgtacctacatgcccattaaaatctcctatgaaatgattcccactaataggtatagtaataaccatgccatctaagtcttcaaaaaatcgcttagcactctgatcgtgacctacttggagggtgtacacgctaattacattcaagaccaaatcacccgtgacaagtttgattaagataatcttatcttcgtgccttttcacatccgtcatacggttcttgaggcttgtgtctatcaaaactactatttcattttatttgcagctgtccctgagtaccaaaacttgaatatgttattgtccacctccttcgtcttctgacacttctatttggtctcttgaagacgtaagatatttacatgcctcctaataattgtctcaactgactctcttaacttacatgtaagcgaccctatgtttcaactatctcaacagatcctagttggttcgtctagctttcttacctttcac

SEQ ID NO: 12403 - DNA, 313 bp, Zea Mays
tgaggcacaaggctgagaggaaaaggtatggatggatgcttgcttgctttgtttccatggtgtcactcagcctgcctcgttttgctacaggtatgtcttgaagaagatccgcctcgcacgccagaccgaccggtgccgccgatcagcacaccaggaggtatgctcatactttgtgtccaattacgaccttcggcgtcataaatctgaaactggttcagaacacaagtggttataaattttgcaaaacagagagaatttgagctctccaaggggacaaacagacacctttgtttccttgtagggcatgcacggc

SEQ ID NO: 12404 - DNA, 751 bp, Zea Mays
ttatagtcgcaaggaggaggcccaagggtacaagggttgatgcgcggttgttgtggtcagaggagacgcgtccgagccctgtagcgacatgactggcgggatggcccttgtcctcgtgtccgagccctgtagcctgttcttttgacggggtagagagccgaggctgagctcgggagcatggtcatgtgcccgagcccagcctatacatgggcacggatgtcgagttggagtagttgtcacagtgcttggtatggtcctccacaagattcgcggaagaataggtggcatttaatgcacgtctgctggggcagttggccgaggccgagctcgggcgaggcggagatttctcccgaagccgaggcctcgactggacgctacgtgtggccacgcttggagaggttgaaatagtggccagagtggaggaacagtgtccggtattcgcaccatgcgcatcatcgtgggcggtaaaagtagattagactgtactcgtgtcttcctttgttgactttggcacctcagcgaggcaggtgaatgtacgaacacacattccggaatcgaagtggttggctgaagcgggtagctcccgagcgtcgtctgatgcgctctcgggcgcatcgaaaaggtgcatctcgcccgaggctagcatcaggtgaatcacaaatgtgtctcccatccgaggttgacctcggacgagccgtgactgtgactcccgcctgatggtggcctcgggcgagttgtgactgtgtctccc

SEQ ID NO: 12405 - DNA, 587 bp, Zea Mays
gcaagctctaagaggagtgccgtgctcggtgccatcgttgatcgccagctagggccggcaatggttatcaccgtggccgcggctgtgcttcaccacgcctataaattcaccccgtcctcgctcccttcgctcaaatcaaccatgctccgaccttcgtctccaaattgcgaagccatagccaccactcccgtctccgattagcccccctagccggagaatcactgtttgcccccaaatcggtctgccgcaccgcaagaacagagcgtgtcgtggccagcaccgttcaggtcagttcatgccgccctctccctcgtttgagcactctcataactctgtgatgcttgctgaaccaccaatttggactgagagctcaccaatcgccaggaacatgagcaaaggtccttagccttcgctgttctcgtgggtagggcggagtaggtcaccaaccgtgcaattaacttaggggaaatgctcggagtaggtctaatttggtgtccgccgctcgggaacgccagtcattgccccgttaggccgatctgctagctcaccggagctccaccgtgctcaccgtcgtcgtggacctcccc

SEQ ID NO: 12406 - DNA, 560 bp, Zea Mays
aaagaagattccacagaaagtgttacgccattttccgttgatacctaggctacagaggatgtttgtgaacaaagaaacagcagaacaagcacagtggcacaagctgaagggaaatcctaaggaaaatgaaatgagtcacccagctgatggtgaggcatggcaagattttgatagaaaatatccaaattttgcaaaagatgccagaaaccttagacttggcttagcaactgatgggtttaaccccttttcggaaaaaaacactaaatacagcatgtggcctgtacttgttgtgccatacaacctttcaccttgggcgtgcatggaggagtcaaatttcatgatggctttacttattcctggtcctacatcacctggaaaggacttcgatatttttttagagcctcttatagaagatttacttgagctttggacaggtgtacctacttacgatgctctaactggacaaaaatttaacctacgtgctgcagttttatggtgcatccacgattatccagctttgggcactctttcagggcgtaaaacaaaaggtttttttgcat

SEQ ID NO: 12407 - DNA, 494 bp, Zea Mays
ctttgtgccatccttcttctccacaaacagcactagggctgcccaaggtgaggtacttggtctgatgtagcctttctctgacaactcatcaatctgcttcttgagttccaccaactctggttcggacaatcgataagctctcttggaaataggggcggtgcctggtataagctctatggcaaattcaaccttcctttcaggtggcatgcccggtaactcctcaggaaacacatatgggaactctaacactacattgatagcctctgatggtttaatctcctcaatatgagcggtgacttggtgacaacttccttttcttggtctagacaagaccaactccactaacacttcttcccctgataaggaaactaacttcaccgttctcttgtcacagctaagactggcttgatacttggttagccaattcatccctaggatgacatctatagttgtatcccggttactcataactattaaatcagtagggaacttta

SEQ ID NO: 12408 - DNA, 365 bp, Zea Mays
gctaagctaagcatgacgagtcgcagtctcacgcaccatcaggcactacactacagtacgtaaagcagtagaagcactaggtccatcaaggcgtgaatgactgcaaggccaacgcccaacggcaacgtggctcgcaccacacgccgccgcgccaaattaccaacaccacggcacacgggtgggcttcatttccgtcccgtcaatgcttccccgatggacctgttcaacaacagtgggcgccgggcgaaccaatgctactgcgacaacgacctacgactacgatggatgctgctcctccgacaactagggagggagtagccagttttccttttggcgcgtggacaagataggctaccgtcttttct

SEQ ID NO: 12409 - DNA, 520 bp, Zea Mays
ccccaaacaagctttgtcagaccaactgaatggcctcgcgatggtacagtggactgaatgagatcaggtgcagtgcacctcgccaccggtaaatcatgcgctcagattcacgttgatcgctacgattcgtgcctcgggttagtggattgcgttcggccgtaaaaagatctcgtcgcgaatgagttcggaacactgtggccgcgctgtccctcgaccatttgcgccggcgacgtggcctagcggccgtcaccggagtttgcgtccttcaccgtgattgtgccacgcctcaggcccttaaccacgtcgcagtacatcgccttagtatatccattcgtcgccggtggtcttgccacgatggcatccacgatttacttgcgccagtgacctctttcctcttcggccgccaccgcgccatctccaattcacacgccaccacccccggagcctataaattgagtgtgccattggctccgcaaggtagtcaagcaaccaatacaccaactcgtacctcgaatcgtcc

SEQ ID NO: 12410 - DNA, 711 bp, Zea Mays
agacttggtaaggggtaaaggccattttcacatctaccatgaagtagaaccttccttatgtctagatccttaatcagaaagtgataagaaaaatattcaagtgagatatgattgtccttggaaaaacaatgaactgagactagattctgtgtggcacgagaaatttgtaaggcattgttgagatataaggttttacaagaggtatcaataacatcatgaccaatattgtcgatgttcatacttgtcgcattggctgaggatttgatctgtccccttgtacttgttctggactgttaggttgtctaggtcagatgcaatttgatttgttgccactgtgtcggtgtagcagctagtgtcgccaccatgggtggccacaactgcactcttgatatcgaagttgtagctctcatcatagtggtatgagcaatcgagggaaatatgcctaccttgtggtagacttgacagatcttgtcagtgcgccgagctcggacatatatcagacaatggcgatggaccttggtagccaccacgaccatcatgaggaccaccacaccctctgccttaactatggccatggccggtggccgcggttgttgtttccacgctttcgactagcagcattagtagagacttgatgacctccatgaagcagggacagagccagaaagttttttaggagagactaaactaaacaactgtagataggagccc

SEQ ID NO: 12411 - DNA, 654 bp, Zea Mays
gagtctggtagtactagatgcttttggttcaccaacgtcggggatatgatccccggtccctagggcccatcggttagtgagcacgctggggaaaggcctttggcaactggggcccgccgttcagctagaggagataggtaacgtctaccatggaagaactcgctccggacaaaccctgtggcaccaagcctggggtcgggagtggcggaacctgacaggagggccaggcatgctgaagggaaaccactcgaatggatcctgcacctggcccgagactgacctgtcataaatgaccgaccgcattaaccgcggccgacatcgagccacagcgtaggcaccggtccgtcccccacacatgacctacaaaccccttgggccagagagcactcatgacctacgagcacctcggactgtgtcgcatttatggcccacacaaccccccgccagcggcacactcatgacatatcaggactaggcctgagtgtgcaggccgctggtagggtgcaacacgacaaaccacgctgagccccaggctacaaaggccaggggtcggcatatcccaaatgatggcgctcgagccccacactacctgcgccgtccgccataaagaatacaagacaactaggcgactgcaagcacgctggctttaccaca

SEQ ID NO: 12412 - DNA, 783 bp, Zea Mays
gcaaagttggagctggtctattaggctacaattgctacagaacaatggtcttgttgccatgtaaaatcaggaggaaattcgccccaaacttgggctgtcaggctgactgaagaacaatcccatggtacagtaacagataggatcaggttctgatcccctcgccgccgatgagccacgcgcggattcgtgctatcgccgtggtgattcgcgctcggatcagttggataacaccggggatccgtaaatatcacgccgtggatacgctccgaccactattttactccggccaccgtacccgagcagaccacagttgagttggatgggttcgccggagctagccactgagcggtcttgcgccacgtgccttgacacattaacctcaccgccgtgactcatgttagcttgtccggtggtcgccggggagcttgccatggtaattgccaccaattgcgcgcgctagtaaccttcttctccagccgtcgcgcgtctctctcaaattcactggccaccgctcaagcctgctataaattgccgaccccgcctgctccgctaagtaattgtgcacccagcagagcaaccagtgcctcgaatcatccactagaactccccaatttgggatttcccctaaatcacccaagaacaccgtgcggtgtgacctcgccgtggtcagctcgtctcaggtccgctcataccctctgccctctcgttttagtgttcttgtgtgcccctgatactcctcgaccaactcgattgagctaagctaccttagatcgccgggaacgc

SEQ ID NO: 12413 - DNA, 363 bp, Zea Mays
ccgggggccactgtcggtaccctgaatcaagggtaccctctcctacagtatgaaggcgctgcacccgtacgacacctcctggtcacacggagagcggcacccaaccccaccacatgggcaggcctaagggcaccacgtggcaaggaaggatgatatgtccctggaagcaccgttgggtccggacctccgcagaggaacaccggacccctgtaagtacgagcccggagctcccatggagacacgtcaggtttccctaagtgaggtccgaaccttggcagggtcccaggacggagaggaccccggcacaagcaagggtccggtgccgacacgtgtccaggccttgccctacgctccccgctcaag

SEQ ID NO: 12414 - DNA, 1175 bp, Zea Mays
aacgtacacatcattatcagctctccttccggtgtagtggctacttgagtataataaatttgcccagtcttctagacatttttgcccgctgaattagtagccatgttcctttaccttgattggagctcctagagttctgttgagtgttgaatttattctgcttcagatatggacagtcttttataaaatgaccagactttccacagttgtagcagccagtagaagaactagggagagcaggaaaacgagcaccaggggcactcgactgatttgtagaagtgggggcagtggtaggacgaatgaaaacaggttgtttgaacggataggagggtggacgaggcgaagaacaattctgattaaaaggtcggattaccaacctggttcgcttctcaggtccctgattagacctgtcacctccaaatccctttgattttccctggcctatgttcttggcttctactgcagtgtcgtgctgacagctctgctgtaagtaagatctaggcaggtggccattttctattggagccggtcgttgagtcccctcatgaagcaattctttttcttcaggtcagtgttcacttggtcaatagcatattggcataaatggttaaacttgttgagatagtgcattacagtaccccccccccttgctttagtcgaataaactcctcttgtttcatgtgaagcactccctctagaacatagtgtccacagaatgctagcttgaattcatcccaagtgacctgatgtccagtcggttgaactgctacaaaattcgcccaccatgtactagcagggcctcttagttgttgggcagcaaacaatggcttctgtttttccatgcaacggaccaatacgaacttctgctccattacccttatccactcattagcttcaagagggtcttcggctttaacaaagagcgggggacgtgtctcagagaattccagatacgaggtctcacgcggcccttgtggaggaactctccagccatgctactggaattgatttcccgccatctcacgcaagaagcgggtattatctacggtagcattgaccaaggcagcgatagcctcggccagtgttggtggtacaggtggcggattaggagtatcttcccgaccacgagaagtccccgcaccgtcatgcgcacgagtccgtgatggcatctaagg

SEQ ID NO: 12415 - DNA, 302 bp, Zea Mays
caccaatccgcagcggggccagtaagacgacctgatgcgtagagcactttctttctgtccgagcactaagctatgttgagcatcttctctacagattttagctagtcatctgcttgtagtgggtccgcggagttggagaaggttggtggtttgtgactcataaactcccagtgcttatccctagggggagctgctggtggtggtggtggaggcagtggtgcttgttgctgttgcgcccttctctcctggcgtatctcctctcgctcttggcgcatctgaaagtcgcctagagggggatgaat

SEQ ID NO: 12416 - DNA, 857 bp, Zea Mays
atccgtaataatcttaactaatcatctgccctgagtatatatatggcccatcgttaccctgctatgtccatcatcggtgaagccgtaggcgccatcgggtcttgctgtgtgcgaatgtggtgattgtgccgccggcgctggacaacaccgcacgtttgtgccgaccggggaagtgagggggcccctgcagccatggtgcccgtggtgcgaacttcgctgggtcaggggctctggtgtgtccgtgtcatcgactaccggccgtcggcgccaactcttctccacggaaccacaccacggcgtggccgagtctccctatggcgtaattcgtggtatgtcggctcggatcatatccgtctctgtcccctgtatccatagctatagttagtagtgcagttggatcaccatagggttggtcgagcgttgctccggtggcctcgccgtcgtgcggtgcttgctgtttgccgtgacccagcgcggaggtaggagacgcgccctgggccgttggatcgggcgtgttcggacaggattagaagtagccgtaccctttcgcttggacgagtatcgatcgtcgatttgatatcgtgcgggtgagatgagataggactataattaaatcggggcctttggtctccgatcctgtggatctgggcaagttttaatctgggccgttgatggatcatcctgtggccctcactgcataccggttcgggttgatcggatttaatctgggacgtccgtttctaatctgacggcccatatcaatacataccccttcgccctagcactttagcataagaaaccctaggctttatagaaatagaacccgccatccttcgcggctattcactgtgtcttgg

SEQ ID NO: 12417 - DNA, 565 bp, Zea Mays
tttcttcatcaggacagcaaccctgtcgtctgcaatggttagagatctacgctgcacgattcatggtgagtcctccctgccaccccctttgcgtgacattagtctatatggagtttcgttggagcacctgaatttctgggatcctggccgccgggcttcatggctggtatgaaggtagacgagagaacagagtgagagatgggagagagaaagagacgcaggagcgcagccatcctggtgttcatcggatggggaagacgccttgagcatcgttggatctccgaccgacgaaggagatttgatcccagggcctctcttcgtcagatgaatacggaccgttgatcgtcgatcggtgggtggcgagcagtttagagctcataaaatcctgatggtcggattttgatccgatggacgcaattccgtaccgattcggggtccgatccgggccgttggatctaatccgagcggcttagaattcaccataccccttcgctgcgtcccttttcttaaaaagcccctgctcttttagcatatgaacctgcagtcctgtctgtgggaatcctga

SEQ ID NO: 12418 - DNA, 931 bp, Zea Mays
cttgccttaactctattcttggttatgtttttcacgattaccatctttacccttgtcacctctaaatcttaccttgatgcttatattataccagccctctaaaaccttctctctaccatctcaattttagagttgtattttacctattttcccttggtcgtatcctcttcctagtcgcttgtgagtttttaactccatccttgttgtgctctgtttggtattacctttacctttctcgtcttcgatcttaccttggtggttacattatgactgctatctaaaatattaaatctcccatctcaattcaagagtggtgttttacttatcctgcctttggtcgtaacctcatctttgccacatgtgagtcttgccttagctccattccttattgaactcatacccttggtttttctacaccttcacctcttctcttacacccttgtctgttatcgcctttaacactcgtaatatctatatctttaccttgatgcttactttcaacatatcctttaaagcctccccttttccatctcaggtagagagtggtgcttcacctatctcgtccttgattgttttccttctttgtcgccttgcaagttgtgtcctaattccatcctttgatgtatttttgtttgttatcctcatcatctttgacatctaccaattttatcttgaaacttatctttatgcctactctttaaaaaatactcctctattccaccccaatttgagtggcaatttacctatctgacccttgattgtgtcctctttgccatttgcaagtcttgtcttactgtaactccatcctttgctgaccttttatttgatatcatccttgcctttgcaatctgtacatcttgccttcatgtttaacttaggactacttttgaaatctcctctctcccatcccaatttgaggacggtgatttac

SEQ ID NO: 12419 - DNA, 514 bp, Zea Mays
atgtttctcagctgaagctagctaaagggttcaagggcactgcttctacttccttgccttcgttgctaccagaattcagttaccctgtcaacatcctgcaaactcggggcatcaccaagggaactcgcctcgtccaacaggtactggtggaatgggccggtctgcctcgcgatttagctacctgggaagacaaggaagcgctccagcagtgttatcctggtgcacctgcttggggtcaagcaggacttcaagggatggggaatgtgagccctgctcccatgccagatgtgccgactcaacctgcacaagaggaagcccagcgtccaactcgtccacgtcgccaacgtcgtgccaatactcgggtccatggtccagagtgggtgtaaggtgtgtgtggtataaatggcagtgtgtgtccttgtatcgggggtaagcaaaaactgagaaaaactctaatagaactcctcccagcttcctccccgtcctcctgctgttcctatcttccttccgtctc

SEQ ID NO: 12420 - DNA, 409 bp, Zea Mays
aagatgctgtgcatctgaaagcacacgaggaagccgcacatgacctcatctcgcagcgaccagcatgtcggccacacacaccaactgtggaagcggaactcctataaaaagatcatcgacccttcttccgctaggcgtacgtggcatcaggtctcgctcgcccccccaccaacaagatttgcaaggactcgaaaaagctaaggctagataacgcaactcgcaagctttgtggatgtaaagtaaagccagtaagtaaatcgggcgatgagacgcacagaatcttggaagggacctcaccactcacactgacggcacggcgccgggacggtgacctggcacccttccccaatccccatcttttgcacggagccagggacggcctcaggggagtgggacccccgggtgcgcg

SEQ ID NO: 12421 - DNA, 639 bp, Zea Mays
tcgtacacaatcagcaaacacattcaccacaataatcaaacctggtataaatgtgtatatcgattgcgcccttcacacactaatttgcattttaacttgggcatcacatgaacactactaatttttacacgcgactgtaaccatacacatttagactacaacaagcaaatcatcgtgattacgagcttaactaacccatcaaacgtttcggctaactacagcaacgacatagcccgctaattaacatacacgtcggcttgcctactattatcactatctaaggcacaacatacaccacaacatttttataaacatacatattcacatgtatattcgcacattgaccaaagcatacgaatcgtaaaccactagtctacagttcgaaaccatcgtgcgcttatttcccaaatcatgaacacataacgtgtatcgacccgactctagatatagaggaagcgatgactacttacggcatgtcatcacctcactatataagccaaaacaatttctactatcgactaagagttctaagtattaaacacattattattttccacgcacaaataaacctcaactaaacaccagtgacaccgatggacttttactaaacttatcatgcgcataaccctgtctcgcata

SEQ ID NO: 12422 - DNA, 379 bp, Zea Mays
ggtttgtgctgatgtgctcgacgacgggttggggtcatcccgggcagcgtcccgcgcctcatcgaccttagagcgcggtcttgagggtcaggaaactgacttggatcgtcttgctcccatggaagtaactgagggaccctcagccttagaggtggctactacagagaacttggtcctcaaggatggtgctgacacctacccagcctccgaggatgttgccggggatgattcggctcgtgctggaaacgcaagccactgcccagcccccgagggtactgccggaggtaatctggctcaagtgggtagcgcaaactatggcccagcccccgagggtgtccgagcggggtctccttcttgtacttccatggatgttcacgcc

SEQ ID NO: 12423 - DNA, 455 bp, Zea Mays
taagtttctggaattattttaacactaaaatcattttctaattgaatttctgcatttttctatgattctggactgcgcgcatgaataactagaagcacaggagcccctgcgcaaaaattctcaagactcacactactccgagttggatggcgggttgattaaaccaaaacacagggtctcgtttataaattaggactaccgaaggggtaacaaaggccctgagccatccgatcgcgggtggacaccccagattagatctgtctttaagtgaactaatacgtgatatgggctgccagatctaaatccaagggtcggaacctagatctaatcctacccctcctcggcccatccaacggcttggattgcactaaccgaagcggtatgatccaattaatctggaccgctcattacgcatcaacggttcacggcagtcctcacccatccgaccacccttg

SEQ ID NO: 12424 - DNA, 638 bp, Zea Mays
ctacggtcgtggcggatctgcagcgatggggttgctccggtgaacgattccggagtcatgaacagcccaatccgctagaaggggccacagaaacgttccccgcgccatggcaaagctcaccggcaaagcttggaggcccccacggcgaccgaacttcaatttcctcccctggcggccagtcttctctccctctcgatctcttcttccgttcacagctgaccgcacggcgatggggggggtcacggccagaatttataccagaggataagggcaaggtccgagcggaaaaggaggcggtgaccggtaagctcggcccgggatctacgcatcgagatgaacagacaccaagtctgttacggcgacgttgaagatgaccctgacaggcggccccatacggcagtgacacaattgtgtgggcgaaggggatgcaggcgctgggttggggttttgggccgagagcgcggctgggctaagtggcgagttgggccaaaactgaggaatccagcccaacacaagtttttctcttttctttttattttctatttcaattcccattcatttcaactattttaaatttaaaggagttactaattcaaatatagatgccaccacaaggaaaatccagcatgtgactaaac

SEQ ID NO: 12425 - DNA, 436 bp, Zea Mays
tctaacacgccgacgtcgtttcaagtcactcggcgttacctctaaaactccgacgtcgtcttcaagtcactcggcgttacctctaaaactctgacgtcgtcctcagtcgctcggcagttacctctaaaactccgacgtcgtgttcagtcgctcggcagttacctctaaaactccgacatcgtgttcagtcgctcggcagttacctctaacacgccgacgtcgtctttagtcgctcggcagttatctctaaaactccgacgtcgtcttcaagtcactcggcagctacctctaaaagcgtcgatatgatgtccgagttatttacttactattccaagagaatcaacttcaaaaacaaggtgggcggaggaatgattcaagaactctaagttatgctgcgaacataacggatagagaacatcatgggcaatgaatatca

SEQ ID NO: 12426 - DNA, 687 bp, Zea Mays
cttgatacgggccggaggcctcatcgcctcaatcaccttgatcttctccgggtttgcttcaatgccccggtacgaaaccaggaaccccagcaacttccctgcggagacgccaaagacgcacttgtccggattcagctttgtgcgagttgcccacagcctatcgaagaccagggccaagtcttccactagggtcgaccctctcttggtcttgactatgatgtcatcgacgtatacttccaccttgtccctgatcaggtccccgaaagtcttactcatcgctcgcacaaatgttggcaaggcatttttcaggccataaggcattacgacatagcagtaaagcccatccactgttacaaaagcggtatgcttcctatcttccctagacatctggatttgatggaaaccagaataagcatctaagaaagacaaaaggtcgcacccggaggtagaatccacgatttgatctatttgcgagagtggatatgggtccttgggacaagccttattaaggctggtgtagtcgatgcacatccgaagcttcccattcgccttggggacgatgactggattggccagccacactgggtgatgaacctctttgatgaagccgacgtctaacaacttctggacctcctttcggatgaagtcctgccgctcaacggactgtctgcgaggcttctgactcac

SEQ ID NO: 12427 - DNA, 1236 bp, Zea Mays
cctgattcttctgacccaatacaactcagtttgaagcccacttcaagaccatctcagacatctccaccccaccccaaatccctaccatatattcactaatgcaaaggcaaaagtgtctcgtatttacgctacatagaccaagcaagattcatgtcatggcaagacttaaacaccatgctacaattaattacctttcgagtgcctgatttttcctcaattccttccgggagaaattcaggtgccatgcaagactgcatggataccaaggcaagggagttatagcatcttctccatgcatatcactgacctttgcagtgagttattaaattgtaaattaaaaaatgtcaatgatcaagtaaggagaaaatcatagacgacagagaaaaggctacctcactctccaaagatcgcctaaattcattttctaactttgaacagatatctttataaaactggcaactgaaaaggaaagtaaagatgtaaacctgtgagaatagcatggtattgcctaatggaataaacttttggcagtaattacactgaaaggtttggtaatggcacacttgaagttaccctgaaactgcatgagtcttataataagtgacaatcacccattcctaagatagttcagaagtacaggtcccttattggagtaccataaagcgcaggctgcaaataaactatctaataccacatttgcacatgactacttgaatggcagattaaccagatatacaagtcatggagcagccagccttcgataacaaaaggctccgggcgcaggacgagaagaagggatgggcatcacgtttaagagaacatgaatatctttgacgacagtggtccatgtggagttactcaagccaaggaatccgacaagtaaattaagacctcagtgaaaattcatgatttcacttcagagtaaccagcattaccaggcattgattctaaaagtcgctggtaatggtttccgtagaacactcatgaaggcatcccactcctcctcgcggacaatttgctgaacctgcccaaacaaatatgcaagtgcgatcacacacactgacacacatccagaagaacaggaccctgaaaccatgccattttgtacgcgacactataactccaaataggaagactaaactcacctagcacaagagtacaaagtggtaaccagttaaaccgcagaccaatgatacagaaagattgttcatatatgaacacatttgtcattattgc

SEQ ID NO: 12428 - DNA, 683 bp, Zea Mays
acctaagagcggctggtcacggtggggtgacacacggtggcgcagacggccgatttggtggaagcaagaaattctccggctatggtggctaatcgacgacgagggttggtgctctggcttcgtaacaatctagtggagctagttgtgcactaaatttatagtatccgtgagcggtggctccgaatttggaagagggaagctggcggccgaagagacgggtgagtcacaggtgcgaacttccgtggcgttcaccgggcaaaaggttacaactgtcacttggttatcctacacaacccgtgacgacatggtagaatagcttaaggcgtgtcgtgaccgaggtaagtggaggcacaacgacaacggtcgagcggccacgtcgccggtgcaagtgggtacgatgaagccggctcaatccattcccccttcgatctttttgcgtcctcggtaatatcctacccgagctgagcatgaatcgtggcagacagcacggatcgcagcacggagatctctggcggcgaagttcattgaatctgatcttgttcagttactgtaccatcgcgaacacccatcagtgcgtctgccagagcaagttagatggctttgttctccaatttctatacaacaacccattaatccatctgcagcaaagttgctctcctataaaccagctttggttttgttat

SEQ ID NO: 12429 - DNA, 2012 bp, Zea Mays
gccgggagcgacgccggaagccaggactcgctgtgcagtgcttccttcctcaacgttccttctcccttcaccatcccactccacctaacaattgggagaagttttagcccagctaagcggctgtggatgggaggatcctaagagcaccctggaaatccaaaaccatctcgtctccgcagcgggagcccaggcttcgtatgacagcggccattgccgatggccactacgcgcgcctacaagcttcgtatcccgtgaattgctggtttggggattttgaatttgaacttgaagtcggattgctcttgactgctttgtttgaactggtgcagttaagttgggctgggttggggttgattcacccgcgatgatcgaattcgattccagggctttgcgattgagtgtagtgcagcgcaggagttgcgttcccaccaaggaacgtattcaggaccatccgaattgtcttgctacttgggttggtgggcatagaatgaaattttagtgctgcaaagtttcagacctgaaatattacagcttcctgcctcaaatcaacctaatctggtggtctggattaacttgagacaggagactactgttgttttccaggaatcgtgacttctgttctctgtagcttatcatttgcttggtaggttgtatcaattgctgttaatagggccacactgtagttagggagatctatacaagttgctcaatcctcaattacatacgtgtcgattcttttgtctgagaacttctacttcacgctaggtagtttgtttcatagagaatgtagctgctggtatcatggatagtgcagctgctggtatgaacttagtgctatgccgaaaattggtatcatttcgatcattgcaatgatgaacaagcatgctcaagtgctattgttgctgtctggttggaggtctttgttttgtaaatttaaccttcttttttactctggcatgtgtggttctttcggtaattgattgattaacatgtttgtgctatttaaacactctatttcctcttaatgaaaaacatgctatggcacggtcgcgaaaaaaatgaattatgaaagaatgaattaagaaagaaactctaaacatgctggtaaaatgaattgatatgtgcaattgagtaattgtactctggattttcagtcaatatttttcattgtggaaatgcgtgtctagatccttctggaaaaaatgaattatgaaagaaactttaaacatgctgggttcatggtagtcgaaaacattttgttatatctttggatatcatgctgagataagactttaattctcttgttgttgcatgcaaccttcaatatatcttgtctccttgacaatgaccagaggagtttgtcgcgcacactttgaatgtcaattgtgccaagtttgggaggcgagcatcaaggatcctcatcactggtggggaggatttgaaggtcaatctttgggctatagggaaacccggtgccctcctggtaatttcctatcccgacggtttatgtgtaatgtcaatatgtcattcttgctcttttttggcaacatctacttcaggtgtttttcattgtacattgcagagtctatcaggctttacaagtccagttgagtcagtaagctttgactcttctgaagttacgataggtgctggtgcagcaagtggaacgataaaaatatggaatattgaggaggcgaaaggtattaaccagtgttggtactcaacagtcagtgcattgaaaacatgaactgcaactatgtcttgcaataatctcagtttctattgacaatttgcacaatgtgcagttgttcgaactttcactggacacagatcaagctgtgcatctcttgatttccatccttttggagaattcttagccactgggtcttcagatacaaacatgaaaatatgggatactcgaaagaagagatgcatccacacatacaagggtcatacccaacgaattaatgtgcttaaatttactcctgatggccgatggattgtttctggtg

SEQ ID NO: 12430 - DNA, 324 bp, Zea Mays
cacggagaaatctaagtcctacacaacctcatcatgcggcaacaagccaaaggttccgtactgcggcactgggacccgggggctaaccagagcaccacgtctacaccaatgacaccttgacaaggcattacccgggccagaggaaggtccggtacggaccccattcggcttgagcttggggacgaacgggagagcatggagcatgcctgattcagggagcaacggggacatgcagatgaagccagacgacaaccatctgtacagccgacgttgtggggtcgatttaaccccgatgaggaccgaagcccgagcccccaccaccag

SEQ ID NO: 12431 - DNA, 509 bp, Zea Mays
tgctctcatacaacgacgctaattattcttaccgacgaagtgctagaggaactaaacagagtattttgtattactagcttaatcatactacgcatacaagtctattacacctttgcccgaatgacaatcctcaagcccaacattcatcacacatatataatgtacttagaacataatcccagcaccactaaatcatatgatgtgtctatttcatttttcatatacatccagttagcatatgtgatgggtatcacagtgaaggcataacacatctagactagactcataaccggggggtgactacttggtcacgtcaccacttcactacccaagccgaaacaatttcctagccacatcaaccaaacttctaattgagtaaaacctacacctccttgtcatgaatacaaccatgttgcggcgtgtactcgagacacttccgttcaacttaacgcaatcactactacaacgcatttcgacatacacgttcgacaacacagtgctcagacaaa

SEQ ID NO: 12432 - DNA, 681 bp, Zea Mays
gcgcgctaaaattccattctcctgtgcgctgtccggtggttcaccggacagctactgtgcgctgtccggtgtgcaccggacagacactgtagactgtccggtgcgcccatactcggtttttaaaaaaattctttcccctctcacgcccgaggccaggcaatctctctgctctgttctctgcccctctctcggtctctggcgatcactccctcgccggcgatcacccctctccggcgatctcttcaccggcggcgtccaagtgcttatccccttccctctctggtgagtatcctcttctctctctctttccccctttctctctgagctcctgccaccagtgaagccccctcttccacccctttgtgcccatctcaaatccctgtgaattctagtgaaaccaagtggtgaaatgtgttcctctgtgtgccttgaacattcttgtaggttctcagctccttagggagggtttcacagcctctaatagccatttcaccgaaaccctaaaactctgcacaccacgtgttcggtgaaatgcccaacccagccaaaaatgctccaattgaacccaaatttttcaggcaccttcacaacacctccagtaacatattcgcaaaagttcacgcccatccgatatcccaggctttaatttccccaaaattcccgtttcgagcgatcgtttcc

SEQ ID NO: 12433 - DNA, 393 bp, Zea Mays
gagaaattgtcgatgtttatctaacgatgaatatttgccaccctttttcaaccaaatgaacctaagagcttccttgcaaactgggcatggaaacttaccgtgaacaccccaggcacagaatagcccatatgctggtaagtcatgcatggagtactggtaccaaacatgcattttgaagtttgtcttcgtagctcggtcatacgtccataccccttcctcccaagcacgtaccaattcatcgatcaaaggctccatgtacacgcccattttattccccgggtgtccaggaattatcaacgacacgaatatattctgcctttgaaagcacacaccgggggagattgattgggataacaaacacgggccaacatgtgtatggggcagcgctcattc

SEQ ID NO: 12434 - DNA, 659 bp, Zea Mays
aaccttgttgccattcggagcacgagctcgaccctgggagcttcaccacgccgccaagtttgtgctccaggtcttcgcgggcaaaacagtgcagtggcgcgcggggtaccaaaccagggcggagctgggatcgccgcaggatccgtatcctcgtcggcctgccatttctcgggactacaccaaagggtcgtctaggtgaaggaagtttggtgccgacctcgggcgagagtgacctccaccgtatcaccggcaatatctcgccggttttggcgcaatgtcgtagatccgcgctacaacgaggaccgcttcgactgttcctccaaccccggtaagcaacccacgactagttttgccttgatcatagcatcgcgataggactagtatcgaccgttttgggttgctgtggcgtggggcgccctactctggccatgtcgccaccgttctgtggttgcctctggttgctgcgccggagaaatgagaggaggatctggtggtcgtcgatcttaggaatggcggtcacgattagatgggaccatgaagtgtttaggaccgtaggatttctatcttgcacctaggagtagatcgggggtgggctatcgtgggccgttgatcccagggtgggcggtgttgggggtcagcttcgtagccgaaggtcctgt

SEQ ID NO: 12435 - DNA, 628 bp, Zea Mays
ttggagttgagtgtgaaagaattgaacattggtgtttgatggcagagtttattgattgacagtcctcctagagcaatattctgccattgagaacctcctctttgggtaagtccatcctgtgatgtcaatcggatagtcaggatgagtatgcggaacgtcttctgtgtccatagagacactacccccagctaaagattaggcctctgagtcagtggttggattgtagtctgcatcgtctgcacgagggcactttgatttgaagcgaccggcaagcttcttccgaataccacccagaccactgcaataaatgtgagaaacatacataggtgaattgttgataacgccacaatcatagagaaagaaagtgcaactctctgtcagggtccggactgtccgcgctagagggggccagactgtccgcgcccacctggcggacggtccgcgaccgatcaggggcgattctctagaaccctagccgcctcaataattcaatcgacgattcggcagaaaatatccatctaaactcgttcaaatttttgcacaacattcacaatgagtagcactaacaatcccaccaatcagatttgtgaatctattgctcaattctagatcagagagaaaatccgaa

SEQ ID NO: 12436 - DNA, 417 bp, Zea Mays
cttcccatcaactatatgtcatctatgttggttcccaagagtgtgctcaatgccattgatcgttgtaggcgtgccttcctctggtcacggaacgatgcctcgttgcctcgaatgaggtttgtcgtcccaaaaattgtggcggccttggccttcctacagaatctggtgatttaacaaggttctcagtgtctctcatgttcattgggtaaaatggtgcttcggtggttctgatcccaattagcttccatgccctgttgctcccatatacattgggtgtgtcttcacttccctcgttgatctccttaggtcatgcaccttcgttgttgtgacttctttctggcttcataggtggaatcttactttcttagcgacccttgtgtgtctccttctcctccctcttttctcattctatcgaaa

SEQ ID NO: 12437 - DNA, 369 bp, Zea Mays
ggcggaagtgagaggaccggccggcgattagcggcgagaaaatgtccagcaccggcgctggcgatgacatgccacctgtatcgtctgtgcataagccaataggtacgtctatttcaatggacatgaatcctgtagcgtctgcgatcgccggttacacagagggtgtctctgttactcccccggcggcattgagggcacctggacatatcgatgagcacacaaaaacggcagacgtggtcgacgcagagaagcacatccccatgagacatattgggccgcatgaataggacacacctcatattcttcaaagccatgtaagttctcccaaatatgatactcttattttcttacatacttctttgtaatgtt

SEQ ID NO: 12438 - DNA, 756 bp, Zea Mays
ggaaaaagagcgaggaagggagcgacgccaacacacgttcttccacctccaagaaggaagaatttcgatcctcatgattgcacagtttcggtaagctctctgccaaaggactcgctatgcgtcggttcgattggcatgcatgcaggtggctgcacaggcagcggtgtccctcgcttctcatcaaggaaccctacgaggaaattaagccagccgggggtacgacgcggggagagagttgctgaccaatttgaggctgggacattgctcaaatgaataaatgcaggcggacgttcttctggcgctggataaaacgatggtacttaccgagcaccaaagtctttggttcaactcggcaaaaatggtccggtctttgcgagcgttatttttcgttgagagtgacactcgataaaatattctttgtcgagtgcccatgattttatattcggcaaagctcgagcactcgataaagagcacgtttctgacagtgccatgcattactcggtatcaccagcctacgtagccattcttcctaggcatggcgaagttgcgcggggcacgagagcttgtggagcatgcatgcgcgcggcgccgatcgagagcggagtcctttatttggtggctagctactagctctccacgagcgtcgcgccggatgcgccaccgcctacaggatgacgatgcccgtgctttgtgctgcccggaggagcttacggcagaggatctcgttgcatctatctgcctcatggctgcactgca

SEQ ID NO: 12439 - DNA, 696 bp, Zea Mays
agcagcagagcacagcgaaggtgggggaagtcacctgggagaaggccacgggatcgagaaaggtggtggggtgcgggttaaagaagttgaggtcctcgttgatttggatccccacatcgtgccagaaaacacgagcgatggggcagtgcaggaggatatgcgacgtcgtttttcgaccgacggagctcatctgagacgatgtctttcctcagcaggttcgcaagtttatccctcgaggggcactgctataccatacgaaggcaggggtgggagagtcttcatgatgccctagagacaagacagacaggagtagagatctttggtgtgtaggcgtccggtggagtcaacagcgaagtagtggcgctcgtcgggggaggtattgagctgaaccacatcaagagcattatggagggaagctagctccgaggctacgtgggaaggcaggtggacattcaaagaagcagccagaccccatcgaggagatcaactaccgtgatagttgggtagaatggcaaaaacctcgctgccatgcgagacatcaaaccagaaggcagtgttgcggccatctcccaccacacagattgtgatggcccgttagagggggagcaccttcctgaaactgctccagtgatgtccctagataggctcattatattcgccgtgcaagtaaaaccccggacccaagttgcccttgat

SEQ ID NO: 12440 - DNA, 1035 bp, Zea Mays
ctaaatcaaagaaatcagggcctttctgtaactacttaacacaaagtgtggatggcgggttcattttcaaattaccgaggggatcatatgctaaaacgtctgggtgaaggggtacgagtctttctgagctgttggatccgaaacacgcggcccagattaaatcttcactttatcgaacaggtacgcgcccagagccgcccgatctagatccgatggctccgagtttaaagtgtcgcggtcaattctaacgcgtgagatctcgatccaatgacacggcctcatttgaacccatctggtatcactttttgatcttacccgctcatcacaaaatcaacggccagatcactactctgaaccgatcaaatcgaagtcgtccagataggatcgggtggcccgcacgtgcctgcctccccggccgaccggacgaacggcggcacacaagtttcccacggtggcgccatggccgcgatttcccccaacaagctagagcccaaaactttgattcactagacgcattatgtgaaggagccgatgaggaattagtaggtcgtgatctcaccggaaatcgcaacaaggagttcacaggtcccggcgcatggtggccctacaacagcggcggggaaaatccacagtgtccgaacgctcctccaaaatccgatgtcatggcgagatcccacaagcttcggcgaagcccccgagcaactcgcaggggttggaacaccagcctaggcctgggacagtgatggcggcttctctccctttctctctcccctctgcttgattgatgaagctctgctccacccgatggcttcggtgcttcctcaatggtcaaggggggtcaacctatataccccagaggcgcaagcaactaggtccgttcgattcgacctcaaacaaactctccacttcctacgtgcggcgcggcgagatccggggaagaagcttctgcccaccgggcccacacgcaagtgatggcaaggagacgtagtcgtgcggggaggctgccaaagtgggcccgatctaggagatttcgtc

SEQ ID NO: 12441 - DNA, 613 bp, Zea Mays
cacgcaaccgctactgacaatgctatttttgtggcggcttcgactgtggctgctgatgatgattcgtttggctctgtgtctaagtgctttgagtctgatgattctgggagttcgattgtgtggacggaagagtcttcagatgaggacttggattattttgtggcgttggatatggctgcggcggagccttcgccgcgcgcggagggttccgaggaactcccgggcgcgagtactgggtataggtggcgaagggcggtggcgaagcggagagtgagtgaattgtcgcgaagtggggggaggtcgtcttcgcgtggacgggactggtaagcgagaattgttgtcctcgccgattagggtgagtgtaggtgagggggagttgcgaaatctgtttgagggtgaggaactgaggataatgttgttcaactacaggaagatgggtatcatcccgaaggttgagccaatgtaatatatgatgccctcgttgtgtgtatgtaaccataatttgtatgttaaggctgcgcccataggccacttctgcacggagggtcttttgggagcggcttcgattgtgcgcacctattattccggctgcacccttaggcgactttggcat

SEQ ID NO: 12442 - DNA, 387 bp, Zea Mays
cagatgtcctgcaccgcaaggcagcctcaccctccaccaccatggagaaaaagattcccgacttcctggaccggtgatacggaagcaattgcgccaacaaggataacgtgaacttaggggaacttcccaagaataccacctccctatctgatggtgcctgcaataacactatcttgcaaaaacaggatataactgcgcgatactaggataaccaatccatacccaagataacatcgaatgccaccaaggaaatcacaaccagattggccgaaaagacctcatcagcaagaatgacagaacactcccgacaaactgaacagctactaatggagccattagcagaactaaccaaaattgggtgacccaacctctgcaccgaaagaccag

SEQ ID NO: 12443 - DNA, 602 bp, Zea Mays
gagactgcagcatcggatcgagcgcaggagttcggcgggcgaccgtacgctgctaaaatgccagacctgtcaattcggcaccttctgcgatgcagcggctgagcgagcgccccatgtttcatttccgaacgagggcaacttgatggccaacaccgcgtggcaactggcaactagcttgttgcaagaacgtgcgcgcctgatcgcctttctattttcgaacccagcaagtcgggcgtgttcgaggattagtggattctgaccttgaatttgacgccgcgggcaaggcaaactactgtcactgtgtcaccaccctccctgtccccgtcgccgcgacgcagcagcttcgtcctttttctccttgtcgcgatctcacagctgaaacagcgaggcgccgcggtgtcactgtcacggtgtcaccacccttcgccccgggtaacgtacatgccaatctgctgacgcgcaaccgcgagcgcatatgccagtctgaactgggaggtgggagccggccaaaggtttgcgcaccgccaacaagtcctactacttctctttcgtcacgtcaggtcaggtgactgcgcccaacagaacgtctcaagcttcgatcg

SEQ ID NO: 12444 - DNA, 356 bp, Zea Mays
ccaacctaaacgccttcatatctggaaacatggtgccaagctcaatcttcgggttatccttatcatatatgaacaatgagtttgatggtgtcaaatcttcagcttgattgggatattctgtttcatgaatataaccaccaacatcatgagcactacatccatgggcatcaatttcttggatgacacccccctggttagcacctatttcatcatcaatcatcaaccccaaagaagcatacatttgctcatcagccataactgctagtcgaccttcttcatcataagattccacaatatgtagagtagaccaatcaaccaaaggaacatcttctgatacatccactaggttcggtatt

SEQ ID NO: 12445 - DNA, 515 bp, Zea Mays
cggagggtgcttagacaacaacaacaagtagatatgaatcctccagcagctggaactgatccagtggttgtaacctagatgcagatgctgtaacaaatgaccgatattatggtagatatgcatgcacagatgcggcaggaatgccaagagatgcaccaggaaaggcaagatatgtgggaggagatgcgtcaagaaagaatggggtgatagcagcaagctccactgccaccacaaccaccaccacttccaccccgggataggcaccgagaatttatgagccacaagccacctaccttcgccagctctccagaccctccctctgcacgctgatgactggttaaagtcagtggacaagatgctaaacattgcccattgcttcgaccgggagaaggttctctatgcttttggtcgtctgactggtcctgctgctgattggtgggattcttatattgatgtccatgacgctgctgatactatcacttgggcgaaattcaccacacagttgagaaattacc

SEQ ID NO: 12446 - DNA, 896 bp, Zea Mays
gaattttctaaggattaaataagttcctaggtttattttaatactaaaaaccaatttctaggattatttgtttattttctctgttccctggactttgcacaataatacagagaaacataggggggtttggtaaaaacatccctaagactcagggcgcccccaaatacggacggcgggttgatattcattaaatataggggctcttgtgaaaaagcgcgcggcgaaagggtatggttatatatgggccgtgcgatcacagatggagggctaagattaaatcgttctcatccccaaccggtatggcaccaggaccgtaggatcagagatctgttgcctagatttcaaatatgctcgatcagtcaccaccattggactctgaatggacgacccagatcatgagcccgaagtggctacgggagatctaatctccagcgtccattgaggaaccagccgccagggactctccttctacctccgtcggccagccatggtaatcgcacgctatcttctacctctagttcggcggcaataacaccgcacctgccctaggtcgcgacaaacccgagccccagaaaccccgcccaaggagtagcatcggtatggagtagttacttggaaaggagaaggtagttctcaccagaaatcctatgcgccggagttgaagctcttagccccgcgaccacatcaccaacggacaacagcacggaccggagcacacgcggtaggtcttacctttggtggggatgcaggcaaacacaaccacgacgcgacacgacagggcggctccgaggcgacatcaagggcatacaagcgattcgtcacgctcctggccgcgagttcgcaagaactggccacgagcggcatcaaagccatcttgcaacgcccctagagctgct

SEQ ID NO: 12447 - DNA, 1066 bp, Zea Mays
tcgctggtgacgggatgtcagagccattgcagcgcatattgcctgaggacaatgggcaagtatgttgtcatgacgtcctccgtcgccccagcggctgaggcggtagtcatgtagacggtcatccagccgctcgggtcctgcttgggctcgtacttgtcgatgttggagaccttgaagttcggcggccattgaattgctcggagtcggggggtaagggctgaaactctgcacgtctcctggtcctctcggcgatggttgtgatgacggtccctagagtgggcctgttcgtggaggctgctgccgactcagttctggcacggttgcgcgctggtgcaccatgatatcagtcgtactcctcttgctgtctcatctcttcctcatgctggcggttgcacggagcgttgatattgctccatgcgtctcgttgaaagttaatggcatggcatagatcgttcagtgaatgtgcgaggagaagaagatggtttcgccgcctgggtgaggatctaccagtagccttccgcgtctggtgtgcgcagcaagccgttggcaatttgagccaggactcccccgactaaacccgacatattcaatgcccgagcgaagtcaagcaacaggttccgagggagaagcgggttctcgcgttggagcctgacgtcctgctccgcttgggcatggcgatgatcatgatgacgggagttgtggcgctcgcagagcgctctgttgtccggggtttccctactttagaggcttcgtcccgggagacaggttgtgcaagatcacgttccccggcctcatggtgacgtcgtatgttacatcgcatgtttcgatgtcgacgtgcgtgacgctaggggactcctcccccaatacagtgggctcatcgtcggagaccggcgcgtcctctactcttccctagatgaagtggatgtccgggaaaaaagagcttggtgcgatgcttcatgctccaaccatcccttttgagggcggagttttctcaggagtatgaagattacaagtgagctttgtgggtgcttaggtgttgtcgatgagggtgagtatcgagtgagat

SEQ ID NO: 12448 - DNA, 1095 bp, Zea Mays
catctcatcataatggcaatggcaccatcattgcagatttgcaccgcttgcaaccaccaaagtttgggggatctgacagcccgattgaggcagatgattggtcgcacgagattgagatgaaggttgaggtcgtccatgacgatgacaaggacaaggtcttacttgcggtacaacagttaaggggacaagtcgttgactggtggcaaagctactgagaggttaatggagaagcaattgtgatggagtgggctgatttcatcaatatctttcgagagcagcatattcctagtagtgtgatgaagctcaagaaatatgagttcagaaagcttcgtcagggtgcaatgtctgtgacagtgtatcttcacaagttcacagagttgtcccgttatgccctcgaagatgtcaatgatgagaggaagcaataagacttttttggtggccttaactttgagatcaggaccctagttgaattcactatccataaaaactttaatgccatggttaatagagctatcactatcgagaggaacaaaaaggcagagctcaacgagcacaagtgtcagtttgagaacaagaagcctcagcagcctgagaagtttcagagaactcagtttcctgctcactttggccactggagccggggtgcgttgccatccaaagtgcactagttctttctagaagccatctcaatcagctccactctagaagactcaaagtactttccatactcatcagactggtggaggaagctaagtgaccaatgtgagagcatgtttactttgccgcgagataggtcatctcattgccaactgcccatacaagaaccaaccagcatcatcagttttctccaactctgtgaatgggccaaaacaaccaactggagctaatgataccacactagctaaaagtaagcaatcatttggaagaagctgaagaagcacctagggtgatatttgatgagttcctggttaacttagttttagctttagtttttttttgattttggagagtcacactcgtttatatcatcacattttgtggaaaagaacgatatacctactatagcccttaagaagccactaatgacctgttccc

SEQ ID NO: 12449 - DNA, 503 bp, Zea Mays
ctcgggcgagtggattacgctcgacggtaaaaagatctcgtcgcggatgaacacaagacactgtagtcgctccgtctcttgcccacctgcgccggcgacgtggccgcacgaccattgccgcgactatcgccgttctcctcgggtatgccacgttgtggctcgttactgtgctctagtaaccgtggcacacttaggatcgcaatcgttgagccgttaccccggtgaacgccacgattaaagccaccagtgttcttcttcctctccggccgccagcgcactacgaccaattcacgagccaccgccctcgaatcctataaattgagcgtgctctcagctccgctaggtattcaagcacctagcgcacccactcgtgtctcaaatcattcaccagagaactccaatttgggaattcccccaaatcaatcaaaaacaccatgcggtgtgagctcaccgtggctagttcgttacaggtctgttcatggcttccttgctctcgtttcagc

SEQ ID NO: 12450 - DNA, 570 bp, Zea Mays
acccatcgaccaatcaatgcaccagattcacccatccgaaccggtatacaaggttctaatcctagacgcacatcctcaatcgggcggtcctagtccatcgtccaccctacgcctaggatgcggcggcgcgagcaccacccgcgacatgggaggctcccggcgagcggcggaccagtcagtccggccggcgaacttaaaaattgacgtgctcaatgtatatattggacgctgacgaaactcataggggaacccataccttgattggcgcgctcgaaagcctagaccgcggcagaacgcgcccgcttcgtttgcaaatctccggcgagcaattcactccaatcccatagacccgagtgccactaactaaccccactccgcacggtgcgtcccgacaatgggtccaggccagcacccaagggccctacgctttgcaatcggatttccgcccacggggaaaggttctgtggctcggcggagaggttcacggtgatggtggggggtcgtttctgcgtgcgagttgcggccgggctacgaggcgcatgagggcgaacttataccccggttggtggc

SEQ ID NO: 12451 - DNA, 653 bp, Zea Mays
cacaataagtgcgcaaaatcgaagtcttctccaaaagactcttcgtgcaaaagtcgcctacgggtgcagccggaatagcaaaataagtgcgcaaaatcgaagtcttctccaaaagactccccatgcaaaagtcgcctacgggtgcagccggactagcgcaataagtgcgcaaagtcgaagtcttctccaaaagactccccgtgcaaaagtcacctacgggtgcagccagtctagcataacaagcgcgcaaaatcgaagtattttccaaaaggttcagatcaacgaaggctcacagtttcatataagttacggttacatacatacagcgggggcaccacactttacattggctcgaccttcgggatgatacccatctccctgtagttgaacagcattatcctcaactccttaccctcaaaaagatttcgcaactccccctcacctacactcgccccaaccggcgaggacaacaattcccgcttgctagccccgtccacacgaagacgaccaccctccacctcactcactctccgcttcgccaccgcccttcgccgcctacgcccagcactcggaccaggaagaacttcagcatccatcacacgcggagaagcctccgccgcagccacatccaaggccacaaaataatccaagtc

SEQ ID NO: 12452 - DNA, 661 bp, Zea Mays
cgagaatcgaggtaatttcacctcctaatcagttcgccataatctcgtaggggctgtgcgctagtcgattcgaactttgggcactgggttgccgttaggcgtcatcgccggtgatcggctatcgtggggggagtctgcgcgtcgccgtctgcgtgccggagatagaagacgtccgaggaccatcgatgtcctgagggacggataggattagcatatgcgtttcctcgcgttgacagtgcggtggccgtcgatctgagaatggacgacagggattggcacactgtgtaccgattcaatcagatcaactgagaccgtggattttaattggatggcccacaatcgagttagggtagatggatccttatccgtcgatctcagatcggacatctcacgctgcgtactggttcgagttaatagagatctaatctaggcgcctcgtttcagatcggacggttgtgataaccctataccctttcggcctcgtcaattttgctaaagagcccatcgacttcttatgaatcaacccgccatccccaccagtgcaaaaataatgtaacttaggtcctggaattcgcagaacagaccctaggctttgtaaaatttgtagccgcaaccttgtgaccttcggaatttataaaataaattcagatttcgattttta

SEQ ID NO: 12453 - DNA, 545 bp, Zea Mays
ctacatcccttgaagaaaatgtcaaggacttgaggattgccaagaggaagaaacaaaagatgaaattcaatacctcctccaaaagcctcaacctcgcctccacaaaaggtaacatccaaggtaataatcaagccacacttcacactaagaaaaataagaagtgtagtgaatgctttgaagagggacacttgattaggtcatgtccctacattaaaaatggcttgattattaacaaggatgatagactttgttttaaatgctcaaagaagggacacttagttaaatcttgtccctatttaaaacaaaaaggcatgatgttagaaaagaaagtttttactaaccatgtagcaagcaacaaacaaggaaagaagaaaggttcaaaacttggaaaacgcctatgctacacatgccgggagaaggggcatcaatgcaaagattgtcccattggtaagaatcccactcctaacttgtcattagatacatatgtaactaggcaacccaagattgcaacttgtgctagaaaggtaacaagtctaccaagcgct

SEQ ID NO: 12454 - DNA, 381 bp, Zea Mays
actgctcatgggaactcctctggttggggtattggtttggggccgttgacctgatcgcttctggggccgatttgagggttgttgctggctacagactagtagttaacgtgatttctgggaagtaaccggcctgtggctctcggctgctttcttttctgttgctctatgttgttcggagggggcattatgcaccaagcagaggactttgcatgccaacttttaccatagggtggcaagtagtatagatgttgaaaaatcttaagctggagcttcagctcaggtggagtcctgtctgcgtccgctgatacttatctacggaacttacctcaaactgtggagcagcttagctacatggggtctcgtcgtgatgcaatactgttt

SEQ ID NO: 12455 - DNA, 512 bp, Zea Mays
cctgcgaaggactactcgctaagctcgtccaagtccgagcagtccttcgacgctttcctgtccatttccatccttgcctccgtcttcggcaacggcatactgcctgaaatccaggtattttttttaacatttcgaaatccaggggtgtcgtgtctttcttgcttgtccaaaccaaacagcgtggatgcatgatactgggctggggtaaactgacaaaatcggtatgggctgggctccatgctagctgagctagtatcaggaggcccccatgcataataattaataggacggaatcttgacccccggcccaaacatatttgaactccatcgtttctgcaggcgacgttggcgccaccggcagcggggaagatgatgaaggcgctggtgctgtgctactccgtcatcgtcttcaccttcttcctctcgtcgatcacgggctactgggccttcggcagcaacgtgcagtccaacgtcctcaagagcctgatgccggactcgggccccgccctcgc

SEQ ID NO: 12456 - DNA, 319 bp, Zea Mays
ccggcacgagctcgagtcgtgccagcccggatgacgaatgcaggcgatgcgggcaaaagggccattgggctcgcaattgtcgtggacaattgaaggtggaggagcaggcacacgtggctcaggacgacgagcccacgctaatgtttgccctcggcattgaggaccctggcggcgctgcgaacacgtcttctccgacacctgtcgatgctgctgtgaacatcgacggcctcacaagtgtccacacgccacatcacgtgaaccttgtggaggcaaaggtgttcgcctcatttgacgcggctgggcaccgggactcacggcg

SEQ ID NO: 12457 - DNA, 975 bp, Zea Mays
gcaaaagaaggaagcaggacaagatcccaagtgccagtgcgctcaagagcagcaatctcctcagccatagcgaactgccactcaggatgagaaaacgcatcacggtaggaggtaggctcagagagaagggaaacagaagtgacaaaaccaagacgagccggacgacaaagcttacgtctatcgcgaaggtcatatcgcggaggaggcacaccaagtacaggtggagacaggctagatgatgccggaggggatggtggaggacgcggacgtcgagtgtagtggaaaggaattggaggacgtgtcggaggggatggtggaggtgatggatggagaggaggcgatggtggaggtggagaaggcgatagtggtggaggcgagggaggtggggttgacgatgatgaaataggaataggggagggtagcagagacaaggtggtaggaggaggtggaaccaagcggaggaaatcaacagactcagagggagaggaagaagaggacaaatcaggaggaaagaaatgacgtgactcatcaaaggtcacatcctgagatactcgaatgtggcgaacgacagggtcccaacaatgatatcccttacgctcagagtcatggccaaggaagacacactgaatagactgtgcaatgagcttggtcctctcacgaggttgaagaaggacaaaggcaatacagccaaaagcacgaaggtgactatattgcggtggccgaccaaagaggcgctcaagaggagtgacaccatgtagagcaactgaaggttgaatgtccacaaggtaaacagttgtagacacaacttcaacccagaaatgaggagcagaggatgtcagaagtaatgcgcgagcagtctcaagaagatgacgatgttacgcttagcaacaccattctgagcatgagcgccagtacaagaataccgaggaagggtgccttgctcagcgagaaacagacgtagagctcgagacaagt

SEQ ID NO: 12458 - DNA, 568 bp, Zea Mays
tggcttctactgccagcgccgtgctgacagctctgctataagtaagatccaggcaggtagccattttccgttggagcctatcgttgagtcccctcatgaagcaattctttttctttagatcagtattcacttggtcaatagcatattgggatagatggttaaacttgttgagatactgcattacagtatctcccccttgctttagtcgaataaactcctcttgtttcatgtgaagcactccctctggaacatagtgttcacaaaatgctagcttaaattcttcctaagtgacctgatgtccagccagttgaactgctacataattcgcccaccaggtactggcagggcctcttaattgttgggaagcaaataacggcttctgtgtttctgtgcaacagattaatccaaacttctactccattacccttatccactcatcaacttcaagagggtcttctgctttaacaaagagtggaggacgcgtctcagagaattccagatacgaagtttcatgtggtccttgtggaggaactctcccgccatgctactggaattgattacccgccat

SEQ ID NO: 12459 - DNA, 760 bp, Zea Mays
cattgaatcagccgacgcgagagaaataggagagggagagaagatcccccgcctgctccagcgattcccacgtcgggcgctgccgttgctttccctctgcgtgaaccggtagatcgccaagcgcatggccgaccggaggtacggtgatttctcgccgtcgattagcaccgccgcgggcccctccttcactgcgaacacgcgcgtcttcgcctctaatctcggtaaagaaccctttccctccgtccgctttcagctcctcttcgcaatgcaccgatcggatttcgctattgggcgcttgggacagaaatcgctgtgccccggccatggcaccaccgtcagctcgggcagcgccgccgttctgctcgggtttatgggaagggatggtcgtggccgttgatgataagatgggcgggtctgattgaagggcggtagcatttggttacgggccgtcgatcattgcacgggcggacgagatcagtgcccacgtagtgttttaggctgatgcatcgggtgtcgttcaattttgatcgaacagtcgaagattatttagatccggtgcgtcgatctgaaacggacagcttctgtcgcgtatgggttcataaagatggagatctaatcctagcggtatgatcatgatcggatggctcagtggtgtcgataccccctttggatagccggttttgcaaaagaaaccccactatttttatgaataaacacgccatccctcgcgactgtactctgagtcttgggattgttacgc

SEQ ID NO: 12460 - DNA, 306 bp, Zea Mays
gataaaccgatttaaagcacttcctttgaacccagtgtcaaaagctcccacattagtggggtctaaaaaaaggatagaccgaggttgacagatacaatgccaaaggctcccacatgagtggggtctaaaaaagagataaaccgaggttgacaaaccccatcaacggctcccacatgagtggggtatgggcgagggataaatcgagacaatctttccccgcaaatacggaggctgcttcaacctagaatctgatgactcaatgaaacagatctcgccattgcacaagaatccataaaaagagaaaat

SEQ ID NO: 12461 - DNA, 898 bp, Zea Mays
attctgatgtgtggatgttaggtagatcagcatccctctcatcctcaattatcatattgtgaagtatgacacaggcacgcataattgtattcaatacttctggcttccataaacgtgatgggttgtacaatatcttccacttggcttgtaagactccgaatgaacgctcaacttcctttctacatgcttcctgctgctctgcaaagatcttttccatgtttgtaattggaccactgatactcttcactagtgtagcccaatcaggatagattccatcagctaggtaatacccaagggagtaggtgttgccattaacattgaactcaacaggtggtgctattccattagccaaatcatcaaatacattggagcggtgtaaaacattaatgtcattgtgggagcctgggaaaccaaaattagcatgccaaattctaagatcctctgtcgccacggcctcaagtatcatagttggcttccctttgtggcctaagtacataccggccaatgcggtagggcagttagcccactcccaatgcatgcaatctatgctaccgatcattcccggaaatcctctttcttcattccgtttcaatatacgttctatctcagcacttgtgggtgggcgaagaaattcatcgccaaagacatcaaccacagccaaagcaaattccttcaaagtctcaaggacagtgctctctcccattttaaggtattcatccattgaatcagcaggtcctccgtatgctagcatcttgatacctacagcacacttgtggtcaggactgaaacttaatactcctgcagcatcacgtgacagttggaagtattttttcttggcagcaatcttcctcacaatgtcatggaacagttccggcctcatgcgaaatctgcagacgac

SEQ ID NO: 12462 - DNA, 337 bp, Zea Mays
ggaggaccaagagatgaggttgtcgccgaggtagacgcagtagcccgaagtggagcgacgagagtcaggacacccagcccagtccgcatccgagtaagcggtgagagactgaatggggccgacgcccaggtgaagaccggaggaaagcgtgcccttcaagtagcgcaagatccgtttgagcaaggccagatgtggctcgcgcgggtcatgcatgaaaaggcacacctgctgaaccgcgtatgccaaatcagggtgagtcagcgtgatgtactggagagcaccgacgatgctcctgtacatggaagggtcggcgactggagcaccaacagtcgcggag

SEQ ID NO: 12463 - DNA, 337 bp, Zea Mays
agaagaggtcgtagcatgcagtgttgataggtaggctgactgtaggtggcataggcggcggcggccgcaatgtcgatggccggagtggtgcaggccagcccgcccatccgacgatccagtgctcgaccgagatgtagcatcaagatatggttgggtatagctagagcgcagttggccggccagaacaatgctaggcgagagagggaagtggtggtgataggaatgtgagaggagagggattgttatctgttaggtcttatgaatatggaggaccgaccagcagcaaacaaaaaagtgaacactcatcatagctactgttgggtagggattcttttcc

SEQ ID NO: 12464 - DNA, 1148 bp, Zea Mays
ggaaatccgaataaaaaacaattattgcttgataaagagctattcctttggaaacgagaatcatccgacacagtaacagaggcctcattaatgctggagacagatttattctttgagatctcttggtgatgattcaatatcctcttgggccgccaaatagatttacgcgaggcccaaggccgcgcccgagcgctccgcagagaaaaccaggagagaggcctcgctagattacccgaactcggatttgaataattttgaaaatgagcacgtttatcaaactgcccacgaggatatgattgagcgaccgactgataagaatgacgacgaaccgggaaagagatccgattgaacaccgaagaacggggcttcataccaccagacctgacctgtccacccaggggaaccaaattcgcaccagacagaatggatgagcgagcaatatcagcataggaggctttcgcagagcgaccacgggaaactatagtccaagagtttgattcttcctccgaaaagagctgccattctttgatccagttggggccgccagaattccaaagatggagataagctttgaaggaagaacaactaaatgaatggcgcctataaactgcgaagcccacttccttgcaagatagcgaaagtcggaaaacccggtctgacagttggagaggcctgaaaagctttgcagaaccaccaatgaaggattgaagcagaagacccaccgattcttcacacaagcgcgaggaacatctgccgaaggaaacgacaaggaggaactcatggcggtcaaatttgcccgggagagggttaatcggacgattaaacttgcgaaaaatccaatcctcaaaatgaaggccgacaaaaaaatccagcgaaagactccccattactccaaagcacacggagagatgaagcgcaagaatggagagacaacagcgagcgatcagaccgcggtggcggcgacgtcatcgctgacagcagtggcgagggcgcacacagggcgggcagcgagagcgaccatcttaggtagtatgttgctctctattcgatctgctcattcaatcaccatcaccttatcgcgcccacttcttgtcgcatccatcaaccaagcaaactatacgacgccccccaatgcaagaacaataatc

SEQ ID NO: 12465 - DNA, 294 bp, Zea Mays
atttttctgggactggctcacaggtgcaatacaaatatccagactgcccaggaattcagataataagaagagcagataaagactcactgcccccaaaacagtccaaaactttgatatttctcaatggagctgaggtctctagccccttggctaagcacctcgaccctatctccacccaaacacacaagtgacactagctgggagagtgatcttcttcagtttgccaatcaaaaactgaatccaattcactaacactgctgcttcctttgcccacttctctgttcaggccccttt

SEQ ID NO: 12466 - DNA, 844 bp, Zea Mays
cttcatctcgcttctcagtgcataaaagccatgcgtccagtcccctcctccctccatcttcttacacttgcgacctctcgattcggccgaggaggcacgacaccagggagaccgagctccgccgccgccgtagagattcgtgcactggttgcggttcggggtgctctggtgggcaccggagtatagctcggcgctcgcgacagtggtggcgacctgataaccgcggcgcgccggtggacctctaccaatttctcataggagctgctctgccgtcgcggggccatatgtcaccgtggacgggactctctacaccatgattcccggtaaggaaaccctctaccgactcgccatgatctccgtactgcgttgcgtgtaggggcttacgaattggggcacaggggcgccgatttggtcagctctgtcatggcggccgccgcgtcgagcgcgctccggcgcttgcagactgccgcgggggaagaagcacgcatggccgtcgatcttgatctgagcgggcgagattagatgtggcttaccgattcattttcgaccgttggatcgtgtccaggagctccagattagaagttggtgtggaacgcctggcaccgtagattttagatcggatggtgagtgttagataccggtttagatgtgatccaatctaatctgtgccgtccttagcggatcgagtggacgagagttaaccgtaacccttcggcctcgtacatttataaaagaacccctgagtttctagggagtaaacccgccatccaagggggtgctgtttgtgtctcggttgttttacacttgtgaccctgtcttctctgataatcgaggcccagtccag

SEQ ID NO: 12467 - DNA, 681 bp, Zea Mays
cctcgtggcgaggtcaatcgcgcagtgcacggttgataaccagaggagaagtggtgttgcgattgcggggttctagtcgtgttgattggaagtcggatcgtctgtgtgacatctccaccaaatcgaaagttacccctcctgacggaagatccataacccacgtccccatcaacagtcgtattcgctcaccctaggaaggagaatttctggtcggggatcctacggcggcatcggggcatcctacgtcgtggacatcgcgacccctcacccatcgctcgtaagaccttgacaacagtatttccccctgcccttgttgcaagtagcgtcaaatctgtggcatggatgatagactgggcgccgggcggagccacgccggtaatggctccgccgttggtgctcactcctccatggcaggtcggtcggtgatgacagccgaacaggtatcgtcgatccggtaatgaacgcatgtgattgcatcggggtataacctctcgcctcagataagttttaaccttagatcttggatcgtgcggtctcaatagatcgtggggattttaattttgagtcattgatctcggaatcaatgctagcgggtggcgtaccgattcacttaagtcgcgatttaatcctgaccggggatccaagatccatcagccccagtgcaaacataccccttcggcc

SEQ ID NO: 12468 - DNA, 680 bp, Zea Mays
ggtgtgcttctgttgcctcccattttcctgcacccagtgtcccccgaagataaagctatcttctctatcaatgcgtggaaacgccccaccaccccctccaccctgctactaacactgtctcggctcaggggggctctccctcgtggaggggaaggtggtagcgcttggaacggtcggccatgcccgacgaagttcttgaagtcccgacaatttcattgagtgtggcacatctccttgtgatacaggcactaggagtcgaggatctcatccagtgttcgtatctcgccatagggcgcaacgtaggtcctagtagccggcggccctacggtgtgcacttcttctcgaggcctcttgttgcagcgcttgtttagttgttggttcatgccttcctgggtgctagaagtgtgggctttgctctcccaatgaggtcttgggcttgctcgtccacggtgatgtagatgtacgcctctcggaacagttgttacgaggttatgggtgccttctggaggatggctcagacgaaggctgagtcgttggatccacgatagaagtcatcgataacggcgctcctccgcgacttcaggaatgcggttcctcatggtttggaatctcctgagaaatgagcagagggtctcgtcgctctggcgcttgacagatttgaggtcccatggttgcgccgg

SEQ ID NO: 12469 - DNA, 341 bp, Zea Mays
gggagattatgcataagttgcagtctgctcaagatttcagatccttgtcgatgttagaaaattggttggtggatcagcttgatggtcgcattgtggccctctcatcactgcagcgttctatggctcggagtcgctctaggatctcatggttggctgaaggggatgctaacactgcctttttccacctccatgctaaatactgcaaaggcaagaattttgttggcaatctgatttttgatgatggatcggtgaagacatcacatggggacaagttggaggttatcagtgagtttttccacaagctgctgggatgttcacctgaccgggcgcacaccattgac

SEQ ID NO: 12470 - DNA, 587 bp, Zea Mays
cctgcgcgaagattcgcaccgccgccgttggattcacgctcgctggtaaccggataacgcttcggggtagaaagatcttcgccgccgtcaagctggaagccaccccggtcagccgcggtactcctcccctggctcaccgcccgcgggtaaagctgctcactgtcgtcgtgccatcgccgttgtccaccgcgtgtctcaaccgcgccaccgcatcgccatgacttcctctagcctctccgttgatcgccggaatgaccgccacggtaggggccacgaatcccttgcgccagtaaagtttcctctcctccagccgccgtgtgtctcgtccaaattcgcgaccaccgctcgctcctcctataaattgaaggccgggccggctgcgttaggtcattacccacccagctacgaagaatcgttagccatcgtccactagtgagtcccaatttccaacttcccccaaattgactctccgccaccgtaaaccacccatcaccgcggccagccctttccaggtcagttcatccctcactctcctttgtttgagcactctggttgctctgtgatgcttgccgagccatcaattcaaa

SEQ ID NO: 12471 - DNA, 661 bp, Zea Mays
cttcgtaacaaacgcaacagacatagttgtggctcggtagtccgggtacatgataagtccacgcaacatgcgtaacaagtgcaatattagcttggtggtcatagcagacagtcctacaaggcttgcgaaaaatacgtaactcgatgatggcggtccgactcaacgggagtggtccgattaagcaagagtgtgacatagcaatcacatgacatagccaagttcgaacgacacaaatactgcttcgtgttgctagggcgcagtcaatatttagctaatgccataactcagccgataataacatagactgatcagtgtgtccaaatatccactatacaatttaatcactcaacatgagtctgaaagctaaacgcaactcaaatatttagagcgatttgagtatcaacagtatatccttcacatattttaataatttctgccaattatctgtttcgagaaataaaagcagaaaaataaactcaagaactaatgcaagaacatagcacatcaggtgtaacaagcattttaccatattcaagcatgtatttgactactaattatttacgacaggaaattgaattagaagctgcaaaataaaacatgatgccttgttatcatataataggttatcctctagtcacccaaatccttgtgctaaaacatt

SEQ ID NO: 12472 - DNA, 451 bp, Zea Mays
acaaaggaaatagggccgactcattatgagccgaccctgctatcctcgttcctctactactactactacaagtatgactactgcaactactactaccacaaccactactatgtacaccggtggcgccttgccaccggcgttaccaccgtcgcccttgtcaccgccggcaccgcctacacagctgtcgccgccgtcctcgccactgctgccatcagcctcctcctcaaagtccaaggagtcctccttctcttccgaggagtcccccgggtagtcctccccctccgagtcatccgacccctcgagccctgcgcgcccaacggatcggatgtaggctcactccaccaccgacaaccccatggagtcatctgagtcatcggacgacaccacgagggacgccggaaggggtgaggcgtcatactcgaaggatgacaccatgaggctcagagggcgc

SEQ ID NO: 12473 - DNA, 869 bp, Zea Mays
taaaccttgggttgaaattttgggatgttacaaacctaccccacttaaaggaatctcgccctcgagatttagactggatttgagaaaagataagggtattccctcctcaaagagtcctcactctcccaggtagcttcctcttctccatctctgatccactgaactttacagagtcttacttctgagttgcgggtcttccggactgctgaatcaagaatctttattggcttctctcggtactgaagatctttctgaatctagattgcctcttcttcgatgtgactttttggtacttgcatacatttgcggagctgggacacatgaaacacattgtggatatcagacatggattctggtaattcaagacggtatgctgcgggtcccattctgccaatgatgggataggggccgacgaattgcggtgctagctttccttttacttggaaccttctgacaccacgcatcggggagaccttgaggtagacgaagtctccttcctcaaatctgagttctctctgcctgttgtccgcataacttttctgctgactctgagcttcaagtaatcttttgcgaatcagggtaactttctcttcagcctctttaacaaaggtaggcccttctagtgtcttttcccctacgttggaccacatgagaggggtttggcattttcgtccatacaatgcttcgaacggtgacatcttgatactggcctgatggttgttgttatacgagaactctgcataaggcaaactggactcccagcttctatcgaacgttaacacacaggctcctaataaatcttcgaggaccttgttgaccctttctgtctgaccatctgtctgggggtggtaggcggtgctgaaatctag

SEQ ID NO: 12474 - DNA, 402 bp, Zea Mays
acctggaaatgagtcaggcgtctggcaccgcttcacgtaatacaacattggatgaaatcaagacaaccactcatgcaaagtattacacctccctgttgtatcaagttactatttcacgataacacgatagacgtcttttactgggcagacacccattgggtgtaccgcccgaattctccgagattttctaaagcagtgatacctgcaacatatacaatgaatataccatgacaaaggggaagatcggctaaaatgggaggaagtccaaatgcggttaccaaagcacaagtctaatctacagaggcattaaagtacgtgggcgagtggtgtctagccaaggactccctgtttcgactggccgggctccaacttgtcaccgatcaaattgattccagaccaaac

SEQ ID NO: 12475 - DNA, 382 bp, Zea Mays
gagtcacaaaaagtatgctaacatcagaagagatccaaattatacactagcaagggctagcacgactataactgacgcacgaccttgaacatgatgagaaacatagcgaaccaacaaaactgatttggagaccagttaagccaatattgatcctattcttcatcgggaagactctcaaacaccttctaggaagacatgtcgaggaggagtatgtggagtttgtcctagtatcaacaaggccatctagaataccgtcaaatctcaccgagagactgacgaacatcgatataaagagaaaagaggatagcagatgtatttttgatatattggatgttggatacctcaattgatcgtgatcctttcatctatacccctatataac

SEQ ID NO: 12476 - DNA, 971 bp, Zea Mays
ggtgaagaagatgtgccatgccatcaaggctggcggctgcacgctcctgctatgctcggaccaggagcaactctacattcctgccacccatgcctcatcgaacaaggggtggtagagtcggtggttttacctctgcaacgacgacgagcggctgtcagcgtgcacgcactgggtcgttttcggagcggaggagcgatggaggtggggcttgcctcaggagctctagacccacctgaagccgctgctggacgtcctgaggaggcttcgggatcgcaacctcactgaggtcggggtcatcaccatgttccaccagcgaagggttttgccgctgatcgagtgccggcgccgcctcgacgagatgacgcctggatggcttcggccgccctccccactgacgaactcctctagcgggtgaagggaacggtggggaatgcggattactccgtcattgtgtcgatgcaccccgatcagggctatgtgtacctggtgacgtagccagaagggaggcgcatcggctggcagccgaggagaagaagaagaaggacgaggagaagaagtaggcccgcaagaaaacgctggctcgtgatgcactggagcagcgtcatagagagcaggcgaggcaggggctaccgcttgaagcctctcccagcacggaagacgacgacggcgatgatgatgtggggatggaagttcgcttgggctttagccccaaggtaggactctggtccgtaccggcctcagcgagcccctctggcagcggggccctacctgcacatgggcagtagtgtccctactcgagccgcgggtgtcggccaagcctgccctgtccctccttccacggaagaggcgggggtcgtggaggagcaggtcgccccgctcccccaggaggatgtcgcggagcctgtgagtgtgcaggctgacgtcccctagcggtcacctattgtgaaaaatacggagaagtggaccatcac

SEQ ID NO: 12477 - DNA, 465 bp, Zea Mays
tctcgtcgctggcagtgcagcaacagtatgtcatgacaatcacagagagtggagtctatctcaaccatcatccgaggcagcccctctgatggagcatcagcgaaggcttagtggcgaagggatcagtctagaaggaggctccgcaagacctcgcttgccgctactccacgcgccggccacgataagactcaaagacccggagccccgagacaaagaccgtagttattacccacgtgtgtcgctgacatgggcccacgcggcgccctgatggcttatttgggtccatgtgtaagcctcattatggggtagggttgatggtgtgttagttcagattgtacttaactacgctgtaatgacatgtaatggcccctaaggagggaatattctggggataatgtaggtaaccatgggcacaactgtacttataagggtgagaccgccctcctggttacctataattacccc

SEQ ID NO: 12478 - DNA, 639 bp, Zea Mays
ggatgatattggaagcgctcagaaagaaagtcttcgacaagaatgaaaagttcacaggaaagtggatcagagagctgtcgtatgttgtttggagcctgagaactcaacctagccgagctctgcatggaaacactcctttcttcatggtctatggtttggaggtagtgctacccgctgatctcaagttttgggcaccgaggttaatctttgaaaacatagtagaggctgaggctactagactggaggatgttgatatactagaagaagaacgattgaatacggtgattcagtcagcctggtatcagcaaactctgaggcgctatcatgacaaggccatacgacatcgatccttcgcggtgggagacctcgtcctccaccgaattctaacgggggagggacggcacaaactgtcgccactatgggaagggccattcatagtagcagaagtcactcggcctggatcatatcgtcttactcaaatggacgacacagaaattgagaactcatggaatatagaacatctcaggaagttttaccccaagctatatttcaaaagctattgggacggccttgtattctgtaaactgggaaatatatcatcaataaaaagacttcattctcaaaggcactcaaattgtt

SEQ ID NO: 12479 - DNA, 841 bp, Zea Mays
gttgaggagatccttgaagcgtcgccacgtcggaatgccttcgtcctgctggacctgcatgtaccagagttgggccttgtcctccaaattatagggggccatccacaccttttcttcctccacgatcctctgttgatggaagtacgactcgcagcgattgatgaagacgagcgggtcggacttgccgtcgaagcgagggaagtccatcttctagaaacgaggtggccgatcggtgtggtgttgcccgtcgagaccgccgcccggcacctgggcgcccgaggacgacgtcttgtccttcttcatcgtgtcgatgtcggtttgatgggtattgatcttgccggtgagacccttgatcaatttggtgaggtcggcgatcgtgggttcggccatggcgctggggtggtgtgcgacagaggtgggaggtgacggtgggttggcggtgttgatggctgctgggtggttggttgcggcggaagtagcggatgaactggaagagtcggatcgacatgaccgtgaatccgtgataccaggttgtcaagggccttagacccttagtgtctagggaagggggccctcggctacgtagatcgtaccctcggtccgtcttctccggtgaggttttacccctcttccgaaggcttgagagtggtagggatgagggaggagataactgtgttattgcttatcctctcacagatgccggctacaaggctttatagcctgagttgcaacaggaagggaaactaatctcctatagtttaggatctccactaaagggaagctaatctctataatttaggatttctactaatctcttccctcttctagccggccttccttc

SEQ ID NO: 12480 - DNA, 464 bp, Zea Mays
acctgcaccttccacacaacattgacgtgatgcacactgaaaagaatgttgtcgaggcactttgggcaacaattatggacattcctaataagtcaaaggataacataaaggcaatactagatctggcagtgttatgtgatagaccaaaccaagagatgaagtcacctagtggtggaaagacttggagaaggccaaggccaattttgtctctcagcagggcccaaagaaaggaagtactacagtggatcaagatgttgatgttccctgatgggcatgcatctaacctaagtaggggggtgaacttatctactttacgagtcttagggatgaagagtcatggctaccacatgtggattgaacggattctttcggcgatggttcaaggatatgtccctgagcttgtatggctagcgcttacagagttgagctatttcttccgccagctttgtgcaaaagagttatct

SEQ ID NO: 12481 - DNA, 412 bp, Zea Mays
acgaaacaataataatcagaggaatgactaaaccacggtgccttgttcattccagagttaagagtaatgtgggtgtgggttttagccggtactccgtatctatctcagatgagagtatgcaaatgtagatatatctaggaaacaaaagttgattattcagaaaatctgaaacgacaaaagattgcaaaaacaaaaggatgctctctgaaatctgatgttttttctttacaaccaccacatatgctgtcatagaagaattttgtttgaacatgaacctttcacctttttacatagaatagaagtcctgatacacctattttaaggaaactcgctaccaaaatatctagagtgtcatgtttacgaattacagtggtgtctaatccaaattaaaatcatatgcaaggtaatccga

SEQ ID NO: 12482 - DNA, 479 bp, Zea Mays
ttcggcaagctgcgggcaacccacacctagctaaacccagagaaatgcatcttcggtgtctccgcagggaagttgctggggttcctggtttcataccggggcattgaagctaacccagagaaaatcaaggctattgaggtaatgaggcctcctgcccgtattaaggacatccagaagcttgcaggatcactggctgcccttagccgcttcatttcaaggttgactgagagggcactgcccttctcaagctcctatagaaatccggcccatttgcctggaccgaagaggcggaacaagccttccatgagttgaagcagcatctagcttccctgccgatcctggttgctccggagccaggggaaccgctgtacctatacattgcggcggctgtagaagcgataagcatggtgttagtcgccgaaagggcgacacaagaaggatagagacctgaaagcttaggaccagctacagaggcccgg

SEQ ID NO: 12483 - DNA, 426 bp, Zea Mays
atcaggaactctctgtgggtaaatgcaaggtggcatggacaccaatgtgtcagctattagaaatgggtggccttggcattctggaccttgaatgctatgcttgagctcaacgcttatggtggctgtggtttgaatgggttgcactagagtgcccttgtattggcatgcccctgcctgtagagctttactaatattgttctcttcaatgcagctatggttacccaactgaacagtggcctcatagaccacagcttgtctctggacatcgagttgggttcgaggagacacactgtcagcactcttcctgtccctgtttgcgcacagcagaaggaaaaatacaatggctgaggcagtgaggctcacataaatggtagatggatttccagatttggtccatgttctcacatattctttttcctttttgaa

SEQ ID NO: 12484 - DNA, 844 bp, Zea Mays
gagcgaccacagggtccgacgggcagcatcgctgaccgaggcagcgtaggtggacagtggtgtcagggactcgtgagcagacagagtcctgaatcccctgtcacctgcatccatcaccctgacatggatgcgagtgatgtaatagcaagcccagagaggctcgctcactcgccttgtttcgtacagggggcggacgtaggtgcctagcgcatgcagcacttcttacagcaggttggggaagtgccccgtctcgaacattgacgtgtaatgttcgacaacaggatcgaaccccatgaagttgttctgctgggcgtagtcagcttcctcgtggacgtgttcgtctccaccttcttcgtcgtcgtcatcctcgtcatcgtcgtctccagagtcatcggggtcgtcgcctccgggtgcaggtgcttggaaggctggtgcagacggtgctgacgtcgatgacccagctgcgaaggccagggactctaccaacagagtgggcgtcgacagctgttccttcgagctgtcctccaggttgactacattctccactcggatgggagggagatccgccggaacttcctcgactaccactgggtagaccgggatctgccggggctgaggggcgtagctggtgttgatgcgggtagtttggagagtgcgaaccatctacaagagaagtgtcaactcagttgaattttcaaagaggtaaggctgataaaataatttataagagtgaaattagcaagtttgaacaactaggctttccatttctaactaatctaacgacctagggtcagcatagctttgataccacttctgtcacacccggttccaggggtagaaccga

SEQ ID NO: 12485 - DNA, 317 bp, Zea Mays
gaagaggtcgaagatcatggcatgctcacctacggctcaaatcgacagtgatggcttgttctctggtttgaagagtaaggcaagtgttgttcggatgtgggggtgacaatgagatggtggttggactgtgaggttctgcggcaagggcatcagtatttataggcggaggaacgacagtttataatggagggagtcttgaccggcgtactgtgagtggtgacgttgccacagtgcagtcgcaacatcccgaggttggcagggtaacttggctcatggtggggcattcatttagttgtgattgtaacaagtgactggcg

SEQ ID NO: 12486 - DNA, 561 bp, Zea Mays
aacagatgttcgtgtgttgctacattagctttaaatttattatccaaatatgaaaaatagtggatcaaaatcatcaaacctaaatttcaatttaccttaacaatatactactctgagccacattcaaataaatagatgattactcgtgccttacaacatgctttgtgatgcctcggtagcatgtacttcagaaggagcgtgagctgaagcgaggtcagtgggtgcaacaccacatggccttagtaggtggtgtcccccattggaggtagcaaatgataagcttgaacaggattgcaacactgtctgtgtcgctgctcacgattgaagttgctaaaaaagatcttcagagagacaactgcgtcaagaggatgtgctagtgacaccatggtggcatagcatagtgaaacacaccgatcaaaaaccttctacatggtgcgccaaatatcatggcataacgatacgaggctaccgtagatatctatccccttctctaaatcatttctttgtttcgccttttctctacgactccgccttcacaccaccaccatgtctccaccttcc

SEQ ID NO: 12487 - DNA, 533 bp, Zea Mays
ctggggtgcttcatgatgccattaccactacatcactatagatttccctaaaagtgggggcactagaaaatgtcttggacttacctaatgacacgttggagcaaactcctagcaatgccgacgagggttcctaaagtggacaaatcacgataggaggacattctagagatggacataggttgggaagctgtcttggtgtgcgattttgatgaccatgctcatgtcccaccatttgaccataggattgccccttttataggcataaagatccaatatggttatataggaggctttgggaagagatgcatgttaggcctagccttgaagacaactttgtcccttctacccacaacacacttgttcgccttttgtgtcgatgtgtatagcaatgagatgtttatgcttctaacaagagttttggctctctttgatgacatacattaccaggttgtgggcataaagtttgattacagggtgtatggccttgttgccctgatagggaggccacattttgaaacatgtggagatcatgg

SEQ ID NO: 12488 - DNA, 846 bp, Zea Mays
gtatgaatgccaccttgatttagtgatcaaacgagttcagttcctatagtcgaattgtagatggtatatagctctacaactttgctataggtcactggatgtgttgccatttgaaaatcagagaaaaagtggcttaaactcgctctgtcaggcaactgaatgggagatcgccatggtacagtagtccgttaaggatcagaccgggcgcaacaaaagaatcccaccgccggtgacccctccgccgtgattcgtgtcgccggccttaagattcgtgtgcggggtggattgataacgttgcggggtaagaatcctcgccgacggtgagctggaggtcactccggtgacatcaccgtggctttcttatcctctttgcggctgagcggattaacacgccggtgaccgccacctcccggccatgcgccgcgtggctctcgctttccaccgcaccaccgcgacttaccctcgctctccgtggctcaccggagtaactgccacggcagtagacaccaagcggctgcgccagtgttcttctttccctccggccgccgcgcgtcttgctcaaaattcgcggccaccgcccgctggcactataaattgacctcgcccgtagctgcgccatgtcatcgtgaagctgtagcacccgctcccaccctcgatcatccaccagcacgcgcgaatttccaattccccccaaatccattctccgccaccgtgaaacgagcttcaccgtcgccagccgtactccggtcagtccccgtcctctgctcccttgtttaagcattctgatgcggctgtgatactcgccaacccatccaattgaattaggagcccactagtcgccaggaa

SEQ ID NO: 12489 - DNA, 711 bp, Zea Mays
cttactgtctggtagacagtagaggaagtcatcttcgttgtttcctccgtataccgaggccccctggtggtattttagctccttagcataatgttgtgtttcagcaagttgctctgctgatagctgttttcccgaagcatgtcgaacaataaagttcaaatcaccttggggaggtgcttcaggagcatatgtcgtgggttttcctggaagactttctcccaccagctttactagcgcagcttctaaagttcccgcttcagcatgagcagaagaagcgcttgcagtgaccacttctcttgcatcttcaattttcccaccaagagtttctgcggaaacaggagtttgcgttttcatggattccaaaacaacatccaaaacactatccatcctcctcttcctcggagtcgttgttgcagtggctgatagcttcggcaattctgtcacagtggggcaactcagcaattcggttgttcttctgctattttctttggtcccggctcttctaccaagcccgcactagcttcgattggcatcacagaagctgtttctatggctagagggccagcctctccactttcaataagcttcggcacttcggccgttccaataggcttcgacctacgtgtcaagaccttggctctctttggcttcgacgcgatagaagaggttgaagcagtagtttttcttttttcccccttgttttcggacggg

SEQ ID NO: 12490 - DNA, 604 bp, Zea Mays
ggctggcacaggagagggtgctaccaagtcaccgtccagtggcaggctggatgctggcgcgccgccactattgtcaggcctaccaggagcggcatccatgatgccgagagatcgtgagcctgcatacatagctcttgacccatagggtaaagaggaatcatcagtgctggtcaaaaaatcaagtgtggtgggagcctggggtgaggtggacatatcggcgaagggaaacaccgcctcatcaaagacgatgtgtcgagagataagaatgtgattataatggaggtcaagacaccgatgacctttatggtcggaggagtaccccaggaaaacacacaaggaggagcgaggtgataatttatgtggagctgtggaggatagattaggataacatgcgcagccgaagacacggaggtgagtgtaggagggctgggcgccatgaaggtcaaggtaaggtgtgcgactgtctagggttttagtggggtggcgattgagaagatatggggcagtgtggaggcaatccgcccaatagaccggaggtagactagcctggaacatgagtgagcgcacaatgttattaatagtatgcagaatgcgctcagcccgc

SEQ ID NO: 12491 - DNA, 492 bp, Zea Mays
cagcgctccccttctaatctagaccgcccaaacaaaatcggacggagagagctcatcagtccaaggccggccgccccgaccgacggcgcgcaagcatggcacggcggcgccatcgtcggccaggcaaattcctagtttacgcgccctaaccactaatccgaccggagctaggcattgcgacgaaccaaacgaacgcatccgaggaaaatcataccggaagttatgcgcgccgacgagctgtccacgatgatcgcagccttcagttcacgtgcgacccacagcgagcaattgccgccagcggccaagcgaatccgacccaaaagtcggtcctacacgtgcgatgaggaccacagatgcacccggaatagtcctccacgatcaaaaggctgaccggggttgtgtcgacggcggcggcacagatttggttctctctccccctcacgctgtttttcctcctcctcagtacgggcggctttggttcgcgattgaggg

SEQ ID NO: 12492 - DNA, 802 bp, Zea Mays
gccgcgcccaacccgttgctggttaatcaaactgttgcttgctttgcacctactttgatttatcagaaaaaatttgaatgtttattacattcccattggacatttgttactgtttggttgcgactttgcttagcaattttcctcaggaatcttgtgtttcctatgcgttatggtcctagacttatgactattctaatttatttaggctgattggaagaagtgcatttctcaaatttattctagaaactgggtctgagtgagttctataatttgcattcacgccaatcaaattttagcatggtatcggcgagatattttgtattgttagggcacaatgatctgttaggtgtctttctaggattaatgatggttctcttcatctcgggtgatggtcttggagtattttgatcagtacagcgagctcgcattgctcctatctcaatttatatgatttagatgggtgaaacgacatttggtttagtaatttgaattcaagccttcatatcattgttgtgtcttatgctcccatttcaagtcacattgttgcttactttgcacttacattgatttattgggtcaaagttgaatgtttattgcattctcattggacatttgaaggtctagcgatttttctaaggaatctcgagttttaccatgctttatggtcccagacttcttgctattcacatttattttaggctgattggaacaggcacatttctcatttgatggttctttcaattcagctaaatttctcgttccacattagcacattgcttatttgatgattctttcagttcag

SEQ ID NO: 12493 - DNA, 885 bp, Zea Mays
gtgctcagatattttgttagaaaacactttttagtactgaatgccgctattgttttcccgttgttagaatacaacagtatctacaatcgcagaagtaaatgtagtatgatggttttgaaatttcttcgtggggcatagaggtcgccctaagatgagtaatcgcaaacgtgcttatgttggattaagtaggcgcgattgtgccgtgccgatttaagtcattaccaacttaaaccgaccgcttcgttagtagggtatagtggtcaccccgagttaagtgagcgtgagcatatagcatcgccttaagccattgccgacttaagtcgattgctccgttagtagggtatagtggtcaccccgagttaagtaggcgtgagcatgtcacatcgccttaagtcactgccgacttaagccgattgctccgttagtagggtatagtggtcaccctgagttaagtaagcatgagcatgtagcaccgccttaagccattgccgacttaagctgattgctccgttagtagggtatagtggtcaccccgagttaagtaggcgtgagcatgtcgcaccgccttaagtcactgccgacttaagccgattgctccgttagtagggtatagtggtcaccctgggttaagtaagcatgagcatgtagcaccgccttaagccattgccgacttaagccgattgctccattagtagggtatagtggtcaccccgagttaagtaagcgtgagcatgtcgcaccgccttaagtcattgccgacttaagccgattgctccgttagtagggtatagtggtcaccctgagttaagtaagcatgcaggttgacagtgaacaatttgagtgcctttgaagtctttttattgatgatatatttcccagtttaca

SEQ ID NO: 12494 - DNA, 549 bp, Zea Mays
ggactcttaagttctataaagtagaatggaaccaacatactgaagacgaagctacctcggaaactcaagatttctcagagaaaaattttcctaggtttttagcttcatgtaacctgtaagatttgtataccttattgtaactttggaacaagccctataccaccccctgttgtataatataaataaggaaataaagttgtgacgtgttttcttttccattacttaccctaggaccttaaatcttgggacaagattcttttatggggggaaggatgtaacacccctggtgttactagaactaaaacttgagcatggcatcatatgcattgacatgtcattatgtttgttacacctagaatgcattcactaggtaaaacttcaaaacaagtatgatgtggtgacttgaagtgttcttaaccctagggtagggtacttaaccctgggattagggcatatgggtaaatgtgaagccaaattgagtagtacctctaaagttattggaaatgttcacaagagattaagtttgatgaatttgagtggcacaaaaac

SEQ ID NO: 12495 - DNA, 428 bp, Zea Mays
gaaaaaaggtcccccataaacatttgtgggaatcctcatgggagaatttttttgtcgcggggacagagatggggagctattcccaatgcggaattcccgttgccatccctagggacgacatgtttaaggtcaactcctagtgcaacaaccagtggaagtgaagcattacactgtaattaggttccttaaaatttcagttgttttcctttcaccccctcacttcacgcgctcccaaaagctccagggcacgacgcgtgcgcgtctcggacccgagcgtctaattcaattgagcttgttgtcgacccctctctagctctctctctctcgcccctatgccctcccgcacccgcaccacgctgctgccactcattgtcctacctccgctgccctccatccctgctccgcttcggacctcccccacctgcacg

SEQ ID NO: 12496 - DNA, 674 bp, Zea Mays
cgactcggatgattccggtgatgatgaagatgatgatgaagaagaagaggaggagaacaacaactaggaagccaatgacgagcaggacgacaacttcgttgggatatggcctgtcactgagcattatacttcaatgttcaagatggggcacttcccaaacctgctacaggatgtttggcatgcgctaggaacctacgtctgtcctctatatgacacaaggcgagtgcctgagcctccctgggcttactactacatcacttgtgtgcatatcagggtgatggatgcaggagatagaggtttcatgactctatcagcctacgttgcttcgtatcatgagtctttgatgccgctatctacctacgtttcttcggtcagcaatgctgctaggcgagctttgtggtctctcagccacacttaccggcagctactgcatgacacgagatacaggcatcttcctcaatgtcttcgtgaagaaagccagaccagtgttgttccaagtgaagctggagaagatcgcataaacacccttgtaggtgtggtggcaggtcttaacactgacctagacagtgctaccctagatctttcgagggtacatggagaactggaagaagctcacgccaggattgcaaccctcgaagctcagctcaaaggaaggaatccacccgaagcccaag

SEQ ID NO: 12497 - DNA, 589 bp, Zea Mays
gcctcgtcagcatgctaatccttggtaaggacacctccattgagtttgcctctctccgcagcgtgtagcatccgtccgaactagaaatgggcgccatagctggtagttgggaggtccgtccatgggcgccgcctcggcgagcctgtgcgccgccgctctggtgaccgggtgcggaagaagacgatctgttgccgttggatatggtgtggatgggctggattaaaggtagcttaccattcgggagaatttgatccgagccagtaatctcagatcgtatggccgagggtgttcaggacttcattgaacgcggatcgatggatcgtgatccgatggtggtcatggcgtaccgcttcggtgtgggtacgatctaatcctgaccctcggatatgatccaacggtcgttgatcaaacatgtaccccctcggccgccactttgcaaaagagaccctgtcttcccttaaaataaacccgccatccccgcacagtttgaagcaagttacagataggtccctgggaattgcaataatacccctggagtcttatttaagtgcaaaataaatattaacaataacctaaaacttgtttaacc

SEQ ID NO: 12498 - DNA, 927 bp, Zea Mays
acgccctcggctgagtcaacactgagcttagaatattctgcaagtatatgaattagcaagggaatcatctatcaacaaagataaagcatggtaaggatcaactcacctgaaggttagaaaggaacagaggaaatcccaaggccggaggcgttgagatactatcaaatagagggacactagtacaggcaatatcgagagcaggtttgagcgctagagaaggattgtaactcatgctcagggcgacgcctagtggaatctcggctccaacagcacgcagtggatcctcaacacccggattactcacctctaaagtagccgggccggcaagagcagtaggaagatcaagacttgtcaccgcagcttcctcagactgaaccggtggtgacccaacatgaacaaccatagaagcagcagaagaagagccaagttcaagaccctcgggggctagaccaccttcagtaacaccctcgggggctgggttatcctcaatcgtaccctcgggggctggataaccctcacgtgtaacattagggaccgaagtgtcctcgcaaatcagacatccctcaaaggtcgaagatgcatgggaaactgcccgggttatttcttgcccagcaagaaggctagctgaaggaacatcatctgggacctctacacggatgccagcatccccagcttctggaagttccaataagagaccttctggaatgatctcctccagtgcatggtcaatagcagacatcatcatcccctagaggctaaccagccttgatagagcctgaattaggacatcgttgctggctttgctacaacgattcatgcgaaccaaaggaggaacatcctcctcaccctcatccacttcctcctcatctgaaacatgcccaccagctctgatgccaccacaactctcaatgtcatcttcgagatcgg

SEQ ID NO: 12499 - DNA, 491 bp, Zea Mays
agatggagcagagaccggaagacgaggggagccgggagggagacgaggtgggtgaaatacctgaggctcgtggagcagagacgcgacgatggagatggagcagagaccggaagacgaggggagccaggagggagacgaggtgggtgaaatacttgaggcacgtggagcaaagatgcggcgatggagcatagaccggaagacgaggggagctgggagggagatgcgacgatggagcagagaccaggcggcggcgatggaatctagggttttatggaatcgccgtgagcgccagccgccaggcggttttctggaatcgccgtagcccctatagggttttcatgtgcctgagcgtctctgcctgagcgtctagggttttattttctcccactccgagtcgtgcccgagtcgggcctgctcgtttaacgggcgtgtgctcgtgccagcactgtgggtcgtcctattggcccaagcatggcacgggggcgtgccgg

SEQ ID NO: 12500 - DNA, 723 bp, Zea Mays
caacacttcagttgttacggattcattgctcgctctaatgcaagctacccggttccaacataccggaaaagatggccaggagcctggatggaggaatggttttatgttaaaaatgatctgattgtgagggaggacattaaggaaattatccaatgccccatctggtctctcttcggccttcgaaggccgaaggtggctaataaaagtgatgccgaagcgtgtcagaaggcttttagcaatgtttgtgctttcattggcacaagggatataattcaagagcacatagcctacagagtgtggccacttgtggatagctgggagatgccgaaggagactactgctgaatccaacaatggtggattagttcgattgaagtacaccttcagatacagagagaagttcgacaaaccaaatgatgactggttgaaatgcattgaggctactagcgacgagttgcttgggacatataccagggccgaagatgatgccttgtccttatccttcgggggtcggggcaagaaaagattgaatagggtttttgatgccattggcttcatataccctgattactgctacccattgcgaaggcaagggaaaaagagaaaaacagccgcttcagacaccactgctatgccgaagggcaagaaaatgaaggttttgacccaccggccacgttatattgaaacggccgtagtgcctgaatttggtgaagggacctcctcc

SEQ ID NO: 12501 - DNA, 586 bp, Zea Mays
cgacggaggaggtgttcacggcggcgcggagagtggatatggggggaattccaaattagagcgcgatgatgtacgataggagctggctgggggtgcgatggatgcgtacaaagaggcggagcagagggcatcgtcaatttataggtcccgattgaactgggcacgaattttgggattaagatcacggttatccgggtaggatatttcaccgtggcatgctctccgtggcatgcaagggggaactggtctgcagacgatgatcggcggcttgccatgactcttaccacgcagaggagtggttattacgtgtcatggccggaaaaacgacgagctccggtgatgccagcgcgattgaccgcggcgggacatgacggccggtccggccagcgacccgattcaccccacactggatattttcaccccgcctcgacgttatctactcttcccgctgcaagaatctcctaggcgggcgtgaattgtggcggcggatcaccggcctcgagctcacggcaccggagatctttatggtcactataccatgccgatcttcatcagacactctgacagcacgatttggagagctttg

SEQ ID NO: 12502 - DNA, 454 bp, Zea Mays
ggggggcagggcagggcatagcatatcatagctaggggagaagcacgtgtagcagcgcgacagacgagagagcagatagcagagagcacgcatgagtagagtagcggcctggagctagctacagtaggagtagtagtgtatatgcttgctagctcctccgcatcgtcgcggatggacccacccagacccagcggcgaggcctggacgggtggctggatccctccctctgtctctctctgagactgtgcccgtctctagatccggccccgacaatctttcaagccccggccacggccagtctctctcctctgctgtcacaccccttctctctctttctcttccccccggccctccctcatgcatatgcatggtactcgcattagattctactcctagctcactcgtcagcagtctcgtctcagtttcagccagtggtggcggactggcggcctag

SEQ ID NO: 12503 - DNA, 441 bp, Zea Mays
gtggagtcggaggccattaaaattgttggaaaatatgtgtcgaagatggagatgatgacaagttaggatatatgcggttccaacgtcaggttgaaccgagtttttgagttgaatagcttgccatatagtccgtacccggaggggcactcttctgacgaccgaggaaagcaggtgaagacccagcctgaggagggcacatcgaaggagaaggttgtggttgcagctactcaaaagaggaaaatagattcgcaaggtacgtgggatgaaaagatggggccaaaggcttctaggctttttgttgaggagttaacagggacgtgtgtgggtcctggggaggtgatgtcttcgcctgagctccaggaaacatcttcgcgcatgttgaaggttaccaggggtcgatggcataggaaggaccctataccccgggccaccgacgatgac

SEQ ID NO: 12504 - DNA, 857 bp, Zea Mays
caaaagttgatagatattgtcgtggtttcggaaaccggtgacaataagatttgtggcggggcatgctagcgtggactcactccgaatggagaatcgttggaactcgaacgtaggaattaagaccgagggtttatactggttcgggctcaagccctagtccagtgtagcgtttatcgtagtattgccttagagcgtgttacaactggtgcgtgtgtgggaagaaggaggacctgcccttttatagctcaagctagggtaggaccatacataagagatttgttctctactcgtaagaggacgatctgttgtctcggattgacgtgtcgtggtccataggatcgtgcgtagccgtactcctggtatggcgtattgtcccgctcattcgtcatacgggtccctgtagcgagtccacctctaatgtcttcgtagtagtgcacaacgggtcccgcgggtcagtctcatggtatggtcgtgtgtagcgcggcttcgcatgtcgtcacgatcccttgtcacttgtcggcgtgtgtaggcatacacccgatatggtgtatttattccgtcctttccggtacgcgggtcattgtagaaactcgggtgctgaggtcccccatgaccgaggttgactggcccctttaggcagtggggataatctcgagatcgtacgcagggcatacaatcgtgttgatagcgacctctcgacgttccttcggtgtgtcgcaagtatgcccagacgtggcctaggaatgacgcgtcttgtccttgctaatgcgggtcgatagtactagactgggaccttcgccacactgagttgctcggtcaggggttggtcgatcgttctgcctcatcgagttgcttga

SEQ ID NO: 12505 - DNA, 639 bp, Zea Mays
ctgtattatacttccgctatggagggacaacgagcttatttcagaaaacaaaggggtctctttactaaaagcaccacaattgcatgacgtgtgatcaccggctcactacggccatccgatcaaagatctatggttgagattagaagccgaaggggtacacgattgcggccctgggatcagcgatctacggttgtcgtttaatggggcgaaggaggtataatgcctcaaatcctggccatacgaacacagatcgacggcaacgacatgacccatctctattcttatcccagttgtttactcacaatccaaaggctggcagccccccccctccttcaccaccacaccgaccatggcggtgaaaacgccaccacggcggcgctcccgtcggcgtacgccggtacaatgccccggtgacccaaatccgaattaggttgtcgcggtgcacaacagagattaaagtgaggcagaagaggcctttctcacctgggttaatggcgccagggatgttgttcacgacgaaggtgacacagcggtggaagattccccgcgatgagaaatcctgccatcaccgaccaacttcactgcttgctttcgttgtgggcgcaattggcatggtcccgtgatgcttctcgaccgagt

SEQ ID NO: 12506 - DNA, 510 bp, Zea Mays
gtcgttgtgggttggtggcagggctggtgttgtggccgggggtgtgtcgacgaccttcttgagtaccctgacatggaacacatcatggaggtgggcgccctggggaagctgcagctggacagccacgtcgttgatgacctccgcgacgcggtatggcccaacgaagcacggtttgagcttgctggaggtggtacgtggtagggatgccgctgggcgctatcggagacgaaggagggcccagtcaccgacttggtaaaccactaggcgatgatgctagtcatagacacgcttctgggccgcctgtgcctgctcgagacagtagcggacatcgtcgaggaaggccgcgcggtcctccatctcctgggcgacagcatccacgcgcgtctcgccggggtcataagagcggatggtcagcgggtcgcggccgtagaccacacgaaacggtgtctcatggagcgatgattgataggcggtgttgtaggtgtactcggcccatggaagccagcggag

SEQ ID NO: 12507 - DNA, 386 bp, Zea Mays
tatggatatcacatgacgcgggttaaggatgaataacaaacctctaatcacctaggctctctcaatcctcgaccacgaagggttagggactcgagcatcttcgtcttgagttttggctaacctttgcctacattccgccttgcccaacccctgaccatgaaggggtcagggactcagtcatctctgtcttaagctcttcctgtctcaaccccgagggtgagaacccagagacttcacccgaccacccgagcgcgggattcccatgctcataccgactcaaccactacgaacatgggacgtgtgagtcaacctctgacacgatgcagaactagaatgatagcatgggagtaggcgtgtcagaatggatacaccacttctcatgacgt

SEQ ID NO: 12508 - DNA, 464 bp, Zea Mays
ccgacatgaaagcagcagcagtggaagtaacgaccccatcggagatcttgaagcccgtttgagtcgacttcaaacagcgctgcaacataggaccgatgcttgggtcgccgacggagatagaatcaatgaactgagaagggacatccgacacttgcaggatcaactcgctgatcgagacttagcacttgactgggccgtacagtctcgtttgctaatgtgtgctaaggaagcaagggctcaggcccgagttaaagaacttagctcaacggttgataacctgcaggtttactgcaatacgttgcatgaggaagtccatatattatactcacaattgcacccaagtgagcctgcacaacctactgaggcggaagccggaccatctcacgttgcgggacgcgcgctgggtggggagttagatctttttgagccccctccttccttgaggttggttgatgtctggactc

SEQ ID NO: 12509 - DNA, 312 bp, Zea Mays
agaatttcagctaaccaaacacatgcacctcaacaagctccagctttaaaaaatcgaaactagaggtcagttttatgagatttatgaagctctttaaaggatgtttcaaaaacactgttttatatctcctcatgaaattgtacaaaaattaaccaccatgccactagttacgcaacatacaactttcattctctctcgcgacaacccactaatcatcacaggtaatcaaggaaactcacacaaatcagttgtactatagaagttggagtccatatgcaagccaaacaatcctgtaacccaccttaacaatct

SEQ ID NO: 12510 - DNA, 339 bp, Zea Mays
tttcgctgctagcggtgaacgagagggtggattggatggatcgtcgtgcagtgcttacacatgaattctcttgtgatcgagccggatgcctcgatcggacctactatgtctaggttgccggtgttgttcttggcgaggaggacgtaggttacttcctacttgttattctgtgtgcctttgatctcacgaattttactgcatcctgtctcgttgggagataatgcgtgtgcaagtgcatacccaattggcataccaacggagaggtgagaatacagaagaaaaggaagattgcagattgttacaacgttcctcctagaagaaacacttccattgctgcac

SEQ ID NO: 12511 - DNA, 368 bp, Zea Mays
aggaggaggaagaaaatatctgtcctggaagcactcgcccccagacggaccccgaggcactgagcccagggtcgggcatggcggagctagaaaggggggccgaacgaaccaaaggaaaaccacttgagtggatctggcctgagactgacgcgtcataagtgacaggctgcattaactatgcctggcgccgacccgtggtagagaaactagtccgcctcccactcatgacctacgagtccctcgggctgcagcgcactcatgacctacgaacccctcgaactacggtgcactcatagcgcgcgcccccaccggcctacgacgctttcatggcctatcggggctaggcctgagtgcgcaggccgtctaca

SEQ ID NO: 12512 - DNA, 589 bp, Zea Mays
gccttgtcgcgcgagggatgtatgcacttcgagaccttcgatcggggcaacgaggacttctatgctggtgtgttctaggtcgaagacgacgtgcgaaagcgctatgcgggggcgctttacgataggatgtggggtcctcacggccgcaacgtcgtttgagatagggccgaccgagcgctgacacatgtatgttttgtttttgacgatgatggtatgtgtgctcgttgtttgaaacattgttatgctgtcttcacaggtgatgaggaaggaagaggtggaagacctcgtcaaccttgagaggtcggtggcctgtggtggagacggaagcggaggagctatcctcacttaaggagccatgaagtccttgttgggccggcccattactctcggacttggctcgtccgcgcaagttggctcgtgtagatgtgtgtcctccctccctcctctccccctatccgtctctgccgacggtacctccccgccgcgacgacattgataaagccataaacggccacacccacagctctttcttctcacctctctactacccacccatggctcgcttaactcccaccaagtccaaatccac

SEQ ID NO: 12513 - DNA, 663 bp, Zea Mays
cctgcgggtgatgtgatgattgctgcaacgctggtgcctgcatgacaccatgccccatcatagtggatggtccagagggtttctgcacgacattgcggtggttccaaaggccctgtccagtctatgatgaaatcggccaaaacatatgatttaattgttgttgtgggctcgaaggtgatgttgtaaccggagagttttgctgcccatttggctattctggcggatgcctccggattcctgagcaactctccaagaccccgatcggaagtgactagtacttcgtgtgtctcgaaatagtgtctcagcttgcgtgaagccatgatgactgtgtatgctattttttctagctctatcatgttgcacttggagcttgtaagtacttcagagacaaaatatactgggcattggtgagtcttgccctctctggtcttctcttggaccaaggctgcgctgaccatgctgggtgaagctgcgatgtagagtagcaggggtagccctgggtctggacttgttaatgttgcaatgtcagacagatattgcttcagagactcgaaggcggcagcttgtcctgggccccaagtgaagtcctttgcaccgcgtaacgttttgaggaaaggaaggcttcgctcggtggatcgcgagataaatctattcagtgcagcc

SEQ ID NO: 12514 - DNA, 547 bp, Zea Mays
ctctgatttacaaaatccctggactgcgcaccgaataaccagataacccaggggctagcctgcaagtttccccagactcagtaaaccacgagttggacggcgggtttattatgaataaccccgagggctcttttacaaatttactatggcgaaagggcatctatgaatcctgaccgctggatccatcgcgagggcatagattaaatcgcggatggtatgagatcacgccccttggatccaaaacctacggtccggatcacatctctgaaacagtacgatggtttctctaatctgcgtcgtccctgaccgaatcaacggcgcaaacattctcttctaccccaggatggtcaggaacggcggtgctctacacctacagtggtgggttcgccggagtgaaatccccaggtgccccaaggcctaatccctaccctggcagcggtggtatggggtaagattatggtgaacccaatccggggaagggcgcaccgacgacgatcatgaagacgacaggttacgcgcaggcggatccttggcgaggctaaaccac

SEQ ID NO: 12515 - DNA, 1164 bp, Zea Mays
ctccacggtacgcaaccaatcttcagcatccatgggatcaacagaataggaaaagacaggggatgacctctcatgaattctgcccgcttggctctaggaacttgtggcatctaaacttgcacttggggttgaggtgggggtggctactgctgcacctgctgcattgctgctaaggtctgaccaattgcttggactccttgggtttccatcaggaacatctgctcaatagtcatcgtgggtggcggtggcaactactgcggagctgcctcctcctggggtgcctactgctctggctaggcacgccttccacctctgcgcctattctcagacatctatagaaagcacacacacatccgatctgactctacagtctttcagcataagaaaagatatatggaaatcttcatagcactgaacaattgatcattttcactgaccctcaaacacagcttctcatataacgaggaaagtggaaataaagggattgcccaactaaataactgactttatcaataactataccaagttgcaggggatgcccacagcttgatgacaatcattacaaagatccaacttcattacaagttcatcacgacaagcaccaaaacatatgacaagaaaactaactctaactaagactaactaagactaagacactgaattaagcattattacagactctgattccgacgatctatggatcaaaatctatctgggtcttgcagtcaggggtgccgtaatcaaagcgaccacagggcggcgagcggtaggggtgctgaatcccgactggggcgggagaaccaccatcctaatagttgtgcgctgcgcgctcagcacacaattctgcaacctccgcctgaaccttgcccaactcatcaagggcgtggtccagcttggtgttgagcacgacgaccaggttgatcgtgttgttcagcctaggattgccctcaccaacgagtgagacaatcacacttccagcactgtcgatcaaacggcgagggtagtactttaggtcgaggtcatcatctaccccgctgaacaacgagcaatcctgcgaaagagcatgttgtgcatcatcttgcatggctgcctcgacagtatccctcacagtgatagaataatgctatgagaaggcctctacacctcggagatcatcgtccggac

SEQ ID NO: 12516 - DNA, 852 bp, Zea Mays
gggcaatagggcagtccaaaggtggtagggaggcaccgaggccatatgcaagagtggcatgggtgaacctacaggcaaaaaacaagatgtggctaactaaagagagctacatggtcaggaagaaagtccaactcgagaaggaagtcgatggtggagatggaagagggagaaagaaaagtcatctcagcgaaaacaatgtgacaggagatcaagagacgatgagtgataagattaaggcaccattaccccttgtgattagggaagtaaccaagaaagacacaacgggagaagtggggcaagattatgggagtaatggtagaaaggttgtggtagcatgcaaacccaaagatatgaagatggtcgtaggagagtggtgccaaacatagtgaagtagagtataggatcacgaaacgccttagtacaaagatgatcaaggatggaggtgatgtggaggatcttagccggtagccaacatgaacgaaggcctgaaagaccaaggaacacatgatgttgttagtaatgcaaatcatacgatcatcctcgccattctagaaagaagtgtaggggcagaacatccgaagttgaacaccataggagaagaatgactgagctgagttatcaaactcacagtcgttatcacgctgaatgaccttaatggtgcgaacaaactaagtggaaaccaagcaaagaagtgcaggagagtcacaaatgtatcgaacttcaaacacaagggaaaatccataaataatgagagtgatcatcaagaacgagtagataatagtataatacttatcactaaaaacagaagaggtccacaaatcatagtgtataagaacaaaattgtgcactgtc

SEQ ID NO: 12517 - DNA, 582 bp, Zea Mays
cgcgacctggatttgtaatttttcgtatcgctcgtttggagctactggctggtgggcacccaccacttaggagagaacggagaacagggctggacgatgagacatcattaggacatctgcgtagcgagacatcggacatagatgctgctgataggctacggcgacgagcgcggcattaactcggatcagcgtcacgtgcacgccacgtgccgggcaccagcgggccactctgtggtgcaagcgcaactagccaagttacaaactttcaaagagcccgcagaggtctgcgtctggtcactttaccggtgaccgtagtgtcaatcaccctgccttcccgcccaaacgcaccacaatttttctcattttctttcttattaggacttcagcagcacgtcattttctttcttattaggacttcagcagcacggtgctactctggtgtaggatgcttattttgcgcatccgcgtttagacgaggacgtgcaaaataagagcttgacaactcggttgtccattttcacacaattctctctcggttcgcatgcggtaagaccaactacagcagcctccgtatgtggcttc

SEQ ID NO: 12518 - DNA, 372 bp, Zea Mays
gaaagatcaactcaggggcctacaaagagaacaaggttggtaatccgaccttttaatccaaaccgttcttctcctcgcccacctacatatccattcagacaacccgtatttattcgtcccactcctgcccccgtcccaaccaatcagtcgattgcccctggtactcgtttccccacccttcccagttcctccaatgcttgcttcaattgtggaaagtccggacatttcatcaaggactgcccatatccgaagcagaacaaatctaactttcagcagacttctaggaactcaaatcaaggaaaggggaacacgaccaactcttcaactggcaaaaatttgaagaaaactggatgagtgtattatacccaggtg

SEQ ID NO: 12519 - DNA, 668 bp, Zea Mays
aacaaatcttaggggcgcacaataggattataggaggctagcacatgcatttgataaaccttctattactatttttccatcacacgatgaccaaactaaagaaaacctatatgacctatcaattgcaaatggtcaggcccaatcccagtcccttatgggatgtcgataaactcctataacggccagccacatcctccgccacctatataggaacaaccagtcccctgcgcacggccagacggtccagcacagcggcggttggctccatcccccatgacgagccactgaaagtcacgccaagaaaagtagagatgctcggaccatttggctatacgcgcggaccgtctatgcacgtcaacagaccgtctaggtattacaccggaccatccgcgacagggtatgaagagcaaaacatggaatattactagcaaccctactactagcccccaactaacacctctctagcacccacggaccctcaaggacgtgggataatgccacccacacattggtatgaaccctttttggcccccaaaaggctagaaagatctaacatgcaatatggaatacctaggggaacattaaatcattaatacccaacataacctaaacccatgggcaagggggcaatataatgatacaccagcaaccacacatatggaccaaag

SEQ ID NO: 12520 - DNA, 321 bp, Zea Mays
cgaccgccgcgcgtccttcttcaaattcccggccaccgtctaagccgcctataaattgagccctcccctagctgcgcaacatcattgcgcacccccgcacctagtattgctcccagccgatcaccagcaagctccaatttcgtattccccccaaatcagtcgaagaacaccgtgaaaccaagttcaccgtggctagagcaaaacacttgatcattagtgaaattaagttaggggaaaggcttgggatggattcaattaggtgttagtcgctcggagaccctagtcgttgccccaatcggccggcgtatgagctcgtcggag

SEQ ID NO: 12521 - DNA, 360 bp, Zea Mays
cacagcaggaattcttctgttggttacccgggttgaatcagccaagcctcggtacagataggccggatatgctctgtctttcagtggctgaatgttcttgaaaacaaagtcagcgaccacagcttctgcagtcagacccctttctttcaacaatccaacttctactaacagagcccctgcctcagccaccttctggtctgtgggggattcggtccagctcggagtgcgaacatccggctgtctccctggccgtggggggagggaattcccatgattctccatgatgaaccattccaggcgccatcccttgatgttgtccttgagtgggatgtcgaggtagtcggtcttcctcccacggtg

SEQ ID NO: 12522 - DNA, 444 bp, Zea Mays
ggaggctacttgtttggtgcgccgtccggacaatgatctccggggtgtagaggccttcttagagcactattcgatctccgggatactgccgaggcagccatgcaagatgcagcacgatgggcactttctcagtattgctcgttgtttagcggggtagctgatggccttgacctgaagtactaccctcgctgttcgaccgacagtgctagaggtgtgattgtctcgccagttggagagggcaatcctaggctgagcagcagcatcaacttggtcgccgtgctcaacacagagttggaccacgcccttgacgagttgggcaaggttcgggcggaggttgtggaattgcgtgctaaatgcacggcacaccactatgttgatggtggttctcccgcccctgttgggattcagcacccttaccgttcaccgccccgtggtcgcttcgac

SEQ ID NO: 12523 - DNA, 724 bp, Zea Mays
ccgtggatggcgggttctatttcaaggaaaccgaggggttcatatgaaagagtgcacccgcgaaggggtacggtgcattatgggccgttcgattagatatcaacacgccagattggatcgacttcaactaaataggtacgcaaagatagccgcacgatcgaccctcaatgttccagatttaaatacaaaagaaccatcgagatccatctgatccctgctcaatgccctatatcatcccaacccgaaacgatactcagatctaatctagaccgtatatgagtagatcaacggatccgggacgttaaactaaacgagtgcgcccggtatgatctgcaccatccaataaccatctaatggtgaaggcgatcgtcttcttccccggaacatgccacatataggatagcgacggcgcgcgtatcacactagtgaaatggaccgacgtgaccctgtccgtggactcgcccgacactacgcgcacattgaaggtttagcagggaccgagcaggggaactcaccgctaatggagagaactggccgacaacgccacaagggagtggacaatttgatggcggcgcacgatgatgcccggccgaattcctcccccgcgtggtatagcaggtcgccgaggtctgccccgaggctctacccgcacgcaccactgctctgttgaccgcaccagacctctacgccccttccttcctcctctcttcttcttctcgttccg

SEQ ID NO: 12524 - DNA, 1505 bp, Zea Mays
gcagctttcgcatagatttggttttcaacatttggattttggacatactgttattttgtttgtgttgagtcttgtcgacatgctgattgattgcatcttagacgattgtggattgcccgtcacctctgctgatgaacatggcaacagaaaagatatgaattttaatggcaaggggagatcatttgacaggggagatgaacaccgtgaacatctaaggagaaagaatatacttatgtctattgaagttgttgagaaggtcactgcaaacaaaattacccaagtctttctgcggcttgtcaaccgtaacacgtatgatgtgttatctttgtaattctactcttttctgccatgcaaatcttgatcgttaaaagatcctagatactcagctacgttttccccgaaaaaaataggtttttataaacattttttacataacaagcttggggttggggatgaaaatgaaattgatatattatcatgttatcagatggtaatagtacctttgaatttttggcggtatgtgcaatagtgctggctgctatctgcgttttgtcctagatgtgacatgttaacctggttgggattgagaacactattttgaccaataaaaaaagagaactttgatggtactcattttattagggagaacatatgggaagttggttcaagctacacatcatcttaggcactttcaaatgagtcaatttccagcttctcatgccatgtttggctctttcccagatatgaaactccataaaacttgtggctttgtcgtcactctaaacttcaagcgtatgatttcattttagaatgtaagtatccatgcatagtttgagagaactttggtacatacatatttgttggcatcaagcaagcgtaacaaataatcgctagaaagcttttggattgtgacccccctgcagacaactcaatcactgttcaaatgttctagtgtattctatatgttaaactgatagtacttccattcctttttgaatgtggtaggatagacctgaaaatttcaattatctacttcggaaacttcaccttattggtgctcttaaaaagaagaacgctttgtctccatgcaatctgctagatagcttgattgtgaatatacagaatgccataagcacgggctaccaattagacaggaaaaggcttctgggagttcctgttagcatacagccttgcagttcagctatttacagtatattcgtaactggaaagggatcttgttggattccttttgatatgtttatggagaatgcaatggatgggagacatcttcatactatatcatcagttgaatatctgacaggtgcataaatgcataaagctgttaattcttgcctttccactttctgtaaaacattttctaacatgaaacagttggttgacagaactatccaaaacacttcaagtgttgaatcgggcaacttggcaagagacctttcaggctttatggatttcggctttgcggctagtacagcgagtgagatgac

SEQ ID NO: 12525 - DNA, 395 bp, Zea Mays
gcactttactggtgagcaacagactgtaaaaatcaacctgcgatcaagtgtctattagtcttgaagtcgaggctaagatcaaaatgcgaggaaggtaatttcgaatttacataagatgaactaattcaatggtgtagtagtcataaacaaaggcacgctgcagcagggcaaagaaggatctaattcaccgtcggtccatggtaattatgacaaggaattgttgaggcatgggtaaacacagggatctaaacaatctgagggtccatttcactagatctccaagacagcgaaacatgaacagtatatcattatctattgccgatttggcaactgttcgaagaattggaccgagcacgaacagttcagaaattgccaggaggacatgtctgatatgg

SEQ ID NO: 12526 - DNA, 407 bp, Zea Mays
ggaaaaaggaaattgggatgctatggtggacgatcaggggcgagagctggtgcactaggtgcataataacctagcggacctggttgatcactcaatttatagaagccaacagtggtgacgtccaatttggagaaggcgtgctggcggccggagaaagggggagtttactgacgcgagctatcgtggtggtcacttgctgaggagctacaacggtaattgttgagttattatggctagcaacgacgtggtgaaagggtcacggcgtggcagaatcacaacgaccggcgtacacctcggcgatggccgctcggccatatcgccgacaagtgggtgcggtgtctaagcaaccacagtgccccgaccacatccgcgacgagatcttttcaccttaagtggttatccgcatg

SEQ ID NO: 12527 - DNA, 500 bp, Zea Mays
gactgcgctacattgaaacggccatagtgcctgagtttggcggggaaacctcttcggttactggagcaaaagaacctgctcctcccacgcaaaagattgaagagccggctgcaatgccgaaggcaccctcagctaaattagctgagccgaagactgataatattgaggagacaagagttgaagggacgaaaacattagaagttttaagcccttcggcagaagtgacagtgtcgaaggcataaaaaggtcttgcggtgacccccaagagaaaaaggatggccagtgtgctagatgtgctggagacggtaaaggcttcaagttctattccttcagggaaaattgtcgaggcttcgaaaatacaaatcgaagctgaaacaagaccggccaaagttgaaggtgcagtgagccaagctattgccgaagccaagccttcagagcctattgataaacaaccttcggaaattgagaaaaaggcagcagaggaagaggctacatagcag

SEQ ID NO: 12528 - DNA, 427 bp, Zea Mays
atccatcggcaccaagctcgccttcgcctctgtgtaccacccgcaatccaacggcgtcgtcgagcgcgccaacggcaagattttcaccgctatcaagaaaagacttcttgacgacaagaagggtaaatgggctgaccaactacctgaagtagtctgggccctaaacacgaccgaatgtcgggcaaccggattcacacctttttgtctgttacatggatcggaggccatgacgccgcaggaaataaagcatggatcgccccgaacaaacacatcagcaatccccgacatcgacaaaccaaaatctaaagacctcatcgatggagaccacgtcttcgcccctgtaggccctcaacaaataccaagctcaaaccaaggcctagcacgacaacgcggtcatcccaagagagttcaacacaggagacctcgt

SEQ ID NO: 12529 - DNA, 609 bp, Zea Mays
tcagcccatcctagcaaaatcaaagcatgatggttgtaatgggacagtgactattgtggagggctctctgacagaggagcagattactagtgagctgaaaaggttggtggcttcggattgggaatggagtgtgaagtgcttgggaaacaatgtgttctcgacaagttttccttcagttggtgaacttcatcgaatgattgaatggggaacagttcacactaaatttggagctaaaatgcaagtcaaggaagagggatctagagaagaaataaaatatgtgatgccaaaggtattggtgcaattcacaagattacctagggaattaagagaatacccattaatttgggcggttggctccatgctaggcatttcaaaagaggtggatacagtatttactcggaagtttgacagggcaagactgcaggtggcagtgcttgacccaaatctaattccacaatatgttgatgttgtagttggtgattatatttatgagctgaaattcaaggttgaagtggaggtcgatggcgatcagcctatgctgatggatatggatgactttggggcatacgacgacggtgattttcaggatcaaagcaaggatgataactt

SEQ ID NO: 12530 - DNA, 448 bp, Zea Mays
ttcgcgcgtaggaccggacggtccacaatagagaagaattttctttttcatagaaatctgaatctcaacttccgggaggtatccgacggaggagggatcctagggttgtcttgagatcgtcaggccacccaagacacctttagacgatgtacaaccgaagagaggtgaagattgagattggggaaggctaaactaaggctagattactcatactcataatgtatggaaagaacaacgcaaataagataaattgatttgatagattcaattgtggttatgttacttggttgtacccattcatttatataagggggtctggacccattgctagttggttcccaaacaaatcctattgagcttgctaacaaatctcgcaagaaattcaaatacctaactaaatatgttcccgcgaggaccgtccacgctgctacgtcaaaccgtgctcaac

SEQ ID NO: 12531 - DNA, 990 bp, Zea Mays
ccggcgatggtagggctccagcgaagggtcgggtgagaatggggggcctctagcggtcacgtcgaggtattggcgacgtcgatggtgaccggagttggtctggccacggactcatgcggtggagctcatcagcgacttctgtaccagccacattacggtggtatagttcaattagaccgcacatggagcttcactaagtggtagggagtgtgtgtgcaaggaattgatgaatgagtgggtagattactaggaccgagggaaccaatggaaggaagaagtccgatgatgggatttggtgtctccagcgatgtggcattcagtttgagtgcctaggaagcttcactaacctctagggaagttggttgtggagctagactgggcagagattggctggggtggctaggctatggtggccggagttttggcaagcttgcaggcggcaccgtgctcggtttcctagcgatcaccggcgtcaagtcgccgacaagggtgtgagacgtgcggaagggctagaccgaaagggtgggcttctaataggcaagggcgtgggcacgggcgcagggctagtggtgcggtcaagccaaccagagctcgtggcatgcgcgggcgcggtcagagcacattcccgagtgctagccgaggtcgaacacgtggaggtttgcttctgtccctgtccaagcgcttgtttagcttccctaacatgtatatcttggcaaggatccatgtagggtctcttccctgctcgaaatcatttcttttccatgtgagtcccgagcttagatatgcttagggtgaggagaaaagcttatgtcaagtcgggtctgtcactctgcttgggtcgtgacaaaaaccaggccaaagcgtgtcaaacagttttggtttggtgtcaaacttcaccaaggtgtgtctgaggtaattaggcaccactttgtccatatgaccttttagttttgagtttaggagctaggtgaacacggtggatctttgaaa

SEQ ID NO: 12532 - DNA, 555 bp, Zea Mays
cttgcccacgtcagtggtaggtgacatactccccgcattgaatgcatacggcgcacccagtctgcaatgtatggtatacactgttacacacatgttaccaagacgagcattgactcaatgcgtcgtttgggcgcccttcattatgacctctactgttcctcatgcgttatggaggcatgaagagacatgcgaaggagataggacgacaccatccatacatccctacgcacgacattgtaccagactacaccacaacctacactaaggcatgcgtggttgcgcctgtgttctgattagacagggcaagaggatagcattctaagagcccgcatagcaaccaagaggagatacgagaccagaagatctagcatcgctagctctacccaacacctcacactttgtattatagtaactcctaggcccacttgtcggggcccaactcccttgtagtgtgcccccttgcacaataaaaaggagggcacttgcgatacagagggggtagattcacactcagacctaggacacccaagctctcagcaatacaactcacaatgg

SEQ ID NO: 12533 - DNA, 813 bp, Zea Mays
cagcgagctccaaccataaggttcctgtgtctgtgtgggatcgtcttggaccattgctgaccaaagtctgtatgcccaaggttcgaccggaattggtgtggcgtgaggtctcctctcatggcgcgacgttcgaaaggtcggggccaccgggcggtcgcaaggcagtgccaaaaagcgtcgccactgcacgcggggcataaggcctaaggttccctccgcaccggcagcgggtgcacctgtccaaagtcctctttcaccgaagtcggttgaggtgtaagccacccccagctcctggaagaggttgctacggattttcctcatggttgtgttctcgagcggtctgaggcgcttgtcagagaggaattcagactccaacactgtgctttgttcgttgtggtcactggttcgcgacctcagtgaatgctcttgcagcggtggcagcagctgggttcggtttgctggagaactcctcattacatcgttctttccaggaggacatcgtgttgatctttgactcggagcgcatatcaaacatggttaacggtgttgtgctcaactcgccttcaggttcgttcaagttcatcaggtggtctaggcttgctcatgcagatatagttacgttcccctcccttgtcatggttgagttcagaggggtctcggttcatgcttagggtctgattactgctcagaacctgctgcgagatcactttgttgaggtggagcttcatcctgactctatcaaccgcctcgattttttctgctaggggtggttcccgccggggctcttgccgatcaaccggacgcagagacggg

SEQ ID NO: 12534 - DNA, 802 bp, Zea Mays
caaaattcatgattttcgccctcccaccagggctgaggccaaagatctacatatttctgaaaatgatgagtactggaaatccacaaatctgcataagtactacagatatctcaactctcttttcacgatgactctcattcccaaagggggaaatcaaatgaacattttgggtgaaaggaaggtaccatgaagcccaatagcagtgagagtttgaatgtgtttgatatgatctggcaagaaatcattcatgcctcttgctcaccactcaagggttgtctgcatgcccccgacatcatgaaaatgattgaggttgtcacccaattcagatatgaaaagggcaccagacatctttcctatacccctttttggattgaccccaataatccagcagtgtggatgaagaaggctcctgccagctctcgtgagcagactcagctggtccctcccatccttctcctagtcatggctctcccactccatgtggtcgtggtcgaggtcatggtcgcggcctgggagccaggatggctcatgggattgcatcctttttctctatgtgcaggaacatttctgctgacgttcatgagctggacaggcagtatcgggaaacgggtggcaatctccgtcgtcagtctatctctatgggaattccttttgctccccactcgccgacgtgcctctccatgcacccctctagaaatcaatgaatggcaccaacaagcttatggtgttccattcatgtctactgacgatgaagatgttgaagaagaagagttctttgatgatagggatcaatttgtcccgc

SEQ ID NO: 12535 - DNA, 504 bp, Zea Mays
gccgattgccgcaatttgtgcccggcggagtgcagataactactcggggtaagaaatatcgcgttaaagatgaacttgggccactgtttcgccctgtcgccgtgcccacttgcctggcgacgtagccgcgcgaccatcgccatcgtgtcgccgttcctcgcggttatgccacaccgtcagccatcttaccacgtcacaattgatcacagtagacaacccatctatcgcctaaggcctcgccatggtggtagccacggtcacccgcgccagcacacttctctctccgcccgccagcacctcccttccaaattcggagccgccgctcaaagactctaaaatttatgccccagcttactccgctaagtaattgtgcacccagtgaaccatccctcatctccaatagtcccccatagctccccaatttgggatttcaccaattctgttctctgcgccaccgcgaaccaccacgtcgtggactgtcgtttctaggttcgttcataccct

SEQ ID NO: 12536 - DNA, 520 bp, Zea Mays
aaaacaaaacaaaccaattatgcctctggtgggattagctgctgatggcctaggattttactcctctcagttcgccaaaatacagctaaaaccccaagaaatcttgtctaggtctggttaaaatccttgaggggatagtttctgtggatgagttggagaaagattttgggtttcactttccgtggggaaggatttggaaagctaccaaatgtcattctggtttccttatgcaatttccttcccaggaaaggcttgatgaattggtcaattttcctgaattgaaaatgaagatttgaggggctaaaattgtggtggttccctggtcttcccaagccaaagccaaatctaggcttcactcagtgtgggtgatagcagaaaatgtacctgatgacttgcagaactactaagaaatatgtgagataggttcatctattggagctatagaagaaatagactttaattccttagattcgaaggaaattgtctggtttaaagtcaacgtgaagagcatagccatgat

SEQ ID NO: 12537 - DNA, 509 bp, Zea Mays
aaacttgactttgccaaagcttttgatagtgtaagctgggatgctctactcactgttctacaggcacgtggcttccctcctctttggtgtgactggattaagctactgcaagtctctgctaagtcggctgtccttttgaatggtgttccgggcagatggatttcttgcaagaaaggccttcgtcaaggtgacccgctgtcaccctacatgttcatactagttgctgatgtcttacagcagctgctggccagagatagcaccattcgacacccccttacagctgaccgttcatgcacaattctccagtatgcagacgatacactgattgtggcaagagctgatgagctggctatgctgcagctaaagtcgattcttcaaagcttcacccgtgcaacaggtctggatataaactacaacaaaagtacactggttccaatgcatgtgcctgctcctgatgtcactcgattcgttaacattcttgggtgtgcagaaggtgcgttcccgcagac

SEQ ID NO: 12538 - DNA, 1463 bp, Zea Mays
gaagccttgttatctcgcctggaatgtggctggaaaaggtattggaccttaatgctagaatttccaaattctgtaatctctcacctatccatgcaggcaagtttctagtgaacttattgtgtgatagatcaaggacaagaagatttgtgcagctctgtagcaacaatgggaattctcctgaaaggctgttgctacttaaaagaagtgtacggatattcaagcttggaggactcgcgggactagaatgaggcatggaggtgctagaagaattgccttgttttgcaactttggtgccacaatcaggaagctcccctgcaagtagattgtctgatagatcaagaactcgcagctgcttccactgacaaatctgattaggaataagcccagtaattcggttggagtagagaaccaccagctgtagtagtggggcttcaaaattcagtgacagtggtccattcaaagagttccttgagatgtcaaacgtcacaatgcttcttggcagccgtggtaccgagccagtgagctggtttgacctgagctgaaggattcccactgacatgaactccaaatcacggggcagctcaccagtaatcttattgtaagagaggtccaagcttgatgcgttagcaaacacagcccaaaaccattctggaatcgtaccggtaaggttcgagtacgaaatgtcaaggacgttaacttggttctgccagcgtagccaggcagggaatcgggaacccagctgacaggatgaaaactctgctacattcagttgaaacggtggcacccagtccggatccactctgatctgtagattgttgtcggacagatcgagagatgtcaaacttgttagcttgctgaagtgctcttctgacatgacgccattcaggttgttgccagacacatctagggaactcaaggctgcaagctcgcctatctccacaggcacagggccagtaaggtgattgccagaaacatcaagtagggtcaggctggtttggttcggcagccagttcaacatggtccctgtcaagttggcttggctcaggtctaactccctcagcttcctctctgggcagcttggtagcctgtccagcagacgcgctatgtccaggccaatgttggtgtaggcaagggtcagtgtgttgagactgcacatgtttctgaacgtctctggcaacatcccattcagatcgttgttgccaagatcaagcacttcaagtgaggtcatgtatcccagctcgcgaggaaacgatccaaacagtccgcacgcatcgagctggagactcctgaggcggctgcccaggtcccagaaccaccagcgggacgagaatgggccgctgaacaggaaattgttcgagaggtcaagctcctcgacggctgtaaggttggtcaggcgcgagagcaaggaatagatactgatgctgcattcatctaggtgcagcactctcaggttagcaagggcg

SEQ ID NO: 12539 - DNA, 570 bp, Zea Mays
gccggagcaggatctgggcagagcggggattgcggggacgagaagagagcacgcatgttgtgtgcggtggaggcacgagagggcggtgaggaagggaggtggcatggtgaagcctggtgcggacacccacaataggtatatatgtattagtagagatagagattagtctagcccagtgcctgcgcttgcttgcggtgaacatgtcaccgtggttcacgactcacgcaaagcggacaagccaaacgcacccggaaaactgcagggaactgagaaggaggcctggccggccattaatggacatcgaaaagctagggtgattgggtgaacaagtgaagtattgccaccactcccttgatagtccgtctacgccgtacgttggttgaagagctctaaaacatcactccaaaagatctgaaatctgtgtttggttatccgattcaaatccaaatccctcgaagcctcatcatattaaaaaaaagataaagtaaaatcacaaccccccacatattaaaataatgaaatcgagatcacaaacaaataatagctattgcctattttagagtgtaaaag

SEQ ID NO: 12540 - DNA, 295 bp, Zea Mays
gaattctaactgccttctctgggtatctgtatagcttttctgtcttgactgcgcagttctcaagttctcccgtatcaagcgtacatgttcttctgcctcttgtataatttctggcccaaagaactgtctttcaccagtttgatcccaatatagagaagtcctgcaccttctgccatataaagcttcaaacggggacatcttcaaactagcctagtaaatgttattgtaagagaactccgcatagggcaaactcttatcccaactgccaccatgtttaagagcacaagctcttaac

SEQ ID NO: 12541 - DNA, 574 bp, Zea Mays
tgaagttgatcccaatgggtgtgaccgtgcaccggccattgtccgtatttttgatgaggatgaagaagaggaagaagaagttccgctgattcgtaagaatagctagcattacagaggtagtagggggatagtgatattccttctccagctcagtccgctcttgtcagccttcaagaactgtcaataacggattttgatcaggcccttgaagatgtcgttcctgaggatatgctatcggagccgactgctgatgacatgatggttgtttgttctgaaattctagacatgggattagaggtatcccgagcagtgtctcgtgcatcatcgactttggaagacagtcttcgatgtcaagacgttggtcaggattgcccgactcacatggaggtgactgaggatccttcagccttagaggtggctgctgtagaaaacctagcccccgacggtggtgctggcagtaacccagcccccaagggtgtcgccggtagtgatccggctctggtgggtagcgcgagctgcaacctagcccccgagggtgttgtcggtagtgatccagctctggtgggtggcgcga

SEQ ID NO: 12542 - DNA, 389 bp, Zea Mays
tcggcttaggattagagcagcaacagccattagtgtttgatcactggtgggagacacagacagaacagaactacagagatggagggagggagcagggggaaccttgagatgacgaactcatcttgtcactggtgctggagacgctggtgatctggagcagccgtcgcccaccggtgatctggactctagagttatgaactggagctgtggagcaggcgagcaggcaaaggggcacatgtgactggagcaggcgagcagctgccggtgatcgggagttcaggcagaggggatcactagtgctggagagtggagacgccggtgatctggacctctggagcagccgcccgacagagggatacatgcagggtttaggcagccttagggtttta

SEQ ID NO: 12543 - DNA, 1008 bp, Zea Mays
tccaattttttgatgcttatgtgcagttagatgctgggtggtaccctctgatctaggtttcctgcctgctgcccagcctgtttagagcttaccaatttttactaggatctagattctttggaattgatatttgacatatcagtctctaaaagaggcactagcctctacctatgtacagagatatatccttactggttggctaattcttatgggctgtttttttccagtgatctaggtacttgctgtttggggggaattttgtcgcagcttggaggagaccgctcgccattttgcgttttcgatcgtcggtgagtttgtgtgcctatacgcctgatctgttttataatgtgttgtttgttacgagccgatttattcactagtgttatgtgacgttcttccatactatgcgatatatagagctatgcctgattctccatgtgtgcgtgttgcgagatgccacgaagcgaagcgcccgaggcacaatgcaattgcacagggttagtcctcacaagttcgctgctttgtttatgcatgcgatggccggtacccatcctaatttgcgatacttctcttgcgggccaaaaaatacgcagcctctttagattgcccaatctttgagacaactgatgccatcgcatttttcatggtgaagacgaagtagacccatctaacctttcggggacctctaaccagccaatacctgcgctacaggaaacacgtgcgtacacccatgttttttcagccattacttcaacaaaaaacaatatggtgttagtgatgcttatgtcggcacaggtagtagatctgtaatgtcattcccttcaacgcttgccgcatccaataggcgatgccggcgcagtagagtacatcacatggtacctgacgagccattgtcaaccacgcttcctttggacaggtcatacgtagatgctctaaaaggtgtgtattatgcccaacattcctggtaacattcttcctgctttgctttggtgctaccctttctcttct

SEQ ID NO: 12544 - DNA, 711 bp, Zea Mays
gccggaataacgttaatcgaagtctatcattacaaagacactccgcacaaagccacccatgtacgcagccggaacaatacaagtgtacgaatacggccaacaggccacatcaccattacaataacatacacacggcgagggcatcacctatcacatcggctcaaccttcagaatgatacccatctccctataattaaacagcattatcctcaattcctcaccctcaaaaagctcccgaatatccccttcgcctatgcccgccccgttcggcgaagacaacaattctcgtttaccagccccgtctactcgaagtcagccacgctccatccccatgcgacggcgcctgctgctccgcaaaaattcaccaacacattgttttcccaccacccttcgccgcctacacccagtactcgtaccaggaagatcctcagcaccctccacacgcagcgaactctccgccgcggtcacatccaacgcaacaaaataatctaagccttcatccgaggactcctccgtccaaggaaacgaactcccagactcaccatcggactcaaaacattcagacatagagccaggcacacaatcatcggcgggcactacaattgaagtctccgacgcaaaatcagtattgtcagtagtggttgcttgtgcaggcccaaacgtcagaacctacgcagcaaccgaggttcagtatcacacagacaaaaagtt

SEQ ID NO: 12545 - DNA, 855 bp, Zea Mays
aattatgagacatgagatttgtgtttaaagacgaggtgtgcgaataatcggttagtgttccacttgtctagtcgataaatgtggtcataaataattgtgctcgacataaatgtttggtcgttgtatcacttcctctatgtttttaagtcaagtcaaaatgcggggtactagtggtacgctaggcggtgctccaaataaattaaccagttaaggcgaaatctgtcgtgcgtgatttatggttagtgagtagttgaattacgagttatgcgagactcatgttagaaactagtatgcgacatgtaactgtgctcgtgatgtgaataacatatcagtaggtattgttggtgtcattagcaagtgtgatgattttggttgtgcgataaattttgaagggcaaagaacatgtctagtgtgtcgaccaggttaaccaataggttccgtaaatatgcttgtgatgcttttatgtgcatgataagctcgacgccttgtcgtcgtagccttaggaaattttctgaaatgcgctattgctctactgatgggttgaatgaacttgagatgtattactataggtgtgtgtcgtgccggtcatccaaaaatggcgaaagatagtgtgtgatggtaattgggaaataatcacgtcatgagccaactcatgttaggtaggagttgattttgttaagtgattgttatatatgttgtgtctcgaattgtgataataataggcaagccgacgtgtatgctgtctagcgggatgtgtcattgctctagctagccgactcgttagatgactttagttaagcttgtagtcacggtaaatttgcttgttgtattctaaatgcgtatggttacggtcgc

SEQ ID NO: 12546 - DNA, 1319 bp, Zea Mays
actgtcgcagtgggtttgagttattaggttccttaagttttcatgggtatcctacatcaatatcagttactccgtgccaggcgatgccaaaaagttggtgcctcgattaactgttcgagcagacaggttagcgggtctacatattcgaatgcgatacatagtcgatcacaatcgtatgaaggtgctattttggcaatccatactggtgttccaaagtaccccgttatttgttttgttgttttcgttattacaaattctgattgacagttgcgaacgattaaaactaaggttagggtgctaacttttggtgtctgttccagttttgcacttaacagtacatttaccacaagtaattttcttttttttttggggcagctgattgggctgtcttaaaagcttagttgtgatacttgtgtaacatacatcgatggtgcactgagtgttatgtgtttagtccatgattatttgatgagctttttaagtaaatttgatgccttttctatagtttcatgatcagttcatggtaatttagaaatatgaatgacttttgagtggtaatttagatagataaacacaatctgcttagagttaattcttggtgtgtgatcaaatgttttgatttggcattaaaaagtgaaggccacccttattcctccaattcagcttctttaatccctatatgtgcccctcccatcataatggagacacacaaggaattgagttatgacagcactggtgcaaggcaataaacaagatgaagtgccaactcacattatgacagcagtggcgcaaggcaatagacttgatgaagtgatggtttaggagggaccataacttttccagtggcagtttaagaatttcaccaacatttagtggcacacaattatcacgattaccatatgctgtcaattagttttagcttgtttgggcctctgtacatgacaacttctgaaacccttgcttgacaacatatccctggctgtttgaagtacaattgtaatcctatacaacagcaagaggccaccagttgacatggtttcatttgaatattgactgagcttgtgttagattgcgatggcagtggactactgtggaggctgtgtggatgcggccatggagtgagctttgagccgtagtgaggtatcaagggaaagcattcctcttgatcttttgtgtgttgatatgaacaatggtgtctactgatctagtacccttctgtgattttcacttcaaatggcgcctgcatttaaacattgaacaatatagaggatatagattccctaattgcacaaataaatatcggtttggtgggtacggca

SEQ ID NO: 12547 - DNA, 518 bp, Zea Mays
ctttggaaccgaatggcacacaacaaaattaccggactaaaaaattctctaccgttgataaacctcttcatctctaccaatcgttcaaccaatatcccactaaaaaatcagcacaactacccatcattcgttttatgtcatttgcttcacagtgctcatccttttctacagcaaacgcggatatcaaaccaaaatagttgagaggtggttgctgttgaggtagggataaatcaacgaacggatttctacctagatcatgagggtaagaaatcaagaagaggaaatcaccactaggaaatgctagggccaaacgagcagacgaccatgagggaagtgttgtgcgggatgctttttcgcgtggctagaacaacagtacgctttcaagaagatcaaagacttccagagtcagttctaccacgacccccaggccccaacagcatgtgttcgtcaccgtcgtccccagaccctaaaatacaagctgccgcgctcgctcctaccatccatctagcccacgttcg

SEQ ID NO: 12548 - DNA, 463 bp, Zea Mays
cgccatctcaatcttgttggcgagcggagcggaagcaatatcgcaagaaagcagagaatgtctggaggcagaaaagcaagactagggctcataatacagaggcatgcgacggcgcagtacaaatggggttttcccgggccagatgccatttctaaaaagtgcccagtcatcactcagctgttattttgccaacgatggcgtgccatgtcatcactcggccgttatttccaaaacggtcgacgtggcccaacatagctcagctgttatttctaaaaacgctggccgctgtttccaaaatgaccaacatggcctgttatcactcggttgttatctctaaaacaccgacgtcaccagtaaccgttcggtcgttatttctaaaaacaccgacgtggcccattatcactcggctgttatttctaaaacgccgacatcaccagtaatcactcggctattacctctaaaa

SEQ ID NO: 12549 - DNA, 697 bp, Zea Mays
cttagtggctgcggcttaaatcaatcggaattggctcacagtattttgtctctatggattacagctgcagtagtccgaacggctttaatccagccatgtctctccggtgacactagctgaaaagattggattgctcggctattattggcaactgcgagcttaatccccaaccatggcctgctgatagtaggtgacaaggttgtttggacggcgacgttcacatgctggggccccgctgggattgtggttgtcagttgtttctcttgcttaagtggctcgggctggtggttaaggcctaaacaacgacgattcggtgggggtgttaatgttatcgatgcgagcctttggtagaggctgatgtgattctgatttctaaaatgtgctcatagtggaggaggttggggtcttagtgtcaatttaaatggcaggagccctgggcgtcttgtaaagataggaaatgccatggaccggtgcaagaaactctactgtaatctggtcagctctctccctctcacacacttgctcattctctgcttaccggagccgagcagatcacgcagtgagtcagtgacgaccgagcgcgccttggttactgcatctcgtcgtcgagtatcagcacgcaatagttgacccggagcagctgtggttagtgcggctcaagagctggctgcttgtgttttcgctactagtattctgg

SEQ ID NO: 12550 - DNA, 599 bp, Zea Mays
ccaagtgtgagcatgcactttctggcaccttcgacatcatcatcaccttgaaggggaattgacacgagtagagaccatcgtcaagcctctttggcccaccaacatcaattttttctccaaggcatgtgagagggccgatgatgcactcctcgaagaactaggattctaggatctgaaggcttctggaccttgaagggggtgcatgtggcgccaactttgtgcctttttgggcccctgaccatcataagaagatatgtgccttgcattttgctcactcaccaacatgttggtgaagcactctagaggtgtgccccttccctcagatactcttatgtgaaacatccctatagcattcccacaagaaatgccgaacacaattagactcctagggttggtggggatattaattatttctcctaatctcaagttcctccttgtacttgtcattatatgcataaaaagcctcgtgaacattatcctgcatagcaatagccatgctctttctaatggaagtggcgaaaagctctaacaacttttctacaccttgaagggtatggtttgggatcttcaccacacatagagcatccaaactgtcatca

SEQ ID NO: 12551 - DNA, 840 bp, Zea Mays
gagcgcgcaaattaccgagacaatggaaggcttgggggtgattctcaccttggtttggcgcctgcgggtatgttgcccacgacggacaacgaatcagcagcggcggcgatactcccgcaacccacgacgatggcgcacggcgcggcgtctagggctccaacagggaggttgctgcagcgcgacccaggcgggaaccagtggctcgtccaccggtcccaggctagagggaggagggtgaagttcacggtcgaggcgcgatgcggaaaggggatggcgtggcagtgagtgtgcgacagcagcgtgcaggcggtggcagagcatctaggtcaggcctcgggcttcacggctggtttatatgcgggtgctagggatctcgcgatgcgcatttggaggagcgatccgcgcggaggccgtggggtctgtttacgccgcgctattcttgcggggaagaagaagaccggatggcgtgagggcccactaacagcggaagtagcggtagttgatgcgcggggtgagtggctcagggcagcaactgtgtttgtttacgcgagatccacgggcggacgatggaaattcgttgtgccgtggactcaggggagaagatgacctccgacagcacggacccacgcgtcagagaaagagataacggtacgcgcagcgggcgactgacaactaggacccaccagcgagtgacagcgtgagacggcgctagacgaccacatacgtcggtcggcgctgtttcctggattgggctgcgcagaaggagatcgcaagatgggctgaataggtggtctcggctcaaacagcgctttcactttttttcttttttttctattctcc

SEQ ID NO: 12552 - DNA, 824 bp, Zea Mays
aaactttatgcatgaggagagagcagataattaacttatccatgttctgttgtatttcaatttaatttcccagattattcaagcactatagagcttgatatagttgttatggccacttggcgatatatataaatatatgatgccacacaacacaatcaaataaaatatagagtcaaacaaaattgtttataaaggttgcggtatgatgtgacttcaggggcttgaacaacccaccgcaatccacgcgagtacaagctctagcgtctagtgtcaatgcgtgtgcggccatcagggccacgacaacacaacaaagccttcgtaataagcgcaacagacacaattatggctcggtaatcggggtacacgataagtccacgcaacgtgcgcaacaggcgcaattgtggctcgatgataacgacaaacgaacagtgcctacagggcatgcgaaaagtatgtgactcggcgatggaggtccaactgaacaggagtggtccgattaagtgagagcgcgacatagcaatcacatgacgcagccaagttcgtacgacacaaatactgcgtcgtgttgccagggcgcagccagtgctcagccaatgccataactcggtcgattaccaacgcagcctgatcggcgtgtccgagtacccactatacaatttaattgctcgacgtgagtccaaaagctcaacataatataaatatttagagcgatttaagtatgcacaataaagccttcatatgtattttaattttctgctaagtatcttctacaggaaataaaagcagaaaacaaacataataaataattaatgcataaacataac

SEQ ID NO: 12553 - DNA, 983 bp, Zea Mays
cggggacgaggtggacagcatggaggatgaagggcggcgtgctcgagcccaccatggacatgggcacccttgacgatgcgctccctgtcaagtatgcacgtgttgcttcctcttcgacccacaacacatgtgcaccgatccaacatcatccctccatgggtttcgatacggttttggatcgattcgctccgatgatgacacacacggatgcatgtgcgggagggggtctatccaacttcttctctaagggctagtttggcaacttgtttctccgtggggttctcagcctttaacctgtggtggatgcccacgtgaaatctttccacgggcaaattactcaatctgtttagaagcgtcgatcgtaggggtctgagccacatgggagcctaacttccacgcagattcttcctcgacctcaggagaccacctcaggagaccgggcgacattccctgtctctggcctttgcctctcatgagcgagacgacaaatgctattgtgcatccctacaccatctactccgtggcccctcgcttcgctgcccccgtcatcgttgtcccatcttcccccatagcaccgcctcaggcattgctgcctttgcatccaacatcccctcggcatcttgttcgtcatgtgagcgagctgctccatcgatagttgttgcctccaccttggccacatcgacgagcaaaggttcatttgtatgcatccttctcaccatggcaaagatatgtttttccctcgactgaggcagacacctccttctctcagtgactccccctcgtctcggcattgctttagcttccttgggatgtactttcatattgcaaatcggatttcatcagtgtgtggaaatctcccctgggtggaggttgggctgtgcacaggatcctcgaggggagggttctgctcctagggatatttgtcagttgttggttgttgggaaggtttggcatgaccctcttttctcaatcgaggtgttttt

SEQ ID NO: 12554 - DNA, 835 bp, Zea Mays
gtttgttgttcaagttcgagagggacatctaacgttagttcatgggtaaattattagatatggcgctcgtggaaggcgtgcacgtatgagggccgggaggagatagctcgatgatgcactgttgtgtacacaagtagctcgtgggggtgagtcagtagacatgagctagctgaggacaaagacttcactgttggcgtcagtagacaggagctagctgactacataccacagtggcacagtgctatgcgtacgtgttggggacttgatcgagatcagctcagcatgcagatgatgactggccgggattatattactggtacaatccaattgattaagctgtacacaggtagtagtagctgttagatcgagtatacgtacgtgaccaaataataatactaacattctctcgatctcaaataaagcagtacatgtgcaacaaaattcacatctctctgacacacacaaacgtagaggtagtaggtgactacagagagagcgacccagtggagcaataaagtgtaaaatattccatggattatggatgcatggccggccggccgggggtctattattttcttgcagttgcatgcagtagccagtagagtattgtgctgcatgctgtgatcgacgagtccaccacatgcatgcaccaataatgccggatcggatgccgtcggagtaaatgcgaagcacctgggtctggagcgcccgcagcgcagcgcagcgcgcacggacacgtaaataatgtcactgtgatccgtgccgatgcatgcaactggcctggcgagatcttcgagtggtcacgtgtggtgtggcatggcatggcatggcatgc

SEQ ID NO: 12555 - DNA, 642 bp, Zea Mays
gttcaaaaacctgatgtctcaaatgctattgaattctccactagaattgatgcagcagttggcgagtgcgatgtctattcaacagatgaccactccacagctgcaaataattccagcagctcaaccgtcggcttccaccgattgtaccaccattccaagctctgtcgcgtcaacgggaaataaggtcccttatccagttgatgacataacaaggccagtgacgtgcacactagttataagatatggtattaacaataatcgcatgaagaaagtaggaataggcattgcgatcccaagatgcaagtttcatggaagcgacataccagatgattattgcaaggtagaagtgacgacggtcgtccaaggatccgaggacgacatgctagacatccctaggcccgaaggaatcaagacacttggacaagccatcaaaaaattcatcatttggcctcgaagggatgtcgaattggttgatctgccaacgtcgtcgtcgtatcatctccaaccatctccgcctcgtcaaactttagtacctgtacatccatcatcacctctacaatcttctcatgctgctcctcatcctctttctaatccaccgtctccgccacaagcatcaacatttaggacaccaccaccttctcc

SEQ ID NO: 12556 - DNA, 496 bp, Zea Mays
acaggtgtacaatgtgaattgtcatcggtcaggttgcccacagagacagagaatgcacattaaccagctgaaaaacatctgcctctggctgataaatgtgacatagaagtgattcaagtaatcccaaatattatataattgacagcacacccagtcatttgtataataacattgataaattggtccccgtttctagcaaacggaaggtggtaaaccggttctgccataggagaatgaaagggagcacacgaagttaactatgggacctatataggcggcaatgcaaacgaagggagcactgcatatcaagcatcagtggtgtgtatcagtgcccaattcgatcccaaacaaacaaagggagggaggcactacatgccgatagggagttggtgatgtgattaatttggaatcagcaagcagttgtgcacgcatgcaaacactaaacaaacagatccacggcagggacagatggataaagcagctaaattagtatttt

SEQ ID NO: 12557 - DNA, 536 bp, Zea Mays
ctgaggcacttctttagttgtgacacgtggaatacattaggcacatcagatagattatcaggtagctcgagttgataggccatctctccaactcgcctaaaaactttgaatgatccaataaagcgaggggacaattttcccttgactttaaatctcctcattccacgaaggggtgacaccttggggtacacatgatcaccttcctcaacctccagtgatcttcttctattatcagcgtagctcttttgcctagtctgagctacccacaaattctcgtgaattatacggacttgttcttctgcctcttgaatcagttcaggcccaaagaactgtctttctccagtctgatcccagtatagaggagtcctgcacttttctcccatataaagcttcaaaaaggtgacatctttcagactgggcctgatagctattattatatgagaactcagcatatggtagacttttatcccaacttcctccatgctgaagggcacaagctctcaacatgtcttccaatacttgattagtcctttcag

SEQ ID NO: 12558 - DNA, 559 bp, Zea Mays
ggcgcagtggaggtcaggacgaagggacatgagagaaaatatcagaaccttttattattcatcttcctactttgtctagcgctgatcttcttccccaactctctcttgtacccggatcttttagaacattatagcatcttccttttagctgtgatttccctacttgctgtttccttcccaaactccatctatccagcacttgttgcttgagttatgctttgtctggttcagtgattgatcatgttctatcggtgagggttgctaacaagtggtatcagattcatcggtcctcggatcctcgttccatggcgtcttctccatccatcggcaccaacatcaccgtcacccaggcgctggatcatcaaacacgcgccctcctctcggcgttggacaagcgttttcaggctcgcgacagcaaatgggatttccgcgtcgccgccccggagtcccgcgtagcggattcgaagcgcgttacgttccttcggacaacggcggcgggggagaagacgctggacacgtcgttcgtgcgcgaggacagaggcaaggcgccggtgatgtc

SEQ ID NO: 12559 - DNA, 623 bp, Zea Mays
cagttgccttggccgacagcacacgcgtgctggcactatgtgccaggcaatggcaagcagtacacgcgctggagtaccagcagctggtcaagtggatcatgctcataccgcgtggtggccgtctccggagcagcccgcggaggggatctcggccggccaagactgggtatagcagcggcaggcctatgaaaccgccgcctcctgcagatactagactaggaggctgctgggcgtcgacgaaggtgaagtcgtccactgtttcagattcggagtagaggacgactggtgtttccttaccttcgaagtggagcgaagggcggcagagcggatggtggcggcgcagaccatggaggccgcctcggatccgctcgtgtccctccgaccctccccctcgatgctggcggctcagaccgtggagaccatggaggcagagcgaatggtggcggcgcagaccgtggaggtcaccttggaccgtagagaccgcgacggggaaacgtgtccggccttaggcatccaggaatatttccccgcgtggatgggccgggtgggggagcgttggcccggtgagttgtcttccaaacgagacgagaaatttccccggagcccaatctccacgtgggctg

SEQ ID NO: 12560 - DNA, 301 bp, Zea Mays
caacgaagtgccttttataaatacattcgaaataaaattccttcatctctggatcagctaggggatcgtacggctccggaggcggggatagttcagttgaagtaggtaaacagattagttcgaagccacaaagcaagtactgaagctaaataatcaaagaataatatcaatacgcctttcgcgttctgcagcttctttagctcgctttgcttctgtccggacattgtgggcgtctttttcactcttttttataatctcatgggccagctctcggccaccattcacccagacatcattataa

SEQ ID NO: 12561 - DNA, 659 bp, Zea Mays
cgtcttcgccgagtgtcatgcttggatcaggatgccggtccttctgctcctgctgttgaggaagtgccagtttttgctgaagctgatcccaatgggtgtgacccggctgatgctgatcccaatgggtgtgaccttgatgatgctgaacccaatgggtgtaatctggccacagctgatcccaatgggtgtaccgtccgcattgttgatgaagatgaggaagaggaggatgaaatccctctaattcggaagaacagccggcgctacatagccagcggggaaagtagtggtgttccttctccagctttgtctgccctcattggtctgcaagaattgtctctggcaaactttgatcagactcttgaagacatggtcccagaagatctgttgtcagagccagcagatggtggaatgatggaagtttgcgctgatgtgcctgatgccgggttggagttatcccgagcggcgtctcgtgcctcatcgaccttggagcgcggtcttaagggtcaggaggctggtctggattgctctgttcccatggaagtggttgaaggtccttcagccttagaggtggctgttacagagagctcgaccctcaaggatggcgctagcgcttacccagcccccgagggtgtcgccggggatgatccggctcggatggg

SEQ ID NO: 12562 - DNA, 569 bp, Zea Mays
ctaatctcgagcttccattttctgatgtgcggccaccgattatcttctcccccaaccgagctggacgacagcgccttgtcccccaaccgcggcggcccacaccgacgagatccccacacgacgcacagacgatcctatgcggcatagaacactactggaactaattgaagtcacgatgaatgtaagggagggcttattacctttgtttgggatggtggctgccctaccacgtggtttcacggttctgcgtcagctcctcaactcctgtgagcaattcacaatgctccgatgatccctgcgcccgctcgctagcacaaacacggtccaagagtgtctgcaacctcgatcgaaccctggtcaagcctttggcgatggcgcatccgaaggttgatggtggcgacgcttcctccctctctggacacaccctcacgacggcggttggtttacaggggcgatagggagagggattcctaggtctacggttttatagccctaggaagtcgatcacatatcggtcaacaacaaccaagccgacagccaacatcgatgtccgtgccacgagcgcggtg

SEQ ID NO: 12563 - DNA, 799 bp, Zea Mays
gtccataagaccttgacatacttaattgatctcttcctcaaaacacgctccgaggattccaagatacgcaccggacgacactccagagtcagatcctgttgcacagcaattggttccatttcgatctgatgatctaggtcccgcaagaacttcctcaacatagagacatgaaatactgggtgtaccccagccatggaatccggcaattgcaggcgataagccaaattgcccacccgggccaagatagtgaacggtccaatgtatctcgggctaagctttccggagataccgaatcgaacaactcctttagtaggtgataccctgagaaggacttggtcacccactgcaaattccaaattccgcctcctcacattagcataactcttctaacggctctgagcggccaaaatattctgacgaatttcccgaaccttctcagaagtttgctaaacccaatcaggaccaaccagggatctctctcctaaagtctcccagcacagaggggagatacaccgcctaccatataaagcctcaaatggtgccatcttgatgctagcctagtagctgttgttataagcaaactctgccaatgcaagatgatcctcccagctacccttccatgacagaacacaagcacgcaacatatcttccaaggtttggatcgttcactctaactgaccatccgtctgagggtggaaagcgacactaagtgaaagcttgatacccaatgcactgtgaagactctcctagaatttggatacaaatttggagtcttgatcagaaacaatggacataggca

SEQ ID NO: 12564 - DNA, 453 bp, Zea Mays
cttgatatttatttttctatatacccccatgaacctgatcagatatgaagtggatacagatgcatttgtctctctattggctctacaaccctgtaaacaaattgcacctgttcctatcattgtcgaggtatatgtacgtcaacaatctataacatggattttatcaacatttaggccttatgcttatattttataccaatgtaggcttccaatgcaaccacttgtgaacttctgaaatcaatcactggcttaaatgtgcaacctgtggagatggttgcttctaagttatttgtgcagtgctctaggcaaaaggaccttctgaaaatctacaagcacttgcttaatcagcacagtaatgttcttattttctgccatgatatttatgaaaaaacaatttctatattggtgcatttccgagcaaaactgtgttacccaggtctttcacgcttgaat

SEQ ID NO: 12565 - DNA, 591 bp, Zea Mays
agacccctgtagccagtcccgagccctcaggttcctggtcttcttgtaccgtcctctcgacgaccagcaccatgctcaccgctttcgcagccgtcgcgatgtataaatacaacagctccctaggctctggggctaccagtattggtagggacaccaggtgctgcttcaactcttggaaggcttgttctgcctcttcggtccaagagaatggaccggacttccgcaacagcttgaagaagggcagcgctctctcagtcagccttgagatgaagcggctgagggcggctaatgaccccgtaagcttctggacgtccttgatgcgggccagaggcctcattgcctcaatcgccttgattttctccgggtttgcttcaatgccccggtacaaaaccaggaaccccagcaacttccctgcggagacaccaaagacgcacttgtttgggttcagctttgtgtgggttgcacgtagcctgtcgaagaccagggtcaagtattccactagggtcgaccctctcttggtcttgactacgatgtcatcgacgtatacttccaccttgtccctgatcaggtccccgaaagtcttactcattg

SEQ ID NO: 12566 - DNA, 837 bp, Zea Mays
gtccacgacgtcgcacgacggagaaccgagctccggcgagcatacaccggccggatcactcaactaccggtgctcccgtgtggcagacaccaaattgaacccttaacaaacatttcccctcgcttaattgctggatttgagctctacatcaccctgtccatggtgacagcgggcacaatggacgacatgaagtgttcccgatgatctaaggggtcctagcttaatcggctgggtcggggagcatcagggacagataaggatactgaaacgaaagagcagggggcatgagcggacctggagcacgctgaccacgatgaggtcacaaggcgcggtgtttcggaccgaattgggggaaatccgaaattggggctcgctggtgagcaattgaaggcacggtttggtggcttgggtgcttgactaccttatggacccaacaacacgctcaatttataggctccgggggcggtggtgcgtgaattggagttggcgcggtggcagccggagaggaaagaggttactggcgctaaaaattcgtggcattcaccgtggcaagctcaccggcgatgaatggatgggttatggtgactcactgcgacatggtaaggctttgaggcacgcagctgggtcggataacagagaacttcggtgatgccagcgcgatcaaccgcggcgggacacgacggccggtgagaacagtggctggaggttatctacagcgcgatatttcttaccccttcttcgttatccaccagcgccggacccgaatcaccgcggcggcacgaatccggacgcacgatcaccggcggtgagcttctctgcgctagcgttctgatccgg

SEQ ID NO: 12567 - DNA, 419 bp, Zea Mays
gggggatttggtgggttctcgccgccggcgggcgttttgtgtgaggcacgtagcgcgctggccgttgattcgatcaggcagggcgtagattagaccgaagggtatcgtttcgtaaaatagaatctcggtcgttggatggtcgacgtgtgggcgagatcgggtcgtgcacataattgatcgcagcccttgatcacggatccgacgaaccagatcacgtaccgattcattaaaggctagatctaatcctaagcgttgaactcagatccaacggtaagaaaccctagataccccttcggcccggtaaaactgcaaataagccctcgggaagctcagaaaccaacccgccgtccactcgggttgttcactgagtctgggaaagtttgtagtttagcccctggcttttagtttatttacgcgcg

SEQ ID NO: 12568 - DNA, 392 bp, Zea Mays
cgtgaaatgcttctgtgtcggccaattctcctaattgtgctaagaactggcatatgtgttcgcgcgtgttttttccttggtcacctgaaaattttgtgaattcgggtatcctggttccctgggggtatgggtggtgatcaaatcggctatcataaggttttcgatatgattgcccccaggtaccatgcttactccgagcttatcctggaacgccccggctatttcatgcctcgctatatcgatggcagccggtgcgagaccaccggctctctggtcaaacataggtggtgttggctggatattagcgtgttgtcttccccccactggtttgagctatgtggtgcattgccatttgccctatatggctcataggattgatcgttcctttccgg

SEQ ID NO: 12569 - DNA, 491 bp, Zea Mays
ccgatgcgtggtgtcaaaaggttccaaatgaaaggaaagctagaaccgagattcgtcggcccctatcccatcattggtagagtgggacccgcagcataccgcctcgaattaccagaatccatgtcagatatccataatgtgtttcatgtgtcccaactccgtaagtgcctgcaagtacaagagaaccacatcgaggcagagacaatctagattcaaaaagatctccagtaccgggaaaagccaataaagattcttgactcagcagtccgaaagacccgcaactcagaagtaagactctgtaaagttcagtggagcagagaaggagaagaggaagctacctgggaaagcgaggactctttgaggagggaatacccttaccttttctcgaaccccgtctaaatcttgagggcaagattcctttaagtggggtaggtttgtaacatcccaaaaattcaacccgaggtttggaaccctaatcccccctatttatc

SEQ ID NO: 12570 - DNA, 374 bp, Zea Mays
aatgcctggaagctctgtcggaaacacgtcagcaaagtcacacaccactcggatgtcctgcacccgcaaggcagcctcaccctccaccaccatggagaaaaagattcccgacttccttgaccagcgatccggaagcaattgcgccaacaaggataacatgaacttaggggaacttcccaagaataccacctccctacccgacggcgcctgcaataacactgtcttccaaaaataggatataactgcgcgatactgggataaccaatccatacccaagataacatcgaatgcccccaaggaaatcacaaccagattggccgaaaagacctcatcagcaagaatgacggaacacccctgacaaactgaacagctac

SEQ ID NO: 12571 - DNA, 927 bp, Zea Mays
tgccgtccattgtgggggacataaccggaatatatacccgaccttgggtacctttttcaccccttgaatacccgagcagtacccctaggagccaccatcaccgagagaagcgagcatgcgtaggtagcgccgccgggcctccgccgacgttgatccccgcctccaccgtctttcggagtctgttgggtggtcagggtcgttcgattgggtgtgctgatagagtacggggaagtctcaaggcgctcgaggtcaagattaaacactaatcgctcgtcggattcgggtggatacggcgaacctgcgctgtgccgcggataactcctctcggcctctcaatcaccggtaaattctaccttcgtctcttcgccctacttcgtcctgcatcttgcacctgtccgttcgtggttgggtgcacccatggcgcatatgcgcaatgccggtgagttctcggggcagtgccctatttcttccgccgtggcgcgtgactggagagcagtgagaagggaggtgagtggatcgtcgatcctgggatgtgcggtggagattcgatctggcgtatctgttcgcataatggattcagtgctattggatcggatatcagcggatagaaacgtatcgtgtcgtgttgaaaccttgatcgtagatctctaatccgacggctagatctgtgtactagtttggtttatagagtgctctaatcggggccattgaagcagattgaacggctcctggcgcgtgccgcttcatgaaactcgggatcgaatcgggatcgaatcctaatcgtggaaccttgattagacggtcaggatttcccgatactcgttcggcatggtggttttacataagagcacctacaattttgacttatcaacccgcagtccactcttgttgtagaataattatagccaggtcctatttttgatactt

SEQ ID NO: 12572 - DNA, 998 bp, Zea Mays
gggtggtgcaggtttcgtacctccgatgaggtcctaggccctctcatctatggtgatgtagaggtctgcctctcgaaacagttattctgaggtggtgggcgctttctgtagtatggcacggacaaaggccaagtcattggatccccggtagaaatcttcaatcaccgctgcctcggcgacctcggggatgcggttcctcatggtctgaaacctcttgaggtatcaccagagtgtttcatcgccctggtgcctgatggatttgaggtctcatggctacgccggtttgttagagagggactagaagttggcgatgaaacgctgactaaagtcactccaatcgtcgatgcagtgtcatggcagatgtcatagccactgcagtgcgtcttgtcctagaacgatgtgcaaatacgctatcattacgtcttccatcaccccggcggcccgagcaccggtcgtgtagacgaccaaccagccccccgggtcctgcttgggctcgtacttgtcgacgttggagactttgaagttgggggccactggatggcccgaagacgcggagtaagcgcggagaccccgcatgtgtcttcctgtcagcgtttgtgaggtcagtcccggggaggggagctggtgacgtgtcgtctcgaccgtccccgggtcgggccactgtcaaggccgcagccgactcaactcaggtggcgcaacttcgagccgggacgccgtggtcttggtcatactcctctcagcgccttgtctcacttttgtgtcgtcggtcgcatgaaacgttgatggagctccacgcatctcgtcggctgttgatggtgtggcgtaggtcgctcgggggatgagcgatgggcagaaggtgattagctgctcgagtaagcagccaccggtagccttctgtgtctggagttcgtgagaggccatcagctatctgggccagcacccctccaacttcactcggcatgttcattgcacgagcgaagtcgggatacaggtttcga

SEQ ID NO: 12573 - DNA, 557 bp, Zea Mays
cgcggaggtcccgggtcgtattcggaggtctggcactctctcacgggggtccggatccactaatgatatcacggtatatgttaccttctctggtcacatggtggccccggagtcgcccacgtggtggggtcgggcgctgtttaccacgccttcttactatggtaaggggtacccttgttccagggtaccgacagtggcccccgggcccgcctcaggggaggttacaagcctgtaggtgggggaaaaagcctggttgacgtgccatttttgggcactcgctgatgtagccgtcgccaacccgccttcagtcatgccgcctgccatgtctgtccccacagctagcaggtacgtgacccttgctcccggtagtttcgtcgggccgcgcgtggggcgtcttattgccgtcgcctaaaaatatcctctagcggcccctaggcgacgtgcggtcgtgcatgacggtttgcttccggggggacggtccgtcttctacgcactcggaggctggttctccaggtgcgtgacatgtggacctgggcccccatgtcggggactgggtc

SEQ ID NO: 12574 - DNA, 441 bp, Zea Mays
tggagatgagtttcgtaggacttatcttgatttgaagttctgtccgagagatagataaatcccaattaaaactcagaatgtaagaaaggctccccctatgtgtgtgcaggattatttgaagctgaagatataacacacataatagatcggagttttgatggagaccttcctacagtcatggttatcgagtcgaacaagaggtgatatgtagagtaagcgcagtaattataatcactcctcgataaaccatacatagagtaatttgaactaaacatagttcaatccacataatattacaaataattgtccacaagcatgagacatagagttcaaagttcaaatagtagtagctagtaccaagtgcataagacataaaataaagcatgcgacataaaatggtaaacatgcacatgcacgatctcaatgtccacatagaccaac

SEQ ID NO: 12575 - DNA, 733 bp, Zea Mays
taaatgcttcctgttgttctgccccccaagtgaattcggcatatttttaagtcggagaataggagtgaaggcatcaatcttctcggctaggttagaaataaacattcgtaaataatttaccttgctgagaaatttctgcatttcaaacttacaggtcggaggtcccacattctgaatgtatttaattcggtcaggctctatctctatatcatgttcattaatggtaaattttaagaacttaccagccgacactccaaaagcacatttacgttgattcatttttagaccgtaccgacgtattttatcaaaggctttgcgtaaatcaactatatgagaactaaactcaaccgatttgactacaatatcatcgatgtaaacttccacaacgttatccaacagctcgtgaaagatcaaattcatagccctttgataagtagcaccagcattcttcagaccaaatgtcatgacaacccactcaaataaatcaataaagcctggacatataaaggttgttttagacgcatcttcttcggccataaaaatctgattatatacggcattaccatcaagaaagctaataattctattttctgacgcattattaatgaaaatatcggctatggcataggatattcatccttaagggttactctatttaaattgcggaaatcaatacacactatgagcttacctgattcttttttcttcaccggcacaatattggagacccact

SEQ ID NO: 12576 - DNA, 608 bp, Zea Mays
gtccggtgtgcccatctcgcgttttaaaaaatcgcccccagcccgaccgagccaggggctctgtctcatttctctgccagcacccgcgtcctcaagctctctggcggttcccagcgcccgccgtcgacctcttcactccggcggcctccatctccggcggcctccatctccggcgacctgcgcaccccttctgctccccctcggtgagcagtcctctgtcctccctctctctttctctcttctctgtcagtgaggcagtaatcaccacccttttgcaaatcttctaatttctgtgaaatccgatgagtccagttggtgaaatgagttcatgtatctctagtgtgtatccctacctgtttttagctccttcgggagggcattcccacctcaaatggccatttccctaaaaccctaaatccccgcacaccaagtgttcgatgaaatgcccaaaccagccaaacttgctccaattgaacccaaatttttcaggcaccttcaccacacttccagtaacctacttgccaaatttcacgccaatccgagaccccaggcttaaatttaaccaaaattctcgttttgcacgatcgtttccgagccgagtgcccaaa

SEQ ID NO: 12577 - DNA, 643 bp, Zea Mays
caaaaccatgaagtgcgaaggcgacaggtcagtcagccgcggggacaggcgtgacagttggcgtgaccgaaggtggaccagcggtaattacaacagcgagcgcacaaaagcagcgagccaatcgccaatcaaactttggccccacatgcaggctcattccctcccctgaggcgggcccgggggccactgtcggtaccctgaatcaggggtagcccttactacagtatgaaggcacggtgcatgtgcagctatctctggccgcatgatgaacaacacccgagtccaccacatgagcggtcccaaggacgccacatgaccagaagaggtgatatactccaggatgccatcagtgcatccagacctccacgagagagcaccggacccctgtacactcaacccggacctccgagtatggtccaggactcccaagtgagcaagccagaccccttggatgaggcccggacccctctgagtgaggtccaggccacccacagcaaggtcccggggtagggaataccctggcctaggtcaagggcaggtgaaggtccagtacagacacgtgcccaggctttatccagtgcgcttccactccccgctcaggcggaggcccgatggtgccatgtggactatcgcccgtgacgta

SEQ ID NO: 12578 - DNA, 454 bp, Zea Mays
cgagcgccatattgtccgtagtgtatacggtattgatatcctacgctgcttcctcagtaacgtgcgagtgatgatgagcatagtgtatgccgcagcactggcgtactgcctgccatcggaatggacaggcacgccgcctgcaggatggcctggtcgccgcctatcagcggagtggaaagggcacattaaatgctgaggcgacacatcgtctgccagcggagtggtagggcttattaaatgtcgaggcgacacatcacctgccagaggaatagacaggcgacgtgctttatccgcaataaatgtcatgccgcgcggcccaggggccttacgtcaggctccgcccgctggcttacgtcatgggcagtaggccatgtggtagcatcgggacaccgcctgagcgaggagaagaagcgtacatggtatggtccggacacgtgtcggctccgaacccctg

SEQ ID NO: 12579 - DNA, 1267 bp, Zea Mays
caaagttgtatgtgcaggtggtgccgcccccggatctaaacaggaacactgagtagttcatgtaccccgaggtctggaccgcctacatcatcttcttttgctggatcctcgccctctccgtctttgggtgcgcccccaacattggcatggacgctcgtcaaccttggccactttgcagtacgtacaacggcattctctcgctccttgcttgtcttactgtctgccatgttacttgctccccttgctatcgttggttcgttcgtgtgcagaggctggaatggggtttcagctgttcctattaatgttagcatgaggagcatcttactgaagcggctccatgtttggtcgtctacatcatgagggattgagggctaagttctgatgcttgtgttggatgggattacatacctttacacttacatgcatttcacctattttggcacgttaataactttgggatttctaaactattaaacattaattcgaggttatgcatatgaagataatttaggtacatgttttcttaggccaattacaaacaaataatgttggggtgcataatagtgactttatcagtagtcaggtctgttcgcattgtctcaacagctaatagttccacaaatgatttggcaggaacaaagtgtgtattgccatcctatggtcctttcaagtttcagctattgatctttttgtgttaggtaccttagttcagacctcagcatgatccaccctcctgacgggactcaggaagatttgtgatgacactactgacatagataacaaaagtgcccatgaaacgtgcatgaaactatgatatatattctaccaatgttggacaattacagaaaaaaatggtaaatcaataaatcacagcagtataggtagcaaattatccaatcaagtcttgtcacatactactaacttagtatggtactgagttgaacaggatggaaacataacgaatactatctacaaggttcaaagcacacatatgcatcatactttatacaggttactctgaactctgaagtagtctgtattcacggatcagttgccaaatttagttgaatgaaacactggggtcgggtccaaaggccacttgatcttggtggtttaggaattttggacctggaaattttgggttgggctctaagaatgaggtgactatggttaaaaaagatccaacctgatcagccatgggctgctctagatttacaggttcactctaattctatgtccatgttctgcatttcagcttattctgtgt

SEQ ID NO: 12580 - DNA, 371 bp, Zea Mays
tcgaagtttggggcttggggtcactagatcgtcgatctccggcaaagctccgccgttgggagggtttgcgccaccgtgggtggccagtggattggggaagagggcgcatagctgttggatggttggtggagggcccagatgagatagaggtaatggatcgacctggggttgggttacccgtctgatctggatcggaggggtgcgaatgggttgattttcattaaaatcaggctgttggtcttaaatctggtgaccgatgttgcatatcgattcacaccctgggtgatctaatcgggactgttcataatcgatcgtgcaattgtggtatacgcgtacctcttcttcacggccgttttacagacgagccctca

SEQ ID NO: 12581 - DNA, 323 bp, Zea Mays
ccggtatctaccctcagccatccaatgacctcccaatggtctggatctaattgagtgaaatggggtaccttacgtccaatctgaggccttcgtttcgatccaacgctccccagatcatcttcctcaacacgccctgcgctaccgcgacattcactgcacacgcttcttcatcgcgacggcggatgccagagctccctttcattgatgggcgtgaacgcgaacaagatctggacgccacaactcgcccagccaaagcgcccgcgccacccggagattaagcggtgcaggggtaccggcgcatagaccacactctctctttcttt

SEQ ID NO: 12582 - DNA, 515 bp, Zea Mays
gggcgggtctatgagcatcacaggcacatgagaacacttaaacgagggagcagaaggtttgaactgacctgaattgcactagccatggcgagggtgttcttgcggtgggttagagcagatttgggcgaaattcgaaattcaagctctcggttgcaagattggaggcaatgctgggaggtgtggtgcgtgatgatcttgcggagcttacggagggctcaatttatactaagcgagagcggtggccgggaattggagcgatgacgcgcggcggtcggaggagggaaagttcactggcgcgtgtgattggtggcaaaccccatggcaaggccttaggtaatagaaggatggtttgttgcgatcgactgagacgtggtaagatggttgacggcgtggcataactgcgaagaacggcggcacgccggtgatggacatgcgaccacgtcaccggtaagtggatgagcgacagagtggctactgtgctccaagatcatccacggtgagatcttttctccaaa

SEQ ID NO: 12583 - DNA, 770 bp, Zea Mays
gccgatggcgtcaaaaactctgttcatcctcttttttccccgacctccgaaggctgtagatagcgcattatcttctgccttggaataagctccaagcagctcatcacttgtaacttcgatgcatttcagctagtcatcgtttggttcatcgaacttatccccatacctgaatgtatacttcagtcggaccagatcaccttcgctagacttggtgatggtctccttcagcatttcccagctctctacaagcggccatactctgaatgttatatgctcttgaattaaatctcttgtaccaatgaagaagcagtcagtaccaaatgccttctgacatgcttcggcggctttatcaatttcaaccttcggctttcggagaccgaagcaagaccatatggggcgcatgataacctccttgatgtcctccctcgctgtcaagtcatttttcacatagaaccattcttccatccaagttctgggacatctcttccaaaatgttggcactaggtggcttgcgttgggacgggcgataaatccataacaaccgaagttgttgtgatactgttctttacccatggcctttgtttcatacagaagttcgtgcatgctgtagaaacacttcgcgcttggctctatcccttggcttcttactgcccagacgaagactcccatcctcaatacggcttcgggggtcatccgatgaaggaagatttggtaggttttcagcacttcaactacaaacctgcttagtgggatccgaagcccaactttga

SEQ ID NO: 12584 - DNA, 746 bp, Zea Mays
aaaaccctttctcttcctcaccacaccagcacaaccaccacaacacccctcgcactacgcgcgacgccgctgcctatagcgctggtgagacgagtacagaggagcagcacagggatggcggcggcctccaggatgagcaggaggacccgagcttcctcaaaccaccacagcacccctcgcactacgggcaccgccaccgctgtcgcttccagtgtcggtaagacgagtagggaggggcaatgcagggatggacggtggcctggacgacgagttggaagacgcgggcttcctcgacgaggtcatcgcctcccgcaaccctaaccccgctcccgctcccatccccatgtttgattccttcgtcattgtccccgtctcagagcctcctatcttcccaccgattcgatctcccacctccccgtcgcttcgtagccccgcttcacgatcagcttctcccctccgctaatggaatgagtatttttaccggttaaagtttggttaatgaaggtaaagttcttgtgaatttggaggcagtgactacatgtccataattgtagctttcctgtgatctgaatactcgcgacaatttcaccttgcaggaatagcaaatggtgttgtgcagtttcaagacttaggtgtccatggattggagaaatttccattaagatgacccatcaacatcctacattgcctggtgatcacacctgtgtcacctgtatgaatgttggtgggttcgacttgcaatgttg

SEQ ID NO: 12585 - DNA, 331 bp, Zea Mays
ccgggatacagttaatggtgggtgtgcacgggtccactaaatttacatacgtatttcatgatatcaatttggttcggtctgttccagtcatgatagtttcatagtaataatatcatttgtatgttaacaacattaacctgtcacaacgcatgctttacaagttatgtaattacttgttaaccaatagtaatctaatgaagactagcttatgatatggagctacgctttgtgagcatacatgagtgtagttaggccacctcgaatgttttatactggtcagatataaatgtgtcgtcaagctagaaattctttcaagtagcacgtgcggttt

SEQ ID NO: 12586 - DNA, 388 bp, Zea Mays
ggggaaactgtcggtagtgggggagaggagaagcggagcgttgctggtgctccaatcaacagggaaacgagcgggcgggtctcagtggcacgagctggcgaacaacggcgtgggagctcgagcggcacgcacgagccagtcggaacagaggagctgcacaaaggttgaagaagagctaacatcaaggccccacaggtaagagagactgaaggaggagagagtggagtggggtggctgggattttcgcggcgatggctccacacgcaaggagagttggcagtgcgtacatgtaacatggctatagcttgaaaaagctcttacaactagaccccacgtgtaagtgagtgaggaagaaaaaagacgggtggtgtacggttgggctattttg

SEQ ID NO: 12587 - DNA, 603 bp, Zea Mays
tggttcaccagctgctcgcccatgaaaaccagctaaccccgaccatgatcaccactagatttatagacgggcttagagatgaaattaaatctgatgttgtgattcaacgtcctcccgacctcgatactgcttgctctctcgccttgttacgcgaggatgtgctgctgcacatgggaaggtgcgatggaagaaagatggagcatggtgcaatcctgaagccaaatctgaagccccattactcctccggtgtaccctcgattgtgaccgctaccaaggtctataactcttctgaagaaaggcgaggttgagtcaacagtggcagtcgagatgaggataacaagttgacagccttgaaagcatacaggcgggcaaaggggctgtgcttcaaatgtggggagcgttggtgttacgcccataagtgctccaacagcgtaccattacacctagtcgaagaaatttgggtaatggtagtggccaatgaggatgagaacctggttacagaggatggagagtcagcagagcaaggggtcgatgaaagcatcgtggctatttcggtggcagcagtcagtggtagtgagggtaacctaaccattcgcttgtggg

SEQ ID NO: 12588 - DNA, 1092 bp, Zea Mays
aaaagagaccaaagtaatatccttgaaggagaaggtagccgaggccaaaagggagaaagaggaagcagtaaaagttcgtaacgttgatatgacaaagatgaaagaacaaaacaaatccataaatgaactttgaaccagtcttgaggctacggaagaaaacgttactagcaaagacaaagaaaattagaaattattggaaactttaaactagctttgggataactcctttgccattgccttcttgtgttgtgatgttatgaagaaaatcttctcctcggttggtgcagtctcaatggcaatttcacatgccaacagggacaccgacagagcgcttggttggatagaaaaggagttgggcgaagtcgaagcaataatcaatgcccgcagtgattattgcgaaatgattgggtcacacggcatggattcggtgctctagaaggttgtctgtaatcatgctaaagtcgtaggagaagctaacttcggcatagccgtagaagatattaaggctcctttgaagagcgtactcggcgttgcgaaaagatttctctacgagttgtgggacataggtggccgacactagctgccttagaagacgaagaattactttactatatattgaagcaggacccttccgtgctcattgaaagtgtccacgtttcccaaaaaaatcagccgtccgatggcctgcaacaatgcaaatccaaccatcaaaagcaagtctgtttccttcactctaccctccgagtgctcttttctttgcagccgctaccagagccttctggaccggggatgaatcgaccggagagaatgagagaagtcaggggacgaatcgaccggagagaatgagagaagtcaggggaggaatcgtctccgtcgtgccgccatcttctccactaagttgacgccggtcgctagtcgccgctctcgacgtcccccctcctccgtcgtccactgcccttggcactacaccagtgtcgtccgccgcatcatcgttcctgcttcgccgcatactcgccgcgccgtcgccgacaaggaccatccgggctgaggcctgctaaaatctccaccacttctctgactacttcgtcatct

SEQ ID NO: 12589 - DNA, 2054 bp, Zea Mays
cgacgtacgtactctgggtcgacgtatcctggtgtgccaacaagagtgttcgtggacgcataggtgtcgcggtctagagcctttgacatgccgaaatcagcaaccttggcctccagtttcgcgttcagtaggatgttgctggtcttcacgtccctgtgaatcagaggcgggttgcagcccctgtgcagatactctagccctacatgccatcactcaagccaaataacacctttaacaacacgagttaagatgacttgttactgtagatgcaatctagtgtgtatgattttgtataccttgcgctgattccaatgcgattcgaagcctctgcccccaagtcaagcgttttcctatatacagaagaacgacatatatttagcatgcatgagaaattaattcagatcaacagaagttgtaaacagctaaacagtatacacgtacacacctgcaatgtgctcctgcagggatccttctgacatgtactcgtagacaagcgccatgtacaccccatctttgcagtagccgaccatggagacaaggttcttgtgatggatccgtgtcaagatctgtgcctggacttggagaggtggccggccggcccgccagagaggtcatgcatgcatggcgactagtcaattaatttccatgcgtgcgtgtgattgtgaaagagacggctataccgtccgtacctccgtgaggaactccttggcaccctgattggacgactgagacctcatcttcaccgccacctgagtgccatcctccaagaagccctcgtagacgtatccaaagccgccccggccaatgacacgcttgaagctgtcggtgatcatctctaggtcctcgtatgtgaaccggcggttctcaagccgcagcgagctaagtctgtgttcgtcggccgccattgaagcaaggctcgtcggagtcttgtcccggggcttcacagagacgtccgctagccctgaatgcaccggcggaccagtggttctcgctcgttcaggatggccgatggctggctagctaactagctagagagcgcggtcagtcgatgctttactactcacctcgcgtctttcgccgccgcagaagacaacacagcagtactgccaacgccaccacgatcagagccataggaacagcgacgtagtagatgactagcttgctctttccttgcggcgccgtctgacatgaatccccggcgttggtgcaaaggtctggattatcggcatagctacacgtacagagatgagagacagatcgatactgtcgtcgtcaggctggaaattaaaggcggtatcatatcatatcatgcatatatgtctgctagaatgaagaacaaaattatagaggataaagataacggacattaggtttaaggagccgtcttggattcttttgagaagactagagggtattggtccgctgagctgattccccgtcaaatctctggaaggtgtaacatgcattgatgtgagccgacgtgtgatgctgatgcatgcatattggttcatgaaatcgcaagatgcagaataatttgccgagttaatcagcagactttacagagttgtcagtgacggcagttgtgacagggagctagggattgagcccgtcaggttgttgtgtgacaaatccctgcaaatcaaaggacatgtcttatagctacttgagatcatgcactatatatatgcatgactaggaggttgcaataaaatttagctgctggcagatgaagaactccgaccccacacgtacgtacaaggattggacagccttgagatttgcgaaagcagatgatatgtcaccggtcagaccactgaaggacatgtttctgcaaaaaaaatatatatatactatataggattattatactggacgctacgctcttacgtacgtacgtagtacggagtaatgaccacttacagggcagtaatttttggaggatcagaaatggcatagctgcacgtcagtccatcccacctaaaagtcccagcaacgcacgggtctcccatccagttcttcttcacctgatacttcgccttgatagccttcatagc

SEQ ID NO: 12590 - DNA, 1349 bp, Zea Mays
gcgggctggctgaggtaaggacaattggccttgtagtgtccggcttcacggcagtggaaacaagtcctcacattggtcaactgacttccaccagactgctaggtgcggaagttactctgggtcttcataactggagctgactgagatggcttctgaaaagaaccggggtgcgccttaaatgagaaggcaccctggctcctttgtccagggtggggtggaaactgagtcttctgaaacttttctgcctgatggggcttcttgctctcaaaccgacgtttgcgctcactaagttctgccttcctatttctctcagtggtgataaccctgttaaccatggtattaaagtcactatgggtggtggcttcaaccagggttctgatttctgggttaagacccccaagaaaagcttcttgattcttatcgtcgtcattgatgtcctcaggtgcataacgtgacaactccgtgaacttatgcagatactcagttacggtcatgccaccctgacgaagcttcctgaactcatccttcttcaacttcatcacactgctggggatgtgctgctctctaaagatcctgacaaattcagcccataccatctcattggcattcccattgatctcccgatagctgtgccaccaagcaagggctggtccccttagttgctgcactgcaagcaagaccttgtctctgtcaaccgcatgaactacttcaaacttcatctctatttcacgcagccaatcatctgcctcaattggattgtctgatcctccaaacttgggtggctgcatgcggttgaaatctgcaatcttgctcccattgccattgtgatgcactgcaagtctattgttgccaaggtttccttgagcttgagctgtgagggttgtgacaagggcttgaaggagttggttctgctgctgcaacatggctgccagatcaatgggtgctggggcacggggaggcagtggcggtaggtgtccaattgctggtgcttcggcggctgcgttctgagcgcctaggtttccctggttgacatcttccccatcttccagagcattgagtccatggactcggctcgaacgacgagacatcttcgctctatgcgaaaagacaagattaggtgattctcctagtagcctactggggtatatttttataatatataataccacacaatgcacacaagcaattcattcaagcaccatacaagcattcattcgaacagggatacatggtacaacggattacaataacgtggctcaacttttaagggtcggccgaaacaacttgactactggttcctacggcacggtcttcgggatctttgtctttagcctcacggggtgacacgg

SEQ ID NO: 12591 - DNA, 448 bp, Zea Mays
caagaatctctaagacacagagcactatacactggactgtgggtttaattctaaaaacccgaggggctcattagaaaaatagacaccgcgaaggggtatcctcggatcctagccgtctgatgtaatgtgagcgacccagattaaatcccaagtcaatcgaacgaaatgcagtgcggactttcggattaagatctaacggtgtagatgtttatgtatcccgatctaatcgccaccactggatagcctacggtcgagatcagattgccgaagcggtatggccagactcaatcgcacccgtccgtcgtctatcccatggttctcaacccctctcagcactatccgctcctggccattcattctaagatccacgacagcaatattttcttcctccctgaggttacgccatggtcatataccggtaaggtccagcgaactgcgatcgggcggg

SEQ ID NO: 12592 - DNA, 627 bp, Zea Mays
agacttggggctctgtttaccacttccacttgtacagtacagacgtagcagactctagggagaaagaagaagcaaaagcatctcatcaggaagcaacatttccagttgatgggaggaagtgagggagaacaattatttctttctaagccttgcttagtgttcacctgcctcgctgaaccatttcctccaaatgagtacggaaaagacaaataccttgtcatacagtttgtctaatagcatgaaatacgtgcacctccacttcttcttgaacaggaggccacaaaacaccacccaaaggcccaccacaaatccaacaagtaaaccaagacccaagtccatcattcgatctgagcctgagccatcttcatgatctctgatgggatgttccacatctggtgtctgatgatctccggggcattgctttgggagtggatgcccacaaagatcaggattgccgatgtacatggaagttggatcatcactgctgagtgtatccagctgatgtccagagggtattctgcccgataaattgttgtaggacaagttcatataactcagcgaagttaaatttgataaatcccagggaatttcaccagaaaggtggttgttcgacaggtcaagagattc

SEQ ID NO: 12593 - DNA, 422 bp, Zea Mays
ttggctgctggatagtggatacttttggacttggcactttgtgttttggacttgccatatacttttgggcttttgcctgtggactgctagtttactaacactgatagtgcactagtgttgtagtggtactaatactaggctaccagcatactactctttgttgttgggcacttgggcgtactactctctgctgtttggcacatgactaaactgaatagttgatactgttagtctataagtaatagcgtgacatgttggcctcttgggcacttggtctgcaatttggttgacccgtgacatgctgtggaactaatatagtacattactacattttgatctttctactgggagaccgatcttacatcttacaatactataattttatgtgtgatgctcttgtttgcatatggattatgcatggc

SEQ ID NO: 12594 - DNA, 967 bp, Zea Mays
acatcaagggatggcgtctggaatggttcatcgtggagaatcatgggaattccctcccccacggtcagggagacagctggatgttcgcactcctagctggaccgagtcccccacagactaggaggtggctgaagcaggggctctgctagctgaagttggattgttgaaagagaggggtctgactacagaggctgtggttgctgactttgtcttcaagaatattcagccactgaaggatagggcatacccggcctatctctaccgaggcctagctgactcaacccgggtaaccaacagaagaattcctgctgtggacttggtgagccggctcgaaatgatactcagaggcaaggtatcaaatgttggcgcccctgttgcatactcggcctggaacctgcctccttccaaggcctttacccattttgtgtcaaatcctcctgctggtgatggcggtttgggccttagagtgcgaccctctgccgaagaagttagtgctttggttgcttcgcttgaagaaattcctgatgatgaacggcaggttcactttgaggtgcctttggatcccagtggtgcagagataagtgccatgcttgatatgttagctgaggattcttctgatgccgctcctgctgaaacattggtggtggtacccatccctaaggctgacaaagctttggacgctcagaagtctgtcaatgttcgtccaaaacgttctcgccgagctgatcaagcctcttttcctgctgagggggagaaaaagaagaagagacgtcttcgtcgggtgtctagcttagatcagggtgtcggtccttctgctcctgttgctgaggaagtgcccgtgcctgaatttactgaagctaatcccaattggtgtgactcgtctgacgctgaccccaatgggtgtgctgtccgtgttgttgatgaggatgatgaagaagaggacgaaatccctctgattcagaagaac

SEQ ID NO: 12595 - DNA, 1193 bp, Zea Mays
gatttagcttggaaggggtcattttacagaactcagcacccaatttcttgatgacgtcaagatgcatagagggaggggcgttttgagtgcagcatgagcaatttttcttgccaatcccagtgcaatttttgaagcccttggcctttgccctaagcctgacactccttctgactgtcgtgtcgactaagataggctgactttttctgggagttgtctcagactggggagggggttgaggcttagcaggggaatcctgactgggtggagggggaattctgattgaaatgatgtccatgctgggtgcgacgaatgccgagatagctccggacaaaaggaatttcctggcccaatcaaacgaatctggcctcattaaaaggcccatgaagaaagcagcccaaatctttggaacaaaaactgagccatcattgtcagggaacaaatcagcccaagaggaggaacgctttctggccaagaaatcttcaagcgcagggtcagggacggtttgatccaagtgtaacatgaggcccacattgatgttatcttcagtttgcatgtcgtcctgtccctcgacattatttccctccaaatttaagttggcaggagggaaagcaggcagggcgagaaccgcttcagccggcgccggggcttcctcctgctggagctggactccctgagggataatgatgtcgttaaaatagcccaccgaatcgtcagaagggagatcctcaagacctgaaagctggtagctgaactgctcttcttcattgttcgcagcgttaacattatttggtacaacctctggcacagggggttgagcctgctcaacaggccaagggtcccagccatcatcagcattggcagcaacattttcctcagcattgattccatcttcaggaggaatattgaggtcgaactgaaaatggaagttgggcatcggttgtcccataccaaaaaactcaaccgggagctggtgaccatcatgggggtatggaggcacggggtcctcatcctgaggttgggcgccaagcatgaactgttgcacaatgtcacattgaaccgtccaagagacaccctgaaaaccatcagccactgagaagacaatgaactgtggcacttcctgcaaagaagtcacccttgcgcggaccaacagcctagtagcattgttaggatcagggtcccacatgagaaccctt

SEQ ID NO: 12596 - DNA, 364 bp, Zea Mays
gctgcccgtgctctatgtataatttttggcatttcttcgatgaaccgtgccgcacaagattttattggcttcttgtcggctttattgctccattagttctgtagattttctcccttttggtggggtccaaagtatgttagattacatgactatcttttcattatggcaagaacaaggtttaggaagattaggagttttgtttcaatagaactacttgttttgtggtgctgtgaggtgaggcgtttgatcttcttatacattcatctagtgtggatgtttcaccattgacttaaaatgaattgttgaagttggtaaaggttgtgcttagtgcatattaccccttcataaaagagtgtttaagata

SEQ ID NO: 12597 - DNA, 696 bp, Zea Mays
cggggagattcctgatgatgaacggcaggtttattttgaagtgcctctgaaccctagtgatgccgacataaatgacatgcttgatctgttagctgaggattcattcgatgctgctcctgatggtacgttggcagtggtgccccttccagaggttgatacaactttggatgtcccgaaacctgtcagtactcgcccgaggcgccctagccgaaccagtcagcccgagccttctgctgatgagcaaaagaagaagagaagacgcctccggcgagtatccagctttgatgaggacgccggtaccttagctcctgctgctgaagaagtgcctgcaactggccttactgacactgatcccaatgggtgtgcccaaactgctgttgaacccaatgggtgtgctccatcttctgctgaccccaatgggggtgctgtttgcgttgttactgtggaagatgaggaggaagaaaatgaagctccattaactcggaaaaacagtcggcagttcatcgccagcggtggaagtagtggagttccttctcctgcattgtctgcccttattggtctgcaagagctgtccctggccaactttgatcaaactctagaggatatggtcccagaggacttgttgtcagagcctgtggatgatgatgcaactgaggcttgtgctgccgtgcctgatgctgggttgaggtcatcccg

SEQ ID NO: 12598 - DNA, 500 bp, Zea Mays
gctcaacgagcgatctccacaatgtctaccctatcggtgagggagatgacttcttcaacagcttttctttcgtataccattgtcagtaagatgtctatgctcatcctagtttcctaaatccgtaacctctattttcatacacatatcctcctcctttgtatccctactgaccatatgtggatgctacacctaccagtgaaaatcctaccaccaatgctcatcctccttccactaaagctcttacgataaatgctccttctactccaacctttcacttatccataccctcctctatatggatcatgtggtgctcctccttatatggtgttcattcgctcgctcccccattgatgctcctccctcatatgatgttcgtccttcattttgtccacctacatgtgcgatagtgcccttgaccagcgatagtgatgccgcttcaaaccattccggtactttggtgctccttaattccaataacgaaaggattggacgaaaatgaa

SEQ ID NO: 12599 - DNA, 373 bp, Zea Mays
aggtactgaggactcatctgcttatatactgttatcaaacatctatgctgcccagcggaagtggaatgatgttgagcgggtgagacatttgatgagactccgaggtgttagcaaagatctggggtgtagctgggttgagctctacaaccgagttcatgtgtttgttgttggggaacaacaacatcctgaagcggaaaatataaatgtagagttgataaggctagcgaagcatatgaaggacgaagagtgtttcctgtttgatgacgaaaaggatgaactaggagattctcatgaaggtgaacaaatggaattgatatcaacaacatattactgagttcgcaagaggtaaaaaagattattactccgattattt

SEQ ID NO: 12600 - DNA, 656 bp, Zea Mays
cgcggatttcgtgggtcgcgcggacctcgcgctcctccaactgattccgcctcaaatcggcgttgatttcggaatcagatcagtcgccgcgttataaaaagtgcgggctgcccccttagaccccaaaccatgccgggattttatggggacaccagtacatagaggatagggggagtggagtatggccgttgtcgacatcccgcgcatacaagcccacctagggtctggtggggagtcgcgggtgatcttgtgggtctgcctaagctatccatggccttcccgtgtgaagcaatccaccggagcaacaataatcgctcgccggagatagtgctccgccttgggccacggttcgtcgtggcctggctgctcggcgcatcgagggatgataatacacctcctatagcattcgccttggtgccctctgcgtgtggcaccagtcttcatgggggattcaatgcttgggtgggagatggcgatcctccggtggggcgccgccgttgtccgtgtgtgtaccgccgctctgttggtcgatggggagaagaacactatgatccgttggattgaaatcaacagtgtggattagatctccatgacacattgcataagtagatttatgccgtcaagatccgatccaagggcgggatactagtgctggc

SEQ ID NO: 12601 - DNA, 398 bp, Zea Mays
ggcaatgatgccgcccatgaggattaattcggttggtggcaaggtacaaacagataaaatatgcttaaataatggtggaaataagggggataggattccccagtgacttaatagtaatagacacccccgggatagatgttattctagggatgaactggttaatgaagtatgagacaaatgttagttgtgacaaggggaccgtaacattgaagtccccgtcaggagaagaggtagtggccgagctatggatgcctaaatcagcggagggagtctgtcaccagatttcagttgatagtaaggagcctaacccgctcgaggctatcaaggtcgtgtcagactttccggatgtgtttcccgaggagctaacgggcatgccacccgagagaaaggttgaattt

SEQ ID NO: 12602 - DNA, 416 bp, Zea Mays
tcgagatctaggcattgcaattcggcctgtcaggcactctgaatcagggcttcgatggtacagtgtaaagatccgatcgccagttctgataactcaccgctggcgacagtgcacccggatttgtgctcgccacagtgattcgtgctcggcgcagttggataacgcagaggggtaagaaatatcacgccgtggatgaattccggccactattctactcctgccgtcgtacccgctgagtcacagccgctttggataggctcgccggagttagccgcctcacaaccttgcgccacgtgcctcgatgctttaaccacgccgccgtgagtcatcttagcccatccgatgatcgtcggtgagcttgccacggtaaatgccaccaatcgcttgcgccattgcacccccttctctccgaccgc

SEQ ID NO: 12603 - DNA, 375 bp, Zea Mays
gacaggttgaggtaagaaagattatggcaatgagaagactttatccaaaatgtttaagtcctgattcatctcgagattcgttttggctgttatatccttccttgtcgatgttgatcttttcttctccggtcttggtctcattggtttgaggttagtgtatatcatcagggttggggagtgtggttaagatagatctggatgagatagactacataatgtaggtcaagttgttgggtatggccgagttgatctaagtcaccaatttaggctcgagtgaactaggagtatggccttatcttttgtacccgcattaagtaacttactcttgattagatcatcatagtttagataaaatctagattaggttgtgtgggg

SEQ ID NO: 12604 - DNA, 889 bp, Zea Mays
atttgcagaaaggccctgtctttttgaataatctgaagcgaggtcacagcactattccttgagtcgctgacagttatagttggacccctgatcttctaactcttcacactccgaagccctcgatgatggacggcgacgcgcagagcttccggcgagcttgcaccggctaggatacttaataccagggccctaacgtggccgacaccgaattctacccttggcgaccatttcccctccatcaatttcataaatccgagtcagactctccttgtccacgatgacggcggaaaccgagaacattttgatatgttcaagacaactcagggtagtctagcacaattggataggtttacgagtaacaggagacttaatggaggctagaacattaagcaatttggtatgtactaacccaaggaatgctagccatggaggggtcccttgcggcggtggaaaccgattccagggaattccggtgatctctgagggtggtggaccaaacagggtggctagtgactcgttggcttcacaactaagggacgaagagctgtgcttggttgatttggatgaagggggatgagagcatggtgaatttataggcctagtgagccaccgtggcggccatggtgataaccatcaccggacttagctggcgaccagcggtgacgtcgggcgctgccctttcttatgagtttgccacgtcccgtcgcgacagtaacgcggtcaaataggtgagggcgtggatgaatggagaggagcggcgccggtgaccaggcacggccggaaggatcagtggtcacgtggcggccggaattattaccctccaccgcggcgatcttacccggatcaggagtatcgtcgcgaggagatgctcgccgagcgcttaactgga

SEQ ID NO: 12605 - DNA, 763 bp, Zea Mays
gttacaaactgataacgtacatagttatcatgtcttcttaataagccatcagcccaaatagatatgagctgcgccacggaaactgatcctacatcacataatctgatactggtgtttagtaccacataggaaaattgatcctacatcacataaactaatcctggtgtttaataccacataggaaaactggtcctacatcacataaactgatcttggtgtttagtaccacataggaagggttgtttatacttgcgagcattatatttagttacaaaagggtaggatcgataacaaaaggtggtgcaatgcatacaatggttgaatctcagttagtttcgtgtggttgcatatatcattcctcgtcttttggtctgtggaatctttgattatgaatgatccttgtttgaacctattaaatgaaaggtaggattttaataatcttgtcaatcattatgtagtgaagtacaattatgcagtgtgtaaaaatatatgcacgtgcagttaacatgcttgatggatatgaggaacctatgtagaagcttacctctttggaggagattgaagaggaagctttctctttatctttatcagtgggagtttcctgcaagcgttaaatagcaatgggtgagcggtacatacatgtatttaaaaggtcactaaaatcacatgatgttggttgttgatatgtccttttatatataaatatgcaatataagaaatactccttccgtcccaaaacatagttctttctagctcatttttt

SEQ ID NO: 12606 - DNA, 529 bp, Zea Mays
ctcacaccgtggtgcctgtagtaggggtttataagcacaacgggagaggggaagtccccaagcccctaaagatgattgaggcaaatgccaatatctaagacaatgtggaggagtgagtgttcattggcgtgtgtgtcgatgtccctccctagagggatcactgcctatttatacacgaaggggagtgtccgtagtgatgtcgagtgctgtattcgaaggagggacgccctgacgtatacaagccgacgtgacgacgaactgtgttgttgattcgcgcctgttgatttctcgtagagagccgaggcaaagaccgaggggttgcccgtacgcccaagcccccgagggagaggccgcccatgccgttgttgtaacagcgccaggatatcagccaaaggctgcttacggggtgcatcattgtcctggcgcgtgatgacctcgagattctctgaatgcgtttgttagggggttaattcgggtgtccctaattattgctcccgacacatatgcttcttccattcttgtataaata

SEQ ID NO: 12607 - DNA, 534 bp, Zea Mays
gataaaatcggttagggagcgcttatcacttcaagtcgaaagactataaaatgtacatttcatgataataataattataaggcagacattcacccaagaaacatgtgcttctcatctcacgcatcgtcgccccttgaccaagggtttcctaagataagtcccatgatgccatggctcaatctcttgtagatttcatcaagacaatatgatgttgtcaccttacctagtagatcttggactaatcgttgtggttggcaagatctgctagttatcttgtgtagtatcaatttatttcatgctgagcttaatgttattagattgatcttgcatgaccaaacatgtatctcttgtacaattgctacaatccacaacatgagaatgcaacatgtgtatgtagcaactcgagagtttgatatgcatatggcatcttaccttacattctttagtcacattgtttattctggatgaactttttttgaggtccttatctatgtttgcttgcatgaccatcaatataccgactacaaatgttcc

SEQ ID NO: 12608 - DNA, 588 bp, Zea Mays
ggagcacgtcaacaaagcacagcacagcaagataattacgatttgtctagtcttggaggagtcgtccgaaaaaacgagaggcggccatacatcctcattattggttacatgtgtacgtaaatactacacgtccgtaccagctcgccgccataaatcactatctcgcgatcgagcttaactgccgggccctatggaaaggcagaaagctactctcttgtgcagcgacatgcatgcttgcatgaaggatgatgtgtggagtagtacaggacgtaaggagctttcgttggtttcttccatctcgatcccctgctaactagctagtggcgtacgtacgtacgtacgtagttttagactgtatagttgttgccctcttgtatcgagactagataggtgagggttcaggggtgccgggtgcgtggttcgctgattcttccgacgccttgaattagttaaaacaaagatctgatgattcgatcgcgtaagttcagagtggcagcttactatagcatatcatatatataaatgaccgttacctgctaggctgctagctagctgcctgtatacttccacccgctagccatgcaggtc

SEQ ID NO: 12609 - DNA, 581 bp, Zea Mays
gaaacgtgctacgaacggtgctcctctgtctgacacgatagtccttggtattccatgcaaacgcactatctggtcaatatagatttctgcatacttctccgccctgtgggtggtatgtactggcaagaaatgagttgtcttggttaacctatccataatgacccaaatagaatcatggtgtcgggatgtgttgggtaaacccacaataaaatccatgctgaggtcctcccatttccaagatggtatgggaaggggctataaggtacctgctaccttcaaatgactagccttgattctttggcaagtatcgcattcagatacatacttagcaatttccctcttcattctggtccaccaatacaaggatctgagatcatgatacatcttgttactgccggggtgcatggaaaatttggaaagatgagcttcatccaatattttcttcctgagttcagaattcttaggaacaaccaatcggtcttcaaaacatagaactcccttgccatcccgacaaaagcatttgtacttatccactttttgttcgagcatatccttgatgacttgaacacccttgtcaccca

SEQ ID NO: 12610 - DNA, 388 bp, Zea Mays
gggaggggattaccgtctggggcgctggattgtctcagcgccgacgatggagccgccgtgctgtgtcccagtttgtcgtggttgtgcgataggttgaagaacggatgtgggccattgatattaggaggagcggccatgattagacgttggggccagatcctatctctaccgttggatctgctaccgacgtgtatgattagatggtagggtaaccattcgatgcgtttagcgcgggacgctgatcaacggatcgacggtccaatacactcggtgttgttcggccctagatcctatagctaacgaccaccgttggagtccggtttgcttttaatcctcgtcgtacatcgcggatctgacggctctgggtcccgatactccttcggccgtg

SEQ ID NO: 12611 - DNA, 572 bp, Zea Mays
ctttgctatagaactcatgccttggtaccatgaagaattctgagataaatgagcctgaagttggactgtcagactgcttgaaatatgaaattcagattaactgtgggatggcatggagttagggctcgaatttaagcatgatccagtaagaatttggctaggggtgctataacaaagatgaatatggtttaatggtttacaactttgatgcagacagtcactctagttgttatacaaaaatcaaagaaattgttgcccaaagtttctccgtcagacttgtatcaagtaactgaaactgaacctgaagacaaaaatggtcacattgatatgggaccaatttgagcacgccataactttgaattcgttcggttttgacccaagaatcctatagtaattttgtagactgatgtttagtgaacaaattttattaagggaagttgctctgttcttaacaaaaatccagagataaagagggtagaaggtggtcggttcaggcgaactctgaagatcctgtgcactgaaatatctgaagaacgcagggggaaagatctaccgcactgtggaattggatg

SEQ ID NO: 12612 - DNA, 1088 bp, Zea Mays
gcgaatacaatgccctcaatatcatagaaacactatttttgtgtggtgttttacttgagtggacataaacacaatctaaggatgccatgaatagaggggattatagttaacatattatcacaaaaggtcattaccttgcccaataacgtcttcatccactagttgtactctaataccctctagtgtgaatacaatgcccacaatatcatagaaacgtcatttgaggtttaaaaggtgatatattgttttgaattctttatattccaactttttagcaactgtatggtggaaacctgttatcacaaaaggtcattagctagcccaataatgtcttcatccactagttgtactctaataccctctagtctgaatacaatgcccacaatatcatagaaacgtcatttgaggtttaaaaggtgatctattgttttgaattctttatattccaacttcttagcaactgtatggtggaaaaaagttgtcttacaaccttaacctatgtttggacagttcactcacgcaatttggctaaattttccatagtctttattttattttgagaaacgatgtggtataatgatgtgcgatgttttacttgagtggacataaacaccatttaggtatgccttgaatagagagaattattggaaacctgttatcacaaaaggtcattagctagcccaataacgtcttcaaccactagttgtactctaataccctctcgtgcgaatacaatgccctcaatatcatagaaacactatttttgtgtggtgttttacttgagtggacataaacaccatctaaggatgccattaatagacgggattattggaaacaaggtatcacaaaaggtcattagctagcccaataacatcttcatccactagttgtactctaataccctctagtgtgaatacaatgcccacaatatcatagaaacgtcatttgaggtttaaaaggtgatctattattttgaattctttatattccaactttttagcaactgtatggtggaaaaaaagttgtcttacaaccttaacctatgtttggacatttcactcacgcaatttggctaaattttccatagt

SEQ ID NO: 12613 - DNA, 673 bp, Zea Mays
ggaaaagggagtaaatgtggctcaaagaagctctgtcaggcatctttggaaagggatttagagtgaacagtaactgaacacgacctgcttcatccccatcgtcgccggtgatctcgcgccgtgattcgagcttgccgtggagatgtgtgctgggattggagtagatattgctggaggtgaaaagatcggcgggtggaagaacttgggcacggagtcggccgaacaccagtgaccacttgccccgacgtcatggcaaagttaccgccgtcatgatccgtcggtcacccttgtcaagccacacatatccttgcttcaccccgtcttagcgagggtggcggacggtgaaacaagtccccaagtcactgagctaaatgtgcgccatggtgaacgaacctagtgagaatatctcgtcgcctccatggatactctcatcctgaatttgcgaagcacgcaatcgatctctttaaattgagtgttccccttgctccgcctctctgttatgtgtctagctgactctcaaccccctttcgtcgtttaccgtagcccaagttcactagattttcccgaaaccaatcatcagtgccgtcgtgtggagctttgccgcggtcagcgctcctctggttagttcatgtccctctagctcatgttttggaacctctctagcccctagttg

SEQ ID NO: 12614 - DNA, 792 bp, Zea Mays
gtaagagcttggtaagatacaatagagtgtgctcctgtgttccacccgagaggagcgtgtagtgagattattagggataaccttcaccgtttgtttccagtttttgtgtttcaatggcaggcgacgacgaagaagcaaggatccctacagacttcgatgaatgtgttagccgccaagatcttgaggcaaacaacaagctcctgaaggagcaaatggaggagacggtccacaagtcagtgcatgatgccttcattaacatggaccttggcaggacttacgagaggctggatcgacgattgtcctagatcgtcgacagacttgctgtgttggagacgcaacaacaagcaccgccaccaccacctcctcgtccacgtcttcccgatgatgcggtgattgatgaagaaggtaattatgatgaagcggccaccagagatttgcgcctccgtcgtcgtcttcatcaaaacacagaaggtatgccacaccgccagcaaggtaataacaatcgtgctcttgacgacccttatgctaagattaaattttctataccatctttttcgggtcattatgatgctgagggatatcttgattgggagatgacgatagaacagaaatttgctgcccaccttgtacctgaacgacatcaagttagacaagccactagtgaatttaaagatttttctattgtttggtggactggtctagttggggatggtagagcacctacgacttgggaagatcttaaggtagctatgcgcgatagatttgttcccccatcttatcatagagaattgc

SEQ ID NO: 12615 - DNA, 1121 bp, Zea Mays
gttgtaaccacccgaaactctctcttccctctgcgtataagtacctacgatcacatccccgtccaattaagccagctcctccaggccccacgccccatcatcgtcgcagggaaggatatcatcgtcgcagggaaggatttggctgccgccgtgttaacgtcgcgggtatagcgccaacaagcccacgatgttcggcctgggacattcgcgggtgcacaaggatgtgtctgtgtcctctcccagcggtcctcggggcagggttgcgtggaatttgtcgatcggagcatcgccgtggagctctgtgcgtcgatttccggtaagaagcaaccccgctatgctcgtttgatgctcttctgcgcataaagttgatccggtgaggtttggggcgcctggcgaggctttggtgcgctctggcggggtctgccgccgcgggtgtgtgttgcgccgccgttagtcactagcgtgaggtaggtggcgccagcacgttccttgacctagagatggacggctacagtattgtttggtgcatctgttcggcggcatcgtgttcgggtctaggctgggtgcacgctggtgaaccatcggagaaagagagagttccagggagagcgcggcgtctaacctgggcggaatggctggggagaagtcttaggttgaagatgatcccggtccgttggttctcagatgtgtggatgagagatagtcaagctgtagtgtcttcaggattaaatctgggccgtatattaggaatccgatggtgtctggtgagagagggtttaaaatagttcgatctaatcgtgatcgttcacagtggatcgggcggccgagaatgcgccatacccccttcgtgggtcacttttgttaaagaaccctcgggcttttagtgaatcaacccgccgtccagtgcacagttccctgagtcttagatttaattgcgccgtagcccctgcgctttgcagtaattgatgcgaaatccagagacccaggaaattcaataattaaatgtagaaattgatttttatgtataaataattgctagaaacttgatttaatcatagaaaatccattctagctccaaattagtatattccagttcctaaaattttgtaataatgttgttt

SEQ ID NO: 12616 - DNA, 528 bp, Zea Mays
gccagacatgctcagggacatagccttgaaccatcgtaggaagaatccgtccaatccatatgtggaagtcatgactcttcatccctaaggctcgcatagtagataagttcaccccctactcaggttagctgcatacccatcagggaacatcaacatcttgatccactgaagtacttccttcctctaggccctgcttaggacgaaatcggccttaggccttctccatgtctatctaccacttggcggcttcatctcttggtttggtctatcacataacgctgccagatccactcttgcctttacgttatcctttgacttatcaggaatgtccataattgttgcccacagtgcctcgacaacatttttttagtgtgcatcacgtcaatgttgtgtggaaggagcaggtcgtcataataggggagtcgagtcaagctagacttatgtgtccacatatgctgctcaccatatcccacaaaaccaccttctgtattggccatgagcccatctatctgttgacgaatttcggca

SEQ ID NO: 12617 - DNA, 478 bp, Zea Mays
ctctcgccaaagtggccagaacgactcaccgacagcggcgctcagccagggcgcgacactgcatggctcgttgccgatgacgaagaaggaacgcgctacgaaggttcaagccaacccaaagaaacagagaaggggaactcacatggacgaaagactcgctggagaagaagggatcatcggtgtcatggagcaacgcggcgacccagccacacagtagcagtggcggcggccacaagtccatgtccggctctacttgtggcagcgcaggggagggaacagttgtgcgctacgtgaatcgggatgtggtggttttagagagggggagaggaggctgatgacatataggtcccgcacaacggttgtgattttgggaagctctagctgatgtgcgagactcacgacacgcacaacaatagtagttccggtgcccgcacagttcatcctcaccattccctgttctgcctttctgattccccct

SEQ ID NO: 12618 - DNA, 1060 bp, Zea Mays
cgaataagtgcagaagagataaaagtatcagacttggaacgcaaggaaaaagtccacgaataatgagagcaatcatcaagaaccaccagataatatttataacctgaaacactgataataggagagatctagatcacagtgtatgaggtcaaaattatgcacaacctgagagaagctagggagggggtcgaacatgatggcctaactgacaggcatggcataaatgctcagtggccctaatataagaaatgattgaactactacacaacttggacaacacatgagggctaggatgactgagtcgacaatgtcaagtgctagatatagtgaaagtagccagtgtgtgcaactgcggcgaaggtgtagcgaaagcatgatgttaaggggtaaacgcaggcgagaaggctctaggtagcgagatccttcacggacaagccaaaaggatcaaactcaatagagcaagaattgtcaatgggaatctaacgaatagataaaagattttgaatgatatgcggatgacaagacaattgtgaagataaaagggcccaagaaggaccgaatcacctacagaggtgaccaagaaaaatttcttgttgctcacaatgatagatggagtggacggtagagaggggtgggaagaagagagtatacccgcatctagagtggtgtggtaagaggcaccagaatcaacaatccagctagtgacagcaggagtcagggccatcgtgctgaaggagctagcgagtaactactgatcccacccaccgcgccaggggttctaggacgaaacaaagtggggtgggagaagcaggagtgacagcagaggtgtcaggggcgcaaaggggagggagccgaggtgataccctggatcaggcattatcagatgagtcggctagggaggaggcagacacttgaagggtccacctagggacgggccgagccatgtggagatgcagtcaatccatgggttgtagagaaagggccaaggagcatccccctagccacccccaccaccacggccaccctcgctccgagcctccgacggcaaccaccaccccag

SEQ ID NO: 12619 - DNA, 667 bp, Zea Mays
caaaactcttcttctcttgactaacagatggagggtgcatttgtcattaatacgtcctattgctcggatgtagaagggttctcttatcttcttcagagttgtgcgcttcacgtgggagttcgcaagaagccgaagtatgtctagaaggagtaccaggagaatggagttgagaaatgctccatggtggtctacctcgggaaagccaaagctacccaaaccacccacctttccaaatcactgccactatacaacgcttccaagacatatgccaaaatgtcaccctaaaagctcttcgccagctataccaaaactacaacaaagaagtcgcccagacaccccttcgctacttcccaccaaccaacaaaaataaccccacttggaggaaaagactccaagctttgtcaaggagagagcatattgagcatgacccatcgtaatctacatggctagatatctccacacccttgacacccactttgatgaccttttctcccattgcacccacctaaactcccaggtagaaaacgtggagcaccagatcaaggaactgaaggaagagaatgccactctccaaaacagcctcgagatggcagagtgtgatgacgccaacacacgtgaggcatacaggagcctgaaggactatgccagaaagctgaagaggttcgcc

SEQ ID NO: 12620 - DNA, 903 bp, Zea Mays
tttgatgaggagatcaaatacacaaaatttgagaatgaggagcccatggaggttgaacaggctgatgatctgtcgatgtggaacttggatgctgagcttcagtaggaggctcaacccgagttgcctgcagcacctatggtaccagaagtggtgattctagatgatgacgacgaggaggacttggggaaccaagcatctgatggatgtatccttagaagagatggactcgtctaatgaagacgatgaggacatggatgatgaggatattgcataagttgagcaaaagaaagaagatccataggacttcatcgatatcgttgtgatgggaacgccaaaatcatatattcttggagtttctgatccgaaggccctgtacttgatgttcccacacttgagattctcgagccagagagtacaacacatgtgttcctccgcaacccctatggatgacttcggttcatcgcagcgttggtctgacccttcagtttcctcgtaagctttggaacctgctcatagctttgggattggacgaagttatagtgacctacgttggcatgtgtcgccaacatgttctctgactttaccctgctgagtggcatgtcatagcaaggtttatggccctgatggctttggaggttaggtcgtgagaggacgacacaatgccatcgtcgctcgagccaactttgacgtaaggattaacgatgcagctaggttggcacagtcatccttctattatcggaatagcactactctcaggcagactgcttacaggtactaccacagtgccaatctggataggatctcacctgaatcagttcgggcatgacagaaagcaacatacgtctggagactctgctagagtacactgtagctttgaacacagagcatgatgctaccctaatc

SEQ ID NO: 12621 - DNA, 468 bp, Zea Mays
caagaatggatgctacaactatagcaatcccgaccacttcatcgctagttgccccaagaagggcaagctataggctggctagcgcgaccaccactcttgtcgcgcaagggcaagcgtgagtacacctctggcacacaagtccaaggagacgtttgacaaggaggcgctcaagaagaagtacctgaagaaggccaaggtgaaggagcatgccttccttgcctccctcagtgacctcaaccatgactccagtgactcatcttcatccttgagcgacgagacaagctaaacggactctgcttcctcgccgacaccgtaggattcctctgcactgcacatggcacttggtgaggacacgttggccacggcaacaaggacattgatgacgactccacctctaaggtatctctttccgcgacaatctcaccgctgaggtagaggagtagatgtctactattgggggccatcctc

SEQ ID NO: 12622 - DNA, 479 bp, Zea Mays
tttactttgctcaagcttcgtaacaagaaagagctttggcaaagtaaagaaaaattttcaacttcattcaaaaaacaagaaattcaagcatcagatggccagagtgcgttccatagctagggttacgcgcgacagagaggaagccaaaagtgctgaaactgccccaatctccaaagtgatgaagcgctcagggttggtagcatcggaggatgcacctgccgctgaagcagaacagggtgatgttgaggagactgagtctgaagatgattacagcgtggtgccaaataaacccagccacctggatttcgggaaatccaccatctctgaagatgatttgcctaagctgttgaatttgggctattttagtgaagcgaagaaagagctagttcattttggtggggaagagactactccgaagccaggaaaggatgaagtagtggtcttcaaaagtttctttaaagctggtttaagatttcctt

SEQ ID NO: 12623 - DNA, 627 bp, Zea Mays
ccacacaggtcaaaatattgcacataagggattgtaaaggactacaaaagcttgtactgcatgtattgttctttactatgcttgtagagtaagctaaatgtaggacccataatgctgtgacttaagtgtgtgggtttggttagagatgtttgggcagagatgttggaaggcctgaacttgagagcacattggtagttctcagtcttacgtatgtgatatttttgggccattgccaacttggcattgattctacagtaatgtcaggggatgtatttaagccagtgtttgctgaaatgaccagtatttaggatggaaccaaatgcaccatcttctgtgctgtgctgtgctgtgatgccaaatgcagccatgattccttacctgaacaaatagaatgggctcaagaagcttggttgcaacaacactacttgttatatgtcagctttgccattcttatgttgagaagcacactgggtgactttggacaaagaacacttacaaatatactgttcattattgatatggcagtttgcttagattaagtgatggtattcgttgcaatagtttgttattattttgtttgcattcagccccctaactattagctaaaatgcttaagtgcttccagtc

SEQ ID NO: 12624 - DNA, 1731 bp, Zea Mays
tacgcgcgtacgccaggatgcgggatggtgggctcgggcacgcggtgcgtgtgttcgatggaatgcctacgaggaactccttcgcgtggaacgctgtgatcaagggccttgtcgacgctggcaggttctcggaggcgctgcggtggtactgggacatggtccgtgacggctcggtcgttgctgatcgtttcacgtacccgcctgttctgaaagcgtgtgcggcgcttggcgaggttgagcaggggagaaaggttcaagagaacgtggagacggacattgcccggggcattgcaaagggcaacgtgtttgtgcagtgcgcgcttgtggacatgtttgccaagtgtgggtgcttaggtgaggcgaggaatatgtttgagagcatgggagtgagggacttggcttcgtggactgcgatgattggaggagccgtccgcggaggagactggcttgaggtgatgacgttgcttaagcgcatgaagtcagaagggtttcggcctgattcaatgatttttgctactgttattccagcatgtggtaaggtgaaagagctgaggactggaatggcattgcatggatatgcagtaaaatgcggagtaggtgatgatatctgtgttcctaatgctttggttgatatgtattgcaaatgtgctaggctggatatggctgcttctctgttttggtctatcgatcacaaggatgtgttctcttggagtaccataattgcagggcattcacagaatagaatatataatgtgagtgtcagtttgtttactgaaatggttgcttcaggcataaaaccaaattctactaccatagcaagcatacttcctagcatttcagagctgaggttactgaggtatggaaaagaaattcattgcttctccttaagaaatagattggagcacagtgagtttctagctagtgcactcatcgacttctactgtagacaaggatacattagggacgcacaaattgtttttgaattcaagccgaagaatgatttggtcgttttgaattcaatgatcagaggatatgtcgtgaataaggattcagagtctgcattacgtctattaagggcactgctgaaagagggactcagacctgatcatgtgactgttgtttcagttcttcctctatgcaatcaaccctcgaggctcctccagggtaaggagctacatgcttatgccatcagacataacataagttcgtgtttctcagttactaacgcacttacagatatgtactgcaagtgtggttgcctagaaatagccaacaagatttttctgctgatgacagagcgaaatactgttacatataacactctgatttcttctctgggaaagcatggccatgcagatcaagcattcattctttttgacctaatgaagagggatggagtttctccagataaagtgacttttgtagctctgttatcatgttgtagccatggaggccttattgacaagggcttatgcttctatgattccatgttgcgggactataatattcctcctgacaaggagcactattcatgtattgttgacctctacagtagatctgggaagcttgatgatgcttggagttttattgctaatttacaagaagtgccagaaatagatgttcttgggtgcctattgtcagcatgcagagatcaccatagaatggacattgctgagcttgttgcagaaagaatatttgagcaaaaccccaatgatcctggttatcacattc

SEQ ID NO: 12625 - DNA, 393 bp, Zea Mays
tcaggctctattatgaatcaactgagttatgacatcggctatgcattggctgcgctctggcaacacgccgcagtatttatgtcgtacgaacttggctgcgtcatgtgattgctatgtagcactctcgtttatttggacagcccccgttgagttgaaccgccatcactgagtcacgtatttttcgcatgccctgtaggcattgtgtgtctgccatgattattgagccacaattgcgcctgttgtgcacgttgtgtggacttatcgtgtaccccgattatcgagccataattgtgcctgttgtgcttattacgaaggcttgttgtgttgtcgtagccctgatggccgcacacgcgttgacaccagacgctagagctagtactcacgtggattgtg

SEQ ID NO: 12626 - DNA, 914 bp, Zea Mays
ggaaatcacaacaagattggccgaaaagacctcatcagcaagaataacggaacacccctaacaaactgaacagctactaatggagccattagcagaaccaaccaaaattgggtgacccgacatctgcaccgaaagaccagcctgcgacaccaaatcctccaaaacaaacaaatagctagcgccagagtcaaaaagagcatgggccacaaacgaatcaactgaaatcgtacctatcaccacgtctccttgctctctgccatccgcagcgggtagcacataagctccggaaatacccacagaagaggaagctcctggagtgaaattaacagaagaaccccactgagccaccgggtgaggcagacgcggagctccaaactgagatggcataggagtagtcggtgcaggagtaggcgcagccagatactgaggaaaaccctacaccgactcgaattgagaagtcccaagcacataaaactgctgcggaggaagtggaactgaaagttgctgctcagcgcttgatatcatgttgacagtgccgtgagaagaggaggaagtcactggctcccatctaagcttcccattgggattcctcctacacaccacatccttatggtcttgactgcagattgaacacttcccgttccactagcactctgcacggcgatgcgcatcaccacaacggaaacacactatccctagcctagacttaggaacagcatgaaacctctaagtacttcctcccgaagcactcgagtcagaggatttcccacggtagggatggtggcactgatgctgagacttgtttctcttgtgggctggacctctagtgttgcccctcctcacgtcctagccacgaggctgatcaacacccgatgacttctgcgactccatcgtatactggtgttgcatctcca

SEQ ID NO: 12627 - DNA, 542 bp, Zea Mays
gaaaaaactgccaggtgttcgccctctcccccttcgtggagttatggactttcctatttataggcccagggagagccaccttgtcgacgggagccgactatatggtgtgaaggggtgccttcatgtcctgtagacagtatggcttggcactttgttgttgacgtgtgcttgcctgtttttcgctgagagccgagggcttagtcacgtatccgagccctcctggagtggagttgcccatatcgcagttgttgacacagtgtccatgggaaaaaaggttcttacgggatgcgttggctccactatttttgatgacgttgggaagtcctctgtcatagatatcgagggaatagcaaagttcgggtgaggcggaggttcgtccgaggttgcaactgagccttgtcttgagacttgatgacgtgtgccacaatcgacagagtggttttccatgagattcgcgggggagcaggtagccgaggcctggttcgggcgaggcggagcttgcgcccgaggttgagtttagcgtcgagcgaggcggaacttgc

SEQ ID NO: 12628 - DNA, 616 bp, Zea Mays
attaccaaaaccatcaccgctcgaagtaatagcctgaagcttaggatcggatccatccctccgtggggcagacgagaatgtgatgcggattgggtacatcaacgttctcctgccagaagacacaccatcaatggcaaagggaggctcgacaatccaaagctctcttgaagcaggcaccaaggacgtgtctaaacaccaagcagaacaacggtaaacaaccacatcctttagctccagggtgtcaggatgaacctgatgaacactagcaaagggactaagcaattgttccacagttatggtttcccaagcatggatggggataccctgaagctctatgtccaacaagataagtaacacaacacccctggagttcagaaaacgggaccatttcctgcaggtgatagtgaacgtggccgccctgagaaaaggccaattgcccacaagtatctccaccatgtcacagccaggcaaaaataggatgaagcttgactcggagtactgtcgaattatcaaggacctctcttccaactccagcctaggagcaattaactcaacaatctcttcaattgggactctctcacgatcgctgataacagtaatcaccactgccttctga

SEQ ID NO: 12629 - DNA, 577 bp, Zea Mays
ctcatctctccaaattctccatgcatccaggaagcaccaaaatgtaccatgatctgaagccctcatattggtggaccagaatgaagagggagatagcccagtatgtatcagaatgtgacacatgtcagaggatcaaagcaagccacttgaaatcagctggtgccttgcaacccctatcaataccttcatggaaatgggatgacatcagcatggattttattatgggtttgcccaataccaccgtggccagacattttcagagaccctcagcctcaaccaagcccctggacagcttccccgaggagccatgaagcttctccaagcaaggatcttcgtcgcggacttcggtcgtccgccaccgcgcgtaggccgagctatccggtgagccattatccaattcctcgcgcccatgccttccctagcacctagtaaagctctctgaccggtttaattaaactctaccgccctggataagccggagccctcgctgccgacgagctcccccgcctacgcacgtggaccggcctactccgaccatccccggagacgatccgcacatcggcgtgaccgtcacgaa

SEQ ID NO: 12630 - DNA, 597 bp, Zea Mays
gccaagttgcaatgcactaggcatataaatagaatcccacagcgacaacatctgttgcgccatttcaattgcttgtgctatcgtctcaagcttgaaatttctagctgtcagatcttgcttgatttgtgtgcttcgttatttgcacaagtgatcgctatatgtctaaagagaaaatgtctgaggagaagaagattgtggaccctgtcctagctgggttttacgaagcaatggaaaagacaaacatggaaaagattacaaatgaaatattagctaggttgtttgaggattctggtgatagcgatgactttgatgtggaaagcgagaatgaagatgccgaagatcggccctggtggccaagccataccatcttcggaaagtcgtccatcaaacagagtcagattgatgccatgaagggaagatactttcgtgacatgtctattgtgagggttgggggagacagtgccgcccctacacatgaggaaaatgaagttgttgtttacagaagcttcatgaaggcaggacttcgattcccgttgagcaaatttttggttgaagttttgaatacatttgagatctttcttcatcaaattaatcctg

SEQ ID NO: 12631 - DNA, 518 bp, Zea Mays
tgcatgttcctactttcttcgtgcgattattgttaataccatatcttataactagtgtgcaggtcactagccttgttatgtcatcaactggataacagaccttatttcccgttgatgcgacagagcttaggatggtacaatcggtggaagccggcggttgagctactggaattatttgcagctgtggagtggtcatctgttgaacagatatcgcacttgccaactgttgcatcaattctggtggaggatttgatagcatttgagacatcaggtctttgaactctttctttgcctcctgcttaaaataatccgacaacacttctttgtatcgatcacgtttcttgtacaaaccttcccactatggtccgaatccttccttccatccttccttagatgagattcctcatacatggcctggatgctcagggttaccaagactagccgttaggatgtctctctccctttgtggcttaaatgatccttggctctgcttagctgccattgcatatatgtttttc

SEQ ID NO: 12632 - DNA, 576 bp, Zea Mays
gtgagattcttaagaggtaggttttgggtggccagcctacatatgaggatcatgccccacctaaggaccctaaaggccacaatattgcctttcagttctttcacttggcgcaacccatggatcagcatgaacatggcaacaacaacatgttgcaaaacaataatcaagttgacagtgggggatgggatgtgtggcttaagcttgattaggttgatcacgccctggacaaccaagatgatcacttccctgatgatgatgatgtcgtgtcgtacgctccgacacccaaataacaactggtgatcaacaatcaatactctgcatgtttaccttcccagatcctcctctggattggaggacacccactggagaatgggcacgttgtaaatcaagtacttcacattggggtcatgcatcatgctgatggtccctgcttagcctccccgtgaaagacttcttgcttcacctggccatcttcaagaaatgggacaatttgtttgttcctaggaccaaggctagtgaagtgatctctatgtccctctcttgggacccttcgttcaatgttctagtgaagtgatc

SEQ ID NO: 12633 - DNA, 414 bp, Zea Mays
ccggggtgcatggaaaatttggaaaggtgagcttcatccaatattttctttctgagctcgggatttttaggaacaaccaatcggtctccaaaccataggattcccttgttgtcctgacgaaagcatttgtatttgtccacgtcctgttcgatcatttccttaatgacttgtacacccttgtcaccaatctgtgccatgactatctgctcatgtaaagtgggctccactgaaatataactcaaggcacctgaggaaacaacttctatgttcagcttgcataactcgtcacacagagtggcgatcttggagtccatactcacacagttgcactgggccttccggcttaaggcatctgccacaacattagctttgccaggatggtaatgcacttccaaatcgtagtccttgattaac

SEQ ID NO: 12634 - DNA, 309 bp, Zea Mays
aaacagtgagaattttgttggccttggcagctcaagaagagtgggaaaacaccacatggatgtgaaatctgcttttctaaatggacatcttagtgaagatgtttatgtctaacagccaccaggttttgttgatcctaagtcggggaggaaagtattgaaactaaagaagtcactatatggcctgaaacaggccccaagagcatggaatgcaaggcttgacaaagaattgcagaagattggtttcaccaggagcgttgaagagcatgttgtttacaaaaaaggaacaggtgcaagattgcggctggtggg

SEQ ID NO: 12635 - DNA, 334 bp, Zea Mays
tgttcaggatcacagcaccaagcaaggcatcgaaagacttccagattcctgatttccagcgtgtcgggcagaacctgggaaatgcaagcatggaggttgatcaaatgctgcaccaccgaagtctcccacgcgtgcaacgatagacctctgatctcaagttccacgagatgcttcaaggaattaccaacagcacccctgaacctcgtccaacgcctagaggagagcatgaagttttcttctctgatgatatggaagcgatccaccagcgtgtcgagctgcacttggttgggtaagacagccaagaagctggactgggagaactgacggagaacca

SEQ ID NO: 12636 - DNA, 469 bp, Zea Mays
cgccggtgaaaagatctcgtcgcggatgtgttcaagtaactgtggcctcgctgttcctcaatcacttgcaccagcgacatggctttacggccgtcaccggagttggtgtctttcaccgtggttgtgccacgccccaggcctttatccatgtcgcttctagccgcaccagttcgccgataaccgccgtagcccctcagccggtgagtgccacggtttcacccgcgccagtagccttctccctctccagccgcgagcgcgtcttcacgaaattggacaccaccgccttgcgctcctataaattgatggcctggtctgttgcgacatactatcacaaagccagagcacccattcccgccttcaattagccaccatagctggagaatttccttctttccccaattcggttgactgcgccgccgcgaaccgcctcatcgcggctagctgcttccaggtccgccctctctctttt

SEQ ID NO: 12637 - DNA, 530 bp, Zea Mays
ttgggggcgggtcatcctcaccggtgtgtcggaggtggaagagggcctatggccgtaggatagtacattggcgggagagattagtgctcgtatggtgagctcggggtggctcgctactgctgttatggcgttcggtcgtggaatatcaactgaggcaggagaaaaagaagagagagagggagccaggggttgaagacgatgtgcgcgtccgttgatttgatttgaacggctgggattaaaccatagatacccccttttagcactttagatcttgaccgtgggtcgcccatccgaggggtgggatgggcactggcgtggttggatttcgggcgttggctttggatccaacgatttcggttgattaccggttcacttaaagcgccatctgatcgagatcctcggagtgagatccagcggccagaaaccgtgcctaccccttcgcgtggccaacttgcataagcgcccctgtacttctggggaatcaacccgcagtcctcccctcggggttctctgtgtctgtggggtttttg

SEQ ID NO: 12638 - DNA, 399 bp, Zea Mays
aagagggagctctcacagccgtccattccaaccatagacgcgtcgacgaccggcagtccgcggggatagggcacagcaggtgatatcacagaggtttcatgtgtgcccccgtcatgcgtatctgctccaactgtaaatggatcctgccctctgtaatatttgatgagtgaccctaacagagcacaacaggtaaaaccctaaaccctagtggagtgcccgtacgttgcgacgacacatagtaatatttgatgagtgaccctaacaatctattatcatgtcatggctactatacacaatattcacattgtaaatggaattacaagcatgaatataaaaagtaacataggagcaattcagatatccttagtcactataacttgtttttctacaagatggtcg

SEQ ID NO: 12639 - DNA, 400 bp, Zea Mays
caggaggcgaagctaagctgcaacgtgcgcaagggggcgttcgggtgagactgcgtcgcaggcccgcgttgtcagtggcgcacggaccacgcagggcaccagatgggccatcgagtgtagtgagaagtggggttagttgggccgtagtggagagaagaaaaaggggagataggccgtgggaaaaggaaatcgacccaggccaggccgaagaggtatcaggcaagtgtaccaaaacgttatcttgtattctctatcgtccattgcagatccaacggcggcggatctggccgaactacatccccgactaaatcccagccgccgaatccaatcgtacgacaaggagtccttctcctactccgacgaccatcaggcggcggcgccgccattgtcgggcctcccc

SEQ ID NO: 12640 - DNA, 980 bp, Zea Mays
acgaaaatgactcagtagcaaaacaactgttggtcagtttggccatgggggaaaaacaggaacattatacactcactaatggtgtaattcgttacaaaggcagaatctggctgggcaacaatcaagtggttcaacaaatggtgatgacagcactacacgacagtgccgtaggaggacactccggttttccagtcacatacagaagagttaaagctaatttcgcttggccaggcatgaagaaacatatacatgaatttgtgagttcgtgccagatctgtcaacaagctaaaccagaaagagtcaaataccccgggttactgctgcccctgccagtcccagaacaagcctggcaaactgtgagcatggacttcatctctggactacctccttccagcaagggcaattgcattttggtggtggtagacaagttctcgaagtatgcccatttcctacctctattacatcctttcacaactttaacagtggctaaggtgtatttgtcagaggtgtacagattgcatgggctacctgctgctatcatatctgatcgagaccccattttcactagtaagttgtggcaagagctcttccgtttaacaggaacccaattgtgtctcagcagctcctaccacccacaaacagacggacaaaccgaaagggttaatcagtgcttagaaacatacttacgctgttttgtacactcttgtccaaagcaatggcccacctggttaccacttgctgaattctggtataacaactgctaccattcatcgctggacaggtctccatttgaggttctttatgggcatacaccaacacagttgggattgttgccaactgaccgatgcaccgtgctagatttgcagcaatacctggaggacaggcaacacatgcaacaacaagtgcgtatgcatctccagcgtgcacaagagcgcatgaagaagcaagctgaccgagggcgtacagagcgtcagttttct

SEQ ID NO: 12641 - DNA, 429 bp, Zea Mays
accagcaccagagaactcgatcctttgggttcccacccaagggaccaagcttcaatagaccagctagacccactccgtcgtgtttcagttagcagagtcagagctcctttcaggctccctcggttgcaagcaaccaaccgccagcaaatgcctgttggcactgcggagactccagtcacttcaagaacaactgcccccagttgaaggcatcaggacctgcttactccaactcggtgaatggccccaagaataccttagcacccgcccccaaggcaccctcctccatcagccagcagaacaagacccagtatcaaggaagggcatgagtaaaccacgtcgatgctcatgaggctcagaaagctccaggagtagtgctcggtgagttccttgttgaatttactcccgctactgtactttttgattcaagag

SEQ ID NO: 12642 - DNA, 672 bp, Zea Mays
ataaatttatgctatatacgtcaatgttctatgctataaaaacctcgctgtacattcataaatctacatatctgaataatgcttacgataactttcacctacgtttatgatattatgcgtacatatttatgatgttgtcggtgccttgacaatttaacatacgatccacatttacatccataatataattttcaacttatatttccagcatactgtatgtcgttcattcatttgcatcactagttacagcggtaaacaagcccattgtctcataaatcttttagtattctactctctaccagatgaatcatcatctccgacatacaccgttcgtttttttgacgttgatgtctcattccactgtggtgctgcacctctgattttgttccttgaaccaggaggccgtcctcgcttgcgtccaggtaggttagccaatcgaaccctattatcctccatagttaaacacgtacggctgttgtgaccatcagcgatgccacatttttggcacttcctgctcatcttcttagctcatttcgcacccaatttaagaacttgttgctcactacttttgatcgttcttcccttaggcttggccttatctggtcttgctaagtttacaccttccatatgaaactccagtttctacaaatcaaagatattaagtcagttttc

SEQ ID NO: 12643 - DNA, 510 bp, Zea Mays
tgattgtgcaagcttcggactccacttgagtgtcacgttgttgctgcgcttggagatgcccttctggctgctagttatgagccaaggtaggtgtcaatggtggtgatggtggtaactgagcccatgcagcttgagaatgacttgccgaagcaactgatgtcatgggttgctggttgcccacatattcagggatatatggcgaatagcatgaggcagtatgcaagacctgcttcggctgattctgtcgtgcttcggcttcagcgatctccttctgcctttggatcgtgacttggcacgtccttgttgtgtgtcccttatcctccccacagaataagcagaacaatctcttgggttgagtgctgaaccttcctctgaagcttcttccccctatgcctcccgaagatcatgagctttgctggctgccttgggtgtggtttgtcctgtcatcatttgtgatgggattatggattgttctaacatgcctggggtggaatcttccttcgaagcccc

SEQ ID NO: 12644 - DNA, 950 bp, Zea Mays
ctcaaacaatattgtttatatgcaacaatacattgatttgaagcattcaagaacattataatagttctaaaatattcaacataatgtttcaaaacacttttaacaatgagattaataatgtgacaagcacaacaatgatgcaataaaatatgaaaaagatcttcttcatgctgctcagcagagggcattaaatcaccaatgtaaccagagaagataggtttaagcacatccatagtagtatgattagctgaagtctttgctcctcattgttggctggatcaagacacatggctgcctcctcctcgacgcctctggctcctaaagacgtgcatcacacagtcacacacgctctatggaagtgaaaccattggccaacaacctatgataacaaaagaccggttagatctacaacaagagaactagagagagaaaggaaggacgaaatgaggagatggcacctccgtagttggagcaccggattcatcgatgagggagaataaattaaagcgaagatcttaactagaaagaggaatagggttagggttatgatgagaagaggaaagaggatgagagttggggagagaggggaagggaatagagaaagtgagcagaggagctgtgttgtggcaatgacaatggtgagtcaccgtctacccgacatcccacatatcaacatgagtgggactaagggagaggaaaacagaggcagatgcgatggaaagagaaaggtgagatgcttagggttacagtaatttagaggatgacacgagagagttatatacccaagatctctgactgatggtgccgaaccttatatgggttggccgttgcagtcaagccatacgtcacatgctctgtgccagctgacccaagcaaagtcatatgatttgtgcctatctaacacaggtacgatgccagttagaccatgtagtgtcagggcgatgcttctg

SEQ ID NO: 12645 - DNA, 597 bp, Zea Mays
gtcgttttgtgcggagggcatataagatatttatgtttccaaaggactaagaaaaacatatcaagatacatcatcattccttataagatctgcccttttgtttttcttagaaaattactataatgttgttgcggtgtaggagaatttagaagatgcggagttcgtcaatagagacatcccccacatcctcgtgatggttatgttgtttggtgatggtgtgcttcctggttagagaaaacatcgtcccctttgtgtagacaagctagatgtatggtggataagaaagaaataggaagtgttgcgggttcatcaagaggtcgtgcaaataggggcaacatctctaatgtggtacctgatggttataatgatgacgatgatttctgccaaggcccactcctcatccacctcaggtggatacaaaagaagcagaaagtgatatggcgtcatcgagaggctgtgcaaatagggggcaacgcttctaatatgatacctaaggatgataatgatgacgatgatatcgtgccaaggccctcccatcgtccaccaccgtcatcggagaattcatatgatgaggcatattacgatgcaacatttgcc

SEQ ID NO: 12646 - DNA, 370 bp, Zea Mays
tatatgtacaacactagcaactcaacttaaattcgctggaagattgtatttatatgtgcaaccattaaaacagtgtatgctaatgtccaattctgttgtattctatttttttataaacttgcaagctattatttgtatcatggccattgtacacatgtatgcttttttgtacggtgcacttgcatctgtctctatttcactctctcacttatctgcttttttatgcttttctttcggatatactattgaacacatagataaccagacattttgtccaatattttgtattgcgttgcaacgcacggacacataactagatgggcttccgagcaaactttctccagacccagggccgggccggcataatctg

SEQ ID NO: 12647 - DNA, 558 bp, Zea Mays
gttgaatgcaaaacaatgcgtggatggagagggcgagatgcttaccgatgtcgaccaaatgtgctcgcttgaggcttcggataccgaagaggggttggtgccgcccgattcggtcgcaaggttctgggggagcaaggcgtcagagcgtggttgggaactcagggtgcttcactgatggaataatggaaccagaattcgaggagatgcgagggtaatggttccgtgattttaggcacacgattgtttacttttcaacggtgttgtggttttaggcgcatgggtgtgttgctatggtttggttgaatcgtgtccgggtgggaggccaacacgtgaggcatggggtcggtatattggaagcccaatagttacagaaagccctagctgcccctggaccgtggcaacaaccaggcgcatgcggtcgggtgcccaaccccccatcatgcacgcgcaggtgcatgaatgcaaattctattttttatagatctgataagtatggcagatcgtgagagttttcattacatgtgcataaattttagataatatttttgtttccactgc

SEQ ID NO: 12648 - DNA, 505 bp, Zea Mays
agaataaaagttgtagacaaacccttttatttacttttcaagagagtgcaataatgatgttcattattgaattcaacagtgaagatagttttccaaaactgaagtcaataatcagaaaagatgagtcaagtctagatgatttccttgtgtacttttcccattttatactactgatatcaacaaagtaacaatgcagtttgtcctaaaagctaaaacattgtcacctagccttctacagtcttgaagatgattgtatgagcaccagagggaaatgttcgaacgcaaactgtcaggcaatgcaggggctaagaacttaaattgatagatcattgcatactcaaaattcaaaaacatgaatgaaacctgtgcagctgttggtgcaactggtcttgggtaaaatgtgttttgtctcatttcctcagtttcttggtgtagcgagtgctgctctgggtctgctttactagtgctggccatccaatctgctgagagggtccgcatatcagag

SEQ ID NO: 12649 - DNA, 353 bp, Zea Mays
cacggagcaacatctatgctttgtgtgatcgttggcatgaggaagagatgaggcggcaagaagagtatgaccgggatcatggtgcgccggcacacagccgtgccaccaggatcgagtcagcaacagcctccaccaacagtccggctcgagtcgatcgacgcgaaacaacgcccaacatgacttgcctcccaggaccatcaacgtgatcatcaccgagaggaccgggggacatgtggagtctctgcccttacccccggcttcgagcgatccaatggtcgccaaacttcaaggtctccaacgtcgacaagtacgaacctaagaaagactcgggcggctggctagccgtctacacg

SEQ ID NO: 12650 - DNA, 512 bp, Zea Mays
aagaggtccatcacccagtatggctggccaatccagtcatcgttcccaaggctaacgggaagcttcggatgtgcatcgactacaccaacctcaataaggcttgtcccaaggacccctatccacttccacgaatagatcaaatcatggattctacctccgggtgcgacctcttgtccttcctagatgcttattctggttttcatcagatccagatgtctaggaaagataggaagcataccacttttgtaacagtggatgggctttactgttatgttgtaatgccttacggtttgaaaaacaccttgccaacatttgtacgggtgatgagtaagacttttggtgacctgattagggatagggtagaggtatacgtcgatgacatcgtgatcaagactaagatagggtcgacgctagtggaagacttgaccctggtctttgacaagttgcgggcaacccgcacaaagctgaacccggacaagtgcgtctttggtgtctccgcagggaagttgttg

SEQ ID NO: 12651 - DNA, 549 bp, Zea Mays
taaatatagattaatgataataacatgaatgttaaatgataatatctagtgtttccaaaatgatatgaataccaaaaaaacctttttggctacctaaaggagagctagagagagaaaataggtggactgacttaggacgaggcactagggcggcgcagccgtatcgacgcgtcgttctggcgagacatcgaatttgttgtgagatggcgttggtgagacgacgacaggtgggaggatcgagtgcaggaggcgaggtagcaatagatgacggtgacggcaagcgacagccattgttgtgttgcgacgacgcggtgggaccctaatgagctagcgagggacagatgacgccacggtcacaccaacagcttacccatctgctggtgtgaactaggaggcaaaatatcaatgttgtgtgcaggatcccgacgagtcgacgagctgatgagtaatgagaaggcaaggtgcgctgcagcgggcgggttaggtcaccgacttactaatagtcagtcgatgatcgaagaagcgagtgagccacgagtgggagtgggc

SEQ ID NO: 12652 - DNA, 377 bp, Zea Mays
tgaaaagataagttttcagaaccagtgcagcgactcgaggcatctcgcgcatggcccaacagtgacattaagtacgaaggtcatgggccggtcaaccatgggaataggaatagcatccagcatgaccataggtgggccgacagtaaatgcatcaacaggcatgcaggagcagcaggccaaccgctaatcagactctggccccacctgcagcctcgcaccctcctctgaggcaggcctgggggccactattggtacccaggatcaggggtaccctcttctactatatgaagacgatgtacacgtacgacgtgtccaggtcacacagagaacgacaccacgtggcagggaaggataatacatcttaggatgcatcgttg

SEQ ID NO: 12653 - DNA, 667 bp, Zea Mays
ctcgcggtgactttgatgtggtcgactgccgaagaccgtcgatgcagtctttttcgacattgctttaattttttgcgggtgattttcgcgtgtatattacatagctctgcctcattaaaaacctcaccctccgggaggaaaagagtgcgggccggaataaaactgtttggtgaattacaagagcgtgttagccctgaggatttaaacaaaaaatttacggagattgtcaatattccaggaatgttccaggtcttcgccagattgcgttgttagtctgtacgcgctgggagacgacttcgtcttgacgataaatggtccttcccactttggctccagcttgccccgtgactctatccgggttgtgcggacaagtacgaggtccccttcgttgaattctcttaggacgactgcgtggtcgcgccaggccttcgtttgggcttggtatttgttgagggcctggagggcgaagacacggtctccgtcgatgagacctttggaggttagctcgtcgacgtcgggtactactgaagcgcttgtccgcggggacccatgtttgatttcctgcggggtcatggcctccgatccgtatagcaggcgaaagggagtgaatccggtcgcccgacactcggtcatgtttagtgcctagactgcttcaggtagcaggtcg

SEQ ID NO: 12654 - DNA, 700 bp, Zea Mays
cgacggagcaaggactccgacgagtctatatcggtcggataactcaactactggtgctctggtgcggctgacacccaattctacccataatgaccctttcccctcaatcaattgcaagattctagctcctaatcactctgtccacggtgacaacgcgttcaacggacaaaccgaggtgttcccggtaatctagcgcggtctagttcaattggccgggtcaagaagcatcaagagcatacaagagtgctaaaacaagagctaggagggtgtgatcggacctgtgaagagctgaccgcggcgagctcacacactacgatgttcttgaccaatttgagggaaatctcaatttagagctctctggtgtgcaatccgagacatgagtgggtgcgctggatgcttaactacgtagcggagctgatggcatgctcaatttatagggcccgagggcggtggctcctaatttgggcatggcacgctagcggccagagagaggggagagcactggcgcaagaaatgcgtggctttcactgtggtatgaccaccggcgatgaccggacatgctagagcgagtcaccacgacaaagtactacgtctaggcatgtggcatccgagcggcaggcagctaactccggtgagcttatctgaaccggccgtgagtcaagtggacacggcggccggggcggaacagtgccttaagctc

SEQ ID NO: 12655 - DNA, 775 bp, Zea Mays
acagaatacaatgctgtcctgatagcttttgaaatcttgctaagggtaaaacttcctgagatgctctatattccatgaattccctatttccgtgccatccatttgagtaagtcgatatgatcctggccgagtgacctccgctctacaaatggcccttcccatagtggtgacaatttgtgtcgtccttcccccgttagaattcggcgaaggaccaagtctcccactacaaaggatcgatgtcgtatagccttatcatgatagagcctcagggtttgctggtatctagctgactgaattactgtattcaatcgctcttcttccaatacgtcaatatcctctagtctggtagcctctgcctcagctatgttttcgaagaccagccttggtgccccaaacctgaggtcggcaggtagcactgcctccgaaccatagaccatgaagaaaggggtatttccatgcagagctcgactaggttgagttcttaggctccaaactacatacggcaactctctgatccattttcccgcgaacttttcattcttgtcaaagactttcttcctgagtgcttctagtatcattccattagccctttctacctgaccgttggctcttggatgtgctactgatgcatatttgatctagatgctctgttgttcgtagaaatcaaagaactcagagctagtgaaattggatcctaggtcggttatgatgctattcagtatcccaaacctgaatattatatcttgtatgaattccactgccttggctaaagtta

SEQ ID NO: 12656 - DNA, 462 bp, Zea Mays
tgcgacgaattgctctctgatagctcggatgactacaaagccgacaagggggttacgacccaactcgggagtgcttccacgtaggtcaccagctcggcacgcctcgagagaatgacgtgccacccgaaaagttgggaagcaagagagctgggtgaggcccaaacccctctagggagtcacatggcccacctcgaacagctctgcgagttgcacgccaaactcggggaagaacatcaatggctgcaacggctccggcaggttctcgagagggaagcagctggcaaggttcttgacgagggcgcgtgtgccaaggcacgcgatgttcatcgtcacatcatggaagatgtcgtggccgacgcacctctggcctttcaccgggcaagtcaaaacctcacgacaatagtgatcttactccgcaccatgcagaagccatctaccaccgagagacatcgaatccacggc

SEQ ID NO: 12657 - DNA, 539 bp, Zea Mays
cgctgctgggagttgcatgatgggctgggttcttttgttgctcggatgttggactgcaggggagtacgggaatcgcggtcgcaaggaggaggatagcttgaagcttcgtccaaggaggtccgaggagtctgtttggcttttggccaaggtccctcctttcggccattgctttccttttccccccaattttgatctttagtattttttgaggagatatgatctttagtattttctaaacttgaaaaacttgtctggctcttagggttgatgcatatacatgtgttgctattacttgcttgctccttgtcgacgatggtatagatagcagtagcactgtacacaagcagcaagcaacaccccacctccttgcattgactgttgcattttttatgaaacctaaagttgtgtttccatctgattgtaggcccatttgactctagtctccggtctctatctccactccaactacagccggcccgcgtctcctcgaccatcaccaccttgacggtctccgtgaaggtatttttcttctttctttg

SEQ ID NO: 12658 - DNA, 520 bp, Zea Mays
ggtggagcccacattacaagagcaaatagtcagggcacagattgaagacaagggtgttcaagttatcaaggaaatgatcaagcagaaggtagagaaatacaagtgcttccgtcaggacagcaagggaattctatggtttggagatcgattggttgtccccaaggaccctgaacacagaaagaggatattggatgaagctcacctttccaaattctccatgcaccctggtagcaacaagatgtaccatgatctcagatccttatactggtggaccaggatgaagagggaaattgccaagtacatatccaagtgcgatacctgccagagaatcaaagccagtcatttgaacgcagcaggccctttgcaaccccttcccataccatcttggaaatgggaggacatttgcatggactttatcgtgggattgcccaatacctccaggcaccatgattccatttgggttattgtggacagattgatcaagaccgctcatttcttaccagtgcataccacccacaag

SEQ ID NO: 12659 - DNA, 536 bp, Zea Mays
tagatatacaaccacatattatgtaggttataagttggacaggttgaggtaagaaagattatggcaaggacaagacttcatccagaactgtggatcttgattccccttcgattcaacttgatctatgaataattgagttgaagcttatccttctttgacgtggttggtcttctttggcctttcttcttggagttgccatccgagttaaggacatatagttaggatagccgggatacacgaggtgggtaggtttgaacagagttttactttgctttttgaacaaatggattagacaacctatgatgtaggttaggttgttgtttacggacgagttagtccaaggtattaatttagggtaagatatgtttatagaattatggcctaatttttttttgtcgccaacattatctaacttatttaagtaaatcaatttggattagatcatgttagattaggtgggatctagatcaaattgaaataagataaaatcttttcaagataagatgaatctattaagataagagagaatcttttaa

SEQ ID NO: 12660 - DNA, 366 bp, Zea Mays
atcttgtcacgtgggcagagttcaagcaagcattcagggaacactacattctagatggtgttctacaaatgagactggaagagtttgttcgcttaaagcaaggggggagactcagtgatgcaatacctcaccaaattcaaccatctctcctagtatgctatagagcaagttgacacagaccagaaaaagaagaattgtttcatgagaggtctgaatgatcgactacagcagaagatggccacttgcctagatctcacttacagcagggccatgagcacaacactttcggtggaggccaagaatttggggcagggaaatacaaaaaatttgggcatgaagggagtgaaggattatggcagaacctcc

SEQ ID NO: 12661 - DNA, 489 bp, Zea Mays
cgtcgacaggagtaaaaggaaacaacatgcgtaaacaggaaaagaaatcgacggatgaggactgacttttccttcacaatgggatacatgtgtcacccgagaccgtgttcataagggtagctctcaccagatcgggcctcggatggcgccagagactaggtttgtgaaggtcggccttcccggactgggacatagataaatgtaaccccattacaaaggaagagtttgttctcatgctaccttccgggtgtaaggttaggggccgacctaaaccgtctaagctccgctgcacatctggctcgaagggtaagcagcacccggtgaaggctgttggctgctaccccaaacgccatggagcttgtggctgatgggttgggtcttggaaacaccggtgtgtgtggggagcttccattggccctactcgccccggctggccacctcatgcatgatgaggttgctgaaggtgaaagtctcctagagggggatgga

SEQ ID NO: 12662 - DNA, 399 bp, Zea Mays
cgaggttctgactggtcgtattaaagatcgagtgttgctcggcctctgcgtgctcgacgatgcaagatagacatcgtgcgatttggcgtgtactcctccgtcgggggctcgacctactctatcctgctcaaggacttgccagagttatcgtagtcatttctattcctcaccgagctcggcttgaatctcgcaaagttgttcgagttgtgtgtgcagactccctacggtaatttagactacatcttgttccctcgtgccttcgatgtgtggtgctggtgctggggtgttgacattcctaggatgccaagctggttctctcctcagtgctcctcgtgcttggcgtggaagcattctcgagttgggtcgtaacccttgtcatctgagctatagtcgttggag

SEQ ID NO: 12663 - DNA, 630 bp, Zea Mays
ggtcaaccgaccgtcatcaatcctgacgcagacccgagcgccgctctcccagggatggcagcgtggtgctccggcgagcagtgccctccccgccacggtgaccgactcgcgacatgatgtgctgctacacgaagcggagggcatggcgaacacaggggagtccaacataccatgaattgtggcacaggttgacaaggccacggcgcgcggcggagttgcggcggcggcgaagttcggcgacaaaattcgggtgctcggtttgatccccgggcatgattcttcatgtacacgacccacgtacatggccgaacacccacgacccaatatcagccactaatcgttggtgcaagcacggggcttcggggcggatggcagcctactccctgcgggtttgatttcttggtcacgggagtggatgattggtcgagatggatgggagttgaggggagagaagagcagggcaagggcgcgaggcggcaatacttataccccgcggctagatcctaatcttcacctggtgccgcggatctgaccgagagtcacggcagtcacacccgcggagtccgtgctcaaggaggccatgaccgagaatctcgttggcgccgttgcccgagatcgctggcagctcca

SEQ ID NO: 12664 - DNA, 336 bp, Zea Mays
gtggtacctatgcatggacgccgcgtgaccatgctcaagccactgctgacagcgcaccaccttattccttctgtgtctagcctcaccggaaccggtgcccgccagtctccttatctctatgtcccgcgatctctgagtttggcaaaattcgtcgtgtccatgcatccatcacccaaattgactgcgcagcgtgctttgccattccattgcgcccgtttagcctcataattgtcgattgtctttccccgagtcctctgtgagacgtcttgccccgccgatcgtcgtcgcaccatccaacctccgcctcaccgcggccaaggttgcacgacatcgttc

SEQ ID NO: 12665 - DNA, 612 bp, Zea Mays
tgaccgacaacgcggcacggcggatgatgaaccccgacgagaaattacttgcgccccgttggctcttcgatcaccgcgacactgcacactcccaccacaccgagcagcgaagtctcgaccccaagatccggaggcaatgcgtccacgggggtggtgatcaccggcggcggctcgcacgggttggttctctcagtcacgggggatgacggctgggtacgtgcggttttaggatttagggttcgcgggcaagcacaacatttaacgtcccgatcccacgaactcagagccacgaccagcagctctggaagaaggggaggggaagactgcaccacctgccatgcacgggattcggttgaaggagcaactgacaacaccagcccacaggtcagagaaacggtcacgagacgtgcgcgggtcaaacgcgcctggcggatgggtccaagacgccagtgagtacgctatagcgcgcggagcgaccacatgcgggtcccgcctgtcggtgtaatggtgaatgagctgggctacgcgaaggtaatgttaggtgggccgaaatggagcaccaaggcccaggtaggttcttttccttttcctttttatttttctatcttcttt

SEQ ID NO: 12666 - DNA, 671 bp, Zea Mays
cagggacatctcctcaacgtcagacaagctttctaaccttgagggaggtagtgttggcggggcttcctcttttcgttcagtctggcatccttggctcttggtccgcttccggattttcttagtgggggcgagcttctttaacttcttatcatagtccatcttcagggttcggtaggcttcacaagtgttggcatcttcaccttctgctatttcgagactttcttggagggacgccttttccttttttttaattccttgatttgttgctctaggctttccacccgggaatttaggtgggtgcagtgggagaaaaggtcgtcatagtggttgtcaagggtgtggagatatctggccatgtagactatggtggggtcatcctcagtaggatctcttccggacaaggcctgaagtcttttccttcaggtaggggtatttttgttgctaggtggaaagtaacaaaggggtgtctcggagacttccctgttgtagttttggcatagctggcggagggctttttgggcaacattttggcaagtgtctgggaatcagtgtctagtggaagtgacttggaagggagggtgatttgggtagttttggctttctcccaggtagactgccatagagcatttttcaattccattcttgtggtattccttccagacgtactccgg

SEQ ID NO: 12667 - DNA, 474 bp, Zea Mays
tccgcccggagatcctctagcgtcttcttcatcgtctctgccgcctgggaagccggagccggctgcgccatctgggctacatgcgctgcctgcgccgcctagaaccagcagacccgctcctccagtttcttctccttctcctccgcctcgcgctcgtgctcggccagcagcttatctcgcctttcccacttctcctccctccaggcgagctccttctcctatcgaatgagatctgatgcccgctcctccagaaagacaccctttgccctgaggttttcctcggcaagagaaattttgccagccttgttgtcaagctcctgctgcagcttttgcagtgtcgcctcagtagcggtctgcttatcccactgttcctcaagcatcgcattgtaggctttcaacttctcatgatattctgtgacgaccacctctcgttggtccaagtgctctttcttcttgagcagcctcctctcctcc

SEQ ID NO: 12668 - DNA, 277 bp, Zea Mays
ggagtagaggagtggttggtagatctacttacagtaggaagtgatttacaccatacctgggaaggtatatagccgcccctttgtatgtatgtgtatatatgtatgcaaggatgcaatcagagcagcttaacagctttaaattcctgtgtgtgtgcgcgcgcgtgtgcatcctacctccattgccaacattattaagttgtgtttgcttatagctagtgagcatgtttacgtaaatgtagattgttagacagtgtgtgggctggcaccactgttgggc

SEQ ID NO: 12669 - DNA, 867 bp, Zea Mays
tagcttttgggatcttgttaagggtaaactttctgaggtgctctatattccacgaattccctatttcagtgccatccatttgagtaagccgatatgatcctggccgagtgacctccgctactacaaatggcccttcccatagtggtgacaatttatgtcgtccttcccccgttagaattcggcaaagaaccaagtctcccactacgaaagatcgatgtcgtacaaccttatcatgatagagcctcagggtttgctggtatctagctttactgtattcaatcgctcttcctccaatacgtcaatatcctctagtctggtagcctctgcctcaactatgttttcgaagaccagccttggtgccccaaacctgagatcggtaggttgcactacctccgaaccatagaccatgaagaaaggagtatttccatgcagagctcgactaggttgagttcttaagctccaaaccacatacaacaactctctaatccattttcccgcaaacttttcattcttgtcaaagactttcttcctgagtgcttccagtatcattccattagccctttctacctgattgttggcccttggatgtgctactgacgcatatttgatctggatgcttcattgttcgcagaaatcaaagaattcagagctagtgaaattggatcccaggtcggttatgatgctattcggtatcccaaacctgaatattatatcttgtatgaattccactgccatggctgaggttagagaagcaatgggtttgtattctatccatttggtgaatttgtcaatggcgaccagcacgtgagtgtatcctccctaagctttcttgaagggtccaatcatgtccagtccccagcacgcaaa

SEQ ID NO: 12670 - DNA, 400 bp, Zea Mays
ttttgcctagcccatattaaacaataaagagcaaaacttaacaccctaagccccatgcctaacgctccaaatttatcattgttggccgccccttcgaaccttgttgcttaatgtgatgtgtcccatgctgccttccaagtcccacaagctgcaacacgactggccgacgaccagcccttccaggctctagtgcttatagcctcagcacgtgcattgcagatcgcccctttctgcgtctatagtcgcccctttgtacaagttcctcaaacctgcactggtcactcctgagtcctcagaccacaccgtcgtcgtccctttgtgcttctagtccgacaccggtgagcctcccctgccacttccccagcggtcttggctcccctctccttctagtctagcgccc

SEQ ID NO: 12671 - DNA, 389 bp, Zea Mays
cgtccacctgagattcaagggggagtgagttagggtttaggaggtgagggagagccggagagggcatccgacttgagaggggagtagagagtggagtgacgagtgagttagggtttgggacggggcgatgggtggactgccacgtgaccaccgagtatttatacccaaccactgctgatctggaccgggctgcactgttcactgacagtcctgcaccacgggccgatttctcaacccgagcacaacccgtctgaatttcgtgctgggttgtgtcgtgctcttgtcgagtcgtgggccatctgctaggctagtccatttggataagtatagttgcatgtcggtccctctcttcgtcctcatcgtgcggctgcagctacggtgtcccgtcc

SEQ ID NO: 12672 - DNA, 446 bp, Zea Mays
cgggggccagccttcatttgacaagctttgttcctctgctttccatcatcctcctgcatgtccaaagaaatacttatcagcgtctcatcgtcgccgttcgtgcaagggaaaggtaaaaagtgctgcttttctacactgtgataagaccctttcgcggggtagtggaagcacctagtcctgttcattcgctcgacaagaccctaaatctggggggcaccaactcccgatgcccaaccaaagcaggcagcattaccgacgtctcaagtagactgcatccatcattagcacaggaaagcaaaaaagaaccaaagctgcgatcgatttttagtccaggaaatggcatgcatacaagtaagaggagcatatgacaagtatacgtgagagtagaagtgagtgtacatcatcatccgtacatagtgctgccttgccaaattcaaatgataacc

SEQ ID NO: 12673 - DNA, 652 bp, Zea Mays
aatctggtcggaaacgcaacaaacaacaagatagagagaaaagagggtaaaagtgtggtatatgtatattttgacgatcgaaagttatcatcctataccactatataatctatcagttgtaacttttgcaaaacccacacaaccaaatcatccccacatccataatcctgctaaatccaccaaacgaattacacccacacataacacatccttgaccaatagttcagattgctggataatcctcctctttcctgcccactcaaatccaatgaccaatattatttagatcagtctttgctcacaaaaaaggacaccgacgaggaagctcaaagtagatgaagcgcatatgctgaagcggagtaaacaaggaattttctggcctcaatgtccaaaataaagttaactgaactagaaacacaggaaaaaaactaaacgaatctagcagtgcccgaaaaaaagccctcagcaaagagccggattccgataatgatgcatagctctttaggtgtgcgcaattgtatcacccgagatatcagtgcttcggtagcgcataactcaaacgtcggtcttgtcttcttggatcaagtttgcccacctaattataagctgctggcccatcccgcaaggcaagccattggaaggcccatcaggc

SEQ ID NO: 12674 - DNA, 532 bp, Zea Mays
ttgtctcttgccaaagtatgtttggctgctccaaattttaaaggcaatgaggttctagtgtcaactgattgggagcagcagaggactgtctacagcacaatgttgcaggaacagctgtccagagctcatcagcgttgcacagaggtcaggggttactctaaagcgagttttgatccatggtcgggtatggcacttgagttttctacctggcggacttcaatgttgtgaagagtcattttcttactgcacttgcttgggggcaagcaagttctggcgaaggggcagatttcatggcctgaatcagtgatgcagcgggagaaccctgaagcaagtagctagcggtagagtgtgtgtttgaatgtaatggcattagggcgtgtgggccctgtagcttgggctggcccagtagagtgcctataaaggctagatttgttactttgtaaacagctaagaaataacagaaatcaaaatatccgtacctcgcgtgcgtacctgagtccttcattttgttcgtggtaactctcctcgccgc

SEQ ID NO: 12675 - DNA, 1358 bp, Zea Mays
gtctttgcttgttgccttgttgggttgctcgcacgtcctgttccagttccaggccagagagagcggggcccggggctgcaggcggcggcccgcggaggagctagggttctctctcccactcccccctgcgtcgccaggatggcggttggggacgcgctgcgccggctctgcgaggaggtcggctggtcctacgccgtcttctggaaggccatcggcgccgccgaccctgtgtaagctaatccccacccctccttcctcctactgtttgtgtttatctttctctcctgttttttttttcctttggatcttatgcttctcctgcagcccgatttgcgaagaaatcccatcccattcgttttcgaaacgttgtgcatcttttcgctcccctggtctggggtttggagtttcgctgcgcattacgtttcagctagattttcctggtagacaagcgaagcgcgcgcgggaacattcggatgggcatattcctggacatccttcccaatatgggagctctttactagtgtatgcaacttttggtgccgctgtaaattttagtggcatgagtacctacctacccactgagttcgcgctaacgtctgtgagttcttgggggtgtacaagggcgggaaacgggtgaaatgcgcttgcatttctatgtaaagctaatgtgctgcgcgttcagcttcgtgatgcgattagtgcacgaattcagctgttctttgctgatttgtgtcttctccttggtgacgtgcaggcatttggtgtgggaggacggttcctgcggccacgcctcatgctataccggatctgatgctcctgaagctgggtgtgagccgggcaccagtgtgtgcacgcttgttgggaaggttatggcctcacaaattcatgttattggtgaagggtaagcaggaattttgttttgcttgttacagtgttcatagctaataagtgcttcggcgttgttggagaagttcaaactttgctgatgtatgtatgtatgtatgctgtgcttgtattcttcagtaccattggccgtgctgctttcactggaaatcatcaatggattgtccatgatcctgccactgccagtgatcacaatctcagaccggaggtgcaattccttctcccttcccttgtgaactgatataaatgtagcccaatttaagttttccgtggtccattttgctgtcaccttatttaaagtctggtgccaagggatttatgccactgcagaagtccttgtggggctattttggcctacgtcttgaaacttcagcatgtagtgagtttggtctattattctctgaacaagttgtcattgtgataagctagctgtgaaaccacacaaatagacatgc

SEQ ID NO: 12676 - DNA, 1184 bp, Zea Mays
ggcttaaggtgtgtcttaatgcaaaatgagaaagttattgcttatgcatcccgcttactcaagccgcatgagcagaattaccccacccacgacttagagttggcagccatagtgcacgccctaaaatatggaggcactatctgattgggaacaaatgccacatcttcactgatcacaagagtctaaagtatatcttcactcagccagacctcaacctccgtcaaagaagatggcttgaactgatcaaagattatgacctcgagatccattaccaccccgggaaggccaacgtggtagcagacgcccttagtcgaaaacctttcggggtaaagaggaccaactttttggaagactggaagaaggaatcaactcagctaaatgcatgtctgggaaacaacggtagcctcgaagtcaagcctatgctagaagatctcatatgcagggctcaacgcctggacgcagagacaacaagacttatggaaagagctcgcaaggagcaacttccggaccttagggcagatgaacaaggagttctttggttcaagaaccgtctgtgcgtaccaacaggagaggcacgggaagtcctgctcaatgaagcccacaactcagcctactccatccacccaggaaccaccaagatgtacctagacctcaaagccagatactagtggagagggatgaaaaaggagatagcacagtattttgcccggtgtgacgcctgccagcgaacgaaggtcgaacaccagaaacctgcaggcctactgcaacccctcccagtgcctgaatggaagtgggaggaaataggcatggattttgtaaccggactgccccggacgcaaaaagggaatgactctatctgggtaataatcgaccgtctcaccaaggtggcccacttcattctagtaaaaaccacttttggaggagccacccttgcccggatatatcttaaagagatagtcaggctgcatggtattcctcagaagatagtgtcagatagagggacacagttcacctcaaaattttggaagagccttcagcaagctatgggcaccaatttagatttcagcaccgcttatcaccctcagtcagatggtcaaatagagagggtcaacaaggtcctcgaagatttattaagagcctgtgtgttgacgttcgacagaaattgggattccagtttgccgtat

SEQ ID NO: 12677 - DNA, 283 bp, Zea Mays
ggcagaggcttcggaggaagatacggagactagcccaggagactgttttgtttgttctgcggcaaagacaaaggccacaacacaaaaacatgccaggtcacgattcagaagcagaaatagcttgccgaagctgaagcacgacagaatcagccgaagcaagtcctacataccgcttcatgctattctccctacgtccccgagtacgtaggtaatcaacaacctacgacctatgttgcttcggcgaaccactctcaagcttcctgggcccagctcccaccaccac

SEQ ID NO: 12678 - DNA, 607 bp, Zea Mays
ggaagtaggagatgatataactaaacatgcagatgatcaacaacctgaaggtcactcagatgtatctgaagctaacccaacggattagttctcgacttcctaagtcctaatcactggcaaaggcagaattaacaccctgaatatgcacatgtcacatgtgatctcttggctcaggataaagctcctagcactgctcagcaggataaccagatctcttgcactgagaggacagtttgggtatgagaagcagacagagaaacatctttcataagcagagcagtaagagccttatccatagtgggaagcatgtaacgtgctgacgtgcaacaagctcaaccacagtaggatcgaactctgggcgaagacgtgcaatgaagttaatcaagtcatacttctgattaaatttctccttggttgtggaacagtcacatccagacaggcctttggcatcatgcagtccaactgccatgtgctacgcgtgaatgcattgtaagaagcctctccaggacaggaacgtgtactgcaaaattatgctcataacactgctgaagatactcacatatccctcgagatgatgagagaccaaaaaattgtagctcgattggtt

SEQ ID NO: 12679 - DNA, 438 bp, Zea Mays
tccaatcctagcatgcgaacggccaagttacgggtgtggtttgtagttgctgtgccggtagatgctgctgctttgacaagtactggcaggcttcgcacctctgaactaacttggctgcatcactttttgttgttggccagtagaaacccgacctgaagactttcccaaccagggtcctggatgctgcatgcactccacattgcccagcatggacctcatccagaagttgctttccagtagctgagagaatacatttcatgaggactcctgacgcgccccttctgtaaagcgtttccccaatgagtgtatagtgagctgactgccttgcaatgcgcttggacctgagtccgactggaccccagcttagataatgcgtcagccgccgcgttgcggtctctctccacatgatgaaattccaaaccttcaaatttatcttct

SEQ ID NO: 12680 - DNA, 332 bp, Zea Mays
tgcaactgtgtgagtatggatgcaaaaatcaccaccttgtgtgatgagttgtgcaagctgaacatagaagttgtttcctccggtgctttaagttatatttcagtggagcccaccctacatgagcaaatagtcatggcacagattggtgacaaggatgttcaagtcattaaggaaatggtcaaacaaaaggtggacaaatacaaatgcttccgtcaggacaacaaaggaattctatggtttggtgaccgattggttgttcccaagaaccccgagcttagaaagagaatattggatgaagctcacctttctaaattctccatgcatcccggcag

SEQ ID NO: 12681 - DNA, 397 bp, Zea Mays
gccgagctgaaattcaacttcgtgtctaggcacttatgcaacttctgccaaaaccgagaagtaaactatgatccctggtctgacacaatcttcttaggtactccatgtagacaaactatccgggccatatacaactcagctagcttggccccccgtgtaattagtcctcacaagaatgaagtgagccacttttgtagtctatgcatgatcacccaaatagagtcataaccaatagaagtgagaggtagaccaacgatgaagtccataccaatttcttcccacttccacttgggtaccattaaagggtgaagtagtctagcatgtctctgatgtttagcttttaccctcttgcaaacatcacaaactgccacatgtgaagctacatcccgttttaaac

SEQ ID NO: 12682 - DNA, 561 bp, Zea Mays
ggctgatgctgaggaggtcggtccctcgaggcggcccgaggagctggtcctggagcgaaccgcactcctccctggcgatgaggcgagtagtggtgtcgtccgcgtcaggagggaccccttgcatggggaggcacacgcctttcatggctggatgaggacggtgagccattgttcttcctcgacgacgtggaggagcaggagatgtgctccgagttttgaatcatggcccgggtaagaggatcgagcatcttccattgtgatgtattccttttcgcagggcatgtcatgatggtgtcctctttcctctcaggtcctcatggcaaagtcagcggccaagtctgtctatcttcgtcgcgagtgtgatgtctaggatgtgctacagcaccagaagggcttattggatcgttcgaacgagcaactggcctagaaaagcgctgaggtagtggatctatcgatgttgtgcttggatcttagggacgaggccgcggccgtgcgtcgagaggtggcaccattggctgaggaggtccgcttgataaaagagaaccttcaaaaggtgtttgg

SEQ ID NO: 12683 - DNA, 318 bp, Zea Mays
gttcccttcgcctgttgtctgcataactcttctgccgactctgagcttcaagtaaccttctgcggatcagtgcaactttctcttccgcctctttgacaaaggcaggtccttctagtgctttttcccctacgttggaccacatgagagggttctggcatttccgtccatacaatgcttcgaatggtgacatcttgatgctggcctgatagctattgttgtatgagaactttgcatagggtagactggattcccaacttctatcaaatgctagcacacatgctcttaatagatcttcgaggactttgttgactctttctg

SEQ ID NO: 12684 - DNA, 746 bp, Zea Mays
cgcgcactgcccaattcgttcaacaactggcgcttgagtttggctgaagccgaatccaagacctaaggcccgtttcccctaaaccaatttcataaacggtgagctatcctgctctgtccacggtgacagtggttatcgcggacacctgaccgcggtcccggtgattaacgaggttctagcttaattggatgggtcgacgatcatccagagcaagtaagaatgccgaaacaagaacgcagatggcgagaatggacctgatttgggctggccacagcgagcttgatttcgcggcgttcttcaaccgatttgggggaaatcccaaattggggagctgtggggaacgatcggagctacgagttggttcactggacgcacgattacctagcggaacatgctgaggcttcaatttataggatacttgagcggtggtgatcaattcggtcgagcagcgctggcggccggaggagaaaaagagctcggtgtgtgaaacaggtggctttcaccgtggcagtcactccggtgatcaccggacatgtaccccatggttcaccatgatgagggccagcgcttaagcacgtggcacgcaacggcgacagctcgacgacggtgagagttatccgatcgaccgacgagctggggggggggtacgacaagcttagccgcaatcgagctcgagttgatcctatgccaatatttttacctacccgtgcttatctgctgaccacggtgcacgaatcatggcaagc

SEQ ID NO: 12685 - DNA, 409 bp, Zea Mays
gaagaaatacattatgggaataactaatgctgacagagtaacacatgagtaatcagcggaagtcatgatggctgcagtccatgcagcattgataggcagtaacccgcacgagtaatggtgagtcattgtcctcgatatggtaacgtgtgagtaattgcgcggcccacgtatcgtggactgggcacgccgcctgtcagtggaatggatgggcacacaccttatccgtaatgaatgcgaaggcgcgcgtagcccagaggcgtcatgccaggttccacccattgccttatgccgcgcgcagtatgccacgtggcagcatcgggtctccgcctgagcggggagcaggagtgtatgcggataggcccggatccctccagaccaggtctggacacatgtcggctctgaacccccg

SEQ ID NO: 12686 - DNA, 721 bp, Zea Mays
gaacaacgaaggcgcacaaccttatcatacaaattacggttacatacacacatcgagggcatcatatattacattggctcaaccttcgggatgatacccatctccctatagttgaacatcattatcctcaattcctcaccctcaaaaagatttcgcagctccccttcacctacactcgccccaatcggcgaggacaacaattctcgtttaccagtcccgtccacgcgaagacgaccactctccatctcactacgatgatgcctaccactttgcgacaattcactcactctccgttttgccaccgcccttcgtcgcctatacccagtactcgcacccgggagcccctcggaaccctccacgcgcagcgaaggctctgctgcagccacatctaacgctgcaaaataatccaagtcctcatctgaagactcctccatccacgcaatcaaactcccagaatcatcagactcaaaacacttagacacagagccaaacgaatcatcaccagcagccacgatcgaagccgccacaaaaatagtattgtcagtagcggttgcgtgcgtaggcccaaacctcagaacctgcgcagcaaccgaggttcagtatcacacagacaaaatttacaagctcctcaacacctattcagccacctgcgaaggactggccaaggctgtggggtcttcggcagcagccggctcggccaccgccttcgaggcgtcctcgc

SEQ ID NO: 12687 - DNA, 783 bp, Zea Mays
cgactgataagacatttgagaaccgttgttctacatttgtcgtgctgctacactcttgtcgtagtccttatttgaggtccccctgtcaggtcccaacattgatgcccacagtgtctgcttcgaacaatcaccccatgatgtctccaaaaaaattatcacactaccacaactcgctatcaagtcagcaggagcaaaggctacctacgctcacgacaatgaaaccatgaatcatcgatgataattctttagtgtgtgtagtggtgatgttgcttgttgcttttggtaacattaagtgctcaggactcctttccattttatgcccattttcatcatcatcttgcccttccatttgcaggtcaacaattctattggatatgttacctaagacattcatgaaaagcttgactagctgacccatttatgttgtcaaggaatttgtttttgctaagtaagcaatatttgctccatatcattctttactcttgaaccactagtgtcagggtcttttctttatcttcacctccatctcctgcattgattatattagtcgatacgtcatgtaaatttcattcctcagtatcatcatctaacactatagaatgtgtgatttcagagtagtgagtggaaccggggcgttcctccagtgattcactagaatctccatctgattcttctcctttagaattttcactgttaacacatggtggggtacctgctattttttgtgatgcaatcaacttaagacgaatactagcaccccctcattgtgtagcactctctaat

SEQ ID NO: 12688 - DNA, 484 bp, Zea Mays
gtctaagtaatgtctaactgtgtcggtcacttaatcgtgtcgtgtcgtgctcgtgccagtctatcgtgtcggagtggcggttcaagcacggtactagacctgtgtcgcgtcagcactagcactatatgaatcgtgctcgtgcccgtgtcgtgccgaaacactacgatcgtgacgtgcttagtgtcagcccattttggcacgcacatttggccatctatagggcagggaagcgcagctcattctatactactctattaagaacctaatgtagttatctggtgctactacgacttcaccctccgcgctgacacactggatccgctccacgtgtcccgactggctctccgaccccacgcgccccgcctcgatgtcgtgtcctatgggccccacgccgaacatccgcgcaacactctctcagctactaccctgtggaccctagtgctcgcgcagtcggttactgtgtttgctcagcacccgatcccgc

SEQ ID NO: 12689 - DNA, 678 bp, Zea Mays
ctcgtacagtgaagtctcatcataagtcaaaatttggtaaaaattcagttaaactctctagtatttcaaaatgaagggcattttctggaattcagatggttttaaagaccccaaaaaacatagatttgtgtttgacctgattaaggaacaaaatctatccttcattgccatttcggaaacagtacatcgttcgtttactgatctgttttgcgcaatttaagtggaggtaaaaacttcttgtggcactataaggagccagatggtcgatcaggaggcattttgttgggtgttgatttgaatgtgtttgatattggagggattgacgagggagagttttatgttaagtttactctgtgtaataagagtgatgctttaaatgggtgttggcagtggtttatggatctgcacaagtggataagaaggagcttttttggctaagttggtgcagtttactagtcatgcgactctacccctcatcataggtggtgattttaatattcttaggaatcaaaacgagaaaaataaacctttgactgaccaacgttggcctttcctttttaatgtcgtaattgatggtcttaacttaaaagagatagagttgtcgggtcgccagtttacttgggcaaataaccttccgaatcccacatgcgagaagttagatcgggtccttgttacaac

SEQ ID NO: 12690 - DNA, 452 bp, Zea Mays
tttgaactcaaaccaaattcatttggcacggttttggcacagtttgacctcgggaccatgcattttgacactggcaccttggtgatgctacaactccctatccctagcctaaaaccgcgcgacgtccatacacaaaagacaaagcaatgtcaggggaacaaatccttcacagtgatcttgcccaaattcacgaagatttgcgcccaatcagcgttagaacttgggcagaggcaacagttccacgtgttcgaccatggctgacacccccggttcacgcccgttcgcgcacccgcgctccccagtgcacgcccgcgcgcgctcgccgttccacggccgcccgtgcgccgcgccgtgcctataaagcagccccgagcctcgaccatacctccctgcgcgctcacaagtcctgcccgagccaaagatcaccggaattcgccccgagcacgccgcgc

SEQ ID NO: 12691 - DNA, 466 bp, Zea Mays
cggagcagtcaccattagagtcacaggaaccaagcgaacccactgctcccacctttcgaagcagcgcgcggcacccgcgagtgccaccaacggcggcgcagtccacccggttctacggcaatggtggtgggttacgaaggatagaggagaaccggtcctaggcctacggctttatagccccggggagtccgtccatggcgcccacaaccacctacgcgaagtttgtgcagccgccagctaggttccgagtccagcgcctaatttggggaaatcgattggaggaacgcgagatccgcggggaagggacgtcccgacacccagccccacatggcggtctccaagcgcgcacgagctgcaggaggagaaacgcgcccaggcaacaatggccaggcgcgacccgcgcggtcgttgagctccatacacgcggctgtttcggtgagagggggaaagagatgacgcgcgggac

SEQ ID NO: 12692 - DNA, 372 bp, Zea Mays
ctggatataatgtttactgtacaagcatggggtagtatggagtggacaaagttagtcagatatttactaaaatttgttgtcgccattgcttggataattattcttccattgacctattctagttccatcaaatacccatccggtgctggcaaaatcctaaatagttggattggggattggtataatcaatcagtttataacattgcgatcgtcatatatatggttccggatattcttgctgccttgtttttcttgttgccacaacttcagaatgtcatggagcgctcagattcacgagtgttggttctcctgatgtggtggattcaggtctgtccctcctttttgtcttcacacggtttttttgaacgcaat

SEQ ID NO: 12693 - DNA, 455 bp, Zea Mays
tgcgtttgtccaacaaagtagtgaagtacaccagcagctgaggtcgagtagatagatttctgtgtctgcgccgcggtcagcctgcacgaaatgtgtacgcaaaaaataaaattcagtgaaaggagaaagcagaggtggattgggatcgagaaatagtgtcatacactcactccaggtcacatcacatcaggtcagtctcagacaccagggtcgtgtcgtgttgacacagattttccacaggtgaactgaaacatgcagcaggagaaggccgaaaggagccggtgccgcaaacccgcacaagaaagcttaatttacagccgcattacgtgaacattataatcgcatttttttacatataatagagtagttgcttcacctaatggaatagacctacgtgcgcgcgagcgcaatgacgatgatgtcgatgagcacgctagtctaggcctctaggggtg

SEQ ID NO: 12694 - DNA, 382 bp, Zea Mays
tagctggttctttgcaggtaatcttgccacggtgaaagccacacatctcttgtgccagtgacctcccctctttccggccgccagcgcgccattctaaaattgggagccacctcccttggacactataaatcggtggcccagcttgctccgctaagtaattgtgcacccagtgaaaccagccctcacctccaatcatcccccacagctccccaatttgagatttcccccaattctgttctctgcgccgccatgagcgagctcgccgtggccagccttctgcaagtccgttcacatcctcctcgctctcgttactgcaccctggtgtgctcaggatgctcatcgacctagccaattgaactaaaccaccttagatcgtcgggaa

SEQ ID NO: 12695 - DNA, 520 bp, Zea Mays
ggtatgtacctcgaaaccctgccaccttgaatgtgagggtttccttttgggaattggcaggggtcccgaagcaaacaggcaggtcaatctgtccgagggaatgcacccttttaccggggggtgatcccatggaatggcgcgaccccaatccggatttgagaccgcccggtccctaggagatccagtgtgttcgcatagatgatgttgaggctgctgcctccattcattagcaccttcatgaggcgcatgttgctgatgatggggtcgacaacaagcgtatacttcctagggtttgggatgtggtttgggtggtcatctcggtcaaaggtgatggcacgatccgaccagtctaggtagactgaggtcgctacctcgaccgagaatacttctcgacgttcctgcttgagctgccttgaggataggttgacggtgtctccccctaagatcatgtagtagttatgtacatcggggaagccatcgctcctgttgtcgtctccaccgttgggagccttcttatttc

SEQ ID NO: 12696 - DNA, 858 bp, Zea Mays
gtaagcctatcattgcatggttcctcctcattaattttctgcgagatccttctcaaatttgacatcatactttcacctccataaattacctccccaatggtatcggttagtccagtcagctcattgaccaactgattcctctcttgaagtacaacaacagacatatcagctgtcttagacttcagctctcgtacgtgttcttctaatgtttcatttctttcctccaacaatttcagcttgtttgcaacttccagatgctgctttgccttttctgacatttcagaagcagtgcgagctttgagttgttccataagattcttcaaatttcttgactgatgcttctcttgcaataaactcacctgcagggagtcaagttctctttcgcactctgcaatgagcatatccttgaaaacagtatcatgcccttggatgacgttaagtgaattcagagtttctgcaaaaccataaagttgattcacctctagctcaacttctgccacttttgttgctgcagcctcaagaaggtgctcgatgtcaacctgaacagattcaacagtttgttgaatatcagaaattgcaatttctttctctgctattagtgtataccgatctgctttctcttgattaaacatttccatgagctcctgctccctgcatgcaaatttctgctcaaagaatctaatccgttcttccagctccagaagttttttgtcggagacctcaacaatttcatagtacctgttcttcacttcatgaatagacttctcatactccatcttgataagacttcccaaatcaagtttctggaccatgttttcctcttctagcacaacgatgcgttgctgaagcttatcaacc

SEQ ID NO: 12697 - DNA, 1150 bp, Zea Mays
gtgggtccttgctcctatggaaggaaagaatgaaaagaaggaatggaccgagctggcgagagaccttaccgagctgtcgttcgacaatcgtggggtcataatggtcctagtcgtggtgggcgtgctcggttgacgtctcccgtctaagcaagagttgatgggcatcgtgttcaaggttcggacagggcacgcttttattaggacaattcacatgaccttcttcaaatgttcgtagtgatttagcgaggtacttgtgcttaccgggatgcacaccttgggtggtggggtggcaatcgttttgtgtgtcggagtccacacgattcaaccccctcaccggtcctctaacaccaggccctattctttgcacctccgatgccgctccgagtccttcggcgctcttgttttctcgtcctgaccactcaccaccgccattcttccttccctgtccatggcgttctgggatcactcttcgattgagcgtagtaatttggatgccctcatcgcctgcggtcttctgcgcgaagaagatctgaagatccacggtcctgaggtcgtgcccaggccgccaccaagttttggggtgtcattcatgcacttaacgagtggggtttcgcaacgtcgtcgcaccctttcttggtaggcctccttcatcactaccagatccagcaacaccatctcaatactaacaggattcaacacatggtgccctttgtggtgctatgtgaaagggtacctgggggtcgatccctacttttgccttaggtgccattctgcttcaccgagctgttacgggccttctctaggcacatcagtggagtcggcgcagatcaggtgtgcaagcatccacctacatgggacacgatcgaagggctacatccaactgcgattaagctcatccaacaaaggttggcacaagtagtggttttatctttgtaactgtggcccgcccacagccgccgctcatgacctccgccctttctcgcccgaggttcccacggaggcctcccaaagcaagatatggggaatcctggagggtgagaagaggcgggtagccggagccctctccatcgttttgctcctccacgagaaggggtgacggtcacatgggtgagaagaggcgggtagtcggagccctctctgtcattttgcc

SEQ ID NO: 12698 - DNA, 683 bp, Zea Mays
ggtccagagctgtgtagccacttagcctagtcccataccctaagcctacacgctccaccactctgcgacgggtgccctattatttggagctgtgatctaaggggcccggacacacgggttggcttcccggtctaaatcctatatgttctattgcgtgaatcaaaggataaaagataccagttagtgggtcatatgggtgtactactaaagcttcctagccaaggctgtgtgcaggtccaggtcccagtcgagactacctcctgggggccaggtcaccaattctttcttaagtatactagcatccagcctcgacacgtcgagcctacatcccaggggggccaagtaccagggagaagttggtaacgacacacacaacaaagacaaatagcatgcagataagttctgtcactcttagattaatacttcccaaaggtatcttacaaaaacaaaagttattacatccgccttcaagcggatccctagcctcatttctacaggtatgaactactcggcatcagcagggtcgcgctggaagcgcgcggccaccgtctccacagcatcttgtatggcctcccgagcgacgtcttcagtgttggccactggactagcgatcgctggctccaagaagatggccgggtcatggctttggggttgccacaagcagccacggcaacggccagtac

SEQ ID NO: 12699 - DNA, 812 bp, Zea Mays
atgttcatgagccttagatttatgacgcagggggaatgtccaacaaaaatgagtaaaatcatcaagtataatatttatagtccgaaatactcaaaactggagaggtccagacatcacaatgaacgagttcaaaaggtgtagatgtattagaaacagaactagtaaaaggcagcctagcgtgttttcctagctggcaggcatggcaaatgcggcgagctgctttattacactgtatagctgaaagcttatttagggtttgaacggcggctggtgctggatgaccgaggcgagcatgccacaactctggagcaacgacagcaacatggcagtgaggcagcagacgatgtggaatggtgtagagatccccgttgctattgcaccgaaggaggaccgttttggtttggagatcctcaacagaaaaaccagaagcgtcaaactcaatggaacagttattgtcgcgagtaagctgtcgaacagataacaaattacgagcaagctgaggaatgacaagaacattattaagatgaaaataacgatcagctataggtaagagagatgtgccacagccagatgaagggatggactgcccgttaccgaccgtaatggagcacgatggggaatgacaacgggaaaggagtataccgtcgttggaggacatgtgggatgtcgctctgctgtccataacccatgaaggggagtcctgcaccgccatttgattaagggcagcaatcaagttggctgtattccagccgcctgaaggagcacctgcggcggagaactgcggtggcgcaaaggcggtgtgggcctgctgt

SEQ ID NO: 12700 - DNA, 1041 bp, Zea Mays
ctaaaccccaaggggcgacatccgggccacctataaaagccgagacaccccccgagcatctcccacctcaagcggagctccacctcacccgaagacgacatcactcacttcgtctcgcccgaggtcgcctcagcctagtccgtctcgcctgagccagccttgtgcagataggacaaggacgctcgaaaataggtaggggactggtgcatttaatgtgtgtgccaaactgcaccgtggcagtggagcacaatggtggataagatagcgatcacgtctaagcgtagcggcatgattacgcctatgccaaatagtgtgcgcacgccacttggcaccctccgatgggacgcctaaatacgacaagccgagaagacgagtcttcgagcgctccgcctcgctcaacccaagctcagcccttagacaagctctccgcctcgcccgagctcggcctcggccagtgactacgccacgaatcccacagacaaccactctgccctactgtagcgcacgtcgagagatggctcggctagcgccttgggaagacttctgcatcaactaaacaaaggctcttatcttaatgaaagttgaatagaatctcgacacatcacgtgccaggacgatgacgtaccccgtaaacgacccttggcccatatcccggcgctgttacaaccactacggcgtgggcggcctctccctcgggaactcgggcgtacggacgaccccttagcttcggctctctacgggaagtcagcacacacgaatctactgcacggtccgccgtcacgtcaggtgtcagggcatctctccttcaaaatacaagacccggcctcaccaagggcgctcctctgggcgtataaatagggtaggggaccctccacgaaagaaggaggatcaacatctacgcaaagggacacacgtagtcgagttcttgttttctcactttgtcttagatattggcacttgcctcaatcatctctagggacttggggacttcccctctctcactgtgcttgtaaacacctactataggcaccaaggtgccag

SEQ ID NO: 12701 - DNA, 468 bp, Zea Mays
cgaatactgaattcgtcaaaagaatgaattataccccaacatttttcaaggtaactatttagagtaccatcaaaacattgttattcttctaacacctgttggacgactagctgagaatcaccaaatagcttcacatgttttactcccatataatttaaaagttctaagccgaacaaaagggcctcatattcggcttgattgttagtgcaataagttttcaatcggctagagaagtcgaaggagacattacttggtgaaacaagtacgatgccaattccctgcctttcattgcaaaccgatccatcaaaatataaagtccaaggagtaatattgaggtatgacatgtctagtttatgagcatcattaacccgatgttctacaataaaatccgctacgacctggactttcatagatttcaatggttcataggccaagtcatattctatgagtgcataagcccacttacca

SEQ ID NO: 12702 - DNA, 745 bp, Zea Mays
ctcccaatgccttcttgccggtctgcaactcctgcccccatcatcgcaatcatagcagccttgaagctcttctctatcgaccctttgaggttgaaggcggacgttagggctgcaagtgtctccagtgactgagtcctttggaacatggttaggaatttttgtaaggcagcctcaaagttattggattcgttgtttagcagtccgagctttctacaaaggtttcgttgggcacgctggattacatgcataggacaagattttgcgagtcggacgctgcgtcgtactgtggtcgtgttgacagtatgaagtcggtgacacagtgttggggttgccttgcttgcttctattttagtggttactgtcttccttgtctcttgaatttctgcagtagtcatgctgagcagaatcgtccgcgcgggcggcctaaagaggcactccaccagcctatccgctgccaggtcaacagaccggtgcacaccacgataagttgtagcatccagtatcagtgatggaggatgggcatcaaggtgctgttgttgtagcacttctgcacccctctccatgctcctagaatatgtggaaagagaggaccaaattgatctgaacacatcttgtattggaatcaaacacctagcagcgggatcgttgtagcaattctctttcatagatgggttggagtgcacatcactgaaagcatttgctgataaatgcatacccaggttattgtcgacgtgttgtgcggaag

SEQ ID NO: 12703 - DNA, 343 bp, Zea Mays
ctcggaagggcgttgtagtcatgcgctatcaaaagtcacctaagggtgtagccggataggcacaacaagtgtttaacaccacccaaatggtgcgatgtcatctacaagacgcacattgtgcgagcaaaagttgctcaagagtgcagctggatcaacacaacacatgcgtaacaacacctaccgggtgcgaagtcgtccatggcacgcacacgtctatccacaccaaagtcacctaagggtgcaacaaactcacaataggcacaataaaaaacatgaagccatcacaaaagaacatcgatatatcaatataaagggcacaaaggcgccacccagcggaattcag

SEQ ID NO: 12704 - DNA, 637 bp, Zea Mays
tggatatcctatatgagcaggtttctgtagcgaatggaagagatttgtccagcagcattttcgttgcctacctggcatgtgggtaatctggaccatccatcccctatcgtctgccgcaccacccaaatcgcaaacctgttcaaagcgccggatagcagtctagcacgccactccacagtccacagtcgatctccgacgtcactttcacgcctcacgcggcggccgcgtcatcaaatctcatcgctcggccgctctcacagtcacagctgaatcctctcgcagagccaccacgggagctgaagtcgtcccctcccgcagtcacccccaagcgagaccactcccacctcctccactggcgtctagccggtggctgctgctggtgcgctacgtcactggctcggggggctcggcgcaccttgtgatgaagggaaggcggcagtcagtggtccggcgcatgtacaaggcgctcctgttcctcgtcgccgaccttgtcctcgaatccgcaggtcagcacggtttccatcccctcccctcccctcttggtctccccttctgccgttctgcgtatctgccaagcgatttcaaattaggcactgccggtgagtggcctagagctgggcggcgccctctgtttact

SEQ ID NO: 12705 - DNA, 376 bp, Zea Mays
acaggagtcgaggggaccaaaatattagaagttctaagctcttcggcagaagtggcagtgccaaaggcacaaaaaggtcttacaacgacccccaagaggaaaaggatgaccagtgtactggatgtgctggagacgataaaaacttcaagctctactcgagggaaaactgccgaggcttcaaaaatgcagactgatacaaggccgaccgaagccgaagctacaaagagccgggccaacaccgaggctgggccttcagagcccgccaaggagaaatccttggaaaccagagaaaaggcagcagaaaaagaagctgtagaacaaattccgtctgaaaaagttggcactcctactcccgaagcgccttccgaagctcttg

SEQ ID NO: 12706 - DNA, 961 bp, Zea Mays
gtcgatcgtttctgatcgccagaggatcgatcaaccgattagattgattaatcgaacgattagtcgtgattaacccacatgccccacaaccaagttacctagtagagatgaacggggggacaggggagaagaggtggagtcatgcctgctcctgcagggtgccgtcgcgacggggatggaggaggagggggggggggggggctgttgccggtggcgcgccgtcgtcgcccgcgtgctagggttcatcagttcgacgagcggcggcgtgtgggcacgtgcaggcagccatgtctttttgcgtatagggtactggttgctttactctatgggctggaccgctgggccaaaatttccaaattccaatcaaggcagatggatcgtccatgatttaatcggacgatcaggtttctggtcgctctgattacgtcgttaccgctgatcagcttcacagttacgatgggtcgattaatcatgattaatggacgatctgaaaacactgcaagtaactttgtaatacagactggtgcttgtggcggccacactgcacgacacttcgcacatctatctagttgaactaattcatgagctaccctgttgcactcccttaaaatctctctggaaggtgatggattgaaaatgccacaccactgatctgactccatcgatgccaaacgatacgttgacaccacttgcacaatccaactaaagtttagtcagtttctgcacccactccgcagcaagctgcaatgtttcttaggaagctataattctacttcctcagcacaagcacatacactcactaactggccatgttgaaagagctatctgtcaatcatgatgaaggattataataccaacacttaattcaagatgaaaatttctgtttgcagtgtaccacagacaattgtcatgtctattcttgtgttaaactgttaactagttgatctgttaaaaagaaaaa

SEQ ID NO: 12707 - DNA, 509 bp, Zea Mays
tgtttgccatgacatgcatgagaattaattaatcgtgcctgttaattaatcgaacagatcgcgttcgtgggcctcatctacccgtgcctggtgttgcagtacatgggacaggcggccttcctgtccaagtctcccgactgcaacatccacttcatcttcttcgagtccattccccgtacgtgattggaataattagctcagctagcatatattgccgtttctgatgtgaagctgagagtccattatattgcacgcgcgcgcgcaggccccatcttctggcctgttctggtgatcgcgacgctggcggcgatcgtgggcagtcaggcggtcatctcagcgaccttctccatcgtgcgccagtgcaccgcgttgggctgctttccgcgcgtcaagatcgtgcacacctctaaccgcatccacgggcagatctacagccccgagatcaactggatcctcatgctcatctgcctcggtgtcaccgtcggcttccgtgacaccgacctcatcgg

SEQ ID NO: 12708 - DNA, 336 bp, Zea Mays
gtccaagacttgcgcaggatagaaagaaagggaaaatacaacaatgtctctgcgtaaacactatgggcctttatgtaaacactatgggtatgtatgtaattgtcggtaccctgaaacaggggtaccccttactacagtataaagacgcgatgcccgtacgccgttccttagccacacagtcaacagcgctcgtcccaccacatgggcagatcaagggggcaccatatggcaatgaaagatgatacatctaggatgtgtcagtcgagccggacctccgcaagggagcgccggacccctgtacgcacaacccggacccccgattgtggcccgggactc

SEQ ID NO: 12709 - DNA, 472 bp, Zea Mays
tccaccccaaatatggtctgttaggctgactgaagaacaatcccatggtacagtaagcagataggatcaagttcagatcccctcgacgccgacgtgccgtgcacttggattcgtgctcgccgttggtgattcacgctcggatcagttaaataacaccgggggtccgtaaatatcacgccgaggatacactccagtcactattttactccggtcgccgtgaccgagcgtgtcacgaccactttggatgggttcgcccaagatagccacttcgcggccttgcgccacatgccttggcacattaacctcaccaccgtgactcatgttagctcgtccggtggtcgccggggagcttgccacggtaattgccaccaatcgcgcgcgccagtaaccttcttctttctccggacgccacgcgtctccctcaaattcaccggccaccgctgtgggagcctataaattgccgaccccgcct

SEQ ID NO: 12710 - DNA, 966 bp, Zea Mays
cgcgcggcgcggccgaggaagctggcgacggagtctgccgcgccttggggataaagccgtggcccttgagttttcgcctcgccctcctctttttcctaccttcgcaaccaccaccgcaacagtgagaggaagtcatccgcgtcgccaagagaaaagagggcagaggggaagcgccgccgcgaattcccgtcgccggtgggattcaagcgccagcagggctattctagtgttgggttcccctcacagcaactgggggaacggctaattggagaaagcgcgagctgtggtaggaggaatccctcgctgtcgccgcacttccgccgtgcgtcgcggacagggcggagcatcgctcgaattctagtaagaatcccgccaacgcattcccatcattgccctcttcgtaaagtagcgtcttccgcagggaccgatggctaggagcttagttcggagaactccggtgatggcgccgccgtctccgtcgttgttgcgccgccggctgtgcggctgggtaggggagaaagacgtctggccgttggatgcgttttggacggattggattagatcctcataccgtttcgattgcatccaaccgtgaccgtagatcgagaatccgatggatgcgggatgatctcggttagatgaagtagagaccgtcgatctctgatccaaggatcaggactgcataccgcttcatttaaacctaaacctaatctgaaccgtaggaagtggatcgggcggctgagatccgtggataccccttcgcccaggcctttttgcacataagcccctcggtttacttgaaaacaacccgtcgtccaccctgtacaacgcgctgtgtctaggatattttacaccgtagcccctgcgcttcctaatatttgaggcccaatccagagaactttgaaaattagaaattaatatcagaaatcaatttttagtgcataaataaatgataaaacttgtata

SEQ ID NO: 12711 - DNA, 504 bp, Zea Mays
ccctgcaccaaatcctacctttttgatgtgagtcccaagcaaggatacggtcggggtagggagatataggggtgagaatttgtctttgtcctagctgtccaaaccgagacaaaagctatgccaagtcgtgtcaaatgacttagggttgggttcaaacttttccagggtgttctagaggtattttgtcgccactttgtcaattgggccaagtggttttgaagcttgaaagagggtgaacatgttgatctttggaaaagggttggttttggacttagaaaaattctgatttttctcttatgctcaaccctttggtgaaccttttggggtttttctgaaatctttttggggtcactttcttactatttttagtagggtattatgtgtactacaattgttataattggcctaagtcatgatcatgtggttttatagccttttggtcatacttacttctagtgctccaattgtccaaaggggtttgcattagggtttgggcaattctcc

SEQ ID NO: 12712 - DNA, 567 bp, Zea Mays
gtgtgttttattttgacttttgagtgtgtgttcgattcgctcagatgagaagataaccttgctgtcccattgtcgcggcttcccccaagctgattggtcgaagttcgttagtgtcatgttgctaaagcgaataagcttcgttgataagccgttggtggaatatctgattctgtattggtagatatttatttatttcttattcatactagcttctgcttctacagagtcgcggttaagctaataatgttttgtagtaaggttgcatgatcctaggatagacacgtgttgttcagaaatcttctctgctcttttctttttagagaactagaattgtttccccatgtatatagttgattgttgcacatactgaaaaaaggaaactcagtgtcaggaggcataagtaggatgtggggaagacataaactaaggcaaaccttactcacaaatgcagtgaggcttttaatccgcaaatgcacatactgtagggaataatttaaagttcagtattcttacacttcagtattttattatttcagaagtgaagttttagtggtccatatcacagga

SEQ ID NO: 12713 - DNA, 274 bp, Zea Mays
tcccgccgaccacacccacggaacaggacacctgcggcagcgccgctcaccagcgcccgcggatccacacctcaacgccctcctaaacgaatccgaggagctctacttgcggcctactgaaggtgaaacgattagagaagttattaccgtgcttcgggatggagaggttgctgcccacgccccgcgccaatccacgaccaagaatgaacgacatcgaggaattacggaatcacttgtggccctactcccgtacaggagccacgacttcccccac

SEQ ID NO: 12714 - DNA, 931 bp, Zea Mays
ctgctttattcatttaaaaggattgttatccagtacaaactacttttcctaccagaataagctatcatgttgcagccgacgacgcttgctgggaggcatctcatcgcattggcttgccccgccatcatcatcgccgtcatcgtcgccactgtcgtcgttgtcctcgtcactgctgccgtagtcactgctgccgtcgtcgtcgttctcgtcatcttcgtcgttcgaggataccatgcacatccaatgtccagacatcgggtcgtcatcgttgtccaaggactccacatctgacgattctccatcgtacgcccaagaccactcagtgctggtgtcggagtccagctccccatcaacgaggaactagaggtcgtcccgtcggtgaggtcgccgtcggattctgatgcaactgcaaagtcccatccatctgcatcccagtgcaaaggtgcctgtttttcatatgctgctataggatcccactctggggttggttcacgggtagaagaatgggagacaaaagaagcagaggaatcacttggtgatgtcgacatgggtaaagctaggcgctgtggcgatgaatggaaatgtggaaatgtgcctgttttttctgagttgcgatgaatggaaatgtggctgatgaccatttaaatacattcaaattgagaactgaatcgacgtttacttgaacttcgaggagcaaagaggagtcaaaagtcgccgcttcatgttcgacgattgtcgtttcaattctacagggacagggatagttgaaaagacacaactgttcaacatgaaacggtctccacacgcggctgagttaaggctacagggacagttgaaaagacacaactgttcaacatgaaacggtatccacaggcggctgagttaaggtgccaccagtggaaagaaggtttccactggcggttcgtaagac

SEQ ID NO: 12715 - DNA, 786 bp, Zea Mays
gcagagacagagaaagaggaagaggaccttgttggtcacgtgactgactaggaagttgagaagggtgtagagttgctcagaggccatgtacgcctgaattgtatgttcagccagatggggctttcttatgaagagcacaaggcgcgcccgaggagggggaggaaaagacggactagagtccccacccaatcacaaatgtcaacagagaccccgtcaacctactcgaggggagttgacgtgggggcctcctttgaagctttcgctgccgagctagcggaggcatgtgagtcaactgactcggcgcacgacgttgaggctaaatccgcggaggacttcttcacggagcgggtcaccgggggtaagatggggagaaatttgattccagtgagggttggttcggggagcgtgaagcggtgggttgtaagagagatgactgcggcgtgcggtcgcaaggatactatactagcctgcatggcgagggagttgcttatattcccttattcacataacatctcgaatataattgtggtagcaatggccccggtggggaaggctcccactctgatttacagagtgatcaatatggtgggtcggcggaagaaccggaagacctgcgccgttgagccctcgaattctacaaggtcctctaaagaggctagggctggcatgaccgctgatgtgggggtagctgcgactgttgtgggctccttggctgccttggttatctccggaatggagtttgcgatgaagtcatcgatgaagatggtgtcgctagcaggttttttt

SEQ ID NO: 12716 - DNA, 362 bp, Zea Mays
ttcatcccctctacaattagaactgtaggtggatataaagacggagagtaagatgacaataatatggtgtggagttacctagtgaagctaggggtggtacagttgacgatgtcgtcgtgctccctatccatctccagaaatgggtagttctcgcacccgttctgcctgaaatacacacaacaccccaaagagcaatcaaattcaaacatgtgagcatgtgccgcccgccaccataagcaataatgctacaacttgcaataggtattcaatgctacaacacaaaaaaataaaatttggcactgattggaatcgagaggggcgacaagctaaaccctacccgctatcgagaacggacaacacca

SEQ ID NO: 12717 - DNA, 405 bp, Zea Mays
ggatcaggttctgatcccctcgccgccgacgagccgcgcgcggattcgtgctatcaccgtggtgattcgcgctcggatcagttggatagcaccaggggtaagtaaatatcacgccgtggatacactccgaccactattttactccggccaccgtacccgagcagaccacagttgatttggatgggtttgccagagatagccacttcgcggccttgcgccacatgccttggcatgttaacctcaccaccatgactcacattagctcgtccggtggtcgcccgggagcttgccactgtaattgccaccgatcccgagcgctagtaaccttcttcctctccggccgccagcgcatcttcgcgaaattggacgccaccgctgtgggagcctataaattgccgaccccgc

SEQ ID NO: 12718 - DNA, 307 bp, Zea Mays
cttgctaagcttggcatacaactggcaatctcatagcctttgaagtaccttcctcaaatgttcctcatgctcttgctcattctgggaatatacgagaatatcatcaaacaccactacgaacttgtcgaggtagtccatgaacacactgttcatcaggtacatgaagtaagctggcgcattcgtcaatccgaatgacataaccatgaactcatatagtccatacttggtgatgaatgttgtcttcggtatgtctgcgggtcggattctgagctgatggtaacctgacctcagatctatctttgagaac

SEQ ID NO: 12719 - DNA, 603 bp, Zea Mays
ggataaccttgggcaagcagaaaggtttgttgttgaactatagggacagggtgacatgcattgcatagtggtctctgacggccatactacacctccttgacctcaatattgtccatcacaactgatatgatagatgaaattgcttatcatgtctgcctagtatcaagtgatcgtactatgtagaagcatacatggtacaagggccataccatctggggttgtcctgctctaggaggcataaccaccaggcgtcgtcctgccttgagggcgtatactttcgaggctgctttgccccagagatattttgaaggatgcctgagaagtctacttatagacatatcttgttgtgaggggtctagatttgaacgagcatgtaggttagctcctgacatgtagggatccgagtgacttgaagagccttgtactctgagagggctctaggatctagttttccgatgtagagggtaccgaaggcggaagagctccggagaccgagagggcccttggccctagtccctcggtgtggggtcctttgattgagttggagccaagcatggccctcaagacaggacatgtggctaccatgagtcagatgttcttaat

SEQ ID NO: 12720 - DNA, 456 bp, Zea Mays
aaattatttaaattatgtgacatgatgaattaatgtcattaacatgtggaaaacatcattataaatctgacataatctgaatagggtgaaataaacttaaaacgtaagagatatcatatttttactagctctcggatataaagtgacgtggcacatttttattgataaaaaactcgccaggcggagggccacatggggctcagccacagtggatcatggaggtgggatccggtgtggctacagccatgcatgggccacgggacgtacgacagcaaaagtcacatgcatgggagacgtatcgggcatgctggggagtcgcagtgcaccatcgcgcatgcaggtggggctcacactgcatgcagtcaggggttcacaagacggttcctatctccacttctcctgcaaccgcacacacacgcccgaccgtttcttctctccacgaccgcacaggactct

SEQ ID NO: 12721 - DNA, 443 bp, Zea Mays
aacattagctgaggccatcgctgccttagttaatgccacggccgacaacacccgctttctgcgggaaatggcgggacaacaaatgcagcagcaaggcgggcgagcagatccgcaaggaccccgcgaaacttcatatctggatttctcagagacacgtcccccattatttgtcaaggcggaagatcctctagaagcagatgagtggatccgacttatcgaacaaaagtttgggcttctccgatgtacggagactcaaaagcctttgtttgcggcacaacagttgcgaggccctgccagcacctggtggggaaattatgtagccattcagccggtcggccatcaaattacatgggacgagttcaaattggctttccgggagcactatattactgaaggggtgctccatatgaagcaggaggaatttatgaagcccaaacaaggtg

SEQ ID NO: 12722 - DNA, 988 bp, Zea Mays
agatggacacgaatcacaaggaaaaaggaagcaaatgaggcaaaggatcaccaaccggaacaactcgcaatgcatcagtggggaccaagtcagtatcatcagcagaaatcaaaactctatcatcaggagtgccggcctctaaggcgactccctgacctgaagcttgagccgctgccaggcaaccagaatgcggaggagaagaccctacgtgaacatctatggaagtatgagagggagaaccaactcgaacatcctcgggggctgggtcatagctcaggctacccattcgagccggatcatccccggcaacaccctcgggggctggataagcgctagcaccatccttgagggctgactcctctgtaacagccacctctaaggctgaaggaccttcatccacttccatgggagcagagcaatccaggccagcatcctgacccttaagaccgcgatccaaggtcgatgaggcacgggacgccgcgtgggataactccaacccgacattaggcacatcagcacaaatatccatcattccaccatctgccggctctgacaatagatcttctgggaccatgtcttcaagagtctgatcaaagtttgccagagataattcttgcagaccaacgagggcagacgaagctggagaaggaacaccactactttccccgctagttatgtagcgccggctgttcttccgaactagaaggacttcattctcctcttcctcatcttcatcagcaatgcgaacattacacccattggggtcagcatcatctaggtcacacccattggagtcagcatcagtcagatcacacccattgggatcagcttcagcaaaaactggcaccgacgcttcctcagcggcaggagtagaaggaccggcatcctgatccaagcatgacacccggcgaagacgtctctttttctttttcttcccctcagcaggagaagttggttgagtggctccgcgaggacgcttcggacgaac

SEQ ID NO: 12723 - DNA, 1078 bp, Zea Mays
ggtggacctaggtaggcatccacatgagctaggtgtgcattcatatgtctgaggctctttgtaaacggttgacatgagtacctccttgttcacagtggataagttatatggtcctttctcatgtgggtaaagtggcacccccttgcaaggattcatgaatcaatttgaattgtcgtgctcacggttacgagcaatactctttgccattggatacatcgtagtgtttacggttgtgtttaaaagttgtaaatgttgctttacttattgtccttactctgtattatgttgcaactaaaacttgatcgtgggatgggcaagacaagtaaaagcaactcaaaggtataggagttgtatcaccctttaactcttaaaaactaaggacatgttatagtcggctttgagcaaatgttacttaacctttaaagcttcccttgctactaccacatgcatactccttgtatctatttatattgtgtaagtcttgcaagtacattcttgtactcatggtgctatgttggataagtttgcaggtgggccagatgttgtatatggctacttccttcttgtcgttccttcgacgggagaggagtgagccattatggtccttgttgcttttgtggctaataagcaatgctttgtggacagccatattgcttattgaccattttgctataataaagatgttgtgcgaggagttggtgtcaccgtatagtagagggctatgtcgttgaagaagatgaaacattgaacttctatttatgttgggaacaaatgtatcttagcttgatgtaatattgcactttaaaattttgctctcttggttgtatggtaatgtgcaacttgtgaggtacatgtgtcaatcctggtgtgacatgtactgggacgataagatttgccttcgttttaaatgggttgttgtgcgaccatgtaccttttgatgtggtgactcatgttaatagccaaggcgtgggcacatgtcttctctaatcatgatggagtggttaccaatctatttagaccgagtgcaaattggaggttcccccacaataaggcagaggcagaagactcaacatggcta

SEQ ID NO: 12724 - DNA, 498 bp, Zea Mays
tgccgtcgacggcgccgtccaggtcggttgcctctcgcttcctcttccttccctgtttttccgatgcatggttccgttaagaagatgacgggaacatgagcgattacccagagatcaagcggttaggcaagagcagcagaagatacgggatcgggatcgcctgtcaattccctgtttaaaaatcagctagaccagatcgtgtgtcatacagttcataatgcaatgaatggatagttttagttcaaacgtctgtttagatgaggctccaacacccgcatccgagagagatgcccctgtttctccagatagagaattcgatatttttctcgttttttacagggttcctgtagacctccatcgtctctataccctgaccctgttttctctctttcgtcgatccatccccatttcccgtgatgcgtttgcctagagtcactaatcgcaactgccaaagtggtggatccgcggatggaatcttgcatgtgtcgtgtggtctgg

SEQ ID NO: 12725 - DNA, 798 bp, Zea Mays
atttactcaggggctcttttgcaaaatgtgccgcgaaggggtatggatggatctcagacgccggattagaaaccaagggcccagatgaacctcctacttaccgaactgctatgcgctcagagccgcccgatctagatccgatggctacaacgcggccccgaacaggtacgctagagtttaatctgagtcaccatgaccagatggatggtcccgatatcaccccccttttccccactctccttgttcaccgtccggcggcgcgacatgggtaacgacggtgccctcaccggtgattgcccacccagcgaaacaacgaagcatgcaggctgatgcatagcgtgatcgacagaggagggaaaggcgaacacggtcatccaggatttaccggcggttacgcagtgtagatcattgcccacggcgtgatgcggatccgcagcgccctcgatctccgatgagaaattgccggcgacgaaatgcctaccgatgagctaatccgggcgcaaacgaacgaggggaaacaggggtagattcaagagagaactcacgatgatcgaagtagcgaatgcggatctccacaattccccagcggcgcaactcgagctcccaaccatgaccacacgctctcacgcgacgcggggagggaagaagataactcttaattgcccaggcggccgtctcgacccgagcgccctagtccgaacgatgtcgagacagcggctatcgcaaggtaaagccgagacgcaagatcggcggcaatggcggcgctgcttccttctcggcactccctcacagacggcg

SEQ ID NO: 12726 - DNA, 729 bp, Zea Mays
gaagccaaattggccaagaacaggacggaatagggagaaattgagtgtgggaacggacatctcacctcgggacggggctcgtggtgacttggcatggcgcggggaggctccggttggccagacgtcgaagaatcatggcggtggcgaactcccaccgaggcaagggggcgatgggggctcaacggcgaccgcagaacgggcggcagatgagcgagcagcggcggagctcccagggtgcgcgcaaagcgagagagggggcgagggtgtctggctgagggcgcaaatgagcaggggaaagtgggtgagcggggtgcgggctcaaaaagggggtcggggcgtgcagaggtgaccgaaaaacgtgcgacgtgggcacatccacggtgggagtgagggcaagaggttagggaagcggagaggactaacgggtggggtccgcgggccagctgttggggcgaaggcgaacatgctatcctttgctcgatgacttcgcctgcccattgtgcagatggtcacatccacaacgcgtccgaacatgctgaaggcgccgaccagatggaggcctgcgcggtccccttcgtggacaagttgcaagacgaaggctttgtcgaagtctacaggtctcccacgtcgtcaccgccacgggaggcccatgtgggattcgacccattgtaatgggcccgcgaggataagcgcgttaagggtcatgtctataatagccttaccgtaatg

SEQ ID NO: 12727 - DNA, 462 bp, Zea Mays
aaaaagtgttgtcagtatgtctaatttattcaccatatgaatgttgaagatgttgattacttacttgaatttgtagccatcccatttacaccaatcacaataatatgttgtattatgtggagttgtttttcggccgcattttgtgcatgatggataccaccatgtgtttgatgtatctattttggtgattgtcactgtgcattcatatcccgtgtcctgaaaagataatagtagaaaggttaggtggtacaaaagtgaagttgttaagtaatgggaagtagtatttttattggtcttactgggtaatcatatgggttcattgtcaggagttgctccagagttttatgttctattgttggaggttggaaggtttgtagtgcatgtttcggttgtgtaggaaggtgcagctgaattgtttcaccaccacgtctgtaagcataatactttgttatactataatgt

SEQ ID NO: 12728 - DNA, 532 bp, Zea Mays
catcaatcaggatgactcagaaaagggtcggacggtgagcaatgcatccgatgccggccggtgcatgcgtgactttaggagatatgtactgtgcagcgtgcagctgtgtttagtgctagggttcattagctagctaggtagcttcatgttatatatgttgtgctagtattgctctttttagatgaagacgctagctggtagccaaacacgtacgcactagatgcacatgcgtttcatggtatagttctcgcagtgcagtgtgtagttgtgtacgtgcgagtgggcagtgcagcatgttgttgcagctggaacgtaacgaacggaacaggatggaagctagaacaggcccatgttctcctacgacgacgacgacgacgaccagtcagaacgtgctgccacgagatcccgccgcctgctcctgtgcaaccatttctcgatctcttgcttagctgctcagcgttaggctagatccagtaaccgcacggccgcgcgctagctagctagacgacgcgcgctagctactcatgctgag

SEQ ID NO: 12729 - DNA, 348 bp, Zea Mays
caaaggagactcggtacgtcggtggggagatcatggttggccgcagccccagcaatgagcatcgacaagacctcgccgagactcctagctacctcggtatgttacgccaaccacctcctcgctcgacacctgaacaatgagatgattatgtgcgtcggtgctgagacttgtgtagatggttgcagccccaggtttgctgccaacaacgacggcgagtttctaggtctcctccccaccgagagtcgccgcgtgcgctccgcctacacggccaccgataacgacaccgaccatcgacgtttccacgctggccctatttgcctgctgcagcatcccttccgcatcatcgcc

SEQ ID NO: 12730 - DNA, 416 bp, Zea Mays
gccaacggacatacataccagagtgatatgcgagtgctagggctaggggcctatgatgctattctgggctatgattggttgaggaggcacagtcctatgcactatgactgggaaggtaaggtgattagttttgtagacaaatggattgaggtccagttggtggggaatcatcaacaacaacaagtggtgcaggaagtatcttctttacaagtggagcggtggttgcacgacaatgatatctgggtgtttgctctgctggaagaagtgactgcagcaagcagcaaagagatccatacagatttgcaagggttgttgggagaattcacggacatctttgttgcacctacagtcttacctccatctcggccatttgatcatcatattactttgcttcaggggtctataccagttaatgc

SEQ ID NO: 12731 - DNA, 470 bp, Zea Mays
ctggaatcggccaccgaggtaaaggcggatcccgcaccagccctcgtcgtggattggggactccgtgcgtcaatcaccggtaagattcaactccgatgcattcctctcctttctccaatcgtgcaccgacaaaattggccccgctcattcaccctgttgatcggaattgctcgatggggttgtgctgccactgattgtcgctcatctctatagacagaattgtagttgtccgctcgcgtatggatagctccaatcgattcaccacaccaggagctgggttcgggatctgtcgtgatcgggtatggtcgagttgtgggcgaaatcgttggcactccggcgaggttcgtcgttgcacagctctccgccaccgggttggctttgagctgggaggtgacgacaggcctatcgtcgatcctctgagggacggcccagatctaatccgcgctctgaccggcgtaacctgaattctc

SEQ ID NO: 12732 - DNA, 592 bp, Zea Mays
cacgcatggctcctctctaggcactgactcgcgggcccgcttgcctatttcactgtcaagtgggtccaggacaccatattcatcttccactcgagctacgtaacagaacaatgagatcgccactgggggtcggcacgtaccctgatctccaaccaaatcgcgagatcctcggttcccatgcattcctcgggctatataagggcgtggtcacaacctcctccactcatccatgggtggcgtcgaccgagtgcatcagggcgaccagtgcaatcgtgtggattgggggtttgactgcactcaggtaggccgcgcatcgcatcatcgggtgggattgtgatcggagggcatgacaattcctcaccgtgatggatacaccaccatcgggccgccatccatcgtcaacagagcatggcgcagcattattcaaggtgagagcctctccaattgcatcgtgtagaagctcgcaaattgggcgtttgggtatcccggccagtgcgccaccgtgctatggccgtgggcgtcgccgcgcttcggtagtgcggtgaggaatggggaagaagggagcatgggcgtgcgatgtgaaaccaacggt

SEQ ID NO: 12733 - DNA, 374 bp, Zea Mays
cagaatccttctgttggtaacccgggttgaatcagcaaggcctcgatacagataagctggatacgctctatattttagtggctgaatgttcttgaacacaaaatcggcaaccacagccttggcagtcagaccactctccttcaataatccaacctcggcaagcagagccccggcctcagctacctctaggtctctgggggattcagtctagcttggagtgtgaacatctgactgtctccctgaccgagggggagggagttcccgtgattctccatgataaaccattccaggcgccatcctttgatgctgtccttgagtgggatatcgaggtactcggttttcctcccacagcgcatctccaaattcgcaccccc

SEQ ID NO: 12734 - DNA, 468 bp, Zea Mays
gtatagaaagaaagaggagaagcgggtgcctgcctaccgcggcccattaatggtgcttcacgtgacctgccacgcccccacctccggccccccctaccctactgtgcacggtggctacaccactactactactaggcagccgagctcctcgcctcgctctcgctctcgctcctccaccttccctcccttgggtccgtccgtttgccgtgcgccattgcccattgcccattgcgccctgcgccccctcccttggccaagttgccatttgccttccctttccctccgcatcggcccatcccagtatcctaccctccccctcccactcacggcagctgccattgtcgccctgtctgcccccctccacgctctccctatccaccacagcacagcacagcacagcgccacgcacgatctcgccggtgccaccgtgctcccccaccttcaaatgtcgggcctccttccaccggc

SEQ ID NO: 12735 - DNA, 562 bp, Zea Mays
gtctaatggtgaatctgggagttcgttttcctggatggaggagtcctcggatgaaggcttggattattttgctgcattagatgtggctgcagcggagtctccgccacgtgtggagggtgccggggatcttcctagtgcgagtactgggtataggcggcgaagggtggtgccgaaacaaagtgtgggtgagttttcgcgaagtggtaggcgacatcgtatggggatggagcgtggccgtcttcgggtagaccgggttggtaaatgagaattgttgtcctcgtcgattggggcgagcataggtgagggggatctgcgaaatctttttgagggtgaggagttgaggataatgctgttcaattatagggagatgggtatcatcccgaaggttgagccgatgtaatatatgatgccctcgtcgtgtgtatgtaattgtaatttgtatggtaatgtggcttgttggccgtattcgcacgcctgtgcttgatcaggctgcacctgtgggcgacttttgcgcagggtgtcttttagtgagagacttcgattaacgcacttgtgctattcc

SEQ ID NO: 12736 - DNA, 578 bp, Zea Mays
cttccaccgattgtacgaccgtcccaagctctgtcgcatcaacgggaaataaggtccgctatccagttgatgacatcacaaggcctatggcgtgcacactagttataagatatggtattaacaatcatcgtacgaagaaagtagccacatgccttgcgatcccaggacgcaagttccatggaagcgacattccagaagattattgcagggtagaagtgacgacggtcgtccaaggatacgaggaaaacatgctagacatccctgggcctgaaggtatcgagacacttggacaagctatcaagaatttcatcctttggcctcgaagggatgtcgaattggttgatccacaacggcagtcgtcgtcgcaggcccaaccgtctccgcctcctcaaactgctgttcctattgtacatccatcatcacctcctcaaagttcacatgctgctcctcatcctctttctgacccaccgtctccgccacaagcatcaccattcagggctccaccttctcctcatcctcatggtgacccactgtctacgccaccagcaagggatccaccttctccacagccatcaagg

SEQ ID NO: 12737 - DNA, 326 bp, Zea Mays
tccaaactacattggcttgcagctttatgaggaggcaaaagttgtgatcttcctcaggcaccacatccatctagatctgaagatggagtatctagaggtgaaagaccctatggtactgtaggcgaagctacgggagcgcttcggtgtggagaagcacgttatgcttctgcgggcgcaacagtaatgggccacaccccgcttcctcgacttcaaggctgtggaggcttacaacactatcattcaccacattgtcgctcaactacgtttctgtggccagatagtcacagacatggagatgattgagaaaactttctagacctttcgcc

SEQ ID NO: 12738 - DNA, 645 bp, Zea Mays
ctccagatgaggtggctgatgatgagagaaagcaagagcacttcatagaaggactcaatgggccactacagtatgcactggttgctcataccttcccatcatttcagaggcttcttaataaagctctaggtattgaacacaagcgtgttcaactgggagacatgaagatgaaggccattacccaggggcagggtagcagcagtatttgccctcgttacgttccgcctagggtacaccagctcgtccaggaggaggaccgcgcctagctcagtattctccacagggcactcgtcagacacgtcccgtcttgagcacgagttcttaatggcatctgaggaagaaaaacatacttgattattacatgccacaagtacacaacctttattatattatgccagactggtactaattatacatacttactggtacaactcaactttccttatttaatttacataaggataccacttactactatactactctagttatcttcatccttggctactcccgcttcactgccagttttgggagaacgttcatctgcgaggttcatggaaggaggggctccaaagagatccaactccccataaggtcctccaccagctgctccagatgttccggctcccattgctacaacctccg

SEQ ID NO: 12739 - DNA, 310 bp, Zea Mays
agttcgtcgccggaggtattaccccggggagcgccatgatagtttacgccggtgactcacctctcctctcggccacccgtctcccctttcaaaattggacaccaccgcttagcgctcctataaattgtcggttgggtctgttgcgccatgttatcacgaagccaaagcagccattcccgccttcaattagccaccatagccagagaatttccttcttcccccaattcgatcgactgcgccaccgtgaaccgccttatcgcggctagctgcttccaggtccgccctcgctctttttgtccgtgttttagcg

SEQ ID NO: 12740 - DNA, 902 bp, Zea Mays
tgggcacccataataccttccttaactttgcaagctccattttttcagtaatgtcttcttttttttgaaagggaagcaatgtctttttaggtgcccatgttagttgatacacttataaaactttagttgattgcttaacagatgcaatcctgttccattttcagttggttttcataatggtggtctttgcttaaaagaccgaggtcttgttgaggggcttttcctcaagggtgatcttcaagttctatgcacaacaaatactttggcacatggcgtcaacttgcctgcacatacagttgtgataaagtcaacacagttcttgtgagaatcaattttagatatgacatcaattaaattgacatatctatacttctagtttttgacatagattccattatgcagcaacaaagagaagggcctatatgttgaatatgagagatccatggtgcttcaggtgcactgagtctaatgtgtcctattaaactcttcgcctaaaaaagtcatataaatctattatctttgatatgcaggaatagatactccatcttgcttcacatcttactgtgattttgtatggttaatgttggtgtataaatatgcctaccttcttccaacatcttgcttcacatcttacttggtagtttaattcgctagtccctctgcctatgcttgtactatagttttttttggtactctgttgcctggcaggggccacaagatgcatgagctccttgctaggcagctcatcctagatcgttaatgggctgagtctgtttctgtggtcggtgtggtgtgtatttttttcccgttgtgtatgcattgttgtttggagggagtaatcccttctgtgtgtcctatttattcttcttaataaaatgacatgcagctctccgttgttcaag

SEQ ID NO: 12741 - DNA, 448 bp, Zea Mays
ggagcagctggcgaatgaccttatggggagttggatctctttggagcccctccttccatgaacatcacagatgattgttctcccgaagctagcagtggagcgggagcagccaaggacacggatgactagattaatgtagtagtaggttgtttccttatgtaatctaaataaggaaaagtgagttgtataagttgagtgtgtataattagaacaagtttggaataatgtaacagaggttgtgtaatcgtggcatgtaataatcaagtatgctttcttcttcagatgtcgtccagaactcgtgctgaggatggggctagaacttcccgtggtggggagtaaactccgaacccactgcctgtacctcccacgctggcagaggctatcgctgccttaattaatgccactgctgataacactcgtattcttcgagaaatggctaggaatcaaa

SEQ ID NO: 12742 - DNA, 603 bp, Zea Mays
cacactaagctagtccttcatcacttagggtgtgcgtcactagtaggtgaattgtatcgtctattgcgctcactaccaccaccaagagaggtgtgcattgcaccatggtgagtagatgagccagcacactgtgggggaatatatatccccaggtcatcacgaacactaaaacatatcatgggacgcctgatgggcctcccattggttcatcctacgggatgggccaacaggttataatcaggtcgagcgaatttgatccaagaagataaagaccggcatccgagttatgtgctaccgaagcactgatatctctagtgatgcagttgcgcatacctgaagagctaagcattcggcggtgactcggatgagaaggtgatcaaacttcagatatgcagggctacaagctgcgattaagaaggagataagtagagtagataatgatcacaacttgtaaagggataactctctggtcatgtatataaggtcgagggggacccctacaaaatcatcccatctcaccctgtctcacctgacacccaccctcatcgacaacacctgagcatccacaaaactcacttgtaatcttcatactccagacaaaac

SEQ ID NO: 12743 - DNA, 669 bp, Zea Mays
agtgcccatggggcgaggcggctggagatccggcagcaggacgcgctcccactgatggcgatggggcaagtactcccgtcatcaggttgggttgatccagcagcgccctctcacaatgcttggcaattttgccaacctccagacgaagatcatcaaccacgccatcgatgcccatcttccattcctcaagcgcacccgtggcgtgctcaagggtacggacgcgagcatcctgcgccgccgtatggcccgaaaatagtgcctcctagcgcgcatcctgatcggtggcgcggcgatctaacttcgcttcctgctctgcgaaacgccgagcgatctcatccaaaataatttgagtatccggattcaccatcacttgctgccggcggaagcgggtattgtagtggtggcacgacggaggatccagagtgaaatcccaacaagcaagaacgactgccctttgataccacttgttagctgctggctgggaagtaggaacttggaacacggcaagaagaattggacgaacaacacaaggaataggtaggagatagagttcaacttggaggacaagtatggagttcagttattacatttcctactcatccgcacacatctgtgatatatttatataaggaaaacacaccactctaattcacccaattgggcccaaac

SEQ ID NO: 12744 - DNA, 546 bp, Zea Mays
acccaagctacatcgaacccagcacctcgtacacctctcaactaacacaaacccctgcgccatatgaatttctcgtcattctgacaaagcagtatataggtgaacaaatcggcaccgagcacaagtctgcaacgaacacaagtctgcaccgagcaagcaaaggaaggcacattcagttttgccatccgccaaaaaggaaaaaatgggtggtacctcgctagccaaaaaaaatatacggcactaaaaccgcgtctcacgctaaccaccgatggaactaaatcctcggcacccactacccatttagattgagtcagtagtttcctttttcattccacgacatcctctgcacatccttgccggtggcgacttcacctccacatcctgccagcggcgacttcaactccccatcctgccagcggcgactttacctcccctttcttgccggcagcaacttcacatccccttcagcctctctgtcccaagatcaggatggctccagggaggatgggatcacgatgcaaaagggatgccctagcaggtaattcc

SEQ ID NO: 12745 - DNA, 681 bp, Zea Mays
catgatcacgtactatccttagcttttctctcttttgaaactgttataatatcaataagaatcaataatcgagcaacgtcagtgtaatgaatagaaacataatatgttgttttgtgctaatgctatcatactttcatagtaagcatgtcttaatcgaatgcactacataactaccgagctgcaaacagtctattaaaatgctaaaaagatacttttttcaaagcaattactaataaagaaatacatgataacctgtgtggaagaagaacacggtagcctttggtgatgataagtgctctatgtataggtgtgtatatatacatgatgacatttgtattgttgcttggatgctgtcggtgaaaacaatgcaaatattttgtccactattaattaggaaacatgatcatattgcccttttgctaccaataactgtagttatctaccataacaatgcatgctttgacttagtaaacatcatcatatctccttgttcacagggggacagctgaatgtacatactgtacacagcccgtgactcaaacaatatacgtgtaatccaaacgaaacataaaaaagccctagaaatagtggcaacccgctaattcatgtcgttgttgtccagctaaaatttttgaccccacatgcatcgttttctaacctcactcaaatccaacagatgcc

SEQ ID NO: 12746 - DNA, 1227 bp, Zea Mays
cttccgcacgcgctagcgtctttgctcaaccgtgctgacacatgggaccccttgccagcttcctctcccttgttcacgagcacgaacagaacgagctgggtcatcttctccaggactcgcgtctgttgcccagagccgtcatgcgcatcagattatctctgtctgccttctctccctttgttccgctgcctggtggccccgggtcatcagtgtcgtcgtcttcatcccaacggacatgcgagcaccgcggcgccaaactcggccggggctaaattccgcgtcccgggattgtcgctcgaccggtatttctcatgcctgggtatatagctcgtgaccgtctacctgcctccctcaaaccgcaccatcaggccggaccaccattgtcggacagctgtgaagaagcgtgccgccgctgccgtagtagttcgcccccagcattgtccgggtagggccggtttcgggtcgataaggtgcgcgcgaacctgagtatcgtgctcctgacagcaatcgggggccggagttggtagtttgaggacaatttctcgccgccgattgtgctccgccgcagattgcgtggttccgtggacggggggttcttctgcgccactgctggtaagttttccattcccgtattcatcatcatgtgcgcttcacgccaacgctagcgggctcgggggtagtgtccttgggcacggaacagggggttcaccggtgtatcgccgtcgtggtcaacacggctgcagccgtggtgtttctgggaagaagatgacgggttcgtggccgtcggatcgtctgatctggtttagacggctgggtctacccaggttgaggatggcgcaggaccgtaggatcttaagggacgactgcaattagatccgggttcccttctcgcgcggtcgatctctgccctccatcggaaatcgatcgtcggagagcgtgtcttcaccgttttcgaatccggaccgtagttggctaatcgtagggctgtagcgtgatcggtggagtgaatcgatcttggccgttgtccatcgatcggacggttgcgggtgaacgtcggctcaggatgaagatcggtctaatcaggggcgcacactaccgatcttgcggccgagttctaacgataccctttcgccatggtaaactgcaaaagagccctcggattgtaatgaaatcaacccgccgtccatccggcttgattctgagtcttaggtcttttatgcgttagac

SEQ ID NO: 12747 - DNA, 377 bp, Zea Mays
ctggggtggagcgaccatatcggcatgtcgctgtgcgagtcgacgagtctacctcaagatggcgacaatgaggtaacaacatgcgagggtagcgagggcaagcggcggcaagcgacaaccaatgtcgcattgcaacgacatggtgggaccctagtgacatagtgagggcaggtggcggtggagccgtggtgccaaggcaggatcccaccaatagcttgcctacccgtcggtgcgaactaggaggcaaagtagtggcactgcgtatgagatcccgacgacacgatgagctgacgagtgacgagaagataagtggcactcatagcgggcacgttaggtcacctactaaccgatctatcatgaccgaaggagcgaccgag

SEQ ID NO: 12748 - DNA, 642 bp, Zea Mays
gtccactctctcatttggtcaagcacgtggcgcgcaagccagaaggcaacaacctctgggagagggatgccacaacgaagtgagaggaggtggtgtgggacgggagcggacagttgaggagtgcagagggacgccaccggggaggtcatcggtggagtgagatgtgcgtgtagcgtagcgaggtcagatgcagatgggggcttgatcctgcaccacgagcaccgcagctatcgatgtgatgcaatggggcccttggggaaggtggagagggacacttcgctgtgagacagaggtcgagggagggggagggtcggacagtggcggcctacacgggggtggcacgtcgaggaggtcatcagcagtgcgagacgaaggcgggcgggccgaacggcggtggcctacgagagggcgacacatcgaggaggtcatcggcggtgtgggcgagatctgcctccccataggcgtggtgcggcgggggcccggaggcgtgcatcgggggcacggctagggaagggggctggcacgtgggcgagcgtgcacgtgcacacgccggagggggggcgctcgttgtggacgcctacgttactgtcttaataggagtactatagatatacataacttggtagttaaacaaacaatagt

SEQ ID NO: 12749 - DNA, 546 bp, Zea Mays
tcggtgtcggacgagttctctatcctggtaggaggtagggctggaggggcttcctccttctgctcagtctggcatccttggcttctggtcttctttcggattttcttcgcgggggcgagcttctttagcttcttgccgtaatccatcttcagggttcggtaggcttcacgagtgttggtttcctcgccttccgctatttcgagactctcttggagggatgccttttcccttttaagttccttgacttgttgctccaggctttccacccgggagtttaggtgagtgcagtgggaggaaaggtcatcatattggttatcgagagtgtggaggtatccggccatgtagacgatggtagggtcatcctcggtaggatctcttcctgacagggcctgaagtcttttcctccaggcaggggtatttttgttgctgggtggaaagtagtgaaggggagtttcaaagactactctgctgtagttttggcatagctgtcggagggcttttcgggcaacattttggcaagtgtctgggaagcggtgtccggtgaaa

SEQ ID NO: 12750 - DNA, 826 bp, Zea Mays
gagtttccgccgccgcggtcaattgcgtgttagcgcagcgccaactccattgtgtctgggcgggaagcttcgccgagtccccacggagctactggtcgtctgggcggaaggaggggaccactgggtgaccggaatttcgccgccgcgcaaccggatctgttctgcgccgtgggcagactatctcggtgcatcgattgctgttgagaacgccttctccaatctcgccatggcctagtagtgctatcgcgcctgtttaattagaaaatggggccagggttggcgagatcggacgactccggcgaggttggggcatggcgccgccgttctgtgggggaaggaaaggtggaagatgcacctgtgcggttcgatcgttgttgaacggccgagatcgattgataggataccccttcgtctcatttaatcctagaggtcggatctagatcgtgcgactcggtggctgatcaaggtattttagatctgagtcgtcagccatcgatcggacgactggcatggcatacagattcgcggtgagtcgaagctaatcctcaccgtccacttcaaatctggcggcccatcgtggcccgtaccccttcgcgagcacattagtcaaaagagaccctctatttctatataatcaacccgtcgtccactccgtagtattctgagtcttagaacattatgcgcagaagcccctggccttttatgaatttgaggcccagtccagtgccgtgttaaatgaataaatgagttagaaaattgatttttaaatacaaaaatatatgctagaactttaataattcatagagaattcatatgagctccaaat

SEQ ID NO: 12751 - DNA, 311 bp, Zea Mays
cttgagtctagggctaagaaattgtatggcatcctggagtaggagtttcttatagggagatgctgaggccaatttaagattcttggttgcttagagttgcaacgatcttgcagagacttgtaggtgcatgttcttgcgctattataatcaatatttctgtttagtttgatgtcatggtttcatttcattgtcaaatatgttagggcccatctctatatttatttgagatagcataaaccaatgtagtttctttatatcctaggctcatacatgcattgttggttttaacccctgcgtggctgatttctgga

SEQ ID NO: 12752 - DNA, 734 bp, Zea Mays
cttgtatgccacttatgagcagcttcgcaaaggtcattgaaaattaagtggcaccagtctgtctcatggaaacgatccatttcttccgtcagtaacacctcatggttagatatgccctagctggaagtggggaacaacaatctattgaataatataaaaaagaagcatctaatggagaggtcatcatcgtctccttttctcaaacggtcctgaagtgatgcaacaacgaactcatctttagacaaaccaagttcagccctcaggttattgcccgccactgcttcatcgatgcttagtggcttaccacccccggcattcggtaggccaaggattaggtggacagtttcttttgtaatctttagttccttgccttgaccggggcgaattgtcatgtccttgtggtccaacttatccatcaaccaccgaagatgagatcggttgcccagtgcatcaagggttatgtcgaggatattggaaaactcttttctcgcaacggcttgccgttgcctctcattcaatatcttaatggttataataacatcctgaggtttgcatctcacattgagtttctgaaacaatgaatgaaaaattgtaataaatggtgtatcagccatcaaattagcacacataatgtatgagtttgcaactaatataatataatagctagataaataatacatgccatgtctgtacacaataaaaaaatggtggcaaaatgttgaaaactcaatatg

SEQ ID NO: 12753 - DNA, 389 bp, Zea Mays
gacatatccaagggtgcacgcgggggtgtaccatcgtgtttgtcagagaccttttgatactgtgcgtacggtctagacgtggtttggcgatgacgcgtcttgttgcggtcgacgtgggtcaacaacgttggcatgggtttcttccttgcgggtccacttggtgggaacttggtcgtttgccctgtcccatagacttgctcggcgggaatttggtcgctctccccgcctcgcagacttgctcggtggaggtttggtcgttcacgcctcgcctcgcgaactcgctaggtggggacttggtcgttcgcttggccccgcagacttgcttggtggggtacttagtcgttcaccccgccccacagactcgctcgacaaggacttggtcgttcgtc

SEQ ID NO: 12754 - DNA, 334 bp, Zea Mays
cgttgctgtggatcatccgttgctcattctaactcctccagctctagtgccacactgaggtatgtctttttgcgcggctgcttgggtgattttggcaggtgtgtacggcctgcctgtgggggcccacatgtaggaggcgtgtagaccggtggggcaggtagatgacaaaataggtccacggttcagaggcagaacggccgttggcaaaacatgtcagaggcagaacggcagactattattgcttacttaataagtagtggagatatgagcatatcacacgatgtaccacgaaacataggatggacgtgttgctgctagtgataatgtcaactat

SEQ ID NO: 12755 - DNA, 581 bp, Zea Mays
aaaatctctttctaaatttatttatttaattttcatgagctctggaccgggcgccaaataatacaaaactcggggtccaatctgtaacaattccctagactcatgctaaaccatggaaggactgcgggttgatactgaggaaacagaggggctcttttgtaaagctgtcggccgaaagggtatcgcagaacacgggccgttagatctaaacagacggtccagatcataacgtgaatcggtacttgccgtgagcgtaggattccaatccaacggttcgcagtgtcgcctcccttacgaccgcatacacgttgatcaccggtcgagatcgatttgaccgaatcggtacacgcaactaaactcaagccgtcgatttctcatcccatggccgcaagtcgaaccgatcgacccaacgccccccttctaatctcagccaaccaagaaggatcggacggcccacgagtcctctccttcccctagcctgctaacccagggcggtgccaccgattctccgcggcggcgcaacataccgacgaccagcgccccagcagatgccccgatccgtgaccaacgagtgctacgca

SEQ ID NO: 12756 - DNA, 422 bp, Zea Mays
actgtgtatgaggctgatggggcagaagtcgctcacccgcaaagcatcctttttttggggatgagaacaatattgcctgcattcagtagtttgaagccttgcccatttaagttgtggagctgattaaacgctgctgttaaatcgtccttaatgatgtcccagcacgccctgtagaaggtacctgtgaacccgtccgggcctggcgccttgtcgcgaggcattgagaggatagtctctttgatttcttcctaggagaaaggagcttccagggaggaaagatcaatgtggtggtagcctagcgaattccagtcgaacgtccttgctctaggggccgttgtgcccaaatgctgcttgaagtggttagtgatgaccttctcctttccttcctgtgtgacgaccaagccagtctcagtttgcaaggc

SEQ ID NO: 12757 - DNA, 360 bp, Zea Mays
ctggccttgccggctggggcgagtgtaggtgagggagagctgcgaagtctgtttgagggcgatgaattgaggataatgctgttcaactatagggagatgggtatcatcccgaaggttgagccgatgtaatgtgtgatgccctcgctgcatgtatgtaactataatttgtatgataaggctgcgtgccttcgctgatccggccgcgcccgtaggcgacttgtgcacttgatcttgagcatttattgtgttggtccggctgcacccgtagtcgatttttgcacggaggatccgtctgcacccttaggcgacttttgcacggatggtcttttgaagatgacttcgattttgcgcacttgttgt

SEQ ID NO: 12758 - DNA, 704 bp, Zea Mays
gcttcggcagctttcttcggagtagagcttgaagattttattgtttctagcacatctaaaacattgaccattctcctcctcttaggagttgttgtcagatccttttgtgtcttcggcattgacacctcaactcttgccgaaggacttgaaacttccgatgtccttgtctcttcagccctccgttcttcaatttttttccatctccggtattgcagctggctcttcaatattctgcagatgggtaggttctctagcttcagtggccgaagaggtctcaccaccaaaatcaggcactatggccggctcaatgtagtgtggccggtgggtaagaaccttcaccttttttctcttcggtgtgggctcactagaagcggccgaagcaacttccttcacagaaactgcaccttttcttttctgaccccgtagcgggtaacggtagtcaggatagacgaatccaatagcatcgaaaactctgttcagcctcttctttttctggcctccgaaggccgcggatagcgcattatcttctgtcttggagtacaccccaagcaattcatcacttgtagcttcgacactttccaaccaatcatcgtctggctcgacaaattggtctacaaatctgaaggtatactttagtcgaaccagaccaccttcgagggggttgctgatagtttcctttggcatttcccagttggctaccaatg

SEQ ID NO: 12759 - DNA, 968 bp, Zea Mays
attggggaaacattatacagaaggggtgcatcaggcgtcctcatgaaatgcgttctctcatctactgggaagcgacttctggatgaggtccacgctgggcaatgtggaatacacgtagcatccaagacactagttgggaaggtcttcaggtcaggattctattggccaacagcaaagaatgacacaaccgagttagttcagaggtgcgaagcttgccaatacttgtcaaagcatcaacatctaccagcacagcaattgcagaccataccagtgacttggcccttcgcatgctggggactcgatatgattgaacctttcaagaaggctcaaggaggatacactcatgtactggtagcaatcgacaaattcaccaaatggatagaattcaaacccattgcttccttaacctcagctaaagccgtggaattcatacgagacataatattcagattcgggataccaaacagcatcataactgacctaggatccaacttcacaagttcagaattcttcgatttctgcgagcaaaaaagcattcagatcaagtatgcttctgtagcacacccaagagccaacaggcaggttgagcgagccaacgggatgatactggaggcactcaggaaaaaggtcttcgataagaatgaaaagttcgcaggaaagtggataagggaattgccctacgtcgtttggagcctaagaacccaacctagccgagctctgcatggaaacactcctttcttcatggtctatgggtcggaggcagtgttacccgctgatctcaagttcggggcgccaaggctgatcttcgaaagcatagcagaagccgaagccactaggatggaggacattgatgtactcgaggaagaacgactgaatgcagtaatccaattagcgcggtaccagcagactctaaggcgctatcacgacaaggccgtgcgacagcgatcctttgcagtgggagatctcgt

SEQ ID NO: 12760 - DNA, 385 bp, Zea Mays
tgcggttgcacgcctcctgcatggtggtccgccctttcgcccgctggtttcggcgaggatgggggaacgcttataaccgcggggcggttacctgcttcgcgtgcagcggtttggcttcttctatttccggtcagctcgcatgacatgtgggacccagcccccgcgccggagggtgggaaccctggagctcgtcggtggagacttcgcccgtggcgcttggaatgcgagtggggagagccgcctttaaaaagggatcaatcccccaggcagtagacatgcctccgcactcccctcatgcatcatgcccttccaccttccgagcccctggatggggagcacccgtgtcgccttcttcttgctgctgctggaggagcgcgacctcgcg

SEQ ID NO: 12761 - DNA, 1174 bp, Zea Mays
agggtaattcttcctaaggcactaagccatacagcgcaggatggcgggttcatttctctaaaacacaggggcctttgtgttaatctgcgcccgcgaaggggtatcgcgggatcacggccgttggatcagcgttgatggcctagattagatcttcatcaccccgaaccggacacaatcacaaccgttggatcccgatctaacgttccccggttaacataccatcgcgagtgttcacggtggacggatcaagaatcaatggcccagcttcgatgaggcaaaggggatgtgtttgaggtgatcagggccgcacgtatctaatcgaaaggctgcatagccatcgccctccatacccagctcgcagacgacggcgccgccatcgccaccaggcgagctcaccagcgatctccgccccagcgcactagtgctcgaaatggacatcggcgagacgcaacatgatatgaaggtagaaacgaaacacatgaagcggtccttaccggcacaggtggagcgtaagtcccggtgtcgacgcatggtggtgagaaggtgatctccaaagtccgacgagcaattaagagatgaccaagccgacccatgcgtcccccctcgacggaatcgaaagcggttggagcaccagagcacagcgccgccgcactagagcatcatgacgaggccagggctactacgactgcgcgcgccaacgacggatctactctccctccctcacctatttctctcgcgttttccctccgacgctttcttcttctctcaatccagtggcgtatgggaattcgtgaactggagctaatctaagtgcgactcacgcggagggcaatgcggcatccatttgaagcccacgatcaaagtccccgccaatatcgtgccgacggcaaggacctatctgaccgggttttgcgctcatttagttaagacgacggttactgggcacctaatttgttgccgagaaagcaggggaagaaggatcagtcgaaggcacgtgagctatgcacatcgtctgttgcgaacaaccagcggggagaacggcgggttctgtttcgtctgcgcgtgcgggtaggaaggagaaggagctgaccgggggccccgctgttcagtggctaacagaagaggcacgcgatggggtggctgccgcgtggggtaggggtgtcggcgctggttt

SEQ ID NO: 12762 - DNA, 631 bp, Zea Mays
cgttgggttcctgctgatttgagcctcttgactggtgatccaccgctgctgattggaggtgacgaccaggacaaatctgataccccccttcacggagaagatgtagtgacaaccctccacgtactcaacatgatgcaatcaatgacgttcctggtaacaagacccacactcaacggcggccggttcatgaccgattgggacccttgaggcgctcagattcccccagggaattgagccatcctcgggttcagattgattttgaggcccgcagcagccagccttgtgttctgtctgatgcagtggcggacagctgcgtagggaatcctccgactcctgtgccggacggggttcaatgtatggcgggggatgtgctgctgcggagcgaggagggctgcgaagatgctgaagtaattcccatgaccccgatggccgtttccagcccctgtccttcctctggagggagacgcagactgttgttgaagaccgctacaaagcaagcaaagttcaggaacccgcccattgcgttcttcaggcggcggcggcgcgctccgaggacccctgagggcgccacacttcccccttgctcctctggtgatcggggggcagagagcagcctaggcgccttgcctcc

SEQ ID NO: 12763 - DNA, 688 bp, Zea Mays
gccggggtgcggcccaacgagctcaccgtcagcagcgtcctgcccgcgtgcgctgcgctcggggccctcgcgctggggaggaaggtggagcgctatgccagggggagagggatgctcaggaacgtctatgtcgccaacgccttggtcgagatgtacgccaagtgcggcagcatccaccgggcttggaaggtgtttcggggcatggggacgcagagggatctttgttcttggaactccatgatcatggcgtttgtcgtgcatggcctctggacggaggcgctgaccttgtttcataaactgagggtgaggatgtcttgcttgcacttctcttcttatccctgcttcattcgctttgcatccagcttgcttgaccaaatatgcttcgaagcaccaaactagtgaccagtaaccttaaatccagattatgcaccgtagttggtatggctggagctgattttactctgtttagatgacaggggcaaaaccagatggcattacatttgttggagtcattttggcctgtactcatggaggcttggtggatgaaggcaagctgcttttcaactcgatgagaggggagttcggtcttaagccaagaatcgagcactatggttgcatggttgacctgctggggcgtgttggtctgttaaaagaagctaacagtctgatcgcgagcatgccaatggag

SEQ ID NO: 12764 - DNA, 561 bp, Zea Mays
atcaatttggattagaaatgaattttctatgcattttacaagtttctagttttgtttttatattaaaaactaatttctataattattcctccatttttaatcctctcgggactaggccttgatttctaaaaaggtcaggggcccatgcgtaaaaatttctacgactctgtgaacagcctgtgtggacggcgggttatttacggaaaagtacaggggctctttacaaagattgccacggcgaaggggtatcttgtaatctcgatcgcacgatcgcaaatggacgctatagattagatctgagccgcggtgaaccggtacacgccaggagccatccgatcccaactcgatgacccggatctaagataccctaaatctaatctcagtcggttatcaacagatcgacggttctgaccagaccaggcgaaacggtaacctaacatctaatctgggttgtccgccaatgatccgatggcgcacgattatcgccccaacttggcagactcgcatggcggcgccatcccacctcacggtggagcttcgccgtcatgcgccctgttccgg

SEQ ID NO: 12765 - DNA, 477 bp, Zea Mays
taaaccgtgcttcttgcttcccgctcccctcccctgcttggcttgactgcttcatcacaccctgaaatttcgaagggttggcgctggtaaatctgcaatcaaacaatgggacgtgctagtgctgaatagataggactgttagctagctttgcctctagatcgacaagcaagcaactaaaacaaattaaaggacctcgttacgttgtgcagatcacacacatgccgattcttctattgctgctttgccttagaatacgattgtcagtcagaaaaggggaatcctaccaccgtagtccgtagcagtgtgtgtgtcctcaacctgcaacacgtgttgaaatataaagcgtctctgaaacaggtgacaatgcagtgccgtcagaatagatatagaaatcaagtttccatttgactctctgttctgatccatttaactcaattactcatgttactagctacggcctacggcagaatagatat

SEQ ID NO: 12766 - DNA, 847 bp, Zea Mays
ccagatgttacccaaggcctggctcaacacattcacttgtgacccattatcacatgtggtttagtgtggggatgaagcaccaaaatttagaggcaatgtcttaatcaagtgttggatatgctagaaggagtatcttagccttttcatgcacctcaaattgggaaaattgctcaaaaccctagaaacccccctcttgagccattagacccccaagcattggattagtgggaaaactatgtaaatgaccaattcatgacttaaaccttttacaaaagttgaagtacatttatatgtatacaagaaaaagtcagggagttatttcaaaaaggtcccacaaaaaccccaaattaagcccccaagtggagagcactctagagcaacccaatttttctctaagtcaaaaatcagccctcttctaaagatcaaaggtgttcacttagttgctggcgccaaatccacatggtccaattgacaaaagggagccaaattacccaaggcacgcccctgaaaaatttgaaaccaatccagaaccgtttgacacggcttgacacaagttttgtctcgggttgaacagtgccgagaaccctgacttggcaccaccatatctcccaaactataccagatcttcacttggaactcacataaactaggtagccctaggtgcagagaagatatcttacacaagtcatatggcgagattcgcacgtttggctgctcagcaagcgctagaacttgggcagaaagaaacgaacacgtgttcgaccttccctggcaatgctagagcatgccccgacgctcggccccgcgcgcccgtgcccgtgcctataaaaccgaccgaggccttgac

SEQ ID NO: 12767 - DNA, 506 bp, Zea Mays
gtctttggtgccacgaatccaaaagggcaatatgaccctaatgaaagtagtgcttttaaacatcaagcaattatatagcttgcttaattcagtaaaacgttgtcagaagtcagcactgtgttacatgcatatttacttctgggtttcactttcacccataacaagatggtgttattgagctattggctagttaatttcttaagattcactcggaggacttccataacatgtactttggggcaaaacattttcaatttgcttaacaatattaatttagcaaggcatccaaaaacactaagatttcatcattgtcccttgctaaagttcgtagatattttttgttcggaaacaatttttgtttcttattgaaaaatcctacagttgtatgaaatacttacatttttagaaagtaacaggtgtactgtgtacagagcgaattatagttttaaaaaccataatattgctaaaaccaccttttctgagtttctgcactcaggacctccttt

SEQ ID NO: 12768 - DNA, 902 bp, Zea Mays
aaagcacgacgggatcaaacaggtggcttagggagacgactacgatgggaggggatagcaagagggaaggttctgccgtgggagagagaagcagcgagcgtgtagcagacgcctgagatcctccacatctagcgtctctatcgcgtcggcatacataattgtatcgcccgctaaacttaggaaataaaaccctttacagggtgttgttgaagatagcttgatcagtgtgtgtgcgatagcggcaggaggagacgaaggagaaagagaatgatgcaggcgatagcaggggcgtgttaatgacgccacacctgcgctcgtcaacacccttttcaaagctgtgtagggacgcaacaatgtcgagaagtgtgcatatttagagaataggtccacaaccaccaaaatagtgtcagcatgagcagacctgggaagcccctcaatgaagtccaggcttatgatttgcaaagtagcctctggtacttgtgtcgatcaggcttagattgttggcaaactgtgcaagctgccacatatgacttgatcataggttttatgttctttcaggcaaacaattgcttaattctttgatatgcaagaggaaatcctgagtgacccccaactagattgtcatgtaatgcagatataatctgaatctgaagagcttcacaagaccccacccaaacatggcctttatatttgagaatgcctgattgcaaggtatatggtccagttaggttttatgttcttcaaggcaaacaattgcttaattcttcgatatgtaacatgaaatcctgagtgacccccaattggactgtcatgtaatgcagatataatctgaatctgaagagcttcacaagaccccacccaaacatggcctttatatttgagaatgcctgattgcaaggtat

SEQ ID NO: 12769 - DNA, 612 bp, Zea Mays
ccctctttgcctgctgcagcatcccttccgcatcatcgccgccgagaagctccgcggccttatcttctatgcccagtacatatgatctgtagtgcacgaagcattaattaacgctcggctgacatgcagtttgtgccaccctaaacaacatggagattctgctcgtcggtggggagatcatggtggatggccacatccccaccgctgcagccattgacgacaccaagcttcgatgtcgcgtgcgctcctttaccaggcctaccgcagggaacatcttctatctcggatctctcggtacgtaacgcccactaactcctcgctcgacatccatctgaacatggagtgatggagaaaatgtaagatgatcatgtgtgtgtcgctgcaaaggagacttggtacgtcggtggggagatcatggttggccgcagccccagcaatgagcatcgacaagacctcgccgagactcccagctacctcggtatgtgatgccaatcatctcctcgctcgacacatgaacaatgagatgattatgtgcgtcgatgcagagacttgtgtagatggccacagccccaggtttgctgccaacaacgacgacgagtttctaggtctcct

SEQ ID NO: 12770 - DNA, 314 bp, Zea Mays
tttactatcaatgtgatagagtggttcagtcgttcaagctggagactctttgtgaaccttaaggcttgttttattgtacttgcattatgtaattattatatgtggggttgtatttggaatttaagcaatatgaggacagagagtagaactattggatccattgttatcatgaaataatatgaagaaattgttagtttgttacgcagtgaataatattgccctgctaaggaacaacttcctagtatctagtttcatattaccctggtgtagatcatttgcaagtaccgtataatctactatccttattcactagg

SEQ ID NO: 12771 - DNA, 521 bp, Zea Mays
tcatatagtgttgttccaagcgaagttcaagagtgggagattaggaattgcgagcgccgatgatggcgctaccgtgcggtgctttaacgctgtcggtcgggatggcagaggtagcagacaagtttcccgccatcgatcatgatatttgcggcccagattagataaggggtaatgtttcgtccgaaaacctcgtagccattgattggtggatggacgctcaggaatcgatacggtttagtggaatctgggtcatggattgtggatctaaggaccggggtcgtgtacctattcgggtggcttggatctaatccaagtcgtccatcgtcaatcgtgcggtaccgggctcaccgtaccccttcgccgtgcacttttacataagaaaccctaggaaataatgaaatcaacccgccgtccaccatagttaactctgagtctcggggttttcacatggaagtccctggcatttattttatttgtacacgcggccggtcagggaataaaacacaaaaattcaattagaa

SEQ ID NO: 12772 - DNA, 640 bp, Zea Mays
atcatgtctgtctgaaagggtacgctagcctaatctgagccatccaacatccatccaacggcgcacgcatgtcttccccatcacacacacaggtgcggcggcgcaccaaatctcacggcggagccctcaccggcgagtctcaatgtgacgcatcgggcgctaatccccctacccgtggtgatcaatacgatgctgtgagtaaggcgaaatgaaatggggaggacttactgtgaatcgcgcggcacagacctctgcccacggagcacggcggattaccgacgacggcgagcgattctggacgattggacgggtcaccgagcgcaatacttcacgcagacgatccccacgcaccgatgaacactcccgacaccaccctggccacccaccggcgataccgggccgggtcaacggcggcggccacaatccttccgcgagcgtagcaatggcggcgtcgattggctcaggggaaagctaggcttgtgcgagaaggtagtagggaaaggaacgagtcacggggcgtccctttatcccccggggtctcggttcggagagtggaagagatcttccgcgtcccggccatggcggcgacatttacgctcgccaccgcgaaggggaaggacgcgccaacgtgcggaacccg

SEQ ID NO: 12773 - DNA, 1383 bp, Zea Mays
caagggctgaatgcagtctccggcagcttatttattctcatacttatatttaaattccactctacgaacactctgaaaacagtgtacactacaaaataatgttttaactaactgcctcctcaacaaaacaccactcctcaaagccattgctccagcaaacggcaaccggcatcacccactgctctcaacgctaccacgcacaaaagagctggtcgcccaccaagaaacaatgttcccaagccaatccagcgcaagagcagtcggctggcggcaaaagctaacggaaatttcgtggatatgactaataaggcggtcaggttgaaggaactgagggataccctacaaggctgctctacagcggtgaagggggaagtccagaaaaaaggtttgctcagtcgttcaatggcgccgatctccataccagctcttcgcaggcttgttcgcgcggcaggattggggtgctcagctgcgaatgctgttggggtggtgccgctcgccaaggaatgatagtctgcacctttgttgctcatggtgcagtgggcacgtcagtctgcacctctctgtgtgtcccgtgggggtctgtattcggttcttttgtgttcagcctgctctgtgcgttcaccgggctttgcttctcagttgtcccagtgtctgtgtgctttagcatgatggtgtctgtgtgttctaaaaatgagtagcgtcaagagtctgtctgtgttgtcgtggaatgttcgtggtcttggcgactcggaaaaatgtgaacttgttcgtgcagctattgcctctttgtctcccactgtagcgtgcctacaggaaaccaaaacccaagaaatttctaagttcaaagctcgatcctttcttccaccaaaacttgctgatacattcctagacatcccttctactggcactaggggaggcttaatcacggcttgggacactgacgtcctggagctcagttcttttgttactcgccaatatgctttaacctgtcactttcttttagccaacacaaactctgaaatcaccataacaaatgtttatgcgccgtctgaccatagggatacaacaacttttcttgacatcctgggggaaatccactcaaacattgtgggaccttggtttatcattggagacttcaatcttatcagggatgcctcagaaaaaaataggggcagaaccaatcgacatctctgtaacctgtttaatgacactatccatgaccttgggcttctcgagctgcctctgctagactgcctcttcacctggacaaacaaacgccgcaccccaaccctggcacgcctggatcgtgccttcacaaatgagaacttcaccacttgctatccatcggcctctcttagctcttcagtcagaactacgtccgac

SEQ ID NO: 12774 - DNA, 371 bp, Zea Mays
ttggtgacgaatttagagcgagctccaagcactaagcggcagcgagccatgcatgcatttttgtgctcagaaatgcatgccggctctctggtccaggtccagtgcaggaaggtccagtgcaggaatgctgggcgtatatatggctgcagagggacgacacacaatgcaagtcataaacagaaagcacacgctgttaatctgaaacttctgcctgccttcgtcagttcgtccttcctgcaatcctgctccatgcgcccatcggaactgggacccttctgttgttcttgccttttttattacctttttacttgccctctctgtatgtttattccttttactactgcttcagtcgtagttcagttcatcactct

SEQ ID NO: 12775 - DNA, 878 bp, Zea Mays
aatccgggttcattcctgaagaagcgaacaggccctaaccataatcagggttgggagtgcatatatgccaagcccattacacagaggggtatgcaagtaattacacggagactgaccaaaaccctaacatgggattctaacattgaggatagacacatttggcgcttctcaccctctggtcagtattctgcgacgtcggcttatgagcgtttcttccagggagggatcctctttgactcttgggaacatatttggaaatcctgggcacctggtaattgtcacttcttcatgtgaccaggggttttagtccattgatcattttcttgcagcctgtgttttctcccgacaattctggttccagcttcttcagaaggtcggtctccagaagctgtgccacgaacctggaattgcttcctttggtgattggtggtggcatgctagtgaggcagtatctaggctctcaaggcatggtctgaattctatgattattttgggagcttggtccctctggaaacatcacaatagatgtgtgttcgatggaatttcgacctaacctttcaggccttgtgatccaagtctcagaggagctgcatctttggagtttagctggggcaaagggtgattctcacctagctgcccgaactctggagttgggtgcttgatgtattggtcgttccttttggttagatttttgtctcagacacgtatgtccttgttctagggagggggtgtgtgttgggggttttcgggctttctttgtacccgcttttttcttaatataaatgatatgcagctctcctgcgtcttcgataaaacaaggctaccaaataaactctaacatatatatcttgtggagcactctatagagctaaccccac

SEQ ID NO: 12776 - DNA, 410 bp, Zea Mays
tgcagccctgtgtggtcgattggtcgtttcttatctaatggtagccggtgatctagagtgtttgagtgggtgtgtggggtgcgtgttgtactgagggtctccctccttaatacaatgatacacaactctcctacgtattcgagaaaaaagttttacgctgtccttacccctcccccctgcaggtcgagttttattttttctcgaacacgcaggagatctgcgtatcccctgctcctccccctcccctcttgaagacgaaagttggtggccagtcggaggtgcaaggatcgtttgctgaaagtggacgccgaaaggaggatggctggcaggtggttgagcacaggaggcgccaccttcctcgtcgaggatccatagtggatctccgagggaagtgctacaagtgcctatcc

SEQ ID NO: 12777 - DNA, 581 bp, Zea Mays
tacaagagaagaggagccggcagagaataagaagaccagaagttgacaaacttttcctgttcttcgagaagcccattttctctcttcttctccactagatagagaaaggggagagagagggagccgaggaggagaagatccctctcaccgtcatctgctggccaatctaatctccgtcgtctgcatctgggtctgctcccgtccatggcctagtgacggaggattgtatctctgtccatgtggatggcgataaattagtacttgtttataggtgttgctgtttggttggttggccttgtctccttgtttgaggaagtggggagaggcggaatcttttgttggatcatggcagttccaatgcggccggtgggcttcgcccccccgtgacatggtgagcagttgaggggacggattatctcctgttcttggctgcttccctctgttctattctggcctggccgccattgtttcagcggatgagttcggggtcggaagtcttgttcttggaggttctcccctctgcttattggccatatgatgttctactcctgcctaaattttgcctgtgcgaaaaatttgtg

SEQ ID NO: 12778 - DNA, 439 bp, Zea Mays
aattatctaaaacttccccaatcatctcattcaagggaaaccacaatcctgctctaaaaaagctcttgaaaaccaccacttcatcttttttaggctctggagtgatttcttctccggcaaagcgaataagcttcttctcagtctccccaaaataacccagcttcatcatcatgggcatatcagcttcagaaatggtagattttcctaaatccaagtggctaggttttgacgggatcagagtgccataatcttcttcttcatcatcaacgatttcttcctcaatatcttgttcagttttggcagcaggtgcaccttgttcaatggcttcctctatcacaactagtcccgactgtctcatcactttggagattggggcagtctcggtggcttcggcctcctctccgtcacgggtcacccttgcaattgaacatactctggc

SEQ ID NO: 12779 - DNA, 741 bp, Zea Mays
tgccccccttgtcccatgagtaggacagaagacaaaattaccatagccaacacccagaatagataggacatcaaaagcagagatggaactcagcttagtttcctgcaaacagactgacaaaggcttggaactaaggacctcagacttcacacagtctcttctaggcctatcattcagacctctaacattccaaattagaaaatttgactgattcatgactaacaatatagaagaatacgaccaaacagcatcaggctgagacctggatctctaccagcacttcccagccgatcaaagctgccatagcctccacatgtgatttggaaaggccattctcgaataatttggcataactagcggcattttccaaggagatttcctcatggtcaccgtagtaccccaaatgtctgcacaccttggcaactgagacgtttccgaggacaggaggaagcttagccacccttctactcctcctaggcatgaagtccttcggcagggtcttcttctttctcaaattgcacctaggtggcgagagcagcccgttaatcggtttggtgataatttgtttgaaggtctccaggggcaaagaatcaaccagctccttcagaatagatggatctgacccaaccttcgttcttcgagaatagacattgagacaacagcgatcaggacgccatctctggtcaaacaagttctgagtaggaagaacaagaacagggctgctgctggccgaagcaatag

SEQ ID NO: 12780 - DNA, 816 bp, Zea Mays
gggcattctatttttttggtcaagatataatagagtgcatgatcaaatttaggatagatagaagatagatgtctattatgaggggaactcaaaattcaaagcatttatctaagtgacatttggtggatcaattacttgcatgtgggttagacctagtcgttacacatgaaaaatcatttgggaaattattgtgaaaaatgctaactcacgtgtacaagtgttgaaacacatttgaagttagcaagttcaaaaaagggatgcaaaatggagctagagatggtatttggggggcatcgaactaaagtaatggacaccagactagatggatgccaagtttggtgactagccctagctccacgatgtctgagtcacaccaatctatgggaattggcctaacagtctcggtcgggcagcattggaccaaatggtagcactattcatcgagtaggccccacctatcagtgcatatgcctattttaaaggaggcatcaaaccatggtcattggtacaatcgtggcattggcctagtttgatgcatgttttacttttcgcaaatgcactaaaccatgggagccatttaaagtagtttcaacattcgagtgtcgtgtggaagcaacaggacatcaatcccttagcctatggtctagtaggaccatcgaacgatttgattcccttgactagggcacagtgaggaggcccaatggcttttgcttaaggagtgttataaataggtgttgcttagtttttgaccaattctcttgacactctaacatgatataaaccattgtgagattgggtaaacatatcccactcatc

SEQ ID NO: 12781 - DNA, 560 bp, Zea Mays
gaaactcttgttagggcttgaattaggtctcaaccgaaggagagcaccggtcatcgcgtgtcctagctagtgcaagctcgtcggagttcggttctccgccgtgcggcgtcgtggaccatgggttgtgaagagatgaaagcgcaagggtgtttttgcaagtgttagtgagatgtgtgaatagtgtcgaggactgcctttctgattttgagccggtaggggcgtttctgcaaaaccaacagcacggacgcgcgcgggcacgctttcacctgtatatgggccggctcgggccagaaataagcccaacgctgtagcatctttcttcttttctttttttgccaggattaaataatttctagaaaattacagaaaaatgctaaaaataccagaccaattttgctaggcttctatttttctatagtatttaataaaaatagtttcctgattttaagttccaatagggaattttgggacatttaaaacagccaaaaaccatacttctagaattttagaaagtaattaataatcccaaaattcaccaaagtttttagacaagatttaag

SEQ ID NO: 12782 - DNA, 397 bp, Zea Mays
ggcgcgtgaatatggccaacaggccacatcatacaaattacagttacatacactcgacgagggcatcatatattacatcggctcaaccttcgggatgatacccatctccctgtaattaaacagcattatcctcaattcctcaccctcaaaaagatttcgcagatccccttcacctatgctcgccccaatcagcgaggacaacaattcttgtttaccaatccggtccactcgaagacgaccatgctccatccccatacgacggcgcctaccacttcgcgaaaattcacccacactgtgtttcgccaccacccttcgccgcctatacccagtactcgcactaggaagatccccgaaaccctccacacgtggcgaagtctccgctgcagccacatctaat

SEQ ID NO: 12783 - DNA, 779 bp, Zea Mays
taggatcaccgaatgtcaaggtgatggattgctcattactctacctattgtaattactcgtgtttgctttagaaatttgttctgatcagatggaagatgtctctcaggcgggcaaatggttgtcggattgtatgcaagaggaatatgcacagaccactcattgtgtcgagaagggatttataaaatctgagggaatcatatttcatactacctgccaagtctattgtaaactgatcataaaggctgcttagattcatagttcttttggggtgtatatggcttcttatatcaggttgacgagagcattgttgggaggcagcatgttattgtgagggggttgaaaggcgatggcggccgagggtgagacggtggcactggagttcatacccatcgctgagcgatgcctccagtacctcggcaaggtgtgtatgcgtgcgatggctactctactttcctggattcactcagccattctatctcctgatatcgtccatgtcactgatctaggtgtcgtgtgctactgaagctcaagaaaaaggcggtcaaagaaggtgccccatttcttcttatttttgctttgacacttatcacaggaggtcaggaggattgcatgccgcttggcattatggtttatggttatgagaagcacctcaataactaattcatgtgtagagtagttcatataggatttacctagctgggagttacatttgaatatgccattgattaggctatatttcccatttgtacacacgcatgtacacacgcatgcgtcaaca

SEQ ID NO: 12784 - DNA, 308 bp, Zea Mays
gcttgctgcgtcaaggactctggtcggaaaggctttcagatccggtttctactagccaactgcgaagagcgatgctgccgagttagtccagaagtgtgaagcgtcccaattcctatcaaaacaacaacacttgcccgcgcagcagctgcagaccattcctgtaacatggccttttgcatgctgggggctggacatgatcgaatctttcaagaaagctcaaggaggctatactcatatactggttgccattgacaaattcacaaaatggatagagtacaagccaattgcctctttgacctcagccaaag

SEQ ID NO: 12785 - DNA, 764 bp, Zea Mays
cggtagagcataatacgctatgtccacttgtgagttgtattgctgaggatgtctgagtccttgaattcgtatcgcatgtgccctcccttttatagtccaagggggcacatacagaagtgttgtgtcccgactggtggccccagtgatctagtatcaagtaatgtaccacatggactattaaatgttgtggcaaatggagatcttctcccttggccttcacgcagatcttctgaccgggtgtgccttggtccctcctgctggcgcgagttggctaggaagtggagtcggttatgctaacgtgcgcaggagtcggttatgctgacgtgcgcatgagttatgatgatagactcgagttgtcatctctaatcagtgttgcatagggcgctttgcctgagccagcggttgttcatgatcggtgtcgcccacgcgcgcggcactaagacacaactgcatgcctcagtaacacacaacttattgtgcgacccatacgtgcgatgctaaaacacaactacctgcctcatcaccacatgacagtaaaactatttttaccaccgtggtggttcccaaaaaggtgtttttgcccgtgttctgcgcgctcggtgtttcagatcccgccttttcacacctttgcctaccacccactacacatgactagcgagcctaggaccccatgtcatggtctaggtcgctagcacacttgctgtgggtgtcccttagtattctgcctaacgcttcggggaagcgtgggttagtcagcctttaat

SEQ ID NO: 12786 - DNA, 405 bp, Zea Mays
gaaggtttcaggccctggcggaactggctcgccttctccatctcattataagccacatgagggacaaagcggaccatcttgttgaagcccacttcatactctgtgacagacttcttctcctgcttgtaggactgcaaatcaatcttcattttctccaggaaggtgaccaggtagaatcttctttcaaactgcctgatgaagacatcccaagacaggactcctggtgaggaggagtgcgctgcatgcacgcctctccaccaaatatgagcctctcccttcagcagttgtgtgccaaagcgaacccgatctccatacacaatctcgaagacattcatcttatcctccacgtaagttagataatctaccgcctcaaccggagtaccactgccatcaaaagaatccaac

SEQ ID NO: 12787 - DNA, 410 bp, Zea Mays
ctttcctttaacctagacttgtttcaaccgcccgattgagatcgatggttagatctggacgttgaaccggtatgagcttgtgaccgccagatcttgatccgacggccgcgcaagcttcgccttcacccaacccaagccaccccaatcagtcactgcacacagcggtgggatcaccggagctcaccaatctggccaacccgagcgcccaaacacaaattcgcctggctctcgctagattcgcgacctcccgaacccatttcgcctcacaatttcccttgtcccacagcgcagatccacggcccacggtgcggtttaacacacggcggagcaaatcgttccgacgagcaattacaaggattagacgttttcaagcgcggcgcggtgtgggctcctatctaccaaggaatgat

SEQ ID NO: 12788 - DNA, 543 bp, Zea Mays
gaagccctgggcttccgttagtggacgaagccccagccaggaggccgatcgggtcgcgttcggcccactggacgccagcttgcgtcagccatgcataggatagcaacgtatctcggctgagacgctgcaaccgatatacgcacgcaaaaaggtatgtggaaatgtgcataactcatgcataaatggaaaagtttctgccacgaatcacgggaacgaatatttgcatgtgcatgccggtttacgattgcataacgctgtgagacatgatagcgtaaaccatgcaacatttaaaatctcccaccggtttgagataaggaaagacgtgctcttcgtgcgcgtaaataaaaccgcagttacgggaggaaacaaatacaaggttagctcgtccacgttcgctcgtccacgtctttatctcaggtattggcggcggttagcggcggcggaagttagaggtacggccggcggcgagaaaatgtccagcaccggagctggcgatgacatgccacctgtagcatctgtaaatacgccagcaggtacgtctat

SEQ ID NO: 12789 - DNA, 932 bp, Zea Mays
atttgctgaggaggtcatttaaatcatatatgatgtctgcttcattgtttcttttcttctttggatttttgtattaattgtgtggtgcttcgattttattctttttgtgagtatattttgttcatgtgcctgttgtagcccctaggaaaaattccaccatactacatcaaatgttgtcagtagatctttgagggatgttgttaggtttcataatcgtggaagaattagttcacatcttcatggatgataattcctttctagctgcatctgaatattacgctttggagaacacctaacagctggtgctgtggtaagtggtaacctcttaccaaaagggggtttgtgttatggtgttttcttgtcgctcttaatattagcatatgtttttgccatggggtaatgattgtgctgatagatttactctgttattcttgggggcacaatagtttttttagttcacttaaactgttagtctcttttacttaatttttaaacgtagtttgacaactttcttgctatgtgtttgtgatatatggttaataagatccatgttattattcgcacctttagttttgtcactcttcttgtgggattaatttcttgtaaaacgagtcactgctaaattttacattaaaatggtagatttgaacttaacagttcacttattagattttgtagtacatgctgcagatagttcatattgcatgtgccgctagcatgttcattttgactgcatttaggttattgactcgattgattggataattacagattcatactagattttacctacagttttttatgagttctcaaagtttacatagttttgtttacatgattcatatcatgccatgttacgttgcaatgtttagatggttcacatggtatttgtgttgccaaggtttatatataggttaatagttacataattt

SEQ ID NO: 12790 - DNA, 594 bp, Zea Mays
taggcatccttgcttaaaccggggatgagcaaagaaggtgtccacgaggaccacgacggcgaagcgcttaaccccgctcatggtggctaatgtgatctattgaaaattcttccattggtgtggattgcggtaaaacggtggtcatggaggcgttgccgggcggggctccctgcagaatacaattataggcgagacacgatgacgcgagacatgcagatcatcatatccaaaactagctagaaggctggtggtccgtccattcattcgtcatcgcccccgagtcaaaatcaaatgcagaacttttgctaccaagtcgtgccacacggcacagcgcctcgactcgatccatatccggttttggcattgctcgccggctggcaaagtaggctagccgcgcggtacggttcctcaaccccggttctcgcgccttcgttcgacacacgtcactaccgccatcaatactgaatttcgacacacgacacacgtcaaccaaacaagcttactatagtatacaatgacggttgccgctgcctgggaacgggaagcgtcacccttggtctggcggctgaatccacgaacagcacggttcaggca

SEQ ID NO: 12791 - DNA, 446 bp, Zea Mays
gagatggtagaggctagaacagtaggctatgtctgatggagtgcttgaagtccctacagttccgtagggtgtggcgcatattcttgtggtagaggcactaggtgtcgaggatgtcatccagtgtctgttcgcctccgtggggcgtacctcgggctcgagcaacgggtggtccattggcatgtacctgctcacgaggcctcttctcccagcgcctgtcaggttgctggttcgtgtcgcgtcgtggtgccggttgtgtaggttttgtacctccaatgaggtcctgggcttgctcgtcagtggtgatgtagaggtctgcctctcgaaatagttgctcagaggtggtcgacgcttcctgcagtatggctcggacgaaggccgagtcattggatcctcgatagaaatcttcaatcaccgctgcctcggtgacttcggggatgcggtttctc

SEQ ID NO: 12792 - DNA, 1010 bp, Zea Mays
gtgaccaggtttataagggcagacctcaccgactgggtcaaaggtaaatgctatcctattacaaaggaagagttcactctcatgctaccttttggatgaatggtgcaggcgccccgctaactgcccgagcaacaacgagcattagacttctccagttaggcggtgtcttgggccgtcctcgtaggtgtcgagggtgtagcctagctggtggccgacgatggcaacctcatacaccatggggctcgactaatgatcatcatggtggaccatgcagatcttgacgctacccttgcaacccctggcgcacccgatgtcggcaagctgcctaggatgctgtcggagtggacgaggtggggttcgccggtggcggttgtgaggaaaagtcgagagagccgaacgtgatgcaactttctggagcgaggctctcaccgtcagtgaacgttgaaatacaagccatcggagtggaagatgtcacttgccacgctaacgaccccctacctggcgcgccaactgtcatggtttcagaaaccaaggaccaataagatttatgttcggtgggggtgctagtgtgtgctcactccaaatgatgaatcgctgggattcgaatgaagaacctgggacatgatatttatactagttcggattcgcaccctactccaatgtagtgctgactatagtattgcaatgagtgcgttacaacaagtgtgctcgtgtgggaacaaaggagggggccctacccttttatatctcaagggtaggaccagatgagatctattttctactggagagagagattggttcccccgtgttgtcgtggtgggtcctccgtatggtcgtgtgtagctgtactcctggtatggcgatgtctgttactccggctcctgtagcgagtccatcctggcgtctttgtagtggtgcacggcgggttccacagattagtctcatggtgcagtcgtacgtggcgtggcttctcctgtcgtcatgagcccttcatctcctgttagcgtgcg

SEQ ID NO: 12793 - DNA, 848 bp, Zea Mays
tccacctttcgataccgcaacagctcgtcgttgtagcacacatcgacgtgctcctcgtcgtgggagagtggggtcacgagctccattgggtcgtgctcgacacgagctggcatcagagagaatgttcccggggagggtatcgtcagtgttggagtacgtggtgacggagagctcgctggagccagagtcatggctggatggcatggtggcgaagagctcattgtagacggagctggagagcgtggcgttgtagtcggtggagacttgggggctggggtaggcctactcgaagaagggtcgcgtactcccctggctccctcaaagtggacgtactcgatggtgaagtcatcgtacgtcggagtcgtgccgtcgtccaccgccttgtcccaggcccatcctcgcccttcgtcgaacactacgtcgtgcgtcgtgcgcacatgcagtgttcctaggtcaaggatgcggtaggccttcgagccctctgcgtaaccaatgaacacccctggggtgctcctgtcgtcgagcttgtcgatgtgaccaagcttcttggtgaacgcgaggcagccgaagacccataggtgagagaccgccggcttgcgcccatgccaagcctcatacgatgtcatcccattgagtgccttgatgggcaagcggttgaggatgtagaccgttgtcaccatcgtctctccccaggagacagtcggcattcccctctgcttgaggagagcccgagccatccccacaaccgtctggttgcgccgctcgacgatgttgttctgctgcgggatgtacgacacagagtagtggtgttgaacaccctcatccgcgcagtacgacgcaaattcagc

SEQ ID NO: 12794 - DNA, 336 bp, Zea Mays
agcagggatgagggctggcacacatgcctcactacaatgcagccagggacgacatgtgggagctgatgggggcaagggcacaccagttcggtggcatacgacatggagcgcaggacagaggctaggagacaccatggcgcgaagatgagagaagaacgacacagatgctggaaagagaagggggtggtccggtggccatggacgggcagaggcgagattgcggcggccaccatcggtgagaaaaggggcagtagagggattcaccgagaggagctcgtggccagagtggaggagcagccacgctggcaccatggctgggcaagttcgacgaatgac

SEQ ID NO: 12795 - DNA, 849 bp, Zea Mays
gcaaaactaggatgggatatcgtggtgcgtccacgtcttggcgaagcattagaggaagtctcatggcacgccagaatgcatggttggtgtcttcatcctcttcggacgggagcagtgggtgaactggcgcatcgcgggtgtgaagcttgccgccaccgttgacccatgatatcatcaccgttggagccttgctgtcgggggggcttcaccaggcttcgttgatcatgagcgttgctccgcctagggagattacgctccggccgccgggaattgttcaccggagcaactcccccaccgtgaaaagaccctgccgcaaaccaccttttgtgcgtcgccatatctggtaaggcccttctcatctagttcgtgaagccatccttttcgcgtatcaccaagcagggttcgtagtagggcttcgggtgagtgttgggatttctccggcgaggccccactgtaatggctggcggtgccgctgcctggcagcagcgtggggaggagaaggcgtcggggcattgatgttgtgattgatggctccagatggatgttagtgtggtgtgtgcttgaccatttgatctcgcatgggcggccaatattaggtcaaggataccccttcatgactcgggcgggtggtcgtttgattgggatccgagggttgcgattgaaactcgggtaattaaatctgggccgctgcttggggatctaacagttgtcgttgggtaccacttcaggttaacgcccgatttaatctgcatcgtcagccgatgatcggacggtcagatatcatcgataccccttcggcgtgctagttttgcaaaagagtccctagattttattagaatcaacccgcag

SEQ ID NO: 12796 - DNA, 465 bp, Zea Mays
ctgtgctattcgcgtgcaagtctagtgagcatcgggagctcaccgaagtttacttcatcccacgcttcgacaccaacctcatcagtgtcggcctgtcgggcagctagacgaggacgactatgacatccatgtcagcaaggggttgatgcagatctgtgaggagcgatggtgccttcttactcgcgtgcgatactcccccaaccgtctgtactacatccggctcaacatcgtgcaaccgatgtgcctcaccacctagggcgtggacacagcatggctgtggcacgaaagcttcggacacatcagcctccagatgcttcggaagctctccattggtgacatggtgcgaggacttccacacatcgatcatatcgatcaggtgtgcaaaggctgcctggccgaaaaacagcggcgacattcattcccaacgcatacccgatggcgtgcaattggcggcctcgatctagc

SEQ ID NO: 12797 - DNA, 429 bp, Zea Mays
cttcgagagaacgttcatttgcgaggttcatggaaggaggggctccaaaaagatccaactccccatcaggtcctccactcactgctccagatgttccggctcccattactgcaacttttggtggtacattcggatgcagctggtcatataacacgtgcacttcctcatgcagagtgttacagtatgcttgcagattctccagggatgcgcttaattctgctacccgggcaagagcatttgcctcacaatcccaggcaaaagagcgtgaatttatggcccagtctatagccgtgtctcattccaggatctcccgctgcaagcgattaacctccgcggacaactcaacaatgcgacagctatctcgcgcatgctccctatttccatggcgtagttctgacatgagtcgttccaccctggcctctatatccc

SEQ ID NO: 12798 - DNA, 276 bp, Zea Mays
gcgaggcgctcgattgaatctgagcaacaaggatgccaggatgtcgactggcagtgtgtgggtttgttgtgtgttagcagaagttatgtgtttttgtggctggacggggcaaatttgggggtttggcagttgtgtgagtgcaaaacctgaaagggagtaggtgagtttcttatgattaacaaattattgtgatttatgaatggatggtgttgtatgatgaagtctggactctggagatgtctcacttgttcttactaatttaagtttgtgatttgc

SEQ ID NO: 12799 - DNA, 306 bp, Zea Mays
ttagggtcgaagaccccgttgtgaagcagtcagcgggagcactttttgataggatgtggggggcgcatggtcgggaggctgtaagggagcggtccgaccgggcgagggagcaggtgatggttattgttttgctgtggtttgttgtgcgtgggtgtaggtggtgtttgctgaatggatgtgcttgtgctgcagatggagcgcgccgaggatgttgaggacttcgggagtctagctggcgcgccgcccgatgctgcggagggcaaactggtgccgccctcggatgctggtgaaggcccatcagatgcg

SEQ ID NO: 12800 - DNA, 677 bp, Zea Mays
agacccttgaggatgttattcctgaagatatgctgttggaaccgactgttgatgatatgattgctctgacgctccagacgtgggattagaggtatctcgggcggtatctcgtgcatcgtcgactttggaaggtagtcttcggtgtcaagaggttggtcaggattgcccgactctgatggaggtgactgaggatccttcagcctcagaggtggccgttgcagaaaacccagcccccgagggtgatgttggcgattacccagcccccgagggtgtcgccggtaatgaccaagctctggtggttagcgcaagctgcaacccagcccccaagggtgtttccggtagtgatccggccccgatgggtagcgcgagctgtaacccagcccccaagggtgtccgagagagctctccttctcacacctccatgtacgtccacgtcgggtcgtctccaccatgatctgatggagtgatggcggtgtatgcttctttagcttcaggcaagggggtcgccttagaggtcggcgcgctggatgccagaattctgatatctgctagtggagctgaatcaaccctcgacgatgctcttcagatcgttccagttgatcttccttcgtcgagcttcaacatggcttctcatgacttggggttgccttcattcttttctaatcttcaagtaactt

SEQ ID NO: 12801 - DNA, 779 bp, Zea Mays
tgaaatgtatcgaagctacaagtgatgaactgcttggatcatattccaaggcagaagataatgcattatccacagcctttggaggccgaggaaagaagagattgaacagagtttttgatgccattggctttgtttaccccaagtaccgctatccgctgtgaggacagggaatgaagagaaaagctgctatttctgccactccagacgagcttgtgccgaagggcaaaaagttaaaggttcttacccatcggccacgctatattgaaccggccgtggtgcctgagtttggcggggaggcttcttcagctgctaaatcaagagaacctgctcctcctgcgcagaaggttgaagagcctgctataatgccgaaggcgccttcggttgagctagttgaaatgaaggttgataaagatacggctaaaaggtcaaagactgaagagtaacaaagatgccaaggattttaagtccttcagcaaaagcaacagcgctgaaggcagaaaagagttttgccataacccctaagagaagaaggatggtaaatgtattggatattttagaaacaaccgactccataagtcccgctcctacagggaaggttaccgaagctgacaaaatggaacccaaagctgatactaagcaaatagaagtcgagactacaataacccaggctgaaaccgaggcagagcccacagtacctactgagacgaagcttgccgccaccgagtagaaggccgaaagaataactccagatattaatataggttttgagaagagtgcgg

SEQ ID NO: 12802 - DNA, 755 bp, Zea Mays
ttcatttataccatttaaataggctctggattgggcctcaaatactgtgaagcgcaggggctctagtgaaaaagagtccaagactcaggctatcactggactggaccgcgggttaattgcctaaaaacttaaggtctcttctgcaaaatgtgcaagccgaaggggtacggaaggatcgtggccgctagattagatttaaacagcccggattaaatcgcaactcatgtgaaccggtgtgcgatctcaaccactggatcccccatcaacggagtagattttaagtgactaaatccgctctaggtcacccgatcacggatcgacggctacgattcaactgaacgaaggggtatgatgtaatctaatcctagccgtccaagaaccgatcgacgacgtctggtccatcttctacccccagcgcgacagagcggtggcatggcatagaccgcggtggccatcaccggcgagcccgactaattcgcgcggacggatcccgacgaccatcccgaagacctctaaacacgacattggatcaacacgaatattacggtgcattattacctgtcggtgtgcagaggagagctccaatcgcggcgaggggcggagaggggaggtcgagaccgcgttggcgagaaattcgcagtgcactattgtactccgcaccaatctactcgcccagccacggcgcagagtgcaaaccgacccactagacaccagataggagcccaagcgaggaggtagaacaaggtcgacggtgg

SEQ ID NO: 12803 - DNA, 336 bp, Zea Mays
cctactagtccctgtatcaatgatgatgcgatgcccatccatccatccatcgaccttgtctgggattcttaatccgcgaataccggttaattaacccaggtgtctggtggtcagatctgatcaattccattcacgtcacaccccctgattaataattaagaaaaggatggcattcttaattgcctcgcaacgcaagtcgccacacgcacacctaatcccggatccggggacgaaatgaccgggcaacatcagagtagacacaccagaccgagagagcaaccgcagagcacgagtccactccaccccgccatcaaggtgacctgggctgggcattcc

SEQ ID NO: 12804 - DNA, 554 bp, Zea Mays
tcgcaggtcaccgtggtcaaggccccacgcaccataaccaccggtaggttgctctcagttgtgttcttcgtaccctgtgcatcgtgtacatccctcgaatcgaagttttgtgcgcaaaaatagatggccgattgatccagccatggccaccgccgcggcttgccctgcgccgccgccgttcctggctggaggtggggggaggcacgtcgaccgctgttctaaaattcgacggcgtagattagaagatgtggatacctgttcgtgtgttggtctcgaccgtttatttgcgatcggacgggttgtatcaaatcccatctatgttaagccaggacccctggatcgtgatccagcggccattaacgcataccaattctgcgcgggccagatctaatctgggccacccacttaggatcggatggctatcatgagaagataccccttcgcggcacaactttttaaaagagtccctgcagttttataaactcaacccgccattctttccaggccctggaaatattacacagagccccctagagtttgttaaaatggttttc

SEQ ID NO: 12805 - DNA, 561 bp, Zea Mays
caccgagccatgcatgacggcctagtcggtggccagtcctaatagggcgaggcgcacgtccatcgcgaccagtggctaggagcaagcgaccacacctggaagtgagtcatgggcggtggcggcggacaggcagagctcactagaggatgagaaaggggcagccatgtctaggcatagccaacaacgctgaggtagaacaatggtaggaaagggagctgggaggcacgaggaagggaggcagtcaacggtgggggtggctggccaaaggcaggaggggtggttggtggctagggatggaggccgactgagagagggagggagcgaggagaaaggttgtggtggaactagttcttcatcttctggtagtgcacccatgagatcatgttgaatcacttcacattgtgtagtctgtgaaaaaccttggaaatcttttgagtcattgaatacaataaattgtggaaccttttctattgaagtaacacgggcacgaatgaggagtctagtaaggttagcatgatctagttcccacataattagatgcccaaaagagctaatatcatt

SEQ ID NO: 12806 - DNA, 533 bp, Zea Mays
ttacagaatacatcgtcgtcccgatagcttctgagatgtagctaggggtaaaacttcctgagatgttctatgttccatgagttcccaatttctgtttcgtccatctgagtgaggcgatatgatcccggccgggcgacttcggttactatgaatggtccttcccatagaggtgacaatttatgtcgtccctcccccgttagaattcggcggaggacgagatctcccactgcaaaggatcgatgccgtatggccttatcatgatagcgcctcagagtttgctggtatcgtgctgattgaatcaccgtattcagtcgctcttcttcgagtacgtcaacgtcctccagcctagtagcttcagcttctgctatgttatcaaagattaaccttggtgccccgaacttgagatcggcaggtagcactgcctccgaaccataaaccataaagaagggggtatttccatgcagagctcggctgggttgagttctcaggctccaaactacatatggcaactctctaatccatttttctgtgaa

SEQ ID NO: 12807 - DNA, 1659 bp, Zea Mays
gaagaacgtcgatgcagtctttttcgacgtgtcttaatttttgcgggggatttttgtgggtatattgcatggctccgcctcattaaaaacctcaccccccgggaggaaaagagtacgggccagaatgataatgtttggttaattacaagggcatgatggccctgaggagtcaaacaaaaaatttgcagagattatctatgttccaggaatgctccaggtcttcaccagattgcgttgttagcttgtacgtgccgggagacgacttcgtcttgacgatgaatggtccttcccacttcggctccagcttacctcgtgactcggtccgggttgttcggacgagtacgaggtccccttcgttgaattccctcgggacgaatgcgtggtcgcgccaggtcttcgtttgggcttgatatttattgagggcctgcagggcgaagacacggtttgcatcgatgagatctttggaggttagttcgtctacatcgggtgaggccgaagcgcttgtccttggggacccatgcttgatttcttgcggggtcatggcctccgaaccgtatagcaggcgaaagggagtaaatccggtcgcccgacattcggtcgtgttcagcacccagactgcttcaggtagcaggtcggcccatttacccttcttgtcgtcgaggagcattttcttgatcgccgtgaagatcttgccgttggcgcgctccacgacgccgttggattgtgggtgatatactgaggcgaaagcaagcttggtgccaatggagaagcagaagtccctgaagtcttggctatcaaattgcttgccattgtcaactgtgagctcggacgggactctgaatcggcaaacaatgttttgccagaagaatttctgggcagtcttcgatgttatcgttgatactgctcttgcctcgatccacttagtgaaatactcgacggcgacgaaggtgaacttgaggttcccttgggccgtgggtagtggcccgacaatgtccaggccccagcgctgaaggggccacgtgtgggcgattagctttgtgaactacgaagggcttcccgagcgtggagaaaacttttggcaggcttcgcatgaccttgtgacccgattcgcggcgcagatcatagcaggccagtagaagccttgacaaatcaccttggtggctagggccctaggccccgcgtgagagccgcaagttccactgtggacttcgcgcaagatctggacgccttcggtctcggtgacgcaattaagcatgggttgaccgacccccttcttgtagagctgtccctcaatgagagcaaagtcccagcttcggtgtttgaggcacttggcctcgctgatatcgcttgggtggtaatatccctgcagaaacatggttattggtgcccgccagtcttcggtcatgatgaggttgactatgcggtggccctcggtgtcgttggttatttggatgccctctgggctgcgaacgactagcgtgccgatgacatggtagaatacgtcggagggcagggcctcgcctttggtggctgccttagctaatgcatcggcctcctcgttcttggctcagtccacatgttgcaaggtgaagcctttgaactgtctctcgagactacggacagccgtgaggtactgcgcaagtgcggggtcctttgctg

SEQ ID NO: 12808 - DNA, 439 bp, Zea Mays
tgcacgccagcacgcacacccacccgtgcaccgcgcccacgcctttaaaagccaccacagaagcacaacacttcactccatgcttcccctcactgtcccggcccagtccttagctccggcgagctctgcgccgctcgccaagccacccgagcactcgaccaccgtggctaggccacttccgtccatctccgctcaatcccatgcctcagctagtttccccagagccccatagagctccccgaagcaagaaaccgagcgttgcctcaccggagaagtcgttccaccctcgccggagttgttctccccgtcggcgcgcgtggccacgcctaaccgataagccgcagctcgattactcgtgcccatgccttccctgacacctagtgaagctggctgaccagtttgtttggaccataccgccctggttaggccggagtccccg

SEQ ID NO: 12809 - DNA, 272 bp, Zea Mays
ctctaagttgaccaggggcttcaaaggacgacttcaccccaggcatgtgagaataatccacaatcccaacgcaaatgatgacaggaccaaccatacccagagcagccagcacagcttgcagtcttcggtaatgcaacaaacttcttacaggccaccagccccgagaggtagaggggggagaagcttcgagggaaggtatggcaatcagccccggaaactattctgcctattctgtgttgaagacaagggacacacaacaaggacatgcccag

SEQ ID NO: 12810 - DNA, 386 bp, Zea Mays
gaggcattgacatgtggggcccatgggtcagcggtatgtcgagggcgcggggcgtgctggccactggatcgcagatcgatggctctggttccacgaaccgttattcgtgaatctgtgccgtcagatcagaactgggtggttaggatgggcgccagggggcttcaccctctccggccggccaggtgcggtgccatacgcgcctgtggtggtgcaggtgtcggagatgaggtagaccagggttctagggcgttgaggggtggtctggatagctagaaaggttggggaggactcggtgaatcctatggcagggtcgggattgcaggaatggggcttaggcgaccaaacggcggagggggagtcctcagcggaccgggggatactccggt

SEQ ID NO: 12811 - DNA, 1313 bp, Zea Mays
gatttttttgtctcgcgccttctaagccatttctgcgtagcgtcgtcaacaccgcttgatacttttcgagcgccaactgcatcacaaaattgcttgctaccggtgaattagctcgggtgaatcaaacttctcgctgtcgtaggtggtatgtaatgtcttcttattctttgtcattgtctaccatggtcgcgtcgtcgagcgctccatctttgaagaagacgcttagtgacctaacatcgatcgtgggactgctgccgggccatatggtggagttcggggtatcatggatcttctcgaggtgcatgcatgaaaggtagtagttgggttattttggatatggcgtgggacatgctctaggggccgatgagatccctgaactggagggggagccggtcgtctttgagccgtttttcatagcctgtttttgcttgcctgtgcatcgctttgtttctgaagtcctagcttggttcgaagtccagctccatcagcttacaccaaattgctatggtggtgttggcgaagtttattttggtggaggctacatatggggggatcctttggtggatgtcttcgtgaagaattactgccttcattggcagaagaaaagtcatcggtggcaagattgcacagtttggcacgtgcacgctcacgtcgtggactaggaagacttcaggtgagattgtgcctatgcgaagaacaactaggggaattggtggggtttttggttttatgtggcaatgaaggacgtctaaggagttcctgggctaccttctaccattctatgttcacactgctatgtcgcctttccgcagtttgaggtggggaagaggaatgcgaatgaagatgctttgcgcagtgcgtcgaagacaagcagcgactgtgacttggtggaagaatttattgcttgcggggtgtggccattggcgcatggctgggggtggacaaggtgaaaccacgctcgatgcctttaaattggaaggtgttgagtctagccttcaccattaatctgcgtggccggaatggtgcaaccttcgttagagagacagtggttgaggcagtaaaaattgttggtaaatattcagcgaagactgagacaccaaaaatttaggatatacatggttcaaatgttagactaaatcgtgtatttgagctgaacaacgtccggtacggaccgtatcttgaggaaggatcctcttatgttggggatgtagaggggtggaaaaagaaaggtggaatcagacatggtggggtgaatgaaggatgctccgagggtaaggctgagatgccgccggtgacaaagaggaggaaagtgg

SEQ ID NO: 12812 - DNA, 864 bp, Zea Mays
tcacccgagtgctaggtgaagaccccgaacactccctcagctcgcccctgcctcacattcgctctttcccagccctcgcactcacccagccgcaacgccgccccccgctgttgcttcacctttctgttgtctccgctggacttctgccagcgctttggccatggtgagctttgcctgagcttggcgcaccgggaacccacggtggtttcccctttcctcaaatcctctacccgatttgcgctccacctctcccctgcgcaggtcggagctcgccgccgtcgtgattcttcaacgtccggccaactagagccccatcgtgctgtgccaagctacccgaagcaccgtatctgggtaagtgacattcctgtgtccctcttttgcgccaattctgctatacgtgggggatttcggccatagaagttgcccctcggcgagccgcagcatcttcatggcgttcgaccactgcaacccctccctgagcccgagcttaggcctagagcaccccaccctctccccggagcctatgccaaccgcagagcgccggtttaaccctcaccgcgacgggtattgctcgccagagtaagcttgggttcgcccgagggtccccctccaccgtctgcccgtcttagtcctgttctcggcacccagaccttgccatagtgcttgccgagtcctccccaacctctctagctacctagaccaaccccaagtgtcctagaagccccggtctgcctcgcctccagcgactgcgccgccgtgtccgcggagagcgccacccctagctgaccagaggagactaaacccctcgtgccgaatccgaaccacccgatcttgatctgacggcccgaagtcgtggataacggt

SEQ ID NO: 12813 - DNA, 407 bp, Zea Mays
gtctgagggtaggaagtacggatctgataactcgtagctttgatgcagtatcactgcctggttgacgttagatagtgaaattctacttggccttgtgaacagctaggtgaagctgataaatcagtagtgatggtaaaagcttcatgaatctctgatgtgattgcctgtcggagtaaacatcagtttgtgcagcagatgcagagttagttggccttctgaagaacaccttgcttgatctaagatgaacttggtgccttctctatggcaaacaggggtgtcatttggtacatctatgaatttggttttggggaatcaacctattctagatgaggtgatgatgagttcatttgtttaaatttagtggaatgttcccattcctcatcctagctatattactaattactccc

SEQ ID NO: 12814 - DNA, 416 bp, Zea Mays
cggcggaagaaaaaataggaactagggttcagagctcaagaggacgtcagcagaagtatggtttggcatactaagtcgggcacaaagggggtaggccggtagctcgggagaagctttggttgcagcaaaacaacatcactcgggcattacctctaaaatgctagtgaaacgtcagacacatgagaggagtacgcagcagcagattggcacaaaagcaggttttcattcaccaggggaagatcattacaaaattgagatcgactcattatgagtcggcctcccacccctcgatcattacattatattactatttagactacactactagctaaactacattattctactactaactactactaccactactatgctatactaatatttaagctggcagcattatgccaccgggcttg

SEQ ID NO: 12815 - DNA, 709 bp, Zea Mays
tccgtgcttgccccaattgattctagtcgttgtcccatgttttccaaaagtggtatttagttgggagggtttcgttacgtccaatatcttgaggtcctaccggttggccatggatcacggtaagcgtccggctttggaatgctctcaccaaggttggttcaagcgtcgctcattgcaggaaaggtgggtagtgaccgggcactcgctcgactcttgcccttccattatattggtgattatatttccttgtagggcagtgggcttgagtgttggagggaaagacatgtcgctttcgtcttccagctcgccggatgggtaaatgaaggctggttcttgtgacggcgggcctgcatcgttggttctgtcggccggagctatcagcggtttggtcatcgttggtcgtcctgtgacgaccatgaggttggttagtgttggcccccaacctgatcgtgttatattatgccggagggtcatcacttcttcctctcccgatcttcatgtgtcgtcttgcggggtagggtcctcgacccttccgctgttggtgatggccaagctgtagggtcgactagaggtgtctcgattggttgtatgaacttccgacactcgtatcacaggtcttcgggcgcgattggccatcatggaggtccatgcaacgagtacgctcctggctttgcttctcaattccttcctgcatcttaggggtgctgag

SEQ ID NO: 12816 - DNA, 633 bp, Zea Mays
cttgagccgacacggtctaacgaaaccacaacatattttagggccgggttaggccactgtttctactctttgggctgtcacgacatgacccaaaagttttctagaccttcttagcccaaatctgttttactcaaagcacgattgatatagatcggatcgggctagaccagcccaattctcagcactaatcatggctccaccagaccaccagcttcagcgcccggccaccgttgcagctcaccctcaccctgcacccaccatcgtagctcgtcctccgacatttccacactgcgtccggacgaccttcattgcccaatcgtaggatagaactccaccatcgcgcatcctcgttgcgttattccggcgcagacaggacctccacccatccctttgccccgacgggtgagaactccgcccctagatccttattgcgtcccgcatcctcgtcatggcaacgaccctccctcccttcgcgtcagtgagacctccgaccctccatccttccacatcgacggggattctcgtcgtggttgcctccctatctttgcactggcgacttctctgccttgcctttgtaagtcaggcgtctgtctgcacactggtcagatctgcgggcatccatctaggccagat

SEQ ID NO: 12817 - DNA, 710 bp, Zea Mays
cccgacggcggcgccgcccccaaccgagcaccgcggcggtccgccatggacggaacgccaattgcgctccatggtacccaatcccctcgtgtcacgagtgcaaaacgaaattgagagggtagcaaatatgggaggtgtgctttcacagtgattccggccgtcacctggtctacccgcgacgacccgtggacttgcgacggcggcgatgaattgagcgccccccggtcaccctccgagctcacaatcaccacccaaccgctccagggacttgggcgaagccttccgtccgcacgcgaggccccaatttggcgccgagcacaaccgacgatggtgaggtcgccaatccgcccgcacggtcccacggtttctggctctctctctctatcaacccctcaggtggacgcgggttgggttaaaggacaggaggggcgagacgtggcccacttttatacgcaggaggttggtcagcaacggaatccgagatcgatggcaagctccgccatgcacggaatctcggttgagggtggagctgacgaagccggcccattgtcagacaaacctgagtgtcgcgcgcgaacgggtagcggctgaagtgtgggacccacaggtcggtcgcaccacagcagtgctggttgggctgggttagcgcgcgagagagaagagccgtgggccgaaatagtctgtccgcggcccaggtaagtcttctcccc

SEQ ID NO: 12818 - DNA, 389 bp, Zea Mays
caaaacttcatgcacagatcagttctcggtaaggttggggttttcttaaacgaactcataacaagatcaactcagatcacaaccaagaactgcacccatggggtgtatgcaatgatccaaagagtgtatctcactagtcaccaccaatcaatccccaacagcacccacaacacaagacctcgatggttcttccacaaatccaaagagacaagagaggtcagaacacaagaacaaaatcgactcaaacttcagcggggacaaaactgagtacaagagtcaaactagccccgtcgatggattcggccacccttcctttggatcaagcagcgaagattgcaaatgcagacgcaagttcaaaacatttgtggatctcggctattctataaaat

SEQ ID NO: 12819 - DNA, 347 bp, Zea Mays
ctaaagcctagctcatgtaacccactaatgtttggtatattgaacacttagcccactatcaatgaattagggttttgactattcaacatggtatctagtcaggtttcctcttctcctcttctctcctaggtgccatgaccaacactcctctccacctccaattagcttccctcctctccaccgctctccactaccacagggcctcctcctctacctgtcgttgccgcacctcctcagacctagctaccaccgctggggtctacccaccaccaccacttgcgcttgcccaatcgttgttgcctaatgcaatgcttgggtagcctagcatagtagtcgctggcgcctcc

SEQ ID NO: 12820 - DNA, 405 bp, Zea Mays
cgctgatgtggtaagtgccttcacctatggcacaaccaacgaggcgctcacccatgaactttggcgtgggagaccaagaacaacaaccgatctcctcgacatagcgatcaagttcattgacggggaggacgttgtaggggcaattttccgcaaaggaaagagctcgcgcgacgccggtgaaccaatcgacaagaagagggagcgtcgggagcaccccgacaggcatcggaggaaccaccacccctggcgcggcgaagaagaagttgccacagcagatcggtcacccaagcccccggtgaagaacgacaacgaccacttccagaagctaatggactcactgtgtcacagccacggcttccccatccaccacaagctctgggagtgcgagctcctaaagcgcttcat

SEQ ID NO: 12821 - DNA, 613 bp, Zea Mays
gtctatttgtatgtgaacctatagggtcacacacttaaggggaaggaagcctaactcggattagatccgaaattagactgggctttagggttactgatgggcctcggagtcagaaggccaccataacgcctatataatgagggtcgggggcgtggttaggctaaccctaattcgccaccagcaaacgagcagccgctcgcctctcgtcctcgcgaagccgccgtcgcgaacctagcagttcggtacgcggtgcttcctccctgtacgtgtggatacctcggaggtgctgcatctggagcactaggacgaaccacgcgaggacgtgaaggacgccggcgactgcacaacactgctcgacgcgttcgtctacatcgagacgtcttcaactgccctacgcgtctagtggtaattccatgacctaacctataaccgcagtagttcttggttttattgggtcaaaaaatttgtttttcgctagcgtagcctccccataatcctacaagtacctgggtttgtactactagaagcccgactaaaatagcttttgaaatctacaaatttgcgacttcgtcctctttccctttgatttggcatcattatcactgcaagtttg

SEQ ID NO: 12822 - DNA, 421 bp, Zea Mays
gtttaacatgagtctatccctcgtgcctaatctaattattagtttgtgagaaatgaggtggtgatatgtcaatttatccctcccaataaagcaaataaaaatgtgaccaaagtacgatgtgcatcggaccattggactgggtcatggtacaccggaccacatttgcagagtggttgtaaggtggaccaagtgaccgttggcacactggaccacttgggtccaatggctacttcgagcgtaacggttgactccagcggctagctaacgtggtggctaagctagcatggtttggtgctagcctagatggaaagtctttgttaggaatttaggatcctggtgtccgtgctactattgaaggtctagtgcacccgagcaaaacagaatctacccaacgactaggttgggtttgggggctataaat

SEQ ID NO: 12823 - DNA, 883 bp, Zea Mays
ggctgaggagactaaatcagtttcgatcttgacctctgagcgtctggtgggagccctagcttcatcagagctagaaatttgaatgggtgaggaggcaccgacatgagcatccacatcatttgggctatggtcatctaggtcgtcgtccacggtgatggcgcacggcagaggggtgagatgttgtgtcctggacctcgcggcggcgctgggcttctagacggatagagagtcaaatcgtgtggtgaggtcgtctaggatgtcgagtatgctttcgccgtcgtcctggttttcccactccgcctcctcttcatccacttgctgtgtggcggtggtggtggtggcaagtttgcataggcggcggccgacgagcttgaccttctcgacctgttcttcggtagcggcttttgcgaaggaagaaattagaaacattaagtagattgaagggcgaggaaaaacaatgaagaaagaagagacggtcgtacagtacctgggggcggaggcggtggcagattggggctagggttatggttttgggtggggcgctggaggctgcgggtgaagcggaggaggtggtcattgaggccgttcggtgtaggggcagcggcagggagacgacgatccttggggacggcggtgacgggtttatcgatgtcgtcgtcgtcgagatcgccgcagaggtcgaagggagggggagacgccatctaggatgaggtagggcgtgttgtcgcgtgcgggcgggaggtagggcgttagggcggttcacggaggtcgcggcggctacagaggctgcggcgggcggttgggcgttcgcggctttcgcgaaggctggagctgtagctgccgaggcaggattgcggcttgggggcgggtggtagggcggttc

SEQ ID NO: 12824 - DNA, 811 bp, Zea Mays
acctcctcaagtttacagcatcgagcagtaacaacttacaaaagagcccagctacacctcctcatgttcagcaagtcttccacgcaaaagcggaaaaacaaagcatggaagcatgcacgctcaggtgaactcaggttgccctccatggcaaacgcctgtcaaagtttaaacaaaccgtacgaatttcaagggaacgccacacaagcttgaggtacagtacagatcacagatgactgatctagcgtttcagttcgggggagtgttgtggccaatgctggggctgtgtcctggagtggtagactcggtctgggtagcagtagcagcagcctcctgcggagcagtccttggggtgcatggaggacgcacgccgctgacaggcgccctgctcgttcccagcttcctggcatgagctggcgcggcgagctgcacgaagaagaagacggtgctgagaagcaacatgaacacaacgacagttctcgacagaatggccatggagtttgcacgggggaaatgctagttgttgctagctagtttggagtgggatgagggtggtgtgatatggtgagaactcggtagacaagttcgttgcaggctcacagctaggactggctcaccacttcttgagccagctcccttctttatacaagcgggatttacttcaaaaaggtgtgcttcaaaagcagatgagtaacgggaggaccacagcaaccgccagccaattgtttagcgtctggaagtatcagtagtttcttccttaacaaaaatcatatgctaaagggaacaccttttcctaatcagttttactctgagg

SEQ ID NO: 12825 - DNA, 1206 bp, Zea Mays
gggcgggagctacccgtggtgcgacgacaccactccttcccccatttggatgtcggaggtggggtcgaggtgctcgacaatccgaaccatcatgtcaagcaggaaaataggtgaaaaacctaagctaaggtcccctaccttgctcgtcaaatgttagaggtaatctccaaccgggtggcggaaagcacccgcctaatcctaacaacgagtggttgcatagggtgtgcttgtggagatgcaagaacataagaaacacaaggatttagagtggttcgggacatcagagcgtaataccctatgtccattgtgagttgtatttctgagtgcttgagcatggatgatgttgagtttgtgtgaggatgagcatgagcctatcccttatatcgcatgtgccttcccttttatagtccaagggtggcacatacaaggatgttgagcaaccccgacaagtgggccccaacaaactagcattaaatatatactacatggagcagtaaaggctatggcggatagagatctctcctcgaccgccatgcagatcttctagccaagcttgtcttccgccccatttgccagcttcgtgctagccatgaagtgaacctgacatgctgacgtatgtagggaccaaccctactgacgtgcacgggagttaatgtgatggatgcatgcgctctgctcaagcaaacaactgctcatgatggtgtcgcccatgtgcgcggcaccaagacacggccgcctaccttggtatcacgcgacgcactatacaagccctgcactcgacgctgacacacaacaactcgcataggtaacgcgcggagcagccattcatgcatgtgcggtctgataaaagcctgtccatgccctacatgcagcaagacatgcctcaaccactcgtattaaatgtgggtggtgagcttgcttctagccgaagcttccgtcacgcgcacatgggccacgtggcgccatcggactcctgtccgagctatgagtggggaccaagggcgcaagctagcctgaagacttgggtcccacccgagggtctagatgtcatacggaggggtttgggacccttgtgtggaggtctagacaatacatgtggatgttaggatccgcccatggggtcaggatggcacacgtggaggtctaggacctgcccatgggagtctggacaacataaacgggtgcctgggctccacccgtgggggt

SEQ ID NO: 12826 - DNA, 531 bp, Zea Mays
cggtgatctgccgccgcaattcgcgcccgcctgggatattcgtgccacgggagaggaagataacgtcggggcagggtgaaaatatccgaggaggggtgaatccagtcgctagccggactggccgtcgtgtcccgcctcggtcagtcgcgctggcatcaccggagctcaccgtttttctggccgtgacacgtaatgaccactcctctgtgtcgtaagggtcgtggcaagcagtcggttatcgtccgctgaccagtcccctctcgcgcgccacggtgatcaagccactgtgaaatatcttggccgtggtaactgtgatctcaatccaaaattcgtgcccagttcaatcgagagctataaattgaggatacgctctactctgcctctttgttacgcgtccaacccatccccatctagctcctatcgtgcaccaccgcgccccaatttcgcatttcccccaaatcaattcttcgcgccgccgtgagtttctcaccgtggctagacatctacaggttagttcaagcttctctgctt

SEQ ID NO: 12827 - DNA, 551 bp, Zea Mays
gctcaagacggtatgctacgggccctattcgggaaatgacggggtagggaccgacgaaacgtggtgccagttttccttttatttggaaccttttgacaccatgcatcggggagaccttgagataaacgaaatctccttcctcaaatctgagttcccttcgtctgttgtctgcgtaactcttctgtcgactctgagcttcgagcaatctcctgcggatcaaggcgactttctcttcggcttccttaacaaagtcgggtccctctagtgtcctttcccccacaatggaccacattaggggagtttggcattttcttccgtacagtgcttgaaatggtgacattttgatgctggcctgatggctattgttgtacgagaattcggcgtacgacaaactagactcccaatccctgtcgaaagttaacatgcaggctctgagtaaatcttcgaggaccttgttgacgctttctgtttgaccatctgactggggatgataagcggtgctgaaatctagcttggtgcccattgcttgctggaggcccttccaaaatttt

SEQ ID NO: 12828 - DNA, 601 bp, Zea Mays
ggggggaaccccgacatgagtaaggtccggtgctggcacgtgtctaggccttgccctgcactccccgctcaggcggagaaccgctgctgccgcgtggcttgtggcccgtgacataagccaaccggtggggcctgacgtaaggcccctaaagccgtgcagtctctacatttattgcggagaggacgcgccacctgccaccatgctgacagatgatgtgccctctcagcatttaatgcgtacagtccactccgctggcagacggcgtcagagtcatcctgcagacggcgcgcctgtcctgtctattgtcaaacagtgcgcccatgccatgcggcgcactatactcaccatcccttatacaagaagcttcctctgcacgccgaagatacgtagatctcggatgttagggtgctagaagattgctccagcggcgaacatttgtagctccaagtgctatatccattatgtccctaggcccgcatgtcggggctcagtacctttgtgcatgccccccttcaactataaaaggggatgcatgcgacgttacaaggcagatccaatcttaggctcactcagacactcacaagttcatacaagctctcaa

SEQ ID NO: 12829 - DNA, 1427 bp, Zea Mays
gagggaggctgggcatgtcagaagggaaccactcgaggggatcctgcgcccagccccggactgacccgccgtaaatgattggccgcattaaccatgcctggcatcgagctacacgtgtgcatcgatccgcttcccactcatgacctacggacccctccggccgcatagcattcatgacctacgagcctctggactgcaaggcattaatgacatacgcgcccctcggcctgcagtgcacttatagcctataggactaggcctcagtgcgcacacctcccacagggcactacacgacgggttgcgccgagccccagaccacagaagtcaagggttagcgtagcccgaatgatggcgcctgggaccattgctgccccacatcatccaccacgataaatatgcgacaaccagaaaaccctagttcccacgagtacgcatggcctcacccgaggtaaaacgttggttttacccctgccttacgactccttcccagagaagccaacactggccatccactcctcggcctataaaaaggagaggctggcttcagggaaagggggatggaacggagagacaacaggttaccttcagacgaagacgaacccacaaggacgaactggaggaggagcgtcgacgaggaccaggaggcgggagccccgccaagccaagacttaggtaggacttcaccttgcagcttctaaactccacttccacctagataagggatctgggagcctatcctccctctctcgactacctgtaaccactactataagtttgatcctcaatggtgccagtagtgcaagccactgatgactggaagtagggacattctgttcgaaccggtataaatcttatgccctccgcgcacaccctctggagccagaaatgtgcacaataaatttacttgtcggagcgaggtacgaaacaccgacaacgtgttacactcggccgataggatgagttgttgactggttagaccagtcgatacaaccagcgtcgtgatcagtttgatcggtaataatcgacacgttagaaccagtagcactatcgatcaagaacggccggtagcggctatcgtttgctggcatgatgtgatctgatttgtcggttctattttctttgtttgattttgaaaagttctccaaaaacaagaaaattaaaaatgaatccacttctataaatagagggggtgcttgggctcaatcatacaactcacacttagaatttatcttctgcctcctcatactcatgtcactcttgtttcattcgagcaaagcattgttgcaaagtcttcgtccaattcatacatcgacatggcccaagaagaggtgatagagttgcaacaaaaactataatgcaacaactgcaaagattgcctctgattcttccacgccaatgaggtgatcgaggcaacattggagatacat

SEQ ID NO: 12830 - DNA, 406 bp, Zea Mays
acctggatcttgcctttcgggagggatctcgtcggggaggaaagatcctagtgttgtcttggggacagtagaccaaccaagacgtctctagacgacgtcgagccaaaatgaggtgaagattgaggttggaaaactacaaccaaggctaaattactcctactcctagtgcataaagtaaatttgggttgatagattgattgttgtgtgttctcaatcgaccgtatccaacatgttttcatgggtttgtcaggataaccatgcacgggataaggattccagcctgaattaaactaattgcagattgtctaggctatcccgcggaccatcctgggcacggactgtttgggccacatggtcgaatcgtcctgtcattcaggtgccaattctagtgctcaacacatgcccc

SEQ ID NO: 12831 - DNA, 629 bp, Zea Mays
atcaatatcaatccctgttgcgtcaactgtttcgtattcgacaaactagttctgtatcagaacatgtagaacgcttttcgaccctggttgatcgccttgctgcttatggaactatcactgatcctctgtattttactactcgatttgtggatggcttgcgtgctgatattagagcagtcattcttattcagcgtccactcgatctcgattctgcctgctcccttgcattgttacaggaagaggtcatggagccgatgcatcgtaaggaatatcgcaaggcggaattcgttccctggagttcttcggcaccgacaaatccacatctgttgccgcattccccttctccatcccaaggggcactccctactgtccctatcgaagtgaagccagtaccagtggcccgaactcctgccgaccgcatgggtgccttgcgtgcatatcgccgtgctcgtggcctgtgtgatcgttgtgcagagaaatggcaccgtgggcatacctgtgctgccacggttcagcttcacgccatccaagaggtgtgggagttgtttcctgctgatgactcaatgccagtggaggatgcaatttcaccagctgaagagcagctattcttggccctatcgactgcagcc

SEQ ID NO: 12832 - DNA, 878 bp, Zea Mays
ttgaagttgagccactgatccgctcggctaaaggttattgcgtgctctgaccaccaataaggagctggggcactggtggttgccgccaggacctgccggtcgttgagcttctgctgcctcatgttctcttgcgatccatgtcctccgaagatgacgttgacctccctgtcaacgcgtgggaatgctccgccccctcccccttcttgctgctaaggatgcctgggctcgacaggccctcctcatggtgggggaggtggtagaggttagaatggtcggccatgtccgacggagtgcttgaagtccctacagttccgtagggtgtggcgcatgtccttgtggtacgggcactaggcgtcgagaatgtcatccagtgtctgtttgcctccgcggggcgcacctcaggctcgagcgacgggtggtccggcggcatgtacctcctcacgaggcctcttctcccaatgcctgtcatgttgctagtttgtgtcgcgtcgtggtgcaggtggtgcaagtttcatacctccgatgaggtcctgggcccgctcgttagtggtgatgtagaggtctgcctctcgaaatagttgttctgaggtggtcggcgctttctgtggtatggctcggacgaaggccgagtcattggatccccggtagaaatcttcaatcaccgctgcctcggtgactttggggatgcggtttctcatggtctgaaacctcttgaggtatgaccgaagtgtttcatcgccctggcgcctgatggatttgaggtcccatggttgtgtcggtttgtcagagagggactggaagttggcgatgaaccaccgactgaagtcgctccaatcatcgatgtagtgtcgtggcagatgtcgtagccactgcagtgc

SEQ ID NO: 12833 - DNA, 965 bp, Zea Mays
gcacaatgcaacgacctagaaaaggtactatatgcttcaggccaacttcaagggccagctcagcaatggtgggagtcctatcagtatggatgaccccaaggtgcacccgagatcacctggaaggaattctgtgataatttcaggtcctatcacatccctgaaggattggtggaactgaaacaggaagagttcggggcattgaagcaggggacaatgatggtgggagaatatcgtgatagattcgtccagctgtcacgatatgctccgaatgaagttgctaacgatgctaacaagcaatgtcgttttctgaaaggactttatgatggactctagttgcaactgatgacaaacacttatcccaactttgaagagctagtgaatcgcgctattgtgattgacaataagcgtagggaaatggaagccaggaagaggagacttcaaggacaagcttcaggaagcaacacccgtcagcgtgcttacccccagcaaggttttcagcagaggaaccagggtccacccaggcaatggaattagggtcagtacccacagcggaacccgaactagccgtgccctcaattttagcaacagaatggcagttagcaacgtcctcagcagcagccacagcaggctagcaaccagacatctcatcaaggaccatccaacaatgcttcgacgaagagagaaacacctaacaatttcaatgtgtgtttcagctgtggagagcctggacactatgctaataactgtccaaaaaagcagaatcggcagattccgcagaaccagaatgtcaatcagaaaccttatgccaggccacccaacagtggaagggtgaatcacgtgtccacggatacagcccaggatgcaccggaagttatgctgggtacgttcagtgtcaactcccactctgctactgttcttttcgattctggcgcatcgcattctttcatttctcaagcttttgttag

SEQ ID NO: 12834 - DNA, 421 bp, Zea Mays
ctaaagagactacagaggacagtcaagctgtcctctagatgctaaaggactacagaggacagtcaaaagcgactgctgtcctctagatgctcaagacttattccatcaaaagaacgaggaaggaagaagtgaggaggtaagtttcttctgtattcatcataagcagttcaatacagagttcaggcttatatatccaaatcaggcccaggcccatttaccacaactattacaacggcccatggccaatataaacctgtacatggcatactcccgccaaccagctagtcctcactcctcagtcgccaccgtcgttacactatttcgcttggggaggtaggatggatacgctgcatgaatagcctcaactatcgaccaatgcgccacaacatggacgcgatgctcctggtcaaggacgtgatcg

SEQ ID NO: 12835 - DNA, 655 bp, Zea Mays
atctcgatgctggttttgtactgggcgcaactgaaccatgatttttcttgtcccccacatccagtacactgccagctgaagctcgaccagtaggacctacattctgggtgacatcaatcaacatattttttcgcctgtatcaacctgttctctgaccgacattcttgctggtattgctctttgcttattactgcaacctgattgttcggccaatgtgtgatgctcccccctatagtggccatccatcataacaccgggaccaactatgcgttgatttgcaatcatttcagccctgcgttcaccctcccagctagcaaagttattcatttctcgtgcagcccctacgtcaagcctcatgcgcttgctgctcaccccttgatcaccaccacttcgcagcatgctcccttgtgatttgtttgtcttagcagcagctacgcgtccatgccctatgcttggcttagctgccatttcctcacccttctttgtgtaaatcttagtgacaaccacctgaccattctgctttgccacctctgcctgggaaccttctgtatcatttaatatgtcgcactccactgttcccactatgacttttgagcatcttttgctcagtggctcatctcgcccatcaacaataacacccccttcttctgttttt

SEQ ID NO: 12836 - DNA, 933 bp, Zea Mays
agagtttctgtgttcaatcgtctgaactttccggctttgggatcgtggccttcttcctctaaggggaggattggatctcctcggttcttgggctctaattcttctggtgtagttcttggaggcggaattcccaaccgtcctaaatttcaaatttcgaattccagctggtctcgccctcgcaacctccaatggcgccccgtgcgtgctcgcgggcctgttgggcttctgggcccgtcgtccctaagctgtcatttctgtaagggctggggacacttggatttattttgtcccaacaagaaaacttccttcggttctcctctgacttcgttccctgcctttgggagtcgggccatcttggtgggaaaccaaaattctcctgatcacagtacctggtttcgcacccctgtggtgtccctgatcggtggaccgcccaaattcagttgcttcgaggagttcgcctaggaggtattaaaaaaatctgaatcggcaccccttcagtccctgacgctttctttgggcgtcacctcaccaaaaccccaacctgctccgtcttcgtccgctggttggcgatcctcagttcctgctctgatggcgtataggcgcgttgatcctgaaccctttctcccaccaggcttcagcgcctcgatggtccttcaccgggaaattatggccaggtcagttactaggcgcctcccgccattgcatgaggactgggctattatcagcattcaacctttacctgaccatgagattactttcccggtggtgagggatgtggttagagaataccttgtggagcacagacgacttggggtgcgtgatatccagcggtcgcacctgggtcaggttctggttcagtttagcagcgtgcttgaaagagacaatcttgtcctgctcggtccgcaacaataccttgatgcttccttcactact

SEQ ID NO: 12837 - DNA, 692 bp, Zea Mays
ggtggctgcacccacaaattaaagccccacatgctaaaatgttttggtagtgcaataagcacccaaaacagaggacgcatatcacatcacatcatgattcatgggaatctcatcaccaaggttggaaaatccaatccctaatccccatgaaagttattcaacggaagaaagtaagaaaacgcggtagtaggatggttgctcgcatgctcctgccttggattgtgccaacggatccgctacacttggtgtcctataagatgacgctgaggttggtgcccctcaacacggcggggttacggttaacatagtcacaacacacacacaaatcgacctgatgagcgagcgtccgttatatacctggtactgcttggcctatacaagtagggccttggcgccatggccagcaagggctagtcacgagcacgcttaggcatcacctcatgcctgtcgggaatcttggcacgctacagcgacgcgaagctgctgctctcaatcttctccacctccaagaagccttcgatgatgcgcgataggccctggatcgtgaactcctcacatttgagcgacgggaccagcgacgtcggcaaggccatggcctccacatcacgacacatccatcgcgacaaatccctaagacatagtgtcagcgtcgtcttgttgtgtcagaggtagagcgccactgcagtcgccca

SEQ ID NO: 12838 - DNA, 579 bp, Zea Mays
ataggatcattcctagaccatcgacccccgataaccttcagcatgcgcgaagaagtttcccggagctcaggtgaagacatcaattccccgggaaccatgcacgtttccatcaactcctcaacaaaatgcccagtggccctcgtcccagactcatcagcccccatacctaatttcctctttcgaattgttgcaaccggagctttcccctttgaggggccttcgccggcccggggattcacttgcttgcctcgatagtcaccggcatcagtggagtccccctccgggtagggaccataaggcaatttatttaatttgaagacacggttcaacctgacgttggaaccgcgaatatcccagctccttaacatttcggtctttggcgcatattttccgacaattttaacggcctccgactccacttccggcacaaaagtggcagcatcgtgcccgcgcaggtccacgacaaaggccaagcttcgcaccaatttatttcctagggttggcatcgggcgaggcgcaatctcgcccaaagcccatccatgcgccaagggccacaccccacaagcgacgaaatcttgc

SEQ ID NO: 12839 - DNA, 475 bp, Zea Mays
ctgatttgaattagggcccactcatcagtctctgctggcgtgtgccctttctcccttgtgttgttgccaggcgggcccggattgtcagacatcttcccctttcttcgctcgcacgactccgctgtggttaatctcggcgcgcttctctggtgccattgcagcgacccgccaaccttgccttgggtacaaaaactagacgcaggccttctattccccaccggtgcatccccagctcaattccctagcccccttgtcgtgtgacgtcgtcgcatgctcgccgtgaaacaccagcaaaccccatgccgtcgtagctactcctcgcgccaccgctgcccagcgtgggtcagggaaaaaggacaaatacatccgccttgttgcacagatcacgtccatggaagccgggtggtgaattggggcgagtctggtcggaatcgcgcctcaaagtcaagcgccaccgatagtcctttgtggccgg

SEQ ID NO: 12840 - DNA, 548 bp, Zea Mays
taataaaagaggtcttccatcttttcctggtccaccttctccacttggcgttgcaccttgtgtttctaaaacagtgaccctccaccttctccacttggcgctgcaccttgtgtttctaaaacagtggatggtccaccttctccacttggcgcacttgaagattggatgccactaacagacacaagtacaaggctagtacaaaatataattttaattagtcattatatgacgacatttgaagcaagagagttataagtgaaatgtagctatcatatgtagacttcggagactgaatgtcggtctgtgaaggttcatttgcaccagcatatttgcgactcctctgtttcctatttctttttttggtaccgtttagtgggcacttataacttatttgtctgtgaccaagctctccacattttttgcatcgtatagggccttttttcatttgcctaccactttctttattggttgtcttaggtttactcccaccttacagacaacctttcattcgtaatttcctttgcctaccaacacctcgttttgctaaa

SEQ ID NO: 12841 - DNA, 800 bp, Zea Mays
ggggaagcaggaacaagatgttgaatccgcgcgctaacctcgcacccacgattctccgtcgcccgggcttcaaaagcagacccaacctctcctcgtgctcctccctttgactccttcttccagccgccaccagagacaaattgcgggagtccgccgccgtcgagttctgccatactcaccgctcaacaccaaagatctggtcccatacgttcgggagggtgcacgggtggcgctcggggaagaagccgggggatcgaggcatctgctgcacgggaattcttcaccgtgtttgagtctccgccgcgggatcgcgccgtcgcgtgggcagactcatcaccaaacccattgtgagtacaaactgtctacccgaattcaccatcatactagccccattttgcacctggcgacttgaccgatcgtgcaccttgggccagcagggggggtagcgtagccatggcgcaccgtcgcggccttgggtttggtcgccaacattcatctaggggaggaagacgtagggtgcaccttaggatcgggcgtctacggttgagattaggcggaagaataccccttcgctacgtttagttatgaccgtagatctggatcagacggctagatacaaatctgcggtgataaaatctctaccgttgagtcttaatccaacgatcccaactgcatacggctttgccgcgctgggaatctatccttaaccctagagtttagatcgggcggtccagattaaaagatacctcttcgccgcggcgtatttactaaagagaccttaggaaatagggaaatcaacc

SEQ ID NO: 12842 - DNA, 1028 bp, Zea Mays
agcaaccatggaaccgtctcacattgtactgtactaacagctatttcagaggtgcttaatccctgcaagagtatgatgtgtgtagtctagattgcttttgaattgcctgaattctgccataaaatttatgtcttatcatacatatttccctatagtatatttggatgaatttacgaattttttgcttacttctcttttgaaaagcagaaatattcttgtcagattcaaatagattctgtaggcggcacttcttgtatctgaactgtttgatcattttatcttctcagttatagtcttgcagcaacttgcatagttgcatgttcctagcggatttgccacactttctgtttgcctaagattaggtatagtaaggttaggcaccaccaaccaaacaggccatgtatgacaataccttattcattgtttactatatgcttgagggatatggtttctttgtaatccacgataacttcagcatcactgagaaaaatgctacataactgtttatcatactatcgctattcatcttgtttttgaaagtgtgcttgaaactatatcgatatactgccttcttttttttgcaaggaccttgaatcatttgggaaatttaatgcagattggacactcagcatatgttgattctccactcgggccagatgcgtttcgggaatatgaaaccttacttattcaggaccatgatgagcttcttaagaagtctgagaatttagacagacataaagaaagcattcataaagaggcgagtgattttacctctgacgttgataattattctaagtggggttctggggtgcattatggctctaattctgaattcagcccaacgaaaagggatttttttgatgacgaaatgggccaggtagaagcaagagggagaagactgtttgtagctgtgcgtcactttccgatgattttctctcctatttcctcaagggtttttgttttgccctctgaaggcataattgctgactcaagcctgtcgaatcatcatgaggattcccttggctctg

SEQ ID NO: 12843 - DNA, 404 bp, Zea Mays
atgggggtagatgtgccttgcgccattcaacatggtattggaaccattgatccagtagacgccaaactcatccatcacatcttctcttatgtctttctctccccagatcaccatgaccgatacttcttcttccctgcccacatacagccattcgttgctggcacaaaaacgacgacagctacaacactgatcctccatcgacggctgtggcgcacacctcctcgtacacaattgatccaaactggtatgtcgacacaggtgccacagatcacatcaccagcgatcttgaccgactggcgctgcgtgaacgctatcacggtggtgagcaagtccaggtcggcaatggtgcaggtttgcagattttacacactggtcattctacaattaattccgatcatcgccca

SEQ ID NO: 12844 - DNA, 499 bp, Zea Mays
gcaatggcgccgccgtgaatcggagcttcgctgtgggtaggggcctgggcacatcgtttcatggataggggttagccatgagattcatggtggtcgagcattcatgaaaatggagtcgggtgtgtgaattggatggggttcactgtagggcgcgttcgcaggtgtgcttccgctgctctgggtgtgtgccgccgtgtcgtgcgcagggaggtggtaaaaggatgccgcgaccattggatcttgatcctgcggtcaccggatcgcgtgggtgaagacctaatctgagccacacatcttcaatcctacggtcggaatcggatgccaattcgttattgtggccgatctaatcgtagcccttgatgtatgatccaacggcccataatgcaccataccctttcggcccgcaccatttgcataagagcccctccgtttctgcggacttaacctgcagtcctggcgccagccgatctgtgtcttagaaacttttacccagggcccc

SEQ ID NO: 12845 - DNA, 556 bp, Zea Mays
gtggctcgcgctacaggcacctgattggtcgctgtaggggttacaagcgggtgagagaggaaagaaccccaagtctctaagggttgttcggttagaggtcctatgtatcgtgtgttcgctcttcgtttgacctctcaagttgttgggccaacccccttctttaatagaccaaggagggggtcgattacagatggcttctctcagaaaggattgtcatagtgggataaaatggagcagttcacctcccgataaaaacctcatcatacggtgatgtccaagtccatcctcatgtaaatctccgaccatgcttctttaagaccgctgggggagcgtgttggcgattggagtcgagcgtcctaattactcctcatgtccatctattctcatattgactcatggtcttcgtagcctgacctctacctggctctgccttgcccaacctctagactcgtgtgtaggagtcatctggaggcggatctttcagatgaacctttcttcatcctccctctgacgcgtgccccgagggggcatccgattaccgatagtgtctccggag

SEQ ID NO: 12846 - DNA, 437 bp, Zea Mays
aggtttggataggctaaaattgccctgagcagttctctcaacttccatcctctttggtctagtcctcgcatctatccatcgggtcccatttcttcttacatcccggcctgccggggccaatccccccaggtgctccattcttaacactgtcgcctccttcctgacgcctgaagttgcctgaccctgacaccacaactgacgagcttgacgaaccagcgagccctggctctcagctggagacatcatctgacccgcctcttctcggtgtcccacccttcgaggagatcgatatttgacatcgtacgcatgacttgattcggtcaggacgaacttagttgtatgtttgcttcgcttaacttgtatgttatattgatagatatggaacttgaattttatgtaactatagtttttaccgtcttgcttgattttgtaacgtg

SEQ ID NO: 12847 - DNA, 659 bp, Zea Mays
gctagatttagtctctcaaggcctcgtctgatttttgtcaataattcttaaggtgccacgggtagcctaggcatgcgtatgtgccttggaagtttccaatgaaaacttcctcgaggttagcccagttgtagttgctcctaggcctaaggttttcgagccatgctcacgtcgaatccgccagatacagggggaggttccggattatgaagtcatcgcgatccacccctcccgcctaacacgttagccagtagtctcctagccaaagaccaaggttcaattccctagagtacttcgtgatgttagagagggggcctataacgctaggtactggtgcccgcaggatgtgatggctgaaagcccgaggtcccagcgacaggggctcaggcttcggtcctcatcggggttgaatcggcccacgtgacaccggctgtatcaatagtcgttgtccgaccccttccatatttcctcactactccctgggtctggcacgcttcgtgctcttccgcttgactcccggttacgacagggtgaggtctatgtcatgtctttctcgggctcgggtgactgcccaatcgagacatcgttccccgacggtgtagacacagtgcacttgtcagcccctgacttctgatgtcgtgacataaaacacttgacctggt

SEQ ID NO: 12848 - DNA, 794 bp, Zea Mays
atttggatcaaaaatggaatttctatgaattttacaagtttctagaattgtttttgtattaaaaactaaattctataatcattttctcggtttttaatatcccctggactaggcctcgaattccagaaaactcaggggtctctacgcaagaggtacgagacccagtgcacagtcagataggatggcgggttgatttgttatttttccaggggctctgacaaaaagtacccgtgaaggggtatcaacggtttctgaccgcccgatcgtaagtgaacggccccgattagatccacacgtggctgaaacgatacatactctacaccgtcggatctgagttcaacgatcgcgatataattatgctagatctaaccacgtccattagatctagatcgacagtctgattttaacgtggtgaaggggtatccctgaatctaatctcagccgcccacgcgatgatcaacgggcgcgaccatatcttcacccttcgaccaaccgagacggcggcgccgaacacgcgcggcggcgctcgccggtgagccaccccactacggcgcacaggtgtacgatccccaaattaatcgggtgctacacgatgcaggagcatgggcgaagcaatggggaaggttattaccggcgatcgaagccccgacgatgctggccacgcgacgatgcggatttgcggccacgaacgggcaacgacgagaaatcgccgctgttctggtgacccccgaccctcctggttgacaccaacgcgagcgcacccttgcggcgaagctccagtgcccaacaccagc

SEQ ID NO: 12849 - DNA, 474 bp, Zea Mays
cccagaaggatattgcgccccaaactgataagccggatactgctcatgatgaggagtgggaggtggattcataccattgttcgagagatggtttggggagaactgagctccaccaccatactcccgagggcgatgtgtagcgccgtgtccgatcggaccgttgggaaaattccatggcgcaggcggtcgctcctcctccgacctctggttgtgaggcgcgccgtggccgccatgttcgagagcatccgtcaatcgatggagatcggaacgaactgaatcgacggaagtttgaagcgattcaatatatccttcgatccgtggccgccaagactcgtagaccgaattgacattttccaacaccgccatacgcgtagtcgcatcagccgcgatggccccgatacgctcctgagccgccgcctccacagccgctacttgcgagacgacctggtcacccacctcgcggcggaaggcttc

SEQ ID NO: 12850 - DNA, 1080 bp, Zea Mays
cacacgcgggacaggcgtcgaggcagcagcggacgcctggccgttgcccaaggcgagagcacacccaggtaaaaaaatatcgttgcatggacataactactcctgacctttacgaatctcgacggagggggaggtacctgcacgattcggtggtggccaggcccaggctttcccgaaatgatggcgtcgatgttgctacccacagtacaagcagcgtttgcggagtagacgaactccggcgagatcctccatggcacaggttcgatctccagagccggcgcccgggaccctggtgacggtgtgtccgattcctttggtggctgcttttagttctctctcggcaagggtacgagcggtagatggtgatggctgtatgcctcaagtatttatgcaccagagggggagatcggctggtggtacctggctagcatcttgtgcggcatgcagcgatttggtcgcaaggttgttacgaggatagagatgctacagcagagccccacatgtccacgagccggtgcccgcgagcgtccttccgcccgacatgcatggccctgtacgtgccgatagcaaacggatgcatgcaagagaattcaacgaccaatttgctagcgaactagagatccaacgagatgacctcatacctgatgtcatgctaatacatactccggccaacatgaataaagaaacggactaaactgggaaacccatcacgcaagagaataaagaattagagagaagaataaataaaacatgcatgcatgtatatgggacttggaccgattttttttaggcagaatacgtgagttttctattctcctttctcttcttttttttcctatttatactttcattttcttttctttagagtttaattttaaatcaagttttgaatttcaaacttaattaaaatgcacaatcaaaaggataccagtgcgagaatcaaatcatatgtattttagatgttttatttattatttaccattgccttttaaatgtgtaattcccacatatttatttcaagaacaatatttttatattgtatgacctccataaagaaaatgctctaacatatatcttaaa

SEQ ID NO: 12851 - DNA, 308 bp, Zea Mays
gccagagccacgcgcgcgcgccggcctccctcctcgcgacctcctggcccgctgatctctggccggccgtcgtcggtgtaaccatggcggcggcggcggctttcgtcgtcgtcgttgtccaactccaagcatcatcaggaggtattactccccgttccttcctttgctgcctgttagttaactaattagtttagtttcttccttccattaactccatcgctgcttcgctcgtgcctcgtctcccctctttcctcccttacacactcacaccttcgatgatgctgtatatgcatttccatgttcctaga

SEQ ID NO: 12852 - DNA, 836 bp, Zea Mays
ggactttacacctccgtaagtggttactgcccacacaaatttacttagagccgccatagtgttcggagttagctggtgaatttgaactccatacctccccaacatttcgaccacgaaatcatggcacgacaagtgaaagccagcaacaaaaaagcataaaaaactatgacttcgtctcgcggtcatggtagagtctctgacctaagagtcctccccaaccccgcagtgaagtaaccaagtccccaccactagttgccccctgactttcactcacgtcatccactaacgactggatggcaacgctggaacccacagaaggcgaactgcccatcggggcaatttccacaaccggtgaaggtgtcaccgagttgctagagcctgctgagtagacatggtggcataccgaagttgatggcgtccgaaggtcttgagccacgccagctctccatggtggttcacgaggatcgttggcactttcggtagcgacggtggtgaacagcaagcacgaggaagcaagaagtgtctatgcagaaaaagtgaaaggtgaaaagagtaaacaccctagagacgatcgcctccttttatttcaaaacccggaaagtgcaaacaataacacccatcatttcacacgtctagtcaacttttatttcaaaacccggaaagtgcaaacaataacacccatcatttcacacgtccagtcaactttttgacgcccctgatgcaactcaaactgatgatcaagggcagtgtttgcatccttcctggcaggctttgggacaggctcattaggttaagtctacccctcgggggctattgttggtacaatggcataatca

SEQ ID NO: 12853 - DNA, 648 bp, Zea Mays
gttaattctagcaattctagtagatatgattttccgtatatatagaaaaggagagattgaatattgcggtaaggagccatgcgaatgcgtaaggttctcccctgtctctcaactcctaaaggcttcgtttgggaacaccaaaactagccggtttccgccggacaggcaccccacgggcacaaaatacacgggattttcgttcgagcgtttgggaggcttgtgtacgggtttgctagccccgtgtaacactgtttttgacgggtgtagagtttcactcattcgatggtcggttttgtgtgcctggtgattctctccctcgtcctcggctcggctcctcgcctctacgctgcacctgtcctgtcgctgccctcacccgacgctgccaggttgcatctctgtcgtcctcacctcttcgacgtcactcgccaccctcacccaccaccaccaccatcagatctggatcgacctactactccgacaccgcagtgagacgcacgcgcgcgccaagagcagctggacgcctccgaggtcctggtttcgacgcgagatcggtgcccgcctttcactgctccccggggtcgacgtgccggctccatctcggtgtgttcccctgatgcccatcgtttcttgcccatttcttccttcagg

SEQ ID NO: 12854 - DNA, 421 bp, Zea Mays
cgacgaagacaaatttgaggttgcccagagcggtgggaagcggccctagtatgtcgaggccccaacgctgtagaggctatgagtgggagatgagctttgtgagctgcgaaggcgtcttgtttcggggtgtagatttctggcaggcttcgtaggatcgcacaacacggttcaccgctcatacaatatatggccagtaaaatccttggcgcatgactttggcagcgagggctctagagcctgagtggaagccgcatgttcctttgtgtacttcatgaaggaggtctacgcctttgaccgtcgtgatgcatttgagcagaggttgatagattcctttcttgtacagttacccttctattatggtgaagccacgacttcggtacttgagcctcttggcctcggctaggtctatagggcgatagtg

SEQ ID NO: 12855 - DNA, 878 bp, Zea Mays
gccatggtacagtgctcgtgcagatcagaccgccagcgcagcaaaagaatcccaccgccggtgacccctccgccgtgattcgcgtcgccggccttaagattcgtgtgcggggtggattgataaggttgcggggtaagaatcctcgccgacggtgagctggaggtcactccggtgacatcaccgtggctttcttatccactttgcggctgggcagatcacctcgccggtgaccgccgcctcccggccaagcgccgcatggctctcgctttccaccgcaccgccgcgacttaccctcgctctccgtggctcgtcggagtaattgccacgactgtggacacgaatccaccgcgcccgtggtcttctccacctccggccgccgcgcgtcctccccgaattcactggccaccgcttcccctcgctataaattgagtgtctccgccactccgtaggatagttacgcatcagttgcaccaaaccttgcaccggattatccaccagtgactgagaatttctcatttcccccaatcacggtttccgccaccgtagaactcaaccccgccgcggtcagcccaactcaggtcagatcttcccctctgctcccttgtctaagcattctcatgcgcctgtgatgctcaccaacccacccgatagaattggaccgccaccaatcgtcgggaacgcgtcgatccagccgccatgatcacggccgccgtggccagagagttttagtgcgcgattggtgaaattaagttaggggaaacattgattaaggtatgaattaggtgttagttgacggagagcgccagtcatagccccaatcggccagcgtaagtgctcgccggagctcagccgtgcttgaacgccgtcggggatctccc

SEQ ID NO: 12856 - DNA, 378 bp, Zea Mays
ggcgagagacggaggatctcccaagtctcttatgcatggttagacctaagaactatgaatttggtgctctctactaagtctttctcgttgtggtggttcgctccttggcttcgaccttcgttatggtggttcgctcctgggtctcggcgtggccgtcatgttgcgggccctgtagacggcaagtgcacttaggcctagggttaataggtcatgagtgggccgcatgcctaaagcatgtaggtcatgagtagaaggagggctgactctctcactgcggctcggtgccaagcgtagttaatgcggtcagtcacttacggtgggtcagttctgggtcaggcgcagaactcactcgagtggcttgctctcgatccgtccgac

SEQ ID NO: 12857 - DNA, 818 bp, Zea Mays
taaaattggccttttttcgttgtctgacttgagatgcttgaaatggcaggagaaaaccacgagtcatagaggatatgatcacatagccagagcatctggaaaggcaaggaaacatggagaacaacagaaatcaattgatggacctgacctgcacaactgtcatgaaggggaaattactggattttcagcttccttcaaaaaacgatactatggcggtgagtaccataacaaaaatatgtcatcttctgtttcccttaacaacctttcagtctttctcataaggattgcaaacttaggaaactgttaacaaaaagtttgataagtattttttttggataatttgttgcctaagaagaaatttaagcagcctttttgtttcttcagaattggtcaggaacagccgaaatcatgctgttcagaggcgtactcctcttataccagttatagctcctgcagacaggagtaccattgatgagcccacaccaggaattgaaaacgtcatcaattttaattctaccaagagaaaatatgaagcggccaatcatggctgtgctgttgctccaacaaataagtactcttcggacagagtttctggattcgctgaaacatgcaaggctgatcaaggccatagttacttggataccatggaaattggggacatagcgatgtgtcaacaacattttaagaaaacacgaattcagcaaactgtggaggaaagtcagactggtatagttgagcatgagacaacgatggcatctaaagaagggaataagctagtctcttctgtaaacaacaatcagatacttatcgacagtatt

SEQ ID NO: 12858 - DNA, 418 bp, Zea Mays
ggcggctcggattggtgaaccggacaccgtttcggtcactggatcattgccgtcaatgtgaaatcgggcggtcggatggcgtttgggcgttcattgaatcgaaacctttagatcgtgatccgagggctctcgtcgatggccgtgtgattgatggatagatctaatcgtcaccctgcgattctaatccaacggcccagaactcactataccccttcggccgtgaattttgttaaagagtcctcggggattaagaaaatagaacccgccgtcctgggggcactattcactggctctgttgagtcttgcggcagagcccctgctgttttctgttattgaggcccaatccagtagtattgaaaatcaggaattaatatcagaaattagtttttaatgcataaataaatgttagaacttgttt

SEQ ID NO: 12859 - DNA, 354 bp, Zea Mays
gcgagcatctacgccggccgattagggcaacggcagggtcctccgagcagcgggcacgaaattaacactaccccgaccattctccccaacctaattgcacaaatcgtgagctatcaagctctgtccgcgtgaaccgaatgggtggcggacaattgatcgtgttcccggtgattggtgagctcgcagttcaaattggtggttcagtgagcatcgaaggcatgtgagaaagcttaaacgaggaagcaggggacgggagctgaccggagttgggctggtgacggtgagctcggtttcacggtggcggaagcttgaattgggggaaactccgaattcgagcagatgagtggatgattg

SEQ ID NO: 12860 - DNA, 634 bp, Zea Mays
tccaccctcccgatctaacctgcacccttgattgctcaatcgacggctaggctctcatccccaaccacacgccacggcagcgaggttgccgcacgcgctacggcggcgctccttgccggagtaactcgatacggcgatttcagggccctagagtccgattgtaggtaaactatacaaatgcagagctacggtgagtcataggggaagttgttaccggcaattggaaccgtgttgcggccagtcgacgatgcaaagcggatccgaggcggagctgggacaccggtgagcaatcgaggtggcccgagccagccacaagtccaaaatagtcggcgatgaggttgcgcacgaatccgcgaggtcctccgagcacaaaacaggggaagcggtgatgtggtgcgaggttttggcggcggactcacccgactcggcgagaatccctggagcggcgcaggcggtgcggtggggaaatcgcgagggcagaataaagaggggaaggaggcggaccggttccagatcctataagaacgtggccacggccggagcgcttcaacgatcatcccggaatccatgcgcccgccatgctcggaggagttgtgcatggatcgtttctttcttatttaacattttggaccac

SEQ ID NO: 12861 - DNA, 698 bp, Zea Mays
cattatttggctatgattactatagcaagattatagctggagtatcgggtaacaactttgttacaggtggattagtgggttgccacataaaaattggtgatctaggctctgcatatagctctgtcaggcacctgatcaaaaccccaatagtacagtggactgcacaagatcactgatgcagtgtatcttgccaccggcgaccccgcgcgtaggttcatgccggtgaggtgattcgtgctcaccggcgcttggataacgctccaaggtggaaagattttctccccccggatgagcttaaggcactgttgtccggccgccgtgtccgctcaatcccgatcaccttgaatcaaccctcgccggacttagacatctcatggtctgatgccacgtgcctcagcactttaaccacaccgcagtgactcgtgctgacctatccagcgatcgccggtgaggttgccacggtaacatccactaatcccctgcgccagtgacctcctctttctccgaccgccgcgcgtctcaatccaaattcaccggccaccgctcttgcctactataaattgagcccgccgtgagctccgtagggtaatcacccatccacagcacccacacttgcctccaatcattcactagagatcgtgaattgctcattgcccccaatctcggtttccgccaccgtaaaaacacctcgccatggc

SEQ ID NO: 12862 - DNA, 526 bp, Zea Mays
gaaagaaaccaatttcttggaagactggaagaaagaatcagctcaactgaataattgtctgggagacaatggcagcctagaagtcaagccaatgctagaagacctcatacgcaaagctcagcgcctggacactgagacgacaagcaactcccagacctcaagacagatgaagaaggaatccattggttcagaaaccgtctatgtgtaccgaaaggagaggcacaagaagtcctactcgacgaagctcacaactcagcctactctatccacccagggaccaccaagatgtacctagacctcaagaccagatactgatggagaggaatgaaaaaggagatagctcagtatgtagcccgatgtgacacttgccagcgaactaaagcagagcatcaagagcctgcaggtctactgcaacccctcccagtacccaaatggaagtgggaagaaataggcatggatttcgtaatcggactgcctcggacccaaaaagggaacgattctatctgggttataatcgaccgtctta

SEQ ID NO: 12863 - DNA, 418 bp, Zea Mays
ctaatctagggctagcgtggcgagagttcacacaaggcagctagcgagggcaaatcgagtggatgggatagcggcggaaacaaataacagcgatggagcggttgaactacgattacgacacgacctaaaccagcaacaagactcgaacacggacacaaaattcaacaaagcaatctgaaacgaaattgcaaggctaaacatggttataggacagcagaatttttttgtatggctattatctggagttataggatgaaaaacctaaactaaactagggtaagcctgacggtaatacctgagtcctttgataccacttgataggaatgggagtgcgcgatctttcgttaggtgaagataactatcgatttggtgaagatgtcacacagacgatccggcttccaatcaacacgactagaac

SEQ ID NO: 12864 - DNA, 429 bp, Zea Mays
agcttactggaacaatgagaagcaagaaacccaaatgtgtgattcaattgatatatttattgttgttgctacatagaaggtatgattctagagcccacactccacaaaagtaattattaatgtaccttcagtgcctgatggtggtcttctgttattctagggtttaatgacccctaaaataagaaatgttgatcaaaagactatatgtgcaataccctcataggtgcgataatgttgtcaaagttcagagcagatgcttgtgtgcttggatgctcaggcttttttattgtttttgagtgtgtaattcttgactcgttgccatcaacaaccatcgtgtttgctgctcgcataagaaaacactaaaatcacagttttgtggtctacaattctattagaaatcagcctttatgtgtgtagaacaaattatgt

SEQ ID NO: 12865 - DNA, 555 bp, Zea Mays
aaaatctgatggggaattcctcgttgccatccctactgacaattcaagcctgtacttccatcgatggtgtccttgagtacctttctagcgagagaattcgaaatagtagaagagatagcaaataggataggggagatagcgtaagacttttgggtgtgagagcgtaagactctgttctttagtgccaaaggaggagggagaacgtaagacttctgggtgtgatgaaagtatgagtaacaagggatcttggtcactcgttgcattatatttttcttgtgtacttaaacatcgtgttaattttgtatcagtgatatagactcaggtctcgacggttgcgaattcaagattatccgaagcctcaagccaaattgtggtagagtgatatcacattgttccttcgtagaggcgatgagttcacaactatcagcaaagaaatcacattcatgaagctacaatgagtctataagatggagaccaaggaaaaggtcaaggcctcagagaagttttttgcctcaacatgtaatgttcaagaggattagaaatacagatggcaac

SEQ ID NO: 12866 - DNA, 430 bp, Zea Mays
acaaagtcacaatagtcacagggtttccaataggggatattctccacaacaaagaagccattggaagaatagccaagtgggcctgcgaactgggagctcacgacatcgagtttcggcctcgtactgcaataaaaactcaagcactagttgacttcgtatctgaatggaccgagcaacaagtaccagacaacccggagactgcagaagtatggcggatgtatttcgatggctcgctaaagctgcagggggcaggtgcagggatcctcttcattgcacctggaggtgagcaactcaaatacgttcttcagttgttattctcagcatccaataatgcagcagaatatgaagctttggtccacggattgaacattgccatatcactgggcattaagaggttgatggtatacggagattcactggtggtcataag

SEQ ID NO: 12867 - DNA, 591 bp, Zea Mays
caaggtgcatcttcttcagaaatcgaatgtatcattgctccggatacagtgaggttttggtagtaggttcgattgttgatctttcagtttgagaaattgagaactgctgaaagcattacatggaaacaatgttggatcaattttgcacagttcagaactgttgaaagcattacatggaaacaatgctggatcaattttgcacagtgacattggttgtaattgctacctttctgtttggtgaatactgatacatactggtgttttatgaactgaaagtcgcagctctacgaccttttctcgatttaccgtcaggaaatgagaggaaaataatgctgaaaaaacacgattactagacagatagtgcacatttttagaacgtgtaatctgtgctgtcttttgagacaaacaagtacacagttgatgtcaggcgaccaaatgataacttgttgcttttacaagcacaactacaatttgctacccaaagatacaatttacaggaacaactaaacctgcacgtgcagctgatcagcaggaagaatcgcaataagtttgcagcaggaattgcaacaagtgagaacggagcaatgtgag

SEQ ID NO: 12868 - DNA, 271 bp, Zea Mays
agttatccgcgggatgaatctaatctgggccatcctttcttcatcggtcggctccgatgggccgataccctttcggctgttggttttgcgtatgagtccctgtaaatagttgaaaccaacccgcagtccatcgacaggtagttttgagtcttagatacttttgcgccgttgcccctgatttctctggaatttgtggcccagtccagagaattataaaatctagaaaaaggaattagaaaatgatttttatgcaaaaataaatgctagaatt

SEQ ID NO: 12869 - DNA, 637 bp, Zea Mays
tgcccccgcgcgtcccctttctctctgcgccgtgggcctggtttgtcagatccgccttccccgcgcccgccgtggaccagcgcgtgggcactcgcacacgtcgccggatttctcggccacgacgcccacccactcacccagctctctttttagagccccgcctgtgccccgcgcacacccctcgcctcatttcgcgcagcttcgccctctctcgcgctctgcccacgccgccagccgcctccggagacccgcgcccgcgttctcggccatccagctcgccggagaccgctccaagcctccccaagctccacccgaggtgagacacccgtccccgtgcccaatttcccttattgcgccctatgttcatccaatttctccttcaccggtgctcgaccacggcggtccgccgtgctcgcgcggtgtccggccgattcagcccggtctagttcaccggagtagttccctgtgtcacccatgtctatgctgaagttagctaaggccttagcgcaccttaagtcccctccccgtggccggaatcgctcaccggagtttctccgacccgcccgaggtcttctcaccgccgttctaccctctctgcccgtggattcatggcatcttccctgccattgagttcgcc

SEQ ID NO: 12870 - DNA, 646 bp, Zea Mays
gcgaagggtgtcgtgcgtgggcgaaggccgcgccaccctacgacggggcccaggccgtgtcccaactgtcatttgggcccatttgtaagacccaccttggggtaggatctatatcatatttaattagattgtacataacatcgctgtaatgaccccataagggggaatatttcggagctgtagcaggtaaccgggggtataacagtgcttaggtgggcacacccacctactcggttacctataaatacccccgcactgtacatggatgtgacacacttaacaagaagttacagttccctgcttactgttttgttgtgcacatgtgttcccccctctcaagtgtttgggcccgtctgaccacgtgccagtcagtcccaacatttggcgcccactgttcgtgctacgacaaaacaaacccatgatggccctcaagaaagcaacttccaaggccaccatccctctagacgcgatgcgaaggcggccctcactgagacaaaaaggcaagacaacccttgtcggcgatgcccctcaagatgcacccgaaaacgacagagcaatcaacagcaagcgtcctcgaactgagaacccacccaccctcgaaggcaccattcacacgtgtagttataagggcctccctcagaacccc

SEQ ID NO: 12871 - DNA, 641 bp, Zea Mays
gcgacatcattgggctcccctcttcggtgagtaagctctacaccgtgttcgcccattccgtgagattgtgtagcacccaacatcatagagttttgggcgctaaatcaccgtgcccgtgcgtccagccatggcgccaccgcttggctttgaggcaccgccgccctgtgtccggtgggggaaagagatgagagggggagatgaagaattacgcgtcgtccgttcgtttcgtgatggatggataggattaactcctcgttttattaaaccagtgccgtagatcgcgttatcaatggccaggatttgaagattggggtacctcgactaatgcctatctccaccgtgggatcctcggccaacgtttgggattagattcaccataccccttcactgcataaaatccaggccgtgcatctgtgatccaatggccacaattgataccgcttcattcaaaatagaaatctaatctggaccgcttagatcaaatctagcggccgagatctcaccgtaccccttcgcgggtacgttttataaatgagaccctgtcttttacatatatcaacccgccgtccacaccagtgattctctgagccttaggaatttttgcaccgtagctcctgcacttcttagaaatcgaggcccag

SEQ ID NO: 12872 - DNA, 627 bp, Zea Mays
ggccttggtatcttttcgataaacaaagttatagcagccaaagttcttatgaaggccatccgctctggccttcgtctggtagtgcaactcatgcacccgacataaagcttcagcgttagcactcatgccctgtcttcggagagcccatatgtaaacagtgagtctaacaatggcatttggtgttaactgatgaagatatatctcaaagttcttaaaaacctctcctatcatgtcatgtaaagggaaccgaagccctgccctgaagaagctcttgaaaacaacaacttcgtcctctcttggctccggaaccacctcttccccaccaaagcggacaagtttgctctcggcctccccaaaataacccaactttttcatcataaccatgtcttctgctgtcacatagattttccaaattcgatgtggcttggcttcgacgggctcaaaatattgtagtcttcctcagcatcatcatcactttcgtcctcaactgcaatctgctcagcttcggtagcttcacattcggaaatagctttttccgatgtcactagacctgatcacctcatcatttctgatattggcgttgtctctgtcgtctcagcatcatctccctcgcgtgatactctagcg

SEQ ID NO: 12873 - DNA, 514 bp, Zea Mays
cactcactcaccaccacataagttcaccgtcgatcagcctcacccatgcccgcgccaccgcctgccatcgtcgccatggctcgaccattgcggccagcctggtcatgtccacccccgcctaagccaaggccaccatcgtgctccctacacctcaccgcatcttgcccaccaactccctgcccttccactgtaccacagaggcacaccaccacgcaccagtgagctctcctccaccggtgatcgtgggtaggccatcctacgccttacccatccaattgaagctcgtagcaagctccaccaaggtcctattaatctcccctacccctcaatcgaagcgctatcgcccttagccggctgaattgctcgtcgttagcgatctagtccctccgcttgcgctcatggctagaacaactctggccacctccacgcacacctcgaccactgacatgatagctaggacctctcggacctcaccaacacctcgccacgaatgctaccaccaccggtaagccac

SEQ ID NO: 12874 - DNA, 504 bp, Zea Mays
gccatgtgtacagtatcgagtgggaccttagcattcgagtctccacagtaacgacccacataccacaaaggacaggacaacacgccataccttgtgtatgcccacgcatgctggaaggtgacgcaacaaccatgacgaaagatgaagccgtactgaacacgaccctcaacctcaccgtgagcgtgctctgcgggactcatcaggtaccgctacgttgacatcgaacaagctacaaggacttgtacgccggatggacgaaacatagcgccataccaagagtacggtggcgcacgacacgttagaagttgccatgccgcgtgtgagcacacctcgagactgacccagggaggccgccacgcactaccgcgcgagacgtcagctgcagatctctctccctctctctttctctcagatgtaaggcccatcccttgaggtatgaaagggggagtctttctccctcttttcagacacaagcacatttgctgtaacacgctcctgagcaat

SEQ ID NO: 12875 - DNA, 570 bp, Zea Mays
cccgaacctatataaaccatgtgttccgacgtgcatccgcacgtaccatcgagtagtgatcgacgtcgccgtcctcccaaaagcactacgtggactaccaagtagtgcgcatttgggactaaacatcgaaagctggcgcgctaggtagggggtgcgacatcgatacacgatagctccatggccatcaccttcagcgttgcgatcatcttcaacgccggggaggttttccactttcgaaccttctccttcatcgccgatcggaagggaatcctacatcgtgtcatggacacgggaagggaagccccaggaacccacacaacgccgatcggccctcacaccacctggggtcagaggcacgctcatacctacaccccgaccgactgatacaaccacccagatcactcagaagaagaggacagatgcccccgatgctcacatgatcatcaggggacattcgatgactgccccgactgctctgcccgcgagggaagcatgcgggccctaggggacaacgccatgaccctacttccccgatgtcctcttcatccacgagaggatagaagacgcccc

SEQ ID NO: 12876 - DNA, 351 bp, Zea Mays
ggacgggcgtcgtcaggtcgtcatatgcccctacttcccacgcgagattcggtcctaacgcaactgaatcacggcgaatacggagctcaggcgcggactgtgtgggttctgttgttgctcgcgtccgttacggtctcacagaggtgaacgatgagttctgcggcccgggcccgccagacagagggtgaaggcgttgttccgcatggagaagagaaagccgctccgtggcgcccacagctcggcgacagagggcggaagggagacggatggggagttgggctgtgcgctgtggaagcagaagtgggccgaaagtgaggcagtcggcccaagcgcaggaatactacttttttt

SEQ ID NO: 12877 - DNA, 642 bp, Zea Mays
agctctacccacgtctagaggcggatctgcggtagcagaccaagtccaatgagcaattccttgctcaaagcacaatcatgcaccctgtcatcgacctccacatgatacatgtctattgccgaacactgcaatcaaatctttggacgcagagcagcgacaaggatgagaattgatcgtggcgtccgtggttctcccctcccccatggatgcatttcatggcttggagcagggcgtacagatgaatagcatgaggcagggattcacggaggcttcgactttatacgcctagggaatggttcggatgagatcacatcctgggacacaagatggagttgttgtgcatggctcagactcgtaacaacctagggaaggagatgagcatcacactggggtccacatgtcggcgattggtgcacttgtgtgaggcagtggtgggagggtgacgccttggacccacccgacggtgacctagtgatggaagagcgggggagcgagtgcgtgacgaggatgaggcacggaggagtttggttctctggctagtagggaccacaggttagcgacccaatggcaacgagatacaggactggtgggccccacaggtcagtgtcacggtttagggagaattgggtcgatggatgattc

SEQ ID NO: 12878 - DNA, 809 bp, Zea Mays
gcgctcccatcgcgtggaggaccttcggaccgtgagcgtcagtcccgtcttcaccccctccgcgtcggtatgttccgtgccccttctctgtagcgtgataggaagcgcgagacgtcttagcctaggcactggtgtggatgcggtggggcaatgctccaggcgctgtcgaggggatggcttgccactggatggcacatagtctcaagcagtctgtagatgaaggcttggtgccgagctagacgggtagtgggaggcgaagaacgttccgcgccgtataacggggactcgaatggcggacttgggttgtcgctgccagatccttggcgctcggccgcggcgagtggactggagagagaaaagagagaagggagagaatcggtgatgaagaagacgcccgacatcacttgatcatgcgttggacggtaaggattaaaggatagggatgaagaaaccgggaccataggatggtgagtggagggggtagattaatctcgcgtacccgccgttcatcactaatcgcacggctttgattagaagcaggaaataccccttcatcccaaccgttatccaccgtagaccggcaatctgacgactaaagcgaaatagtggggatcgtgcgctgtgagtcgtcgatctcagatccgacgatgactcgagaatcaggatttatacccatcgccggtctaatctgggcgctcggggttggatcggacggtccaaacatcactgtaccccttcggcctggccattttgcataagaaaccctgtagttaaaagaaattaacccgccgtcctcattagcagtagac

SEQ ID NO: 12879 - DNA, 449 bp, Zea Mays
ggagaggtcaccgtggggaaagaagaggaagaggaggctcaccttggtgacgagaagacgatggcgcggacggtgagccgtccatggcgagcgcagcagagtgattcggttttgaagggtcgtgggaagatgggcgatggggaaccagagaaaatgggaggaagcagttaaggagaagatgaacaggacgacgtgggagaatttgcatgcgagcggacccacatactgcagttttccaattgaaaaacaaacgcacggcgtggagatcgtacggggcacatgcatgcgatttcttcattcttcacctccttcctgtaactgcacatgggtgcatgcaggcaacaggcagtcggacagagccagagcgagtgggcacggggcgcgcgcatctgtgcatgccgccatgcgcgacgaccatgtgggcttttccttttcctatctctttcttt

SEQ ID NO: 12880 - DNA, 276 bp, Zea Mays
gtaaatgtgtcgtcagtacgtacgtgtctgattggtcaccatgcattccatcatcagtacgtacgtgatgtgctagtgctagctatcctgccctaatcgtgtgcgctaagtgtagtaccaagcccgaccgatcgtcgtcgtcgtctctctcgttccatgaattacacacacactagcatctgcattaattaatctttttcctgccgtatgcctatcccctgaatggttggagcgccgctagcagctaggtggattattatcgtatgtgcatgcacc

SEQ ID NO: 12881 - DNA, 591 bp, Zea Mays
gggatggtgtgctgagcttcgtattacatgggtcccaagtgattcttgcaattgctcccaaaatcatgccacaaatggtgctcctctgtctgatactatagtccttggtattccatgcaaacgaactatctggtcaatgtagatttccgcatacttctccgtcctgtgggtggtgtgtactggcaagaaatgagctgacttggtcaatctttcgacaatgacccaaatggaatcatggtgcctggaggtgttgggcaatcccatgatgaagtccatgcaaatgtcctcccatttccaagatggtatgggaaggggttgcaaagggcctgctgccttcaaatgactggctttgatcttctggcaggtgtcatactcggatatgtacttggcaatttccctcttcattctggtccaccagtataaggatctgagatcatgatacatcttgttgctgccggggtgcatggagaattttgaaaggtgagcttcatccaatatcttctttctaagctcagggtccttgggaacaaccaatcgatctccaaaccatagaattcccttgctgtcctgacgaaagcacttgtatttttc

SEQ ID NO: 12882 - DNA, 554 bp, Zea Mays
actgcggtgagtagcaatcttccggttgactagctacttctggcaacgaaacagaacgatcgatcgaccatcatttgcattgaataatcttttggaacatggaatcccaaagctttgaatttctaacattccttttttatcactgacgagtgcgagtgtacattgtacaacatgtgtttttcttctgacaacgcgcggtactagtatagtgatagtggtagcaatacgtacatcaaacaaattaaaccaaacatgaaagttagggtagaccttgggaggcgttgagaacggctacttatctgcagatactggaacaacgctctagagtaagagtagagtccagatagtagtgttgcagactgatgaagcccaccaccaccttcgaattcgaagcaaacctccagaaccagaaaaatgccggcgagggcagtgacaatcccgacggcggtacctgggtggtgctccagccgtcccggatagtctacatcgtcatgatctccaccgccttctgggcctttgtcttatactactacatgcaaaatggcgacggcggc

SEQ ID NO: 12883 - DNA, 371 bp, Zea Mays
ggaaagtataaactcataatgagttgatttgtaagtaatgttacttccctttaatgaagaatgatgttgccttctctgtgccgattgttttgcttcgtagtcagttaacttctgctgtgatattcattgctcatgatgctctctggttgtggcataacttagagttcttgaatcattcctccgccctccttatttgtgaagttgatttccttggaatagtaagtaaataactcgagcatcatattgacgcttttagaggtagctgccgagtcacttgaagacaacgtcggatttttagagataactgccgagcgaccaaggatgacatcagcgtgtcagaggtaactgccgagcgactgaacacgacgtcg

SEQ ID NO: 12884 - DNA, 768 bp, Zea Mays
cgggcacctttgggtttctggatctccacatcttcaccaaactcttgtccagccgtgatggccatcggctcaatatgagtagagtcaaacgattccccggccagcaggctaagcacgacatccatctcagcatcatcgatgctagctgacatttcaaagtgagtttgcctctcagcctcgggaagactccgaagtggggcaatcaaggcctcaatatcctcaggggagggtcgcactctatggcccgggctaccatcacgagtaggagggttggagataaatttagagaatagcctatctagaggcaggttcctacccctcagaatctgagaccctacccctcagaatcatatccaatcggctcagcaaatccttactgggaatctgtctgtttgtgacccgggtagaatcattgatgtcggtatataaataagcgggataaactctatccttcaagggttgaatgttcttgaagacaaagtcagcaaccacgacctcagcagtcagacccctatccttcaacaagcatatttcagcaagtagcactttggcctcggttatctctgaaaaggtgggagattctacccagctgggtgtacgaacgtctggttgcctccttgaacgagggggagggatttgcagtgattttccatgatgaaccactcaagacgccatcccttaatgctgtccttgagggggatatcgagatactccactttcctcccccggcgaagctctaaacttgcgccgccgacaagatgatgtttc

SEQ ID NO: 12885 - DNA, 553 bp, Zea Mays
ggaagaaactagggcctcgatccaacaggagacaataaaggggaacaacaccaagagtgccaaaattacagcaagaagaaaaataaatcgtagcgatcctgcaaccgcatgggtcaaaatcttaaggttacatttactatgatgcttgaatcaacccaaagaggggccgcgaataatctcgtgcaacgaaaggagatcaaccatggccttagtggccatatcgaaatcgttgtccaagtcctcaagaacatgctaggtgtgtcccctaggagaccaacgatattgcatagctcatagctcgatctaaattgggcgatggccaaggcggtgttgatgctgcgctgagcgccgcgatgaacgacgtagtgaaccccattaggtacattgaagagacgctcctcccgattgacaccgcgggcttggacaagccccgagacttgacccgtgccctagtagaggccttgaacctctgactccagttccaacaaaatggagaggggttagtaaagtcgaaaattggtcgaacaaagagacatgactcaccacccatgcg

SEQ ID NO: 12886 - DNA, 789 bp, Zea Mays
gttcacgacaacccagggcggtctagttcaatcaaaggagtcgtgaagcttgaggaggacctaaggacactagaacaatcgaccagagcgcttgaacgaacctggggcaagctggccacgacgagggcaaaccgtgcggtgttcttgagtggattgggggaaatgcgaaattgaagctctctggtggaggatttgaggtgcggacgggtgcgctagctgcttgaatacataacgaagtcgatggtgcactcgatttatagactccgggggcggtggctctcaatttgatcacgacgtgctggcagccggagatagggaagaacacggtggttgtaaccgtggcgttcacaggtgcaatggcgcaaggataatactcctaagggtgccacgattactaccgcatggtaacaagatagggcgtggcgcaatcgaggtcaccggcgcttccacggctacaccggtagtccggccacgttgccatggctaaaagcacggtgataatctccaatccgtgatcttatccattcccctccgtgagatctttaccttctcgtagaaatcttctacgcgcaaagcacgaatcccggcgaccagcacaaatctggtcgcgcggatcgccggcggtgagctgaccgagctagcagtctgatccagtcactgtaccatggaattcatcttcagtgcgccagacctagcgagtttgagcgagatttactctcaaatttcgtatgacaatataatcacttacctgtatcaaagctttggagctataccccaactgcaattcga

SEQ ID NO: 12887 - DNA, 400 bp, Zea Mays
tgggtgtgcatttatacccgtgcacgggtacgggtattggactggggagtttttagtctgatgaggctaggtctggtgtagcaaaacccggtaggtcttcacccgttgccatctctagatcggacctttcaagaaagctcagggaggctatactcacgtgctggttgccattgacaaattcacaaaatggatagagtacaagcccattgcctctttgacctcagccaaggcagtggaattcatacaagacataatattcaagtttgggataccaaatagcatcattaccgacctgggatccaacttcaccagctctgaattctttgacttctgtgagcagcggagcatccagattaagtatgcatcagtagcgtatccaagagccaatggccaagtagaa

SEQ ID NO: 12888 - DNA, 734 bp, Zea Mays
caagagcgcaaaagtgtccgtgacacagccacctccgcgtaggacggcgggttaatttggaataaaccgaggggctcataagtaagaatgacatgcaaaggggtatgggatgattactgtcgtgtgattggtaatcggtggtccagattatattcttttatccgaaccggtatgcagcccaggccgttagatcttgattcaacgcttagaattttatacggttccagactatccttgcccacccactagcagatctgtggtcacgatctatcccagccgaaccggtatgaggcttctaatcgcagccatccatcatagatccgatggttgcaagcttatcccctaccccaggtggtttgaccacggtggcgcattggagctacggcggtgcgcccgccggagttggtcaaaactgtgacagatggccacaccaccccacctgactagtgcaaaacaacttggaggcgatcgcgagacagaaggtgggcttacctctaagtatcatggcattcggagtcctgcccacgctgtggcgcggaacaccggcccctccccaagtccgacgagaaattgggtcgagaacggtggtctttcccgcccaccaatgtcacgatgagcacgcacgcaccccagcggccatcctcgagcacaccgcggacttcaaacggcggtggaggccaaggacagctgcggcggaggtcgggttcacgctgctctctctctctctgcttggt

SEQ ID NO: 12889 - DNA, 557 bp, Zea Mays
gaagggctacaagtttactacagatgtattggcaagttcttgcacaaaaattcaagatctaggcattgcaattcggtctgtcagacactctgaatcagggtttcgatggtatagtgtaaagatcagatcgccagttcagataactcaccgccgacgaccgtgcgcctggattcgcgcctgccacggtgattcgtgcccagcgcagatggataacgataaagggtaagaaatatcacaccgtggatgaactccggtcactattctaccccggccgtcgtacccgcctaagccacagccgcttaagataggctcaccggagttagccacctcgtgaccttgcgccacgtgcctgggtgctttaaccacgccgccgtgagtcaccttagcccatccggtgatcgccggtgagcttgccacggtaaatgccaccaattgcttgcgccagtgcacccccttctccccgaccgccaccgcgcgatctcgaattcacgggccgccgctcaagggccctataaattgagcacaccctcggctccgttatgtaattgtgcactcag

SEQ ID NO: 12890 - DNA, 674 bp, Zea Mays
attgctccgttagtagggtatagtggtcaccccgagttaagcaagtgcgagcatgttgcaccgtcttaagtcatcgccgacttaagccgattgctccgttagtagggtatagtggtcaccctgagttaagtaagaatgcaggtcgacaatgaataatttgagcgctcttgaagcctttctattgatgatatatttcccagtttacagagtacattgtcgtcccaataacttttgaaatacagctaggggtaaaacttcctgaggtgttctatgttccatgagttcccaatttccgtgccgtccatctgagtgaggcaatttgatccctaccgagtgacttctgctactatgaatggtccttcccatagaggtgacaacttgtgccgtccctcccctgttagaattcggcggaggacgagatctcctactacgaaggatcgatgttgcatggtcttatcgtgatagtgcctcagagtttgttggtaccgtgctgattgaattaccgtgttcagccgttcttcttcgagtacatcaacatcctccagcctagtagcctcggcttctgctatgttttcaaagatcaaccttggcgccccaaacttgagatcagcaggtagtactgcctctgaaccgtagaccatgaagaaaggagtatttccatgcagagctcgact

SEQ ID NO: 12891 - DNA, 1196 bp, Zea Mays
tgctcaagacttattccatcagcatcttcctccagctcagtcttttgtcaccaagcccgcctcccccttgtggcaccgtcgtcttggtcatccaggtcatgaagctctgtcaaaggtcgcttctagtgtcactttcaatttagaggattgtttagctttaagtcattcttgtcaacttgggcgtcatgttcgactacctttccatgcttctcattctcgtgcgtctaataagtttgatcttatacactatgacttgtgacatctccagtggttagtgtgtctggctacaaatattatttggtcattcttgatgattgcactcattacctgtggatttttcctcttcgtgttaaatttaacacttttagcacgctcgcaaccttcattgcctacgcctctacccagttcggcgccactgtgaaggccgtctagtgtgacaacgggtgcaagtttgaaaactccagtgctcgtacctttcttctcagccagggcatccaccttcacatgtcctgcccctacacctcacctcagaacggtaaagttgaacgcaacattcggtccattaataatgttgtttgctcccttctgttccaaacatctatgccccctcatattgggttgaggcactctccacaacaacaagactacttaacatcctgccaaccaagacccttgccttctctaggccgcaccttgccttgcatggcactcctccgacgtatgatcatctacgggtgttcggctgcaaatgctacccgaacttgtctgccacagctccccacaaactcgcacccaggtctgccctatgtgtattccttggctattccgaccatcacaaaggatattgttgccttgacctctcttccaatggcatcatcatctcgaggcatgccaattgtcatctttgatggaactgcctttccctttgctgatcacgatggaccacgctctcctgtagcgtttgaatttcttgatgatcttcacactgtgcctgatcctattggaccacagcacatgtttttgcctacaacaactcccggtgacccaaaatcatcggcagcccccacagaccctatgttgtcgctgccttcacccgcgccatgtgcggcctcgtcgctccttcccgcgccaagcgcggccccaacaacgccttccaccgcgccaagcacgacctcgactacgtgcccggaccccga

SEQ ID NO: 12892 - DNA, 2437 bp, Zea Mays
cccgattataggaacgagttcccggccgcagcccagatctagtaggctggggcggcaccggaagggctcgccggcgacctatggtaatggttggcggaaccaccggccgtttatcgtcggcaacgcctgctgctgaattggtgggaacaataacgtcccttttctctctgccgcccctctctcctttattccaaatccttgttcctaaacatagaaactagggagcagtataatgctcaataaggtaactaatactaccattacaaaattgagggatacttgctgctaaataagccgcagctgattactttcctaatctactgtttcctaaaatataccctgttcggctgggccatatcaatactccccccccccctcgacaacaagcttgtcctcaagcttgaaatctgggtgtgcacgccgaaattccagggcatcttcccacgtagcctcttcaatatcctgtcctgtccattggatcaagaactggcgatgaccttgaatgaagcgctgagccaatatgctgtaaggaaccaactgtgcagattctgaagacggataagaaacattagccggtagatctggagccacgaccggaggagtgcctttaaagggtttcaacatggagacatgaaaaacatcatgaattttggccgtggttggaagagctaggcgatatgccacctcgcccaccttgctgaccaccaaataaggaccaaaaaacttgggcgccagcttgtgatagtgtccctgtctcactgaaagttggcgatggctctgaagcttcaaccaaacccaatcacccaccgcataagtaacctcacggtgatgaagatcataacgttgtttcatccggttctgggcggtcaacaaatgatgacgagctcgatccaataaggcatcccgatccactaacctgctatcaacgacactaccagagtggtgccctggctgtaaggaaccaacggagggggtttgcgaccatagaccaattcaaaaggagtcatccgaagtgccgaatgatacgaggaattgtaacaaaattccgcccaaggtaaccattgaacccaagtggatggccgctccgtggctaaacagcgaagatacatctcaatagtacgattcaccacctctgtctggccgtccgtctgagggtgatatgaggaagaggtgaggagttttgtgccgcaacgcttaaaaagattcttccagaaggtgctagtgaacaccggatcgtgatcggacacaatagactcaggcaccccatggagcctcaccacttggtcaaagaaaatatccgcaaccgcagatgttgtagcaggccgcttgatagcaataaaatgaccatatttggataaacgatccaccacgaccaacatagctgacttcccttgagactttggaagtcctactacgaaatccatggatatatctgcccaaatgtgttgcggtattggtaatggttgcagaagaccagcatgcgctaaggtactagctttatgctgctgggcagacaacacactggtgaatgtattgctccactgatccccgcaggttctcccagaaaaaactttgcttaatacgatgcagtgttttgtgcactccttcatgggtcacattgtggtaagcagccaccacctgagaacgaagggaagaggttgctggaatgaataaccggtgtttgcgaaagaccaggcccccatgtgtggaccaaatgtgtgcggcggttgtcactgagttgctggaatcagactcctcctgtgaaccctgactcgagcaagaagctgtgcacaacgttgttgaatggcaggatcctgtctcagctcggcttcccacctctcccgggatgatagtgttggagctgaaatagctgcacaagtactcactggattatggaggcgagatagtgcgtcgacgaccacatttgcccgtcctagtttgtattccacagagaagtcaaaccccatcagtttgctaagccagtgttgttgcggtggagttactagagcttgatccagcaggaatttcagactggcatgatctgtgcggaccacgaatgggcgcccccataaatacggtctccagtgtcgaatggccttggataacccaattaattccctttcataagctgcgagtttcacatgacgatctgccagtttctgactataataagccactggatgtccttcctgttggagcacgacaccaatccctgtgccagaagcatcacattccaccacaaaaggaacaacgaagtccggaaggcggaggactggagccgtctgaagagcttgtttcaaacgttgaaaggcagctatagcagcttcggaccagtggaactgttggcggcgaagaagagtagtgaggggttctgcaatcgaagcataatgatgaataaaacgtcggtagtaaccagccaaccccaaaaaactccgga

SEQ ID NO: 12893 - DNA, 910 bp, Zea Mays
ccttcataggtgccttggtaccggaggtcgaggggttcctccctccatcgtccgggcgagcagttttcgccgccagggtgtgcagcttctccacagccgcaagcgcaacagcgcggtcgccccgcacggtgaggaccccggctggagatgacatcttgaggaccaaatacccgtaatgggcaatggccatgaaccggtacagggtcggcctaccaatgatgtcattgaatgggaggttaacctccgcaacgtcgaactggacgttctccgtgcggaagttttcctttgtcccgaatgtaaccgggagcgtgatgctcccaaggggatacaccggttgcgcgcccacttcggagaatggacaagagggtcccagtcgggaccctaggatctgcagctgcctgaacgcagcgtggctgatgacgttgagcccagccccaccgtcgatcaggacgtgatgcagcttgatgttggcaatgataggggcggtgatgagcggcagtatgccggcccctgccatgttctcggggcagtcggatgccccaaaggagatagtggtgctccgccaccgctggtgtggggccgccttcggggcccttggggtcgccgataggacctcgcggcgcagggacttcacgttcctgcgggaggtgagctcccagcttccgccgtacatcacgtacagcttcttgcggcggtcggtatcatcaccggagtcagaatctccagtgaggatctccttgaggacctgctcgggggactgatacccgaggtcccgttctcccgcggccacatcatcgtcgtcgaccctctccttgccaggacggcgacgaggtggggagccatccttggaagtctgctcgccgcttgctgatgtgcttcacgagcttgataatctcgtggcactccgcga

SEQ ID NO: 12894 - DNA, 533 bp, Zea Mays
caccgacatatttaaacaagatttcaatgtgatatagatgatatagagggaaactgtaactcaccggcaccgaactagcgacgacgagttcaggtgagactttgcaccagccaccatcttaataatgtaaaaaaggcaagggaactggaaagaaaaatacatgtttccttcgctttgtcagggtaagtaccaaataaacaatgagggcctgagacacgccatgattctcaacccaaaaaaaagctcaccacgcgccttgcgataacatgattgcccgcccagctggagcttgactaataatatgacccaaagtcatgcccgcggccggaagtgctcacagagatccgtcggatgggacgcagttcgaaacctaagaatcttttagatcatcctggcattgtactggcgtgcaagaacacactattcggcaccttttcggtgacagggaggaaacatcttttgactcctccaaatgcaagcaagcatcttcagaagctactacaggaccgaagcatcatcgatctgacacgaac

SEQ ID NO: 12895 - DNA, 949 bp, Zea Mays
ggggacctggaattagctccgcttcaagctcggtcgtaaccgccgcgccattatcgcgtgcgtggatctcgccggggatctggcacgtagacttctttttcccctcgcgcatctaggtataagaacttccttgccatgcctctgccaccgcaagctcgtatcgttagccgcaccttgcatcgtgccgaaacgctagaaccagagagagagagagggccgaggaagtcgctccgcgccatcgtcaatcgtgggtcgccggtcgacttcgtggctcagctgggtggtttcagctgggtggggagaatctccatgggctaccattgtggaattgggggctcatgaacccggagaccatttgtcgctgaacgaacaccaccgtgctgcaccaccgtccgcctggtgtcgtggccgggaggaaccactccgagatatcctgtgagaaccttctacactgctaaaccatgtccccaatttcgtgttgcgccgtttaatttgagtttgggggtgtggagcgccgaattgtgattcctccggcgaggtcgcaatcatggccaacgcggtggccatggcggcgttggaggggaataggaaattagggccctggccataggatttgagttggacggcagagatgttgtcccgcatacccgttcacgtgaatggatcagtgcctttagatcttgatcgcgcagttcagagaaaatcaatcctcataaaatctaggccgtccatttataatccaagggatcccgagccataccggttcgattctaatcagagccgcacgtgtctgatccaacggctctggttgctccttaccccttcgctggttcctttttgcataagaaaccctaggaaacctagaaactcacctgcagtccacactgtgggaatactgagccttaggaatgtttctgttttagtcccgaacttctcggtaatattgcgc

SEQ ID NO: 12896 - DNA, 567 bp, Zea Mays
gtttaaacgaagcggtatgtaatcatgatccttggatcagggatcaacagccgttattttatggggcgaaggggtatcgctactggtaatccggaccgtccgctatcagatcaagggctggcacgcgattcctgccttccaaactaatctggttcgtccccctagatccgaccgcccagatatcgtcaacggccaacacccttcttccccaagccgctaccagacgcggcggtgctgctcgacatgcggtggcgcaccgccggaggacattcgatttctgctcctggtgcatgattccttgccgcgatggatattactcgatgagaagcaagtgtataactcagttgaggctacgtaccagtgtttggggtaacccggatgatagcttcctcggcccgagagcatgtatgcccccccagtggttctacgaacacccctggcccgctttcggatccctaggcggcggtacggcgcactgcgatgaaatgggacctcgggcgaagctgacaaactcccggtggagttatagggcgtgactgtgtggctaattgcggagcgcgagggcaa

SEQ ID NO: 12897 - DNA, 589 bp, Zea Mays
ctgtaaatttgcagtagtaaaacaatgcgcgatggttatgaaatttgtttgcgggatatagaagtcatccttatatgagtaattgtaatctcgtcagatcgccttaagtcgctgctgacttaagtcgcttgcttttgttagtagggcatagtggtcaccttgaattgcgtagtcgtgagcatgttgcattggcttaaatcgccactgactttagccgattgctccgttagtagggcatagtggtcaccccgagttaagtaagcgtgagcatgtcacaccgccttaagtcgttgctgacttaagccgattgctccgttagcagggcatagtggtcaccccgagttaagtaagcgtgagcatgtcgcaccaccttaagtcgttgccgacttaagccgattgctccgttagcagggcatagtggtcacccgagttaagtaagcgtgagcatgtcgcaccaccttaagttgttgccgacttaagctgattgctccgttagcagggcatagtggtcaccccgagttaagtaagcgtgagcatgtcgcaccgccttaagtcgttgccgacttaagccgattgctccgttagcagg

SEQ ID NO: 12898 - DNA, 781 bp, Zea Mays
cttaaagccgccgaagagtcgttgcacgagcacacgaaagtgaccgtccttgtgtttgtgactcgacttatggctattaagtttgagtttgcattctcaaacaactgctacaaggagcttttgaacttgatcagtgatgtacttctggagaatcacaagatgccaaaggacatgtatcagtacaagaagttgctctctagtctcggtatggactacgaaaaatcgatgtatgtgacaataactgtatgcttttctggaagaagaccacgagtgagaagaagtgtacagtatatggtgagcatagattcgtagaggttgaaaacgatgatggtttgaccgtggcgacggagattgcacgcaagcagcttcgttacatgcctcttatacctcggttggaacatttgttcttctccaagaatacaggcagacacatggggtggcacaaagaaggggtacgtgagaatccagatgtcatggcacacccagctaatacagatgcatggaaggcactagatgacttagattctagctttgctgttgaagtgcggaatgtccgcttcgttttggtaacagatggtttctctcctttcaatctaactgcaccgtcctactcatgctggcccatctttgctgttccatacaaccttccgctagctctttgcatgaaatatggatttattttcttgtgtcttgtaatacctggtccggatcatcctagaacaaagatagatgtgatgatgagacccttgattgaagaattggaaagtttgtgggaaggagt

SEQ ID NO: 12899 - DNA, 481 bp, Zea Mays
acaatctgtaaagagtcagatccactgttatgtcaatcagcaaagaaccgtcatgtgaacggatcctaagactggggcgacaattgcgcatcatcatcctctgaagaatggatacaggcatgcagcaaagatgagaaaaaaaaaagaacacaaatgtaacacactgcaacggatgggaggaagtggtgaaggcgaactcatgaacagtggagtcagaaacgataacatgtcaatcagcaaaggtccggaagtccggatcctaagactggggcgacaaaaaccatatcatcatcctccgacacgaccatcgacactgatgaattcaaaagaaatcaaaatcaaaagatgggaaaacaacactgtttcgaccaaaaaacgcaccgagcagcgagaaatcatgggagtcaagaatgctagacgaccgtagaagaattcggctacacgcgttgtgtatttatattcagctaccgccggtgaggtg

SEQ ID NO: 12900 - DNA, 817 bp, Zea Mays
gctctgttgaagaaaatccagtgagtgtttgagtctgaccactatagcaagattgaagctggattatagggctacaacttggttactgagagattagcaagttctcacgcagaaattggagttatgggtcctgcaagttgatcggacagaggctctgaattggagttctcatggtacagtgaactgaagaagatctttagatacatctcccctcgccgccggtcaccgtcgcgtcatgatccgcatcatcgctacgtttcgtgccctctagtatggagataatcacggccgcgtaaagatattggcgccagataaactcagacccgatcgacgaggagttcgccgcgcccacttggattgcggtcggccgaattggtcctcgccggtgttggacacttaccgaccatgcgccacgtgcccgagcgtcttaccacgttgcagtgggtcacgttaagcatatccggtgatcaccgatgagcttgccacggtgaaagccactaatcgtttgcgccagtacaccctattctctccgaccgccaccgtgccatccccgattcacaacccaccgcccccagagccaataaattgagcacaccctcggctccgttaggtattcaagcatccaatccacctgctcgtgccttcaattactcacaagagcccacgaatttcttagttcccccaaatccgttttccgccaccgtgaaagagtcctcgccgtggctagcttgttccaggtctgttcatgctctctgctctcccgtttcagcatccttaggttctcctaatgctcctcgacccattcgattgagctaga

SEQ ID NO: 12901 - DNA, 565 bp, Zea Mays
ggccttcgcagccagactccggtcgggacggccgcaatcagcaacaggtgcacaacatcgccaaccagcacctcgctggcgaggcccctcgccgccaagagtatccccccagggccgcgggaacggaactcgtggtcgaggccggggacgtgcgcagcagcagcgcagattttactgcctgttccacggtgaagactgcgtccaccctaccagagactgcccagagacgaaggccaccagaaacaggatggcacgggcccaaccagccgacaaccctagggttgtcgcgcacacatatcagcaaccccctccgccatacatccacggccctgctccgcatccaccgcaccacgcataccaacatcaccaggaggtacaaatcgtacctcccccacccccacctctacaccagcaacaacaaaacatccaccacccccacgtcccaaagcaagaggacttcgccgatcagccgtatcgcggagtcattcatatgatcactagggggtccagcgctgacttcgacacaaagcggcagaagagggaccattaccgcagcatcaaccac

SEQ ID NO: 12902 - DNA, 514 bp, Zea Mays
acgtgcatgggaggaggacggagcatgcaggcagggcgaagctcgctagcagaaaggagcagggtctgcaatggcggctaatctttcggtattggcaaaacacgccttggcttgataggtatgggtgctcacgactaggatatataggcacgatcgagccggcagcagcaaagtttgttaggatatgctgaagtctgttatgatttatttagagggtgggaaagacgcctcgcatccaggttcatgcatgcagcaatacgtgaaatacttagatgatgtcatgcctgaggtcatgctgatgcagagtccggccattaaaataaagaattaaaaaaaatgtgacgtgggctacctctctttaagtggctgaatacgtatgtcttctattcccatttttttctatttttcatttctaaatttccaaattcatttctgagttcaattttcgaaatgcacttgcaacaaagaaaacctccagcacgaatgcaccaatttacttttatctctttatttt

SEQ ID NO: 12903 - DNA, 448 bp, Zea Mays
gtgatgatgagtccaagaatgatgaagagacaccttcgggcctagaaaagaagagatctaagacttctatgaagaagacttttgctacgcaagagcaagggaaagggagtgctacaaccacttcatcttttggttgtacgcggattcttgaggttacgacccaaccattaccattctccactctaaatcccttgggaccgatactgactcgatttatgccaaccacgaagggtactgatgatagtcgacaatatttgaaaggaaaagatgttttgtctaaagaggaagtagagagcccgcatattcagggtcttggaggtgatgccttcggagattcatcatccttcgaagaggaagatgaaaagaagaccgctgaaggcggcagatctttagggcatgagaaggtagaagaagtgccaaaagagccaagccttacacttaaaataga

SEQ ID NO: 12904 - DNA, 464 bp, Zea Mays
ctacagaggctctagcagactcaagctccctaagcgtagtctcataattgtacttgtattctttcctctctcaagcagcaagcctaagtaacttgtccaaactagccaaagcagtcgtcagctcatctaccttggcggtgagatcatcggtggaaagggatacctcaaaggtggagtcattgtccttgtcatcgccgctcattgcgtcctcaccaagtgctatggtgtagaggcctctagcagtctcatcaaaagtcatctcacacggtctccacaatatgattaatttcaaggttaagggcatgtttagttgcatgcctaaggtgccaaaatttgccacacattttctaccacacttgcctaaggttttagcgctcaaattttgcgccacgctatgatatgcctaatggaatcttgccacacttttacaagtcattgtcgagtgggtcctatgcagcaggaga

SEQ ID NO: 12905 - DNA, 586 bp, Zea Mays
gttgcgctccctatgcgccgtttgccgactatataaaagtgaaccgggcgcgaatgtcaattccctttttgactcctgccttttctgccaccaatgttatatttctctctgctttgtagccccgatgaaagggacgacatcgcatgtcgtctatcccggtggccacatcatggctcaagggacgcaaacaatgtgtcatcattgtcaatacgtgatttcaccctcttcgtcgttgtcttttagtgctactgcacgggggaaagtgcatcatcgaagcagaccgagagagcatcatcgctggcgatggaggtgggagcacaccaccgatttggaggagacaaatgtcccacggtctcgccgctggctaggggtctagtgcccaacaactagcaggacatgagtcaccggactttggccaatctcgcgcctcctccagctagattaaagatttcaagccattgggatttttcggctcgagaaccaggcatgtgctcaggtcggagatgatgtcgaatccctaggaagaggtgtggtgttcgaagcatttttcaaggtgggccttcgattcccctaccacagttttgtt

SEQ ID NO: 12906 - DNA, 719 bp, Zea Mays
gcttcccattgtacagtacgcaaaaagatcttcagattcatccccctcgcgctggtggccatgcgcccgaattcgtgctggtcatcgtgattcgtgctaggcgcgcagtggatatcaacggggaagtaaaaagatctcgcgggggagtggatttggtcgcggggtgaagcttatcaactgcgcctatagccgtgcgacgtggccggaccaccggtgacgccgtggtactccggtgacctcaattatgccacgttgtagctctttaccgcgtagtagtaactgtggcacgcctaggcttgccattttagaaccgttgcaccggcgggcgccacgactgagccgccagtgactcatctctctctccggccgccagccttctccttcaaaattcggagccaccgtcctcgggcactataaattgatggtgccgctagctccgcatgatcgtcacgaagccaaagcacccgcccttgcctccgattagccaccatagcctcccaatttctctcttcccccaaatcgggttttcacgctactatgaacgccgcaccgtggccagctgtctgctggtccgttcatgccctcctcgttcttgttttagcatccttatctgcaatggatgcttatcgacccagccaattggactagatcatgttagatcatcgggaacaccttggattgttctcagtttgcgccatcaccgtggagagagatgtaac

SEQ ID NO: 12907 - DNA, 628 bp, Zea Mays
gccggggagggtcgtctgcacttggtattgctgtccgtggccgcaatcgaaaaggagtggccgtgggactgcggcaatttctcgtcgtcgactggtttgccgtcgcgggctacttcacaccgcgactgggtacttctacggcgtcgagtccggtatgtcacccatccatgagttcaccgtagcctccgcattgtgtcgatgccgttaaatttgggactaggttccttggtcacgggcgggcagctcaccggcgtaatcgccgctgcggtggagttctcagcggctgtgtacccagcgttgggggaagaagagggatcgtggaccgttcgatccacatcaacggccgcgattagaagttgatgaccggatcggttcaacgtcacggaaccgtccgatccaaatcgtgtgcacaggattagatcttaggtttttaaatcgggagcgttgcattgggatctgacggctgggatcgcataccgcttcgcgggagatcagatctaattgcagtcgtccctggttgatctcacggctaggattagttgataccctttcgccctgccgttttcgcataagaacccctctagaattacagattataacccgccgtccctcacctctgtgcgctgtg

SEQ ID NO: 12908 - DNA, 471 bp, Zea Mays
gtaccgggtgatcggcaattgctcgccgtcgtagggcactaccgcgaaaaccgcctatcgccgtggatcagcttcaactctcggccagtgacggtaaacaccctcccctgttgttcataatagcatgcgcttcgtgtagcacactttagattgggtcaggggcgctggaatgcctattgggcactgctccggcaatgtcgcgccgcgattcgatgggcggcgccgccggtggtggtcgggggagaccagctcgtcctaagccgttgatggcgcgatctacagtgtagattagagggtgtgtactaggttaggtcagagtattgtggagcattcgattccaatcgaacggatcggtgcacggacgagatcgacaccgtcggattcggatcggatggtgcttagcgcgtaccgattcaatgtatagtagatctaatcgaggacgtagaattccaatcggacggccagtgtctg

SEQ ID NO: 12909 - DNA, 539 bp, Zea Mays
ttagtgtcggtgtttaggcccgacgacacactacaaggtgtactgcatagtgcttttgggagggtggcgaggtcaatggcaactcgatggtttgtgtagggcatgacgaaacacgaaaggttatataggtttgggccgcttgagcgcttaatacccgatgtcatgtgagtttgtggagttgtattgcctagtgtctttggttatagagggttctggcggtggaagatgactatgcctactgagatctatatctccttttcgtaggggctcccccactgccttattcctgaccgaggagaagttgcacgtatgactcagtgaacgtccttagtatacccaccttgacaagagtcgtgtcgacttgcccaaaggtcaatgagtctttagggaatttgcacatcccctgcatgtgcggaatgcgacctagaagccttcatgcccacacaactgccttcctcgtaaccgcattcctcataacctccttcctcgttatgcttctggttacgcccgactgatgtcctctaaaggctatgcccctg

SEQ ID NO: 12910 - DNA, 578 bp, Zea Mays
gtgttctgatcatgtgttctgagctccttgttcttggcatgtttcaacattgttgaccattcaaacaattcaatctggatttcctaggccatagctttgtcatttgtgcttcgattcctccttacaggatgtactccatcgctaatgaggaggaagaccatttcgttcttcctcacgaagtcctccatggcttccaacaaatgcttgtaatattgcaagtcacttttctcacacggcatctgtcgcatcagcttagtagagacattcgataagaattgcactgaatttgaccccgaaccatggatatgcatttgggttgaagccactcccccaatccaatctcttcttgaaaccatggaacccgagagagcaccagaaacccccaaaacgccgagagagcactagaaacccccaaacccaacaccctcacagatatacaagagtgagattgcaacaagaccttagtattgtcaccccatcgtcaaattctgcacaaaaacatctcaacaatgcaggtactcacctgctatgtaagctggtgtgtgctcgtcgtagacaaaggaccaacgaggacctag

SEQ ID NO: 12911 - DNA, 524 bp, Zea Mays
gggcagccatgcattcacggaggtgcggcgaactgtgcgagcacgcgccacccgtcagataggctgtgtgtgcatgcttgctattcttggcgatgagctgaggcaggctgcttcgacgtgggtagagccaagagggagggaatcacgatgctacgtcgtgtctgacagtagatacgcacatggtgtggcagcggagacgtcggcgttgaacgtggcgaggtgcacgagacacagataagggggacaacttgtgctgtagcaacgacgacagtatacgcggccatacggtacgctgcgcacacgtgctgctgatgacgagacgtgagctgctcagactttgtcgtggcgttgatggctatggcggaattcacggtggagtgctgagacggggaggacaacgaggagaggagagaatcccgctgctgcagtttggtttgtagctcactaaattgggtgttgctgagtgctactatttcaccaagtgaaaagagggattatgagcagtacgagggagtagcaagaag

SEQ ID NO: 12912 - DNA, 637 bp, Zea Mays
ggtaagagtgatggagcagaagttcgggttgattcgctgcacagagacgcagaagccattatttaatgcacaacaactaaaagggtctgccagtacttggtgggcaaattttaagcagttcaaccggctgggcatcagatcacttgggaggaattcaagctagcattccgggagcattatgttccagagggagtgctccatatgaaacaagaagaatttatccggttaaagcaagggggagatactgtaatgcagtatctcaacaaattcaatcatctatcttagtatgtcatcgactaagtaaatgcagatctgaagaaaaaaatttgttttatgaggggacttaatgacaggcttcaacggaaaatggcaacatgtttggatcttacctatagcagggctgtcagtacagcattggcagtggaagccaaaaatgtcgggcatggaaaatcaaaggggtttggaggtgaaaggtcaaatcaagggcctgagaagagaaccaggttggtgatccgaccttttaatcagaatcgttcttcgcctcgtccacctccctatccctttaagcagcttgtttttattcgtcccactactgcccccgctcctaccaatcagtcgagtgcccctggtactcgtt

SEQ ID NO: 12913 - DNA, 331 bp, Zea Mays
ttctctgccagttggaccacgatgttagcccgtccttcgctcaccgtggggatcggaacaggacctcaagcgctcgggtccgtggggctcggattgagctgttgcaactaaatcgaccgagatctctggcgatggggggaggataaaacctggggcctcaccctcctccatccagccgagcttggcggcagacctgaaagcccgccgctcacccacaattcccagctgcatccggcgctggcgataccaatccaagaatccgggcaccatggtggagagagatgaagagcacccctgtgcggaccttcaacgagcgcgtgatggttggcct

SEQ ID NO: 12914 - DNA, 654 bp, Zea Mays
tatagacaaccccagccacaacctgcagagatgaatcctcctaatcctccaccaggcggagttgacccactggttgctgctcagatggcagtgatgcagcaaatggcgggacactatggctgatatgcgtgcccagatgcagcaagaacgccaggagatgcgtcaggaaagagaagatatacgccaggagttgcgccaggagcgagatgagatacgccaggaaaggagggcacaacaacagcaacaacagcagcaacagcagcaacaagtgccactgcctccaccaccaccaccaccagtcccaccccgtgataagcatagagagttcatgagtcataagccacctacatttgcaagctcacctgatccactggacgcggatgattggctgaagtccgttgaaaagatgctgaatattgcacagtgcacggaccgggagaaggttttatatgcttctggacgtctgacaggtcctgctgctgactggtgggattcttatactgctgcccatgatgctgcagatactattacttgggcggagtttagtacacagttcaggaactaccatattccagctggtatgataaagatcaagaagaaggagtttctgtcgctgaagcaaggaagtatgtcagtcagcgagtaccgcgacaa

SEQ ID NO: 12915 - DNA, 371 bp, Zea Mays
ttcttgatctagatcgtgcaatggtgcgcttaaaggaggcaagggctaaggagtgctttttcagtccacatctcagccaatcctccaaaggggacaaaagtcttaaatcttgggctatttcaagcctgtgaagaatctctcttgctaaagctaactgtgaggccacatgcccaatcttttttccactccatttctgcaaagatctagcagtgacttttaatctcctgtcaaagtttagaactaggcagactccatcatcgatagacaaccatgcttcactgacagcttcctggaatccatccaactttggccaaaagggttcaaaatggaaccacctcttgccaaagcagttgctctgcagaccaagcaca

SEQ ID NO: 12916 - DNA, 675 bp, Zea Mays
ctagcattggcttgacttctaggctgccattgtctcccagacatgtattcagttgagctgattctttcttccagtcttccaagaagttggtttctttcttcccgaaaggttttcggctgagggcgtctgttaccacgttggctttcccagggtggtagtggatctcaaggtcataatctttgatcaattctatccatcttcgttgacggaggttgaggtctgactgagtgaaaatgtactcaggctcttgtgatcggtgaacatgtgacatttgttcccaatcaggtagtgcctccatatttttagggcatgcactatggctgccaattctgctcatgcggcttgagtaggcgcgatgcataggcaatgactttctcattttgcataagtacacaccctaaaccttgccttgaagcatcacagaagacgatgaaatcctgatggatgtctggcagtgtcaaaacgggtgcggttgtgagcttcttctttatgatttggaggctttcctcacacttcggggtccacataaacttattgtctttcttgaggagctcggtcataggtcttgctatgctggagaaccctttgataaaacggtggtaatatcctgccattcccagaaagcttcgaacttcactaacgttggatggttgcttccatttggatactgcttct

SEQ ID NO: 12917 - DNA, 561 bp, Zea Mays
atttccttgtgtcactgacaatcgcagatagaccctcccctttctattccttcgcaaggtgaggtccccgaccgtggacggtggagcagtggctcaggcgagcctgtactagccgaataacgcaatgaccggtgctccgatgtggctgacacctaattctacccctaacgaccataacccctcactcaattacaaagttctagctcacaatcactatgtccacggtggcaatggaaaccagagataactcaacatgttctgggtgattcaagattgtctagttcaattgaatggttctgtgagcaaaaggggacatgagggaggctagaacatcccacaaaagagcatgagctaacctgtagacgtctggccacggcgagctcactcacgatggagttttgactgatttgggggaacttcaaaattggagcgctctggtggacaatctgaggcacgggctggtgcgttgggtgtgtgattacttagcggagctcactggggcggcaatttataggttccataggtggtggcggctaattttgagaagacacgcggctaccg

SEQ ID NO: 12918 - DNA, 493 bp, Zea Mays
cgaacaacgagggcgaggacggacctgaaatcagctagccgcgagcgggcgattcacgacggcgcagtccaccgaattgggggaagaggggaattctccggctacggtggttaattgagggtgagaacgagtacttcggctttgcgatgacatagtgcagctgacccggccttcaatttatagagggcttaggcggtggcgctcaatttggccgagcagtgctggcggccggagatagagaagaattccggcgcagtggattcgtgtctaccgtcgtggcgacttcaccagcgacgattagacggctatagagagtcacggggacgcgacagaggtgttcaggtacgtggcacaagaccagaagacggctgtcgccggcgagcttatctgcccaagccgcaaagcacggggggtacggcggtgagtcaccggagtcatctccaggcgcatagcttttacctggcagccttatcgggtcatcggcggcgtgaat

SEQ ID NO: 12919 - DNA, 818 bp, Zea Mays
ccttcatgtataaatagggcagtggtccctccagggacaaggacgcgcaaacaaacgctcactactccactttgtcttagatattggcacttgcctcaatcatctctagggacttggggacttcccctctcccgccgtgcttgtaaacccctactacatgcaccacggtgcgagtaatataagcatcatccccctcggctggaagtagggccttgtgttgcccgaaccaggataactgcttgtgtcttctcgcacaccatctagagtttggccacaccgcacatttactagttggttaaggacccatggtccaaacaccgacaaaatgtattgaatgatgggttgttccacacatcttgtcagagatcaaaatatttaccaacacgtgccattggggatacaattcccaatggtcatccattcttaagatgtccttccaccaaaaggatcccctttctgaagcgaaatgatgaatttttccgagcaatagtgtgtgttccaaattagttagacataagtaatatccatcctagcatagaacttatgaagatatttcaagaggagggcctgattctaaattctgatattagtgatcccagaccacctttgttcttaggggcgacaaccttatcccaggacatcatcgatctgcgattagagataacatcatttcctctccacacacaatctcttatagcacgatcaatggaatgaatgactgaagctagcagttttaccattcacatggtgtatgttgcagagcggatagagtggaattgaccagagtgagtctactagccatcgagagctagatacta

SEQ ID NO: 12920 - DNA, 815 bp, Zea Mays
ggatgcttcgcctgaccacccaggcaggagattctcgagtttgtatgattgtatcacttcaaccactacggacgtgggaacctgcgagttagactctgacacggcgtggggcctgaatgacgatacgagagcaggtatgtcggcacatggacgtcatccatcacgacatggagattgacaccggttcaaccattccctcaccgggaagtcaacagaggacaccgagtaacccgctgcaggacgtgatggagtgtaacgacaggcgaggatggctcgcacatggctacagtttcctgacggaagggggagacatcatccacggtgtcgttcgactggcagggatcttggaggacaacgaactacatgacaacgcccgaccttagactcttgtaatagggctccgctctcaccttggcctataaaaggatgggataagcccacgctcaggatatggtcaatcgaacagtcgaacgccacaacacttgtaagcactagaacactaacacatttgcacacgagtagcaataaatggatgtagggacatttagaccaaactagtataaacccttgtgtcctcgttgcacaccatccgttttgagatgcacaaagcatgattagtactgaccggtgatccgaaacaccgaaacgtttttattgctaattcaccattttgatgcaaaggtgtgagcatgtttagatggactcattgaattttttgcacagaaaattatgctatagttgtcaaatgactcatttctactctttagtgtagtcctatcatgaacagtcctgatacctatatgtcaattgttcag

SEQ ID NO: 12921 - DNA, 611 bp, Zea Mays
aaaaaggtgtcaatagaacatttgctttctgttaaatttgtctggacaccaatattttggtttacctgtctatatatctaccttcagatttaggtattaattggttctgctgttacttcttgaattttttacttagatgttagtccctcctgctatgttgtttttgttgttcagaatcccttcatttttgtagttgcctgctgcattttgtgctactgatctgtgtcatccttcgctgccctcttttctctttgggtttgtgttttgcttggtgttgctatcctgtgcggtgaaggctgtgtgctcaagactgttttccttgggtactgttgctatcttgtgtggtggaggctgtgcgccagggaatcttttgcttttgttctccgatcctacgaactttgcaaatgctgcttgtggattagcttttgccttccgtcctggttgatggaactatttactactacgttcggcacaacggcgtaaaggacatgatgtcctgctttggggccagctttagtggtgctgtcgaatgtaaatatgcccatcgtggacgttatccaatgtaaatatgcccatcgtgtatagctagaacatcttgttgaccctcatcg

SEQ ID NO: 12922 - DNA, 393 bp, Zea Mays
ccggtctgcaacatttcagccacttgagattcaatttcatccttcattgctagagagaaccgatagggtcggatgcttactggtctggcaccttcaataagggggatagaatggtcacaaaaccgactgggcggcaacgtcgcgggtggctagaacaggctctcgtaattgcggagcagctgcacaactggagcaggcaaggacaactcaatagaacgcagctgggctaatgcaggttccgttaccgtaaccggccagatctccagtatagtgcatgcaggaaccaatggctggcaaccttgtaacaccactgtggaacctgaatgtggtaatgatagccatttatgtttccagtcaactgtcattgggctaaacatctccagccaatccatg

SEQ ID NO: 12923 - DNA, 331 bp, Zea Mays
gccactctggtggtcgggatgggggagaagtgtagtgaagcgctttggaccatcggtccgggcatcaacggtcgggatcaccccagcgcataccccttcacgcgtcctaatctgaccattggatctagatcgggcgtgcacggtttgatcaagacattttaaatccagaaccttcatccgcgatccgacgtcccctgttgcacaccggttcgcaagaaccacgatctaatctcggacgtgcatgctagatcggacggttaggattgaaccataccccttcggccctagccgtcttttaaaagagaacctggattctttattattaaacccg

SEQ ID NO: 12924 - DNA, 351 bp, Zea Mays
gtgaccataggtgagctggcggtaactgcatcaaccggtgcgcaggagcagcgagccgatcgccagtcaaactctggccccacctgcaggctcgcatcctcccctgaggcgggcccgggggcactatcggtaccctggattaggggtactccttgctacggtatgaaggcacgatacctgtccgactacccttagccgcgtggagaacagccccaggagtatctcgtgagcagttaacgtggcgctctcggagacaacgccgtcggacccagaaggcacaggacccctgtacgcacaactcggacccccgaagtaaagcagcccggagccattggatagggttcggacccc

SEQ ID NO: 12925 - DNA, 599 bp, Zea Mays
tcaggggcacctcaaaatggacctgccgttcatcatcaggaatctccccgagcgaggcaaccaaggcactaacttcttcagcagagggccgcactctaaggcccaaactgccatcagtgactagaggattcgacacaaaaagagtgaaggctttaggaggaggcaaattccaggctgagaatgccactggggcaccaacatttgacactttgcctctaaggatcatctcaattcggttcaccaagtccatagagggaattcttctgttagtaacccgagttgagtcggctaggcctcgatacagataagccgggtatgccctgtctttcaacggctgaatattcttgaagacaaaatcagcaaccacagcttcagcagtcagacccctctccttcagcaatccaacttcagccagcaaagcacctgcctcagctacctcctgatctatgggggactcggtccagcttggggtgcgaacatccggctgtcttcccgaccgaggggggagagagtttccataattctcaactatgaaccactccaagcgccatcccttgatactgtctttgagggggatttcgagatactcagtcttcctc

SEQ ID NO: 12926 - DNA, 1094 bp, Zea Mays
tttgtggggtccacttcctttgccccttatgagcgcatttggaaatcttgggcaccagctaagtgcaagttctttctttggctagtgatgcacaacagatgttggtctgctgatcgattggctagaaggggttttcctcacccagcctcttgcccctttgtgaccaagaggaggaaaccatccatcacttgctggtgtcgtgtgtcttcgcaaggcaattctggttttattttctgcaaagggtgggcctggcagtcttgtcaccgggttttgatgaggttaattttgacagttggtggagcagatcagctgaacgtatccatgaagatgcccggaaggggtttaactctttggtgattttaggagcttggagtgtttggcgccaccggaatgagtgtgtgtttaatgggtcgcaacctagtatcgctaagagcttgaccttagccggggctgagtatagtctgttgtgtattgctggggctaaagggccttctatgatgtcaggttttgttcatgacccaggttgaggtactgtggtgcttcctttggtgcctagtgtgggtggtggggttggttctggcagtgagtgtgttgtgggcgtgtgttgtttcttgtatctttgtttttcctttctctttaatggaatgatgcacagttctcttgcgtgtttgagaaaaaaccttatatattagagagaaagaaaagccttacaaaagagctgagcaagttccccaagggcccaacacaaacacgaaggaattacatactggtaccgtaacttgatccgacctcgccaagagctgcaactatgcctaggttctccagctctttagctcctaccattgcccagataacacactcatctaggaaacatctaaaaattctagttaaggagggggactagaggaggttcttttaattgggattgccaatctgctgtcaaatctgttgaatctctgtagaccctcaatccattgttacactgctggttgcgatggcaactctgaagttattcattgcccactttgctttattttttccatttactgtctttcctgttgactaatatttgaacatgtataacaacttaaact

SEQ ID NO: 12927 - DNA, 520 bp, Zea Mays
tgcttttttgctcgcagaaatcgaagaattctgaacttgtgaagttggatcctaggtcagttatgatgctgtttggtatcccgaatctgaatattatgtcttgtatgaattccacggccttagctgaggttaaagaagcaatgggtttgaactctatccatttagtgaatttgtcgattgctaccagtacgtgagtgtatcctccttgagctttcttgaaaggtccaatcatatccagtccccagcatgcgaagggccaagtcactagtatggtctgcagttgctgtgctggtagatgttgttgctttgacaagtactggcaagcttcgcacctctgaactaactcggctgcgtcactcttcgctgttggccaatagaatcctgacctgaagaccttcccaactagtgtcttgtacgctgtgtgtattccacattgcccaacatggacctcgtccagaagtcgcttcccagtagatgagagaatgcacttcatgaggacgcctgatgcaccccgtctgta

SEQ ID NO: 12928 - DNA, 973 bp, Zea Mays
gcgattcctcaacttgatcgccggtactgatcgtcggtactaacccttgtgcgacggaagaaatggtaacgttggcagcctcctcgacgatcatctccgcattgacgatgacatccccgatggagactccatccacggtaacatcagcctccattatgctcattctatcttcttctaccatgtgtgtcctgtccttctcaacctccattgacagcaccagcgccttgtggcctccggcggcggctcgtgcaatcgatcgcgtgggcgtgggatagctgggctctcacgattagtttggagattaggtccaacgaggaagatataagttccagacgtgcgcaaaatacggcggcaggcagtttggcggcagagaaaagcgggaacagaagataaggccaagccgctgaggtgagtgaagccgtaaaggagcagcgcaactacgtacggagccgaagctgagtgagtcggagccaagcaatatggtgagcgatgtacgccggccatacgataaaaaaatgaccacgtgtatgcatctcaagcaaggtccgttcgtacgagacattggggacgtaccgtccataatttttttccggttgcggatcttattcgtgatgtcttctaggttctatcacgctcattagcaatcttcctctgcatattagatgggagagagaaatactgctcaacaatcaacatcaatctaattaatgttggtatacaaataatataattagaactcttaagggaaacaaatttatgtacctgaagatgcaagttaagagctaaagaacccgatctgggagttcatatattttccaagaagcttcagatttgcattagtgagggtggcagaggagggagtctgtgggcagtccaatggtgatggaaacagagaggatcagcagaggaccagtttaggagggagctcgacggcacgtcgtcattggatgaggaggcgaggtgggacggcggc

SEQ ID NO: 12929 - DNA, 475 bp, Zea Mays
caactgaataggttgcgccatggtacagtgaatgggatggatcaggttcagagaacctcgccaccggcgacctgtgcgcccggattcgcgccctgtaacgtgcagataataattcccagagcaaagatctcgccgtggatatggtcggggtactgtggccggcctgtcactgtacccacttgcgccgcgacgtggccacatgaccgtcgccacgatgatcgccgttcatcggttttcgccacactactagccatgctaccaccccgctatagatcactaaagccagtctcgttgtcactggagacttaacccagtaaatgccacgttgagcggcctccggtgactcctctcgtttcttaccgatagccatccgccgctcaaattcgtcgtactcatggtcggtctctataaattgatgcctcagtgagctccgttagattatccccaagccagagcacccaccctcatctccaat

SEQ ID NO: 12930 - DNA, 616 bp, Zea Mays
tgctttgttatattctgttccagatgatgcaagccctataatgtgttgagaatacctaaatttctcagttcatttttttctcgaacgcgcaagagaaatgtgcatcattatattaagaaaaagaaaaatacaaggtccggaaagagaccaaaaaaacagaaggcaccttacagtggccaaaaacaaaggaaccagaaaggatccatgaaaggaaacaaaaaataaactgcccactaaatccccagaattggggctattagaagagccaatcttttgactccagctagcttccagaagtccatctcttcttcagctctagtaatagcttcttccaagtcagggttacgatcaaacacacaaccgtttctatggttccaaagaatccagagaccaagggtgactaaagagttcaacccctttttggtgactccttgcagctggtcactgattcttttccaccacagcatggtattcccttctacttgaggagcaaaaccctgaaggttgacctaaccaagcaaccaaaaccagaaattcctcgcgaagacacagccaactagtaaatgatctatggtttcagattcctgatcacaaagagggcatttatcaggatgat

SEQ ID NO: 12931 - DNA, 360 bp, Zea Mays
cgtgggagaagatctggacgaaatgttctagctctttgcttgaaaggtctgaaaccagacttgataggcagccgatgctctacgatctctcggcttaatccaggcatctcagtgtaattccaagcaaagcaatctgaatattccttcaatagaccgatcatctcatctctaggatcggtcttcagggtcttgtttacaaaagtcggccttggagttttaccatctcctatgtcaatctcctccaaaggatcgaccgatgtaaacccctgtcctagtttatcaagatctcggaattcctctatcatgttcctcgcagaggaattagatgatctttgtatgatggcagactttctggtctcg

SEQ ID NO: 12932 - DNA, 278 bp, Zea Mays
ccaggatcgcctcgccatctcatcgagtacgctgtgcgccgtaaccaaacacaagcacccttagccacgaacgaaaccgagcagggtgaggagggattcgagccgccgccgtcgacccacgtctatgccgacgttctcctcccatgaagtagccgagtgggttcacggatgcacgcttgacgaagccacggcataattgggcggggagaagccttagaccgaagggaatttgtcgccgacgatctaacgccgccgcggaaccgtccgcgccatggtcg

SEQ ID NO: 12933 - DNA, 1007 bp, Zea Mays
aaccactagaaaagtcaacacatgcatgaaacaccttgaaatatggaagtggtaatgtcgtggtttcgaaaaccagaggcagtaagatttatgttcggtgggggtgctagtgcagactcactccgaatggtgaagacatggggtttatactggttcgggttcgcaccaaactccagtgtagtgctgatcgtagtgttgcaatgagtgtgttacaacaaatgtgctcgtgtgggaagaaggagggggctctactcttttatatctcaagggtaggaccttacagaggagatctgttttctgctagggagagagagattggctcccctgagttgtcgtggtgggtcctccgtagggttgtatgtagccatactcccggtatggcgccgtctgttactccggctcctgtagcgagtccatcactgacatttttgtagtggtgcgcggcgggtcccacggatcagtctcatggtgtgggcgtacgtggcgtggcttctcctgtcgtcatgagcccttcgtcacatgtcagcgtgcataggcatacactcagtatggtgcgctgtttcgtccttccaatgtatgtgccactgtagagaccccggtgcccattcgacgtgttgtgtgtatgttcgaacgtggcttggtggtgacgcatcctgtcgtaactgatatggtggatcagttgtgttggactcagatctttggctcgccgggttgctcgacggtgggttggtcagccggagctgattggtggagagttggtcattggagttggtcatcgaggagttggtcagccggtccgcctcacggagttggtcaacggagttggtcattggagttggttattgaagagttggtcaaccggtccacctcgtagagttggtcggtggagttggttatcagagagttggtgagctggtccgcctcgtagacttggtcgacagagttggttatcggagagttggtcagccggcccgcctcgcagagttggtcgacagagttggttatcg

SEQ ID NO: 12934 - DNA, 442 bp, Zea Mays
gttcaaactggcatttagggaacattatgttctggaaggagtgctacaaatgaagctggaagagttcatacttctaaggcaagggggagattctgtgatgcagtatctcaacaaatttaatcacctctcccaatactccatcgatcaagtggatacagacttgaaaaagaagaattgcttcatgagggattaaatgacagactccagcacaaaatgactacgtgtctggaccttacatatggcagggctgtcagcacaacactgtcagttgaagccaaaaatgcgggacaaggaaagtcaaaaggatatgcgggtgaaagatcaactcagggacctaaaaagaggacaaggttggtaatccaacctttcaattcaaattgttcttctcctcgtccgcccacatatcccttcagacaacccgtgttcattcgtcccactcctg

SEQ ID NO: 12935 - DNA, 786 bp, Zea Mays
gccctcgccgcactccggcgagcacctggaccggccgaagggagccaagactggcggcctcgagtggcgaacaccgaattggatctcccccgaacaattcccctcaaacaatttcaccaatggcgcactaaaacgccttggccacggtgaccgtgcgggtgatccaaagaacactgcgttcccggcgattggcggcgatctaattgaattgggtgggtcggtgagcatcacaaacgaatgagactgcttaaacgagggagcagaaggtttgcactgacctgaatcgagctagccacgatgagatgttcttcgcagtgtattcgaaccggtttggggaaaatgcaaaattcgagctcgctggtgatcggctgggggcaatactgggtgtcggggtacttgagtaccttacggagcttgcggtggcttcaatttatagagctagtgggcggtggccgcaaatttgaagaaggacgcgcgacggtcggaggaagggaagagcactggcgcagtagcttggtgtcctacgccgtggcgattactccagtgatcaacggagagtgagagtaggctacggtgatgcggtggaaaggtagagacacgtggcggacgccggtgatggcttaacggcggtgagaaccttatccacgggttcggtgagcaaggggggaggcacggcggtgagttaccggagttatccttaggcgaagagctgctatctggcaggcttatctggtcaccggtggcgtaaatcacaacggcggtggcgcggatcgcagcggagatcgg

SEQ ID NO: 12936 - DNA, 385 bp, Zea Mays
cggtaattggctatcgcaccaagtggccgaccggttggacaagcgaatggttttacataaaggcggacgagaagaaaagagagaagttaatgactatggtcatgagtccaatgaaattaagcttcgtgatgacaaggcccttgtgccacatgcaacttggctccccatgccatctagctgaagtggaattcagagtggtagctgccgaaatcagcactagagatctagtacaagagtacttggcaaataggacatttccgacctctagtggctggggaatgcctaagaaaaaggaggggggaaggtacgaacttgttcggctcccttatcgattcaaatttgagaaacagttcaagaagccatgcaaagagtggctagaaatgat

SEQ ID NO: 12937 - DNA, 830 bp, Zea Mays
ccgttggatcagagatccacggtttacattttaaatacacacggtcgccctggatccgtccgagttgagatcgacggcccgaacgaagggggtatccccgatctaatcagaaccgttcgtcaatagatcaatggcccaggcgctaacccagctgcacatgcccaacaccggccgccggggtagctctacgcggcggcaccattgccggtgttcaggcgatctggggagccgggctcgatactagttatttcttcgcaaaaggtggagaggaggtccaggcgaaccttacgggagggttccacattggtgacgaatgcggtgacagtccgtccacagcgcctcgcggcaccgcgacggtgagcaggagagctggacgaacgagggggcagaatcgagcatggatgggttctacacgtggagcgggttgaggcgaactcggaggtggtttgcttaccggtgaaaaatggctggcgcctgttgactatggtgtgggtacacccggcgacggacgaagcggacctcggtgagcaatccgccatggacccaagcatccatgcccccaaaatccaccagtaagcacgaaccgtgacttcacaagcttgcaacctgacggtggccgacactctctctacgacggagctctcctgggcggcgtgaaaacctcagatcctggtggctgggttgaggagcggatgaggcggtcaagtacccacgatttatacacccagatgcgctacgatcggggaaattgggtaaaacgacagcgcgatatcagagccaaggcggaatcggaaatccccaaccaaatcgcacgcgcacgcggcttccgc

SEQ ID NO: 12938 - DNA, 790 bp, Zea Mays
ggaacacacgcccgcggaaatcgcgcacaggttggtgcgctccactcggcgagttcggcggcaggcgcgacgagttcgactcgaggagggagaagacggtcctggcattctagccctagccgtattctgttggcgagtgggcaggcgagttcgtcgcggcgggattcgtggatccggacgtaactaacatggggaagaagactggcctgacttgcgggctcacaaagcagagagcagatcgggagcgtgggtgcggcatcgctttgatgacgagtgggccaaccgagtcagtggtcatggtggggcatgtgtgtcgttcaggctgtagctggtagagccaacgtgccagcgcaagctactaggcgaagtcagcggcgagcggcttgggatgtagccatccggcttgctccacgctgcagcttcatggccgaaatacggatgccagcaagacatcagcttcacagtacagtggccagcgagtaggccgcgtagtggcccttcggccaatgttctgggccaaaggtgacatccccgtaggcttcattttctttttttttcttttctatctctttctcctattttctttatacaaatttaattcaaatccatatttggttttaagtattgaactaaaatttagatgcacaatcaaaatctcagcatggatgcaaccccctttttttaatatatttatttagcatttattaaatgtaacatgtctcaataatagaacacaacttaaaataaatcatgatattattcctcagataatagaagaactaactaactt

SEQ ID NO: 12939 - DNA, 636 bp, Zea Mays
aacgtggtagcagacgccctcagcagaaaacccttcggggttaagggagcaaactttctggaagattggaagaaagaatcagctctgctaaatgcatgtctgggagacaacggtggcctggaagtcaagccaaatctagaagatctcatacgcaaggcccaacgcctggacgcagaaacaaccaagcttatggaaagagcacgaaaggagcaacttccagacctcaggacagatgagcaaggaaccctctggttcaaggaccgcctgtgcgtgccagtgggagaagcacgagaaaccctgctcgatgaagcccacaactcagcttactctatccacccaggaaccaccaagatgtacctagacctcaaggccagatattggtggaaaggaatgaagagggaaataacacagtatgtggcccgatgtgacacctgccagcgaacaaaggccgaacatcagaagcctgcaggcctgcttcaacccctcccaatacccgaatggaagtgggaagaaataggcatggatttcgtcaccggactgcccagatcacaaagaggaaatgactccatatgggtaatcatcgatcgtctcaccaaggtggcccatttcattccagtaaagaccacttttggagga

SEQ ID NO: 12940 - DNA, 577 bp, Zea Mays
aaaggttccttgtgggttttggtgttttggatgacaacacaatttaaggtctaacttaggtgttaagtgttgaataggtttccatgaagaacatacaaagttcagctcaaggtgatcaagtatgatggtccacataggctgagctgactatggattatggacatcataaatcaagttgaaggatggatattgactaagtgggactcaatgtgcatggcttggagatagttgattgaaccgaggatgaaggcaaggacttcgaggtaccaagagtaagggacaaggtcaagaggactgaggtacctaaaaccacagtgaagaagaggttcttgcaagaggtcaagcttggtcaagctgagaagagatatggtgaattgaacttcatgacatatggacgtgacttacaataatcaaggtaatgcacatggtttatggtttaggtcataaggctcaggatcctagctcgagtggagtcatggtcactagaaggtggagaagtatcaaagtcagaacttagaagggtccaaagagctaagtgcactttgatatgaagtttagggtcactcctgagttcaga

SEQ ID NO: 12941 - DNA, 681 bp, Zea Mays
cctaagtcaagtaagcatgcagatcgaaaacagttcgagtgcctttgagaatgaagtctttttattgatgatgtattttccgattacagaatacaatgctgccccgatagcttttgaaatctagctaggggtaaaacttcctgagatgctctatattccatgaattccctatttcggtgccatccatttgagtcagtcgatatgatcctagccgagtgacttctgctaccatgaatgacccttcccatagtggcgacaatttgtgccatccttcccccgttagaattcggcgaaggaccagatctcccactgcgaaggatcgatgttgtatgaccttatcatgatagcgcctcagagtttgctggtacctagctgactgaattactgtattcaatcgttcttcttccaatatatcaatatcctccagtctagtagcttctgcttcagctatgttttcgaagatcagcattggtgccccaaacctgagatcggcacgtagcactgcctccgaaccatagaccatgaagaagggagtgtttccatgcaaagctcggctaggttgagttcttaggctccaaaccacatacagcaactctccgatccactttcctgcgaacttttcattcttgtcgaagactttcttcctgagtgcttccaatatcattccattggccctttcca

SEQ ID NO: 12942 - DNA, 550 bp, Zea Mays
ctcaccgcgatccccgagtgagtaggcgggtcgggctcagacggacgggaacggattcgctgccattgaattggctctggaactggaagcagaggacgaggacgcctggagtcgggacggacagaggaaattccaggcaggcaccgtcagattctcatcgaggggaggccctgatcactgcacgtgcaagtcatggacgaaacgtgaatacaaatgtaaaaaatgaatagcgatgattcatggtcttaccaagatcgctccacaactcacttgcgtagttgcatgtcgtatcgtccctcccctcccgtgtcgcagtcgcagctcgcaccccagccagaagctctgtgccgtttcgtggagcaacaaacagcaagtggcttccgttactggacggccaaacacggacggacgaaccctcttggcgatggcgaaaccggacaccctaggttttaggaggtcaaatgtcttgtctctctcggaccagcacacgatgctggtcacaacaacgtaaccatagttcatgtaatcccgtaagaagactgcaaactcc

SEQ ID NO: 12943 - DNA, 303 bp, Zea Mays
ctagctcagctcaacagtacacttaacaaaaggcggctagggctctccttattcaccagctcagacatctttaaagcatgtaatccttgcaaacacttttgcatctaatcaccaaccatacaaaagatgtagggtatcacactcatgcagctcaaaccaatctacattgtgcttgtgtttacaaccatatcgatgtcctaatacaatggtcccagtcctacattcctctctctccctctcattttctcttgtacctttttgtactatggtgtcgcataaccgtgacatttgacacaccacgtt

SEQ ID NO: 12944 - DNA, 640 bp, Zea Mays
ggttatgagacatgggttataatggttcagtgtagtgctaatcgtagtattgttctgaagcgtgttacactaagagtgtttgtgtgttcaataaagagagagagttcccttttatagtttcagggttggactttaaaatggggacttgttctctagggacttgtattctgcggggaggagatcgaccgatgggctttgggtagcgtggttcctctagtgttgtccgtagggttgttcgtggtcgtactccatcatggcgtactgtcttgtccactcgtcgtatgtgtcctttttgcttgtcttccgctgatattctcgtggtactacacgggggtcttgcaaatcagtcatatgagttggtgggtgtcgtgcgatattgcctatcgtcacgagcctacgtcacttattggcgtgcgtaagcatacatttggtatggtgtatctattgcacactacccgatattctggtcactgtagaagctctgatgctgagatacttcatgaatagggttggtcggcccctcgaggatgtgggagttcgtctggagccgtacttagagtggtgttgtcatgtcaatagtggccactcggtgtgccctcatcttgccattcgagtgactggccatagcctagggtgtcat

SEQ ID NO: 12945 - DNA, 458 bp, Zea Mays
tgattactaggctaaaggtatccgagtggggaaggactcacctgagattcggcaacgggaaatagttgtccacacaccatgcaaatccgcggccaagtccgggcaatggcgaggaattacgggcaccccgatggctcccggtctccctagttgtcaccactatgagcgcgatatcgtgatgaagatcccgactccaatctaggcgccaaactaccgcacaatccaagtatggcgtggtgtccctcaactccggcgagaagtaccccttccccccgctccgagcacgctaacgtagaatctttgggattagcgtgagatggatgaggagcacctggcgaccgcatgtatactcatgtccaagatctgaaccctaggacccaggacggattccacaaccaaatcccaagatccgcgcgtgcacgagttcgtccagttctgttgtgaggttgatgagctga

SEQ ID NO: 12946 - DNA, 881 bp, Zea Mays
cagtttcctattccagagtccgagaaaaataatatcgtaacctaacagcattttgatccaatctgcttgtatcttgcccagcattttgatccaatctgcttgtatcttgcccagatccgaatccctaaacacgaattgtttaaaattctgcagtataaattccaatcaagataaatcatagccagagattcaaacagggaataattattgcgctaaaaatacatcggaaagaagattatataataattaaggaaagaaagaaagttccaatcttctatctctgccgttatttttcctaagtacgtatgctgtcccaattctggtattttacatcgttcttatctcagccacgtatccttctccctgatccaaatcaagccaacgaaggaagcttatctctttcctatgcacgtcatcttcatctattccacgtacgtttcctctggtccatccacgttgctgctcctttctttattctgagatgagcgatccctggaagcatcttccgggtgtggcatttatctcccctcacacacgttctttgcttcgcttcggcaccgcacaggccctgctccatcgtcacttgtccctgcgctgacgctcgcatgctgctacgctcgctgtggctaccggtggtcgagctcctccctttggccgcgctctccttcgcttgtgccttacccatcgagctccagcgtttgccagcgtagagctcgccccttgcgtgtccctcgtctccacgcatgcatcagctccctgcgccctcgcctgctgctctggcttgccactatttcggtcctaccccacctttccggttaccagccgtcgtcgtggacacgccccgacagtaccaccaattgatcgtcgactcctaaaacctc

SEQ ID NO: 12947 - DNA, 494 bp, Zea Mays
cttaaatccaaggtacagggacctatttatgaaatctgaggacttaactgtgatttccaatgaactgggcggtcggcgggttaattctaagagaccagggggtctcttgtgcgaaaggggcggccgaaggggtatcgtatcgtgtgaaccatctaaactaccacaacggctaggattagatccgaagtggcatgatccatagacggttagatcttgatcctatgcttaggattaaaagaagaagggatccattcctggtcaagggatctaagatccatgacgttggtttaatgtggcgaggggggtaagctacattctgatcatcaccgcccttctacaatctaacggttcccaacaatctcacacctctctctcaccgtccgtcaacaaacgaaggcgcgtgcgccatggcgacgccatcgtcagcgtgatgcgaccccatgcctcgggtaatcgatccctaaattcattcggtgatacacattgcagccccc

SEQ ID NO: 12948 - DNA, 320 bp, Zea Mays
tgggcagcatcgctgaccgaggcagcgtaggtggacagtggtgtcagggactcgtgagcagacagagtcttgaatcccctgtcccttgcatccatcaccctgacgtggatgcgagtgatgtaatagcaagcccgggaggctcgctcactcgccttgtttcgtacagggggtggacgtaggtgcctagcgcgtgcagcacttcttgcagcaggttggggaagtgccccgtctcgaacattgatgtataatgttcgacaacaggaccaaaccccatgaagtagtcatgctgggcgtagtcagcttcctcgtggacgtgttcg

SEQ ID NO: 12949 - DNA, 332 bp, Zea Mays
gatgtgttccccgacggccaccgtcctcccctgctccaccatcacatctgcgccagtggagttaggcactgctccgtcctcacccaatatgctcacacctccgcacgacaaccagccctgagccgtcttgtcctcggcgccgtgtgccataatcaccatcgcggcacacctcgccggtgtccgccatccccgctccccctcttccccggacgcttataaatgggtcgtcccgagcccctcacctcctcgccccggccttagccactctcctctccccccgagctcaatcaagtcggcgccgccgcccatccccccgctctggtgagttctcc

SEQ ID NO: 12950 - DNA, 1204 bp, Zea Mays
gagggacagaccgtgtacatatataggagaggaggaagagaggtaaaaggaaacccatatgtctatggaagccaataatacacaggatcaataggatccggcctcctctccctaattccctctatccatgtatactatagccggccaggcacaagattacctaagacaaatggctgaattcatgtgtataggagtacatacataggggagggagaagcccgaccggcaataggagctagcggttggccctaaccctagggcataggcccctatacatgggttgggccccatccttcacgcaggaggttggcctagtcagttaagccttttttcctcgaatacgtaggagagttgtgtatgattatattaaaaggagaggaaaagggcctagggtccaaaacgtacaagaaaaaacacaaacaacactctcagaacactcaaccgccacaacacgctaataaactaaacccctcccatttaggcgccaggtggggcgagacagccatcagggcatgttgatgagggtgcacatgttgttgtagagggggacgtggtctgtgccacatggtgatcatgcccgtgcacggcttgtcgaacgatagccatggggtgttgatgctctcggtgccaaggtcatggttgtcgctggaggagtggtcgttggcgcatcttcctttgcccttccctttgttgttgccgccagtagggggcatatgcctaagagggaggcgcagcttgcgtagcaggctgctgttacgcgagttgttgtgggcaacctatggtggagtagaaggttgttgctgagtccagatcgatcgtagtctcctagtcaagttcctcaagctcgaggtcgttgcagacgacatggaacagaggggcggtgattgacgcttgatcggcgccttcatggaacaatactcgtcgatgccttcatgtgagcaaagattggtcttcatgtgaggacgagataattgtctaccaattcctcgcccaaagaacgaatttcgtccaccataaccttcatcttgcgacaatactcgctgatgctgaggtcaccgtgtttgaaagcacaaaagtgttcaagtttggggactcgagaccattgattgccaaggaacttagactcgatcgcctgccatgcctagtaagttgtcttagagggcttgcaaactcgctccaggagttcaatggagagggtgtcaag

SEQ ID NO: 12951 - DNA, 328 bp, Zea Mays
acacgaaggaggtagcccagatggtggatcaaacactgaactgaattccgagaggaacaaggccatctgttctggtaaccccatatcaacccatgatatagccaaagattcaaaagtagtagacaacatagctgcagtggcctgaacatccttaataccaccgtgtaataagactgacgatgtaccataaggaatcaacaaccagccatgtccccagtgtaccttcatttggctatacacaactaatcaatccattccaacaataatgtcaaaagctacgatatccaagactcgaaaatctgtgtagaattcacaagtttggatcgac

SEQ ID NO: 12952 - DNA, 961 bp, Zea Mays
cccttttgctccttcacgcgccagcccagtctaatttcgccaccggtcgcttacacgtgggcccgggacctgacgatcttctccatctcgcaactgcgcagcgtggtccgagctcctcgccgtggaaatcggaccttcctccctacaagttcggcctcaccattgcatccttgaccggttcggggtacatatggttcacgccctccgtgctcgttgagatccctggatcgtgaaccagtgccgtgcaagcttactaaccgcgagagagaagagaggagcggccgccgcgagtaatccctgcaaggtcgtcgatccggtcctcggtggggtgtccgcgggcttcatctggccggtagggaggcatccgtggcaaaagcactcggaatccgtcgcgggcctcgccggaattcctcaccgtgcctcgtcctccactgcgcgccgcgagcaggagtctaccgccattcaatcgaggtactaacgccatccacgtgttcgcattgttgttcagtaggtttagcgttagctaatcgcattttggacgaccctagcgcgtggaattgctcgccggcgttcatcgccgcggcgggtgagcggcgccgccgtgtccagggttgggttggggaagaattccccagcaccgttagatctggctggtgcggctctgattagatagaagatgccctttcgcgttgtgtcgatctggtccgttcagttggatcggacgggtggaaaccaatctagtgtaataaaatcctccccgtcacttttgaatccaacggttctcattgcgtaccgcttcgagatcacgccgatctaatccagaccctagacctgtgatcggacggccagaaaacatccgtaccccttcgcgggtacgttttataaaagagcccccgcagaatcataaaaccaacccgccgtcctcactcactatttattgagtctagggaatcttctgcac

SEQ ID NO: 12953 - DNA, 873 bp, Zea Mays
tgtgtcgacgggtggcaagggaagaagagaagggaacgctcgttgttggaaaagattggaggcctcgacctctagaacaaacaggaggaaggtatggagcctatcattcctcttcgcgtttatggtatctagagccattgaaaggggcaacagtgtgtggttgctgaggagagcaacacaccttattctccccaacttacaatatggtatctagagctagggttagagcttgtcgccgccatcacctgtaaaagtgtgcgctgccgaccacctccatagcctggttgtgcctcccctcgtgcctgctgcttcgtgcactccaagaggagtgttgcacctaggctcctcgaactccaaagtcgccgccactgcaacaactccttcgccagccgccaccttctctgtatgttgcattcgctgctgccgtcgagctcgtctgcgccggtgtcctctccaccaagctgtgtgtggggcgcgcacaggaggaggccagcagggtccgtccactcgactccccctctaaatggctattggttgccctgttgtctgctttgctctccaaactgtgatagtctgattggtcagcaagggatagtgtggggggagttgctgtgtgaggcaaaatctagcacatccagggttgttgttgtagtaggaaggagaaaagggaaggaagcctagtttgattgtgcagcctggttcgattgagcctttgcggtgacagtggaagagatatagtgggaagggatggtgagtccgtgagagttagaaacaaagaggtcggaggaagaggcaggaaaaggggcagcaattgaacaacatggtcgtggcaagcgtgaagaggatccactaatcacaaaaggtgagatgaga

SEQ ID NO: 12954 - DNA, 928 bp, Zea Mays
tccaacctggaagaagctcttgaaaagtacaatctcatcctcctccagctcaagagtggtctcatcactagcaaaatagatcatatcatcatcttcagtgtacccaagtttcttcaaaacctttaggtcactaggcttgatggtagactaaccaatattgatgtagctgggatttatggccaaacatcattgtctgcttcctcagcaacatcatcttcatcatccgaggcaccctcctctagacgatattctttagcaactttgtcagccttcgatttccaaggcttagtcgttgccttcatcacctcataaattgacgatatagacccacaaccacactgtcgagggcatgttcctccctctcaagtgccttggatgaattcagagttgccatcctagcagtcaaacgaatcctagccatcagaggactgccaaaatccaaaatccaaactcccgaagcttgcaagaaaactggaggagtgaaaaaagctttgaaggcagataatttgacataagcgggttggtacaagcaaaaatatcatgatggttgcatgggaccaaccaaattatataagcatgcgggtgcggaagccgatgaattatcctgtttgagctcgctactctgtggaccgctagtgttcattgttcaaagatatgctcatttaattttgtttttaataacgtgattgaggaatgtgtttttggaccttcaacataagccttcatcagtttcgcggtctgagcatgttatggaaaaatgaactaatctcatgaggggctactgttagagaatgcctttgctaaaggttctccaaactaattgatactaacaattatacagtctgtttcacggataactaatctgtgtttgaagaaggatgccagcacaagtaataaaattggaggaagcttaggcgctcacccaaag

SEQ ID NO: 12955 - DNA, 402 bp, Zea Mays
gtttggaacgcccatggtcttagtacagtgtggtgtaattcagttcgggatgttatcctctccgccagggctgatgtggtttgcctccaggaaaccaaagaccaaggttgcatctataagttggcagattttttacttgtttttttggctctgattatgataagtttgtggccctgccggcgagttgcacgcatggagggatcctgattgcttggaagagttatgtgtgccaagcaatagcctcccatgttgatgtcttttcagtagttagtccaattcgttgaagaaggctgtaattggtggttcacaggcgtatatggtcctcaagaagatatcgagaaatccttttctggcaagagctgtggaattttcagtcccttttctctggtccatgaagtgtag

SEQ ID NO: 12956 - DNA, 543 bp, Zea Mays
agggaactcccaagtcgtgggaaatcaactgacgactcgttgaagggtcaccaatcggaacaacccgcaatgcatcagtagggaccaggtcagtatcatcagcagaaggcaaaactctgtcatcaggagcgctggcctctaaggcgacttcttgacccgaagcgtgagttgctgccatacaaccagaatgcggaggagaagaccctacgtgaacgtccatggaagtgtgagagggagaactgactcggataccctcgggggctgggtcatagctcgcgctacccatccgagccgggtcatccacggcaacaccctcgggggctgggtaaacgctagtgccatccttgagggccaagctctccgtaacagccacctctaaggctgaaggaccttcacccacttccatgggagcagaacaatccagactagcctcctgacccttaagaccgcgctctaaggtcgatgaggcacgggacgctgctcgagataactccagcccggcgtcaggcacatcagcacaaatatccatcatttcaccatctg

SEQ ID NO: 12957 - DNA, 296 bp, Zea Mays
gttgggcctgcgacgcaacagagaacgcgactggttagaggccacctcactatggctgcttgatagcactgtagtgcctttaggagcagaagggatagaagctcaatatgcggcaggggggacacaataggtcagagggaacataggggagcataataagggggaccataagtagggggaatatcgtctgagccatacaaagggagaccatttggtacggaggaggatatggataagtgagatgatgggggagaacgagcttcggtagctgtggattcatcggtgctataaggagg

SEQ ID NO: 12958 - DNA, 1123 bp, Zea Mays
ctctaaagtttgtcgggtttttttctgtggtgcttttttgtgtgttttggagtctggaaaaagcacttcacctctttcctttgtacttctatctccttattgaaatgacacgcagttctcctatgcagttcgagaaaagaaaaactatgtccagaagaacaatatcaggtgtcatattgcatcaaattgaaaaagaaagcaaatgaaccaagaattatctgcttcccaaaggagtgaaaagtgattggactaaaaaatacaaaaagaagaaagaaaaaggcatgcacctcggtaattaaatctggacggatagattgttgaagggccgagagcgttccattttttccatgcccagaacaacacacctgaaacacccaatattatcacaaaggaagaaaattaaatgaaggacgacaaagactgtacagctacagtatttaaactatgaaatcgtgacagatttatttttttagttcattgcctgtagccctgtacagcaacaaagatttgatgtgaacaatggtaaccagagtaaaattatgaatcacttcaatcaggaggtacaggaaggcagcggaatctatccctagaactccaggcatttcacatgacacttatgaatcttacggagatggacgaggttattactgaggaggtgtggaacactattaagaccatgtcgtctgataaagcactagggccagatagttttaccgagcatttttacaaagcggattggcagattattaaggtagatttcatggctgccattagcagagttatgcaaggagatgttagccggttatacttccttaattcagcttagatcactcttttacaaagttgcctaatgatatcgaggtcaaggacttctgccccataagcttaattcatagttttgccaaaatagtgaccaaactattggtgaatcggctagcccaaagattacacagtttggtttcttctagtcaaagtgcttttgtcaagggaaggtgtattcatggtaattttatgctggttcaaaatactgccaaggcgctacattttcaggaggctaaggtgcttattaaacttgatattagtaaggcattcgacgtttctctgttggaagttcttagatatt

SEQ ID NO: 12959 - DNA, 426 bp, Zea Mays
agcgaaggtggattagtttgattgaaatataccttcagatacagagagaagttcgacgaaccaaatgatggctggttgaaatgcattgaggctactagcaacgaattgcttgggacatataccagggacaaagatgatgccttgtcctcagcctttgggggtcggggcaagaaaagattgaacagggtttttgatgcaattggcttcatatatcctgattactgctaccccttgagaaggcaaggaaaaaagaggaaaaatgccgcttcggccaccactgctgtgccgaagggcaagaaaataaaggttttgacccaccggcctcaatatattgaaacgaccgtagtgcctgaatttggtgaagggaccttctccgctgccgaagtaaaacaagctgctcccgctgaggctgaagccaaaggattg

SEQ ID NO: 12960 - DNA, 651 bp, Zea Mays
gcttgatctgctagctgaggattcttccgatgctgctcctgctggtgcgttggtagtggcgcccctcccagaagctgatacgactttggatgttcagaagcctatcagtgctcacccgaggcgcccttgccgaaccaatcagcctgatccttctgctgatgagcagaagaagaaaagaagacgcctccggcgagtatccagttttgatcaggacgctggtacctcagttcctgctactgaaggagtgcctgcgactggacttactgacgttgaccccaatgggtgtacccaatctgctgctgatcccaatgggggtgctacttgtgttgtcaacgtggataatgaggaggaagaagatgaggttcctttgactcggaaaaacagtcggcagttcatcgccagtggtgagagtagtggagttccatctcctgctttgtctgccctcattggtctgcaagaactgtcccgggccaactttgatcagactcttgaggatatggtcccagaggacttgttatcggagctagtggatgatggtgcaatggaggcttgcgttgacgtgcccgatgttgggttgaggtcatcccgtgcctcgtcgaccttagaacgcgatctcgagggtcgggaagctaacttggattgtcctggtcc

SEQ ID NO: 12961 - DNA, 621 bp, Zea Mays
ggagtatgagggaaaatcatgccctcgcatcatcagcacacgaaccaatctgatcatcagtaacaagcgctggagcatggtcgattatccgtccgtcgaagacgcagagtgaataaaaaaacagaacagaaaaaggatccgagaccatgccggtcagactcgacggaaggcactactagctttacggggttgcgctggtccgcggatccagcgaggaagaaagcgggggtagtagcaagcataggggaagggaaatgcggttggggtttttgcgtggtacggtccgtaccttgaaaaccgctttgctttggttggagctgtggtggaggagtcgagtgccaaagccctgctgttccaggaaggaagagggtggaatgcggcgatcgcgctgcagcggaagccctcgcggcggaaggaagacagcgtggttggatggatgtagtagtgaactgcgctgcctctcttttatgtccaggcctctgcacagcactacgcctgcacggtgagaactgagaagggaatggaagtgtggttgatgaggagggatcgtgaaactgattctgatacgcataggtggttgtggtgggtagaaaaaacaaatgctgtttttactgctcccag

SEQ ID NO: 12962 - DNA, 451 bp, Zea Mays
gccaaaccctacaatgtggcacccgatgctcctcgtacaactgcattgtgtacagagggggtgtgggctatccagcggagcaaagcacctcccacaaggtagggtaacatagtcaaagttgaaacgggtgtctcctccataggctggagtgggtgaagtcatctgtgaaagaggggtaaatgtaagtgctaaggtagcggtaaggagataagtgttcttaagttaaagaaggtgggtcgacttagattaatctattttagctcattttcctgctactcattcttaactaatgttgttaggggtcatgattcaatgcattctcttcaacatttaattattcatgttctataatgcatgcatgcttgaatgaacgtcttctcctcaatcataggggtgctcctagggcatcccttctatcctagtgtcagcctttatggcctacttgtatagc

SEQ ID NO: 12963 - DNA, 391 bp, Zea Mays
ttctggccattggatctcattccgatggccacgattagataacgctttggtgaaccggtacgccgctatccgccattgattcagagatctgtggtgaggatttaattaaagcgagatctaaccgtgcccgcacgatgtggatccaacggtcaagactccaagccgcaaggggtatgccatgatctattctacaccgaccatttccagatcaccggtctaagaagcgtctccttccttgagtcacgccgcggcctagcgagcacccggtaggggcgttcaacaccgccggcgcgcccgatcgctgcatctgcgcccacggactcaattgcgcagcccgcaaatggatcgagaacttgactaccctgatttcgaccgccctcttcccccgcga

SEQ ID NO: 12964 - DNA, 838 bp, Zea Mays
aatcgacacccttttgaatactaaaggtagaaaatttatccatgtaacactattttggggggctacatttcaatcaaacatacaatacggtccatacacagaagggatggtgttgtccccttttactgttgggactacactggggagaggatggatgggcaggcatcgcccgattgttaagacctacaaaaaatccacagaaaaggtgaggaaggcgccagcgacgaccaccacgagcaagaaccagtgtagaagaccttacctgacttgtgggcgacgacggcatcccatcccagtgggtcaccttcgggcatcggtgtccctctccacgtggtggctgtcgtcaccgtcagccgcctctgcctgtgcagcggtaaaaatcatcgtcacggcgagcagagcgtcgtgcacccggaccgcagcttcctcacccgccatcgtctccaccttctgcctcggcttccacgtccgccacatcattgccgcggggcacaaggttgagttggtgcgccagaccgagaccgctgccatgaagcccacagtcggggccacgagaggcgccccattcacaccacaatcgaggtcgccgcatgcgagctggagggtggttgtgcagccacgcccgaggaggggaagcaactaccacatctgtgtcatggataagggaggtggaggcatcggggagggaggggctccaagtgaaggttgggagatttcaggtaggaagaagagtgtgccttatgtgcttgggaaggctggtgaaagggggaaaggtacagcgctgaaggatgacgagcgccgccatttttctgaggtacaagttgtacccggcggcggc

SEQ ID NO: 12965 - DNA, 1294 bp, Zea Mays
atgcaagtaaaaagggacgaaggcaaccaaaactctaaaataccttatcttgagcaaaaggaacatcaacataaacaagtaagaaaactatctgaactacattatcagagcatggaccattaataaaagttgtagctcaccaaattacttacaaaagttagtaaggacaaaataccataaaggttctgcaaaatacccaaataggtcacccaagtggaaggatcaatggaaaaacatatttctgttaactgagttttcagcccctctaactggacccggcgtgttcactaggatttagtcctcaaacctaataccccgaagatagttcctaagtaccttatctaacctctgatgaatggtgagcccaagacacgaccaatggacaagacaaaacgttagttttgcctcgaactaagctagctgacggtctgtttttctagaccccatatctcttacgccagtggccgaaacctttgaatccccatacaaaagagctttcttagagttaggagaacattccatgaacaaagatattgccaagatcaggcttaaaagggtgactacatgcgcgaaagacgagctcaagcataccagccacgtgtttgacccgggatggcatgccagagcgtgcccaacccgtgtgcgcgccccggcacccacggtcggccacttcccttccacttgcgctcgtgcttataaaggccaccctaaccctcaggcaatacctctgacactcctccagcctagtgccaagctctacccgagaccttgtcaaatccggtgagctcagcgccccaccattgcctccgagtgccagccaccgcaaccaatcgacccaggtcatgttccatcccactccgttgctctgaaaacttccctagagcattgagaggaatcaccaagctatagcacaagctaagacccaccgaaatagtgggatcggcatcaccaatgctcggtaatccgccgacgaacgtgggccaacctccacataccaccatcgtccaattcctctgagggtcagcgctccaccaaccctgtggagcttccttaccgaccggaccaagctctactgccattgttggccagaatttggtgccgccatcgaccaccaccacctgcgagcgtggaccgagcagcaccggccatcttcgacactgacctgaccaccaacgtgatccccaggacctccccgacctcaccaaccacctcaccagagtgctaccgcctccggtaagccgctccatcatttccttttgccatggatactgttcctccagccatggaccgcgag

SEQ ID NO: 12966 - DNA, 356 bp, Zea Mays
gataatttgtgccgtccttccccgttagaattcggcgaaggaccaagtctcccactgcgaaggatcggtgtcgtatggccttatcatgatagcgcctcagggtttgctggtacctagctgactgaattactgtatttaatcgttcttcctccaatatatcaatatcctccagtctagtagcttctgcctcagctatgttttcaaagatcagccttggtgccccaaacctaagatcagcaggtagtactgcctccgaaccatagaccatgaagaagggagtgtttccatgcaaagctcggctaggttgagttcttaagctccaaaccacatacagcaaatctctggtccacttccct

SEQ ID NO: 12967 - DNA, 496 bp, Zea Mays
atctgatactcacaaaacatcattccaaacgccttgaggccactatgaatttcgtgttatggcttttggactcttgggtgctcctagttttcaaaaagccatgaacgccaccttggctccactgttgcggcggtgcgttctcgtgtgctttgatgaaactttagtctacattgtctcatttgaggagcatttgcatcatattcgggaagtgatgcaactattgctcaaagatcactggaaagtggtccaaatgcacttttgccaaaacacaatttgcttacttggggcatatcatctctgctcatggtgtggcaagatccaggaagaacttcgtagcttcttgggattagctggctactatcgacgctttgttcgtcacttcggcattattgctaagccattgaccactttactcaaaaaaggtaccttgtttatttggatagcagcacatgagtctacttttcaggccttgaagcaggctctcgttacagcaccg

SEQ ID NO: 12968 - DNA, 486 bp, Zea Mays
aaactcataaccactttcttgatcttcgaatcatctatcacgttgtcgagctcacctaacgcaaagggggagtagtctagagcggcccactggactaccttatgtctcattcctgtctctccaagaatcttcttgaaatgtcggtgagcctcttgcagtttgtcttgctaactagacaataaattgtcattccaacggagagatctgatatagttcttctttcttctgttgtttgctaccaagtgaaagaatttagtgttagcatctcccatacgcatccatatttgtctggagtgttgtcttgctgttgctttttgaatggaaacaataccaagaattttgatttttagtcttctcctaaactccaattcatcattggagagctgtctattttcttgcgccttctccagatgagtaagaataatctgaatgattgccaatagaaccttgacgctgcctactgttttgcgtctccacgcacttaga

SEQ ID NO: 12969 - DNA, 470 bp, Zea Mays
cttgggcactgacaggcgggccaggggcgcagggcgcacgtgcgcgaagcggtacccgtgatctgagtcgtgcgatcaggatcggacggaggggatcagactggggaggatgaacggctacgggcggcgctgctcctctccgcggcggtgaagtcactggagttgaggcaggcatgagctagggggttccggggtcgctgggattgggcagagagggagagaacgccacggcgaactcaatggcggggaagaggccatgaattcgtggacaaagaggggagaacgacgggtgaaaggactcgggcggaccggaggaactccgacgaggcattccggccatggggagggggcttaaggcgcactaaggcctaggctagcttcagtcgaggcagaggcaccttagggactaacgccagggaactggaccgggctaaatcgatcggccaccgcgcaagcacagcggaccgccg

SEQ ID NO: 12970 - DNA, 427 bp, Zea Mays
cttctacatattcaacaacttccatcttctttgtagcaggcactatagcagttttctctaaagagtgcaacttcggccgatgagtcaaaactttagccctctttggcttcgacgcggcgaaagaggtcgaagttgcgattttcctcttcattccttgtttttgagcgggaaagaagtagtcaggataaataaatccaatcacatcaaaaactatgtttagtctccttttgccttgagcactgaatgcagtgttcatggcttcatcctctgccttcgtaaaagtccccagaagctcatcactggtcgcctcaatggcttcaagccattcatcattcagctcgtcaaactgacttctatagcgataggtgtattttaggtaaactaggccaccttcactggaactagcagtggtctccttcatcccctc

SEQ ID NO: 12971 - DNA, 801 bp, Zea Mays
gctggtgaccctcgcgccgtgatccgtgctggtgctacgattcgtgctctctggtgaggagatgatcacgacagaataaagatcttggcaccggataggcttggacccggtcactggtgggttcaccgtacccacttgacctgtggccggctgagatggcccttgccggcgttggccgcttaccgaccgtgcgccatgtgcctagtagctgtagcacgtcgcggtgaaccatagcagtaagtccgtccatcgccggagaccttgccacggtgaaagccacgatcacttgcgccagtacttttcccctctctccgaccgccagcacaacttctcaaaattagccgccaccactctcggacactataaattgagggtaccactagctctgttaggttgtcacgaagccagagcacccgcccctgcctccgattagccaccatagcgccctaatttctttcttcccccaattcggtttttcacgccgtcgtgaaccaccgtgtcgtgaaccgccgtttccaggtccgttcataccctccttacacttgtttcagcacccttgtgtgctatgaatgcttatcggcccagccaattaaactagaccatgttagatcactgggaacacctcgggttgtccttggtttgcgccatcaccgtggacagagagattttgagatagaactccgcaattggtagagggattagggtcgcccgaggtagaattcggtgtcgaccaagtaagaagcttagcctttgcatattccggccagtacaagctcgctggagcaactgctccaccgtccg

SEQ ID NO: 12972 - DNA, 1234 bp, Zea Mays
gggagatccgtcagcgaatacatccacaaattcacagaacttgctcgctatgcacctgatgatgtcagcacggaagccaagaagatggctcatttcttgaaggggttgagaccagaactcaagaccatcctcgccagccaagacttcctcagtttctcgcacctctcgaacaaggtcatccaggtggaaagagcacgagaagaagaaaaaggtcacctcaagagaaagtttcaagttctctgagctcagcagcaggacaggcaccagagagttcgatcttttgggttccctcccaaagggtcgaatttcagcaagccaagagggtccactcggtcatgtttcaaccagctgggtcaaagttccctccacatcccatctgttgcaagaagccaacctccaaccaatgcttgttggcactgtagagacctcagtcacttcaagaataattgtccgcagttgaagacatatgtatctgcctactccaactcggtgaatggccccaagaatgtttcagcacccgcctccaaggcaccctccaccaacagccagctaagcaagacccaggttcacggcagggctcgagtgaaccacgttgacgcccaagaagctcagcaaacccctggagtagtgctcggtgagttcctagtcgaatttacccccgccgatgtactttttgattctggagcatcccattctttcatcgccactagttttgtggaaaagcatggcatccccactgcatctttagaaatccccttggtcacccgaaccctagggtcagaccttctatgccacctcaaatgctcccaagtcagaattcttttaagtggggtagtattcttggcagacttagccatactaccatcccacggaattgatgtgatccttggaatggattggttgaccaagcacaatggcatcataagttgcacagataagactattcttctcactgaccaccaaggaaaatcagtttcgtgtaaagctcagccaccaacctaagatccaatggtgttcagcctagcagcagaaagtatatctgtggtagaagaattcatggatgtgtttccggaagagttgccaggaatgcctccagaaagagaggtagaattctacattgatctcctcccaggcattgcaccaatcgcaaagagaccataccgcatggctaccacagaattggcagaactgaagcttcagatcgcagaacttcaatagaaagggtatattcgtc

SEQ ID NO: 12973 - DNA, 327 bp, Zea Mays
gacagaatttgggtaggcagcgggtggaaaggcaactgggggcccatggaagcccatctggtaggcctcgaaaatcaagttttagcccatggctggattccgttctgatggaaggtgggccattcaacaccacgggggctaattatggcccatccggcggcggttggaatgtgccgaatatgcacgtaaggagggcggcgggtctccttcctgggttcacggtcatttgttcaaggttgggaactagggttagccactgccccgctccacgttccaggtctctgatactcgcggcgacatcattctctttcgcggacgtggtgcgcg

SEQ ID NO: 12974 - DNA, 368 bp, Zea Mays
gacgagccgttgttttcaaagacaggcagagacaggcgtaggagcagtagtaattttaatgacaggcttctggtggatcgggttgaatgctcatgttccccttctctctcgctggcattggattctcgttccctgctccagggatgcagtcccatgtcgacgaacaaaggaatgcaggctcccagctggtcgatcacgatccagtgacttgtgctgtcctgtgtgcagttgggcgttggctcactgctgcagcaagcaagcatcgcccgttggagcaatcctccatcaccgaacgcaacgctggttctgctatgtggcgcatcaatcacgattcacgccaaagcgtcgctttgtgatgcttccccccc

SEQ ID NO: 12975 - DNA, 784 bp, Zea Mays
ttggttgtgtgcttgcttgctgtgacattccaacaaacatccatggggcatcagacacaacatcctgcttgcaatcgttgtgcatctggttccccaccccatgggccagccgctgccaaaaatcaagtgaatcggagccaagtaacacttcttcatcccaaaccaccttctcagcagacgtttcatcgaacatgtcatgtgcagcagtatctgaccttgccatcgtgaggaactctctctcatgtaccttcaaatcgcaccacctctcacgcagccaactccattgtctccaccgaagttctacctccatcctcacttagaaacctcagaaaaaaacagtacagcccgatgcagagggaaatcgtggaaaccttacgtcaaataggtgaagtgcaggtggtctgcagccaccacacgccatcggaattccaccgccgccaacaccacccagccaaatgtccatggacatcgacgaacatcgagaaaaccctcgccaaagaccctggtcgccgatatggagatgtcgttgaggaagatacgacccgctctccctgatgccgaggatcggaaggctctgataccacttgtcacagcccttggtcgacgcggcgtcgtcggcgtgagctcgagaacaactcaggcgatcgccgggtaccaaacaaccagcaggttggttcacttgtggtttctattctctttttcctctctctctcaagtattacccatgatttatactaccacactagcacgacccacatggcccattaccaccgactcattataa

SEQ ID NO: 12976 - DNA, 761 bp, Zea Mays
ctcaaccctaaacattaaaccccaaaccctaaccctcaaatcaaaacccgaaatctcgaatcccaaaagcctaatctctaaaccccgagccccaaaccctaaagcctgaacattgaaccccaaaccctaatttgtgaaccctatacctcgaaccctaaaacaaagacccgaccaccaaaacacaaaactctaaaccccaaactccaaaccctaaaaagtaaagtaaggctgttttggcctcgcgtgagctacaacacatgttttcatggccgaacaaccaatttagtgtccaaaccatagtacactagtgtccgaaccattgtacacgcatttggccccggaggccggtaaggctatttttggcctcccgcgacacatgttttcatcgtcgaacaacaatttcattcctcccgtccaccacccatgttttggccactgaaacaggtaaggatgtttttagcatccagtgagctatagcacactaaacctcgaaccccaaaatcctaaaccccgagacccaaaccctaaaccatgaatccggaaccccgaaccctaaaactaaaacccaacccccaaaacacaaaacctcaaatcctaaactccaaatcctaaactccatatcctaaacaccaaacttcaaatcctaaaactcaaattgaaatcctaaacctcgaaccccaaaagcctaaactctaaacacagagccccaaaccctaaagcccgaaccctgaaccctgaaccctaaattgtgaaccctatac

SEQ ID NO: 12977 - DNA, 390 bp, Zea Mays
gttgcggcgtctctgggcgaaattgggagatgggattggggctatacggccgtaaggaactgtgctttcaccgtgcgcaattgatttgggagaaggtggagagatcagtgggaatttctagttgcgctcgagcttacttgaagaacagcgagcgcctcgccgtggaccaccgtgctatttatagccacggcgacccaacagtcgatctccggccccggatagcttcgctagtgcatgcctaccacgtcggtagaagacacagtgagggaggtcgcggcatgggtgacaccgcggcaaagttactgggtcacggtggccgtcggtgaggtcttcggctggactcaggggacggtgccacgtttgcgccgtttaactccggcgttatctgtt

SEQ ID NO: 12978 - DNA, 797 bp, Zea Mays
tgagtttttacacgaaaatccgagatcttggcgttgcaatttgttctatcaggcgtctgaaaggagtctgatggtacagtaatctgaacctgatctctggttcagccccctcgccgccggcggcctttgcgtccgaattcgcgccggtcgtcgcgattcgtgcctcaggcgagtagattttgctcacccgtgaaaagatctcgtcgcgaatgggttcgagttactgtggcctcgctgttcctcgaccacttgcaccggcgacgtggctttacgaccatcaccggagttggcgtctttcaccgtgattgtgccatgccctaggcgtttaaccacgtcgctactagccgcaccagctcgccgataaccgccgtagccccttagcaggtgagtgccatggtaaaacgcgcgagtgactcatcccttctttccggccgctgagcgtctccacgaaattcactagccaccacttcgcgccactataaattgacggcacgatctgctgtgttgggtcatcaccaagcccgagcacccgctcctgccgccgattagccaccacaactctccaatttcctgttcccccaattctatttccgtcgccgtggtagagccctcaccgtggtcagtgaatcccaggtctgttcatgctccctattctcttgtttcagcgtccttaggttctcctaatgcttctcgaccaattcgattgagctaagctgccctggatcaccgggaacacgtttgattgtccgtcgtgcccgctgtcaccgcgaacagagcgtgttagagctccattaatg

SEQ ID NO: 12979 - DNA, 340 bp, Zea Mays
gacgaaatcggccttaggccttctccatgtctttccaccacttggcggcttcatctcttggtttggtctatcacataacgctgccagatccactcttgcctttacgttatcctttgacttatcaggaatgtccataattgttgcccacagtgcctcggcaacattcattttagtgtgcatcacgtcaatgttgtgtggaaggagcaggtcgtcataataggagagtcgagtcaagccagacttatgtgtccacatatgctgctcaccatatcccacaaaaccaccttctgcattggccacgagcccatctgtctgttgacgaatttcggcaccagtaatc

SEQ ID NO: 12980 - DNA, 576 bp, Zea Mays
ccattatgaaagaacacggactccaaaaagtatcttttgtacaccaaaacaggggatgtctggggctgccatgtctgtgtacgctcctagctactgctctccaccaaagcgggggtacggtgctgccaagtggcatgtggcatgttgtggaagcttctaggcctcacttagcatgggcctctaacacgggtgccgcccacattaagtacgattcacacgagtgacaggcggtgtatgccccgtattgaatgatgacaatgtgtgaagtccgcaaggcctgggacaatatagtaacccacgcgttaccaaggcaaagaccattgaccaactgcgccgcacatgggtaacttccatcatggcccttgttgttcccactatagcaccaggtgaagagacgagcggaagagataggacgacaccgtccacctactcccctatgcaagacaacgggccagcctatgccacatcctacgccgcagcctacactgctacctttgcctactatagtaagggctgcagttgacggcacaaatatatcacattaactcctacacacgtttgcttgcccaacactag

SEQ ID NO: 12981 - DNA, 528 bp, Zea Mays
tgcgccatgcaataggccgtattaccacgtcgtcgcgagtcatggagagtaactagtgactgatgtaagaccttgccccagtacgtgccacgatgaactcactttagcaacatatcccttcaccgtcgtgatccaaatctcattcaaattcggagcaaccgtgaccgacttttataaattgagcgcttcccttgctccgcccctttgtcacaaacccagtgcaaccccaaccatgtcctaccctccaccgtagctcgtgaattcctattttcccccaattcggtcatccgcgccgacgtgtgacctcgtgccatggccagccattcacaggtctgttcattaccctcttgtccgtgtttctatctcctctgatgctagtaaatctcgtcggctcaaccgattgagcgctactgcgccatagtgtagagatcgcgacaatattgtccgggaatgccgcctcggacatggctcctgtcgactggtcgtgccaggtagtcccgtctgagtttgcgcaagcaccataaccct

SEQ ID NO: 12982 - DNA, 617 bp, Zea Mays
aaagcagcttcggcagaagaaagtcctgcactgccgaaaaaacgaagaattattcaaatagcagatgtgattcatcagacaccgccaccgggcgacagtgtcgaaaattgcttttgtcgagaccgttgaagccgaaggcgccgcagccgaagcttctagagtggagaccactgaagctgaaaccggcgacgccgaagctgccggggccgcagctgggaccacagaaggttcgaatctggaaaccacccttgaagttattgataatattctcctaaaaatggctgaggaagaagctgctgtggctgcggtaaccactgcaactggaaagggaaagaagcagattgatgacactttagaagaagaaagttttaactttcaagatttgcttggacaagagctaacaggcgccgaaaaagaagagttgaaaaaatatgccatatcttgcgggtataagccaggggctacactatttggtggagtcaacgaagggaagctaagatgtcttcggaaccgcaccgaggccaaagttgttagaaccctctccaaaagcgttggcctaccgaaactagaagctgacctctgcagatatcaacgacaccatatcgccggaagcctgc

SEQ ID NO: 12983 - DNA, 776 bp, Zea Mays
aaaaacaaaatctctcatgctcaaccattggccgatcggccttggcctactgcagcccgacgcctataccggtatcttctctctcgctcactctctctttatgccatgtggggtccgtttgtaaggtcttcttctcccaacaccagaagttggacgctcgctcgtacgtctctatgtgccgtcggttctgttgccaccacgttgctgtcagcacagctcttggtgttgcgcctcctccccttcccgccactcgcatgctaagggtactgacgcgcactactgttgtcaccggaaactgttcgtctcctaataaaacgtcgacgccatcaatagacagtaacgtcgctggatctgtgtataaccttcccagcatcgccttggctcccctcgctcggttataaaacgtgccacactatgagctctccctcatttccctgctcgctcacctcgcggcttgttgctgctcatggtagcacacgtcgtgcactgctgcttcttgccatcgtcaccaggctctagtgccgcagctcaccggagtagtcgccctgctcgcgccgtcgccgacgttgtgcctgatctctgtcccagcgccagcccctgctctgcaactgcttcgccatggttatgcgcctcatcagaacccgttgtgcctcatcgtcaaaacctcgctactcgtggccgcgccatcgcaccagcagctgcgccgtcatcgcaccacgtcaagcaccgtcatcaaagcgtcatcgtgcccccgtagatctcgtgttctgctctct

SEQ ID NO: 12984 - DNA, 406 bp, Zea Mays
tatggtggtccaagacgagacggtgaggttaaccaaacaaacggtaaaataagcccctcccgaacaaaccgacacatactgttagagaagtataggtgtgtatatctttgtactcacctcacttgtacaccaagccatactcctcctgaacacaccgacacattcctgttagagatatgtataggcgtgtatatctttgtactcaccttacttgtacatcaagcatacatcctacttgtacaccaagccacacaacctatatactaaaaggtcaccatctgctatgggtgtgtggtgtctccctaattcttcacatggtatcatgagtccgagcctaaccctggctccactctgctgcttgcgtgcctcaccccaccccttagctatcgacccttacttatggcgc

SEQ ID NO: 12985 - DNA, 544 bp, Zea Mays
ccagcagcggcgtagcgcccatcccaacagcgagcaaccgccagccatgcacgccgactccttgctgccattaccccgccccgcgtgacgtccaactccagctggtgttgcgtcgccttgccgcatgatgcgcgtgccgtcgtgctcgtgaagaaaagcaaaccgtccgtgtggccgtgtgcgagtatgtaggctaggagaaaagaacggacgttgggcctcacaaacatgcatgtgcaggcagcgttcctccatgattttcctgcatgcgtacagattctagagccaaaacgaaattgccgatcccttggatatcgtatttccctccccagccaggctgcatgccagagaaataatccttaaggattctctgtgccccaaatttgtggccctaggtgtggcttgtttcgaccaataaaaatgtgccacgtcgttattaatctgcgattagttaaaatatattaacttttgcgttagacatctgaattaatatgtttctattgagttagcttcgtaataatatcatgcacacattaaacatatt

SEQ ID NO: 12986 - DNA, 896 bp, Zea Mays
cattggtgctgtacagaaattggagataaatggacttaaagtcaggctgttagtcacccctgaatctgaattttgactggcagtgaactggggcaaactttgggaacgattttgagtaggatccagtaaatatttgattatggttgctattacaaaatcaaagctagtttgtaggagatcaactttgctatagatggattagtgagttagcacacaaaaattcgagaacaaagcccagcaatttgctcggtcagatagactgacgaagatagccatggtacggtgacaaaaagatcttcagatgcagtgaacttgccaccggtgaactccacaccgcgatcctcactggcgtcgcgattcgtgcgccctggtgtgcggataacaactgacagtgaaagatctcaacacaaggaagggttggagccttatcaccggactgttcaccgtgccacttgctgcgcgattgactgaggtgtccttgccggagttcgccacctttcgtagccgtgccacgtacttagaagagttaccacatgcaatagatcattctaggtagcctatccatcgcctgagacattgccctggtgaaagccacggtagttcgcgctggtgactcacccctctctccggccgctagctttcctcttccaaattcggagccaccactctcggatgctataaattgagtgcatagccagctccgctaggttgttacgaagccagagcacccactcccgcctccgatcgtccaccgtagcgccctaatttgggattttcccaaatccattctccgtgccgccgtgagcaccccctccatcgacccactatcctgtcccttcacccatcttcctagctgccattcttgagtcctagtatgttgctaaagcttatcgcgc

SEQ ID NO: 12987 - DNA, 1215 bp, Zea Mays
aaaaaattggcatatgcataatagtaactctctccccctggcagatggcttcggataaaaccacgcctaccgcctccaggattggagcagggtttcccctaagagctgaaagagaagccggaggagaagggagtgagacccacctccccgcacctccagaactacccttagatttagcccaagttctagccaaccaaacccgactcattgaggtcctcactagaagtctggagaatcaacgcccaaatggtggaagaccacaagacaggatgggagattttctgaggctcaagcctcccacattcgctggatctagcaatcccctcgatgctgatgattggctgcgcacgattaaaaggaagttagaagccatcggatgcctggagaatcagcatgttcaattggctgctcatcaactttccggaatggccttagcttggtgggatacattcaacgctgccatcagagatgctacctggacagagtttgaaactactttccgagagcaccatgtgccccaagggatcgttcagctcaaggaagatgaattccgggaactaactcaagatggaagatcggtcagtgaatacgtgcacaaattcatagaattggcccgctacgcgccggatgacgtcagcaccgaagtcaagaagatggcccacattttgaaggggctcagaccagaactcaagaccatcctagctagccaagatttcctcagcttctcgcacctctcaaacaaagccatacaagtggaaagggcaagggaagaagaaaaaggtcacctcaagaggaaattccaagtcctccgagctcagcagcaagaccggcaccagagaactcgatcctttgggtttccacccaagggactaggcttcattagaccagttagacccaccccgtcacatttcagtcagcagagtcagagctcctttcatgccctctcagtttcaagcaaccaaccgccagcaaatgcctgttggcactgcggagaccctagtcacttcaaaaacaactacccccagttgaaggcattaggacctacttactccaactcggtgaatggccccaagaatacctcaacactcgcccccaaggcgccctcctccatcagccagcagaacaagacccagtatcaaggaagggcacgagtaaatcacgtcgatgctcaagaggctcagcaagctccgggagtagtgctcggtgagttccttg

SEQ ID NO: 12988 - DNA, 554 bp, Zea Mays
gagggagaccccgctcggacaccctcgggggctgggctatagtttgcgctacccacttgagctggatcatctccggcagtaccctcgggggttgggtagtggcttgcgtcccccacccgagccgagtcatccctggcaacatcctcgggggctgggcaagtgtcagcaccatccttgaggaccaagttctctgtagtagccacctctaaggctgagggtccctcaattacttccatgggggcaagacgatccaagtcagtttctcgaccctcaagaccacgctctaaggtcgatgagacgcgggacgctgcccaggacgatcccaacccggcgtcgagcacatcagcacaaacctccatcacaccatcatccgctggctctgataacaggtcttctggaaccatatcttcaagagtctgatcaaagtttgccagggacaattcttgtagaccaacgagggcagacaaagcaggagaaggaactccactactttccccactggcaacatactgccgactgttctttcgagtcaaagggacctcatcctcttcctc

SEQ ID NO: 12989 - DNA, 537 bp, Zea Mays
cgtacacattgtggtcactttgaattcctagtaatgccatttggcccgactaatgcaccatccacattccaagctctgatgaatgatatactgaagccgttcatccggaagttcaccctggtattctttgatgacattctgatatatagctcgtcatggacagagcacttacaacatgtgaagcaagtgttctaattactgcgggataatgaccttgttcttaagaagtccaagtgctcatttggtaaatctgcagtcacttaccttggacacattgtctttgtgcagggggtcgccatggaccgttccaaggtggatgcagttgaatcatggcccatacctaggaccattcgagcactccgcagtttcctgggactcacagggtattaccgcaagtttatagcaggttatgggtcagtggcagctcctcttacaacccttctgaaaagagatgcattccactggacagagtaaacaactgatgctttttgtcaactcaaacaagccttgctgacgtctctagttaccggatttcaa

SEQ ID NO: 12990 - DNA, 1299 bp, Zea Mays
gcatcccagtgtaacatctcccagacatgcaacaagtatactgcacactggattatgtaaacctaattcaagagatggttaacatgttattcgcttcaaagttatttcatctacaattgtttccaccagaaaactttcaaagtctaaactctaaagccacatctatgtgacgtgaccaccagggttataactacatacagtaactagatacatcgccactatcatataccataaaaaatacaaaatctatgagatggtaactatcgcctccttagctactgccacatataataaaaaacatgctaccagagtctgaacattagtttactaacagagccattaagtcccagtaaagcatgatgtcttatttcaacaacccaaaaaggctaaaattgatgcaaagcgatagaattttcttagacagagctctcactcagttcggtttctaagcaattatcaccaaaattgtgagacaggactctcactcgttcagttcttaagcaattgttaacatattagtagctcactagtctcgaaataacaaagtctcgtgacaaaaggtaagtagacaaaccaggtggttgacaatgtgggagcctgaagtgttcccccgcgagttacagaaccacttgcggcaggagggtacgttgcacctcgccacgcacgcagggttgtggatcccgcagtaccggcatgcgtgttccacgaagtctcccttgctgtagtcgtacccgtcctccacggcgccggttcctacaggatcctcgaagttaagtgcgacaaccccggaggcgagcccatccgccgcagccgacggacgcgccttggaggcggaacgcggcgacggcgaggaggaggaggccggcggggtgtggacgtcttgagacgtgagatcgggttccggggaggccgcgtcggacggcggaggcggtggggcaggccacgacgaggacgacgtgccggcgccggggatggaggacgtcagcggcgtggatcggggaggtggttgagagagctccgggaagtcggggtagtcgaagtcgtccccctgcgtgttgaactcgagaaaagtgtaggcgtcgccggcggcgggggcgtccggctgcgaggccgtctcatagaggtcaaccgcggcagtggcggtagagggcggctgcgtcgccatcccaccggttagggttttgtcgctggcgtagggcttgggaagacggggcgaatcgggaggggaaaatggagaggacgactcgggaaggatggtggggtgtttgatttgttaggatttccttttgctttaaccgt

SEQ ID NO: 12991 - DNA, 640 bp, Zea Mays
atttacaaacgccacacggggcgctacaacaaccaagtagaaaaagggctaagtggcagccgcatcagcggcagcaaggacttcgttgtaaacaacatttcaagtctgtgagccgcacgagccatcttcattttcaatcaggattataagtccatttctagacattgaacgggagacagccacataaagttggccatgtgtaaagacaggtctcttgaggtaaatgccaactcttgataacatttgcccttgacttttatttatcgtcattgcataacacaggcgtactggaaattggcgtcgttgaagtgtgaagggccacttcacatttgtagtgttgagggcaatccttggtattaagacttcttccccaacatttgatcctgtaagcgctacgcagtgcaagatgcgttgaccgagttgagtgacaagaagtcgtgtgccattacagagacctttactttgattcaggttgcgcaacaacatcacaatggcacccttttttagctcgagtttgtgggtagagaaattgttcgcatcaattgagtttaagaattcagtagggtagaggatgtcgaagtctggtatgtgttccgatgattttgctataacatcacaactcaggtattggatggtgtct

SEQ ID NO: 12992 - DNA, 890 bp, Zea Mays
agagtcgtatagaacgtatagagagggagagagggagagtcgtatagaacgtagagagagatggagagtcgtatagaacgtatagagagggagagaggaggagtcgtataggacgtagagagagagatggagagtcgtatagaacgtatagagagggagagagggagagagtaggagtcatataggacgtagagagagagagatggagagtcgtatagaacgtataaagagggagagaggaggagtcgtataggatgtagagagagagatggagagtcgtatagaacgtataggaggagtcgtataggacgtagagagagagatgaagagtcgtaggaaatggcgttgttaatgaagctttgatttttttttgctttgctaatgaagcttgatgcatactctttttgtgagagagaccaaggacagatgatgagaactcgctctggtcaagtggggttatgatgagttgctcttaatcgaagcaacgcaagtgtgccgtacgtcgtcttctaatttcactagctaatagtgctacaatggaatacgttgtttgagacaatcagacaactatttgccaggtcgtgccacatgtagctgcatgtctctttatggatgtcgcagactttgagctcttttctactagtggctccgcagtcaggtgcacgcgcacgcgcacaggcgtgctgaggtccgagtgcgagtggcatgccatcctacagaactccctgcgagcgctgcagtgatttgtcgctcgtgcgcaagctggtgttcaataggatactctggagacggacgtggtcctctggaacaagcacaaggcagtggctactggaccgccttgcattggcgcctggatgcatacaccgtagatggggtcttcgctggtgcgc

SEQ ID NO: 12993 - DNA, 628 bp, Zea Mays
cagcatgcacgaatttggtgggagatccacggagtgatagttgtggcgtggtctcggggataaaagccgccatgcgactgcctagccctctccccctctatcgcgcacccacatccgcaaccacctgcacccgctgtgtaccgtgttgcgccgccgagagaaagagagagcgtcgtggggctgctgccgtggtgtcgcgtccacaccggtgtaggtacctaagcgagtaggtcgggagcttcatcgcgttcgcgggagtctgcgcgagatctttccgggcattttcgagggtcggctggtggcgaattgctcgccggagcaaaaacatcatggagaagccgctctcgcgtgtgaactgggatctgcattgtggccatataggtatgtgaccatcccccattttcactatgatccactctacgcacttcttggtccggatcgatgtttgacgcactggagagtagttttgggtgcgggcggcaatggcgccaccgtggggagcttcaccccaccaccggtgtccgtcccgtgggggcaagcagatctcgggtgctgatctgtcgttggacggttcagattaaaccagcgtaccgctccacgggctcatcttggtcgtagatctgtgaag

SEQ ID NO: 12994 - DNA, 754 bp, Zea Mays
cacccccagcggcaccagagccgaactcgcctcgtcggcccatgcggcgatacgctggaccccgatgtgatgcttcgcttggagatcctctagcgtcttcttcatcgtctctgccgcctgagaaaccagagccgcctgcgccatctgggctacctgcgccgcctggaaccagcggacccgctcctccaggttcttctccttcttctccgcctcgagctcgtgctcggccaacaacttgtcccgcctttcccacatctcctccctccaggccaggtccttctcctgttggatgagatccgtcgcccgcttctccatggaggcatccttcgccctaaggttttcttcggcaaaagagattttgccagccttgtcatcaagctcctgctgcagcttctgtagtgccgcctcggtcacggtctgcttatcccgctgcttctccagcactgcattataggctttcaacttctcatggaactcggtgatgaccacctcccgttagtccaagcgctctttcttcttggccagcttcccctcctctcgggtcgctttccgttcccgttcgatcacctcctccaggtcctccttgaggtccttacgcccctactcaagctcggaccgctccgaggcaaattggtaggacacggctttggtacgttcctccaactgggtgccccaatcgccaaggcgctggtgctcagtctcgagcgcctcccactcccggaggatcgccgcttcagtctcccgaagaacgggc

SEQ ID NO: 12995 - DNA, 504 bp, Zea Mays
tgctcacgccagggtttcccctatctcgggatctcgtagcggcccggaccttactcagggggatctggaccccatccaaggggctcggcatgcttgctttggagtcccgagctgtaatcgggggtccgagttgtgcgtacaggggtccggtgcccctcgcggaggtccggttcaactggtacatcctgggatgtatcatctttctttgccacatggcgccccttgagcggcccacgtggtggggtcgagcgatgttcaccacgtggctagggaacgttgtatgggcaccgcgtcttcataccgtagtaaggggtacccctgattcagggtatcgacagtagcccccgggcctgcctcaggggaggatgcgagcctgcaggtggggccaaagtttgactgacgattagcttgttgctcctgcgcgcccgttgatgcaattactgtcggcccgcccatggtcacgccgactgccatgcctgtccccgcggctgacttgcccgtgac

SEQ ID NO: 12996 - DNA, 359 bp, Zea Mays
accaccactgttgccccatggtttgaccaagcacaagaatcttccatcagaggggaaggtgacctcgactgcactcccacgagggttctcctcatgcagggagcaatggtggaaaagcctcaaatccttctagcaaaagagaaaaaatgggtacttgagaacaataggcatgagagaggaagaaaagaaaagggtcgcaccctatccctctcggccttttaaggagcgctttgtctggctctagctcctaaaaacgcttctggcccttaagattggatgaattaggtctgcctccttgggtaacagatcaagaaaatcaaggtccctcgtcgagggaagcaggatagacaagctggaac

SEQ ID NO: 12997 - DNA, 774 bp, Zea Mays
atcatgtccccactgacttgcggggccagtcaaccccgatcgtggggacctcagcgccggagtctctacagttgcccgtataaaggaaaggacgggacggtacaccataccgggtgtatgcctacgcacacaggagggtgacgcaaggctcatgacggtagaagaagctgcacatgcatgacccaaaaacacgccgtaagtctaccctgcggggcccaccaggggccactacatcagcattagactcactacagggacccgtatatcgggcggacggtacgatacgccatactggaagtacggttgggcacgaccctacagacgacgtcacaagagctacaccacccaagggcaaccgtcgggcaccctccagaagaacacgagtccccactgtatagacctgtccttgaactataaaagggcaggccccctcctcctttcgacacaagcacacctattgtaacgcgcccctcagcaatacaacgatcagcactatactggactagggcgaaagcctgaaccagtataaacctattgtctcaaaactaaccctcgagtcccagcgattcaccattcgaagtgagttcgcgcttgcatacccaccaaacataaatcttattgtccaccggtttctgaaaccacgacaaaatgtatcgaatgcatcagttgtgtctataacagataccaatgaaaataaatggacaagttcaaaagaatagaatgactgaaccatcgaatcctagcgatacgattagctcctcccgtcccctcgcc

SEQ ID NO: 12998 - DNA, 562 bp, Zea Mays
gggcaatctggtctaccgcctctgcgtcaggtatgacaccatgaattgattcgcctaacacgtagcagcatgtagcacctatctgcatttcctaaagtcactctggcaccgtgcggtactctcaccggcgaagtcgccgccatggtgggtctgggcgccaccgtggtgtgggtttcaggaagaagataacgtgatggccgtctgttccatggatgtgcggtcatgattaaatccctgagtcactacgccacaaccgttgatgctagattagacgcttgtgattggaacccgcataccccttcgggttttaaatctaggccgtggatctggttatcgacggcgagcgttcaaccgtggcgcgtaatgcctcgggccgttgatcttgatccaagggctgctagatcacaccacgttaatgaagtctcaatctaatccgcaccgctcaatcgtgatccaacagctctcatccgcccataccccttcgaccataagttttgctaaagacccccttgaaaataggagaaataacccgccgtccgcgcggggtgaatcctgagtcttg

SEQ ID NO: 12999 - DNA, 403 bp, Zea Mays
gctaagtataatgccagccattcagatcgagatgcgcgactagaggcttctcttcttactcgaggctgcctgagcgatggcgcacgcacaggccacggcagcgctattgacgtgctgcaccatccctgattcccgtgctcgaattccgattttatgaatgatacacgctgaggagaaagaagcggacttagggtggaaaaactcacaggaattcgacgcatggagatcactggccacggtggatgcgcaaccctgcagcgtcgacgacgaatcacagtggctccaaggtccattctcgcccgcagaagctacaacgagcatctacccgtactgacgatcttgatttactcctcccagggttccagactatgctgtaggcatgggcatcatcggcggatcttac

SEQ ID NO: 13000 - DNA, 655 bp, Zea Mays
cttctcgcttatcccctaattagtagtgaacaatcttccattatcccgaggaaatctggtgctcctgcgcccgagctatcaccggcggttcaggatgtcgggcgcgcagaacaaacccggcccgacatattcgcacttatgcctcgactaacttggttgtgggcctctttcgcatctggactgactcgcttttgctaattccttttatccggcccatagcgggacgcctccagagggtggctgctatatggccccgggcgtattttcgcactcgtgtggagccgggggatatccatcccccacagttagggtccttggcatcacactttttgttcatctttgctatctaccgttccgccgggatgggtgttcgcaagttttcgggtccctcaatttccactagtgaccattatcgtagccttcgaggcataggtattcacagtctcgaccagcttccccatcaggtccttccgttcacgttgcccgccccataggtccatttctagcgaagatggggatggagtcgtcccgctcgatgctttccccaaagtttatccactggggtctctagttacgttgtcttgaggtcccccttcccgtcgagggtgccccaaggatgcacgagcagtgcgatgtggcgttttgcctgggactc

SEQ ID NO: 13001 - DNA, 430 bp, Zea Mays
gaagcttcggaggaaggtatgataattagcccaggagattgttctgcctattctatggggaagataagggacacacgacaaggacatgccaagtcacgatccaaaagtagaaggaaatcgctgaagccgaagcacgacagaacccgccgaagcagatcttgcatagcgcttcatgctattctccatatatctttgattatgtgggcaatcaacagcctacgacgtccgttgcttcggcgagtcactcccaagcctcctcggctcagttgccaccaccgctaccactggcgcctaccttgatccataaccaacagctagaagggcatcgccaggctcagcagcagcgcgacacttgggagaaatctgaagctcgcacagtcaacaacattgtgctcgagttaagacatatctactgagcgtcataatccaa

SEQ ID NO: 13002 - DNA, 473 bp, Zea Mays
tgttgctgaagctttgcgctgcaaatgtaaaaagtagtctcatgacacggtgccgacattccatttggcgcctaaaatactagcatcccagctggcagacacagacacgcttctactgctacttacctcgccactcaagtctggaagcagcggactggagtggactggactggctctgcgtctgcggccagcaaacgacaggcttgtaccgatgcgcccattaaagatgctaaaaggagtagagctgaaagtatcgtagccaacaggcttcattactcgacgacacactgacacgcaaataaaacatttcattgctagccacacacgaacacgcgctgtcgaagaaccagaccgaaatgtggcagcagggccccccaatacgtgcgagtctgttcggatactggctctggatgggggaagggttccggatccagaaacgcagcgtacgagtagagctgaaagtatcgtagccg

SEQ ID NO: 13003 - DNA, 742 bp, Zea Mays
tgggtattcctctgaaagatagcatcaagaggtggtgctatgaatggtttacactagagaaccacaataacttccttactccccattctaggaggcatatgttagggtgcccagctagctggagggcccaaatgatactgaagttagtgaagtaaggattctgctaactgagatcgccgatttgaaatatagaggcctgatcgccgaggtagttgtgcttgattttgtgtttactaatatccagcctctaaaatacaaagtgtatcctgcatacttgtatacggggttagagatccctctcgggtaatagataggtggatcttggtggaggacgtcctgagccgggtcaaactgatgttgaggggtaccatagtcaacgatggtactccatgatcttactctgcgtggaacctgccttcggctataagttttgcttgcctggtttttacttgtcatttgccgagttaagcttgtgttttttgttgtcagtaccattttcttttcgcagagtctttttctgtgtttgtgtccaaccctcccattcgtggagaatgtgggggtgcaggccatagagcttggagattgaagttcgtaatcgctattcaccatggtttgcctgaggtggcaagcagacccacatttccatacaacgcccaactgatgactctgagattgaagttgttctaggcatgcttgctggagagttgtctaagtcatcggaccttgagtcagggttgtagcc

SEQ ID NO: 13004 - DNA, 436 bp, Zea Mays
tttagccatgtcatgaagcctgccaccgttcggaccgccctctcccttgccctctcctgggactaggcggttcaccagctagacttcaacaatgccttccttcacgccactctaaccgagacaatgtactgcagccagcccaccggtttcgtcaactccactcgttcaggtatggtgtgtaaacttaaccgttctttgtatggcctcaagtaggagtcgcaggcctgatacagttgcttcgccttctcattggtttcgcttggcttcgtcgaggctcagtcggacaagtccttgttcatcctttgacgcggcggcgacatcttctacctcctctacatcgacgacattgtgctcatgacatccagtgccgttctcctccagttcacgatcgctgccctgcagcgcgagtttgtgatgaaggacttgggccctctcc

SEQ ID NO: 13005 - DNA, 571 bp, Zea Mays
ggcatcacatattacattggctcaaccttcgagatgatacccatctctttatagttgaacaacattatcctcagttcctcaccctcaaaaagatttcgcagctccccctcacctacactcaccccaatcggcgaggacaacaattctcgcttaccagtcccgtccacgcgaagacgcccactctccatctcaccacgatgacgcccaccgcttcacgacaatccactcaatctccatttcaccaccgcctttcgccgcctatacccagtactcgtgcccgggagctcctcggaaccctccgcgcgcggcgagggctccgctgcagccacatccagcgctgaaaaataatccaagtcctcatccgaagactcctccgtccatgcaattgaactcccagaatcatcagactcaaaacacttagacacagagccaaatgaatcgtcatcagcagccacggtcgaagccgccacaaaaatagcattgtcagtagcggttgcgtgcgcaggcccaaaccccagaacctgcgtagcaaccgaggttcagtatcacacagacaaaatttacaaactcc

SEQ ID NO: 13006 - DNA, 411 bp, Zea Mays
aggattgaacttgatattataatcacactaatcccctctgtcctcaccttttctctctgcaggtatgtgaggattgaacttgatattataatcacactaatcccctctgtcctcaccttttctctctgcaggtatgtgaggattgaacttgatattataatcacactaatcccctctgtcctcaccttttctctctgcaggtctatgaggattgaacttgatattataatcacactaatcccctctgtcctcaccttttctctctgcaggtatgtgaggattgaacttgaaattataatcacactaatcccctctgtcctcaccttttctctctgcaggtctgtgaggtagtgtcgcaggcatctccatcgtctcaggtcagctccccttccaataaaatggtgaagtaag

SEQ ID NO: 13007 - DNA, 561 bp, Zea Mays
ttctgagctgatggtagcctgacctcagatctatcttcgagaacacactggctcctctcaattgatcgaataaatcttcaattctgggcaggggtacttgttcttgatagtaacctcattcaaggctcgataatcgatgcacatcctcttcatgccatccttcttctccacaaatagcactggggctgcccaaggcgaggtactcggtctgatgtagcctttctctaacaactcatcattctgcttcttgagttccaccaactctggcctagacactcggtaggctctcttggaaatgggggcggtgcctggtataagctctatggcaaattcaaccttcctttcaggtggcatacccggtaactcctcgggaaacacatctgggaattctgatactatattgatagcctctgatggtttaatctcctcaatatgggcgatgacttggtgacagcttccttcccttggtccagacaagacaaactctactcacacttcttctcctgatagggacactaacttcaccattctcttatcacagctaagactggcttgatactt

SEQ ID NO: 13008 - DNA, 766 bp, Zea Mays
cgcgcagtgtatggttgataaccagaggagaactggtgctgcgattgcggggttctagtcgtgtagattggaagccggatcgtctgtatgacatctccaccaaatcgatagttaccttcacctgacggaagatcgggcacccccgttcctatcaagtggtattcaaagactcaggtattaccgtcaggcttaccctagtttagtttaggtttttcatcctataactccagataattaccgtacaaaaaaattccgctgtcctaggacccttgtttagcctttgcaattttgttttcagtttggctttgttcagttcgtgtccgtggtcgagtcgtgttgctggtttagggtgtatcttcgtcgtagatcaactgccctcgctagccgctatcacatccacaattacccagatcacaagtcgatccacccattaatcgacttgccctcgctagccgccgccgtgccagccctacatagattgtagatacgccgctatcccatccaccattacccagatcacaagtcgatccaccccattaatcgctatgattgcagatagggaatttttgccctaaccgccgccttctagtcgtgcctccaaaaacataacttgaggtaccttccttaaaccgggcacaacttttcgctcaggtgtccaaaaaatctgaaatttttacaggagcttgttgacaccattctgaggccagccaaactcacctatggcctatttggtttcgataaaattgtcaaaaaaattcaggaaaat

SEQ ID NO: 13009 - DNA, 424 bp, Zea Mays
atttcacgtgggggtggtggccaacagatcattcaccactcgtgcaagtgacagatagatgctgagcagccccaacgccaggtcaacactatatgtcacttggtgcaattgtgcctacttactctacaaaatactgtttcctgtcatactcaaaccacagaaatgtagaccctgacatttgcccaggttcatatcattcatcatggctcccctagcataagggtgggaaaaaggggttactgctaatcacgctagttaggcaatagaataagcacggccgtgtctccagaaaggtgagagcgaaagcagtgaagtggtctaaaaagcttttcaccactgcagtaatcaggagacaaggaaacatgtggaatgggcaaaccgccgcatacaggagcataaaagaaccgcaaaggcattattaaac

SEQ ID NO: 13010 - DNA, 914 bp, Zea Mays
gcgacataacatacttgccccaatagaaggtatataggagagccactaaagaaggacaccctcgacattgtgccatgatccagggtatgactctacacatggctccatgatcaggataagatcgaggtcgttgggtcttagctgactgaaccatggtccagctaatgtaaacctttatcctcccttgatctataaaagggggagcttggtaacattaagggtcgggggattggccacataggggtccacccacataagggatttggatccattcataaacacacatacacataaacatacgacacctaagggtaggcataaaggtggatgagaaccaataggttaggactctcattagaaccaagtggaaaagggggagctagaaggtcatggcactcaattgattcttgagcttgtaatcttcttcatctttgtattcgtatatcgatgagtaggaaaagcatgtagagtgttagacacatatgccttgaacctctataaaaccgtaatatgctagttttcgattgtgtccaagttcaacacatcgctcggctatgcccccgctcgggtgtgcgaccgtgatatggaagttggcttgtggtatggcgggtggacgaaatagtgtgcaaacgacatggtggggaggtgggtggttgaacatagaggagaggtgcacataaggtagggtggtgatgaggaggcgtgtgcccacatagtggaggcgagcaggtgaacccaaccgagaggccgacatgcagggaggtgagtcatgagagggcaactcaacaggaaggtagtgtggtgggaaggtgtgtggtcagccatggcggagaggtacagtgatgatggggaggggaccacctgtggggaggtgcatggatgctcacaaagagtgttccgtgagagacgaaaag

SEQ ID NO: 13011 - DNA, 1831 bp, Zea Mays
ttgcggatgataagctgagctcatacgtagctggacatcagcaagccgaaataattccttccacaggttactgagaaacaccttgtcacgatcggaaactatagaatgaggcaatccatgatgtttatacacttgatcgtggaaaaggcgagcaaccgtcagagctgtaaatgggtgtttcagtggtaaaaaattggcatattttgaaaacagatcgacaaccaccaggatgcatgtatacgaatgtgaactaggcaaagcctcaatgaaatccatagaaatgatctgccataaagaagaaggaaccggaaggggttggagcagaccaggtagcctagcacgatcagctttggcttgctgacatatcaaacagtgagtgacatatgtgtgcacttcagttttcagaccttgccaagcaaacagttgcttcaaccgggcatatgttaccggaaatcccgagtgaccgcccactgcagatgtatgaaaagcagctatcaacttctgatgcagatgagctgaaggtcctacccaaatgcgcttcttataacggagcaacccatcttgccaggaaaaatgtggaacggcggacgaatccacagcgagcttagcaatgatatccgaagaatgggtatctgccaaatatgtatcagcaacttcggtgacccactgtggctgacaggacgacaccgccaggcaactcgctgacactataggatgtcgcgataaagcatcagcaaccccgttctctactcctttcttatacacgatgcgatattgcagtcccaacaaccgagtaaacattttcttttgccatggtgtgtgcaaccgctgttcatccaactgagcaagactgcgatgatccgtatatatgatgaattccttaagttgcaagtaatggcgccaatggtcgacagcaatcaaaatggccaaaaattccttttcataagtcgacaacccttgtgatctgggtcccaacgccttgctaagatacgcaattgggtgaccggactgcaacaacaccgctccgaccccatgattgctggcatctgtttctaaacagaagggcaatgaaaagtttggtaatgccaaaacaggagcagacactaaagcttgtttcaaggctgcaaaggaagcttcgtgtgcgggagtccatacaaatatagcacccttttttagtagacccgtcagaggtcgagccaaaagaccaaaatgacgaacaaagcgacggtagtaccctgccaaacccaaaaaactgcgtaattccttcacagtcctgggagaagaccactgagaaacagcctgaatcttgcttgggtctgtagctactccggccgctgaaatgacatgaccgagataggataactgaggcctggcaaatgaacatttattcaacttaatttgccattgatactgtatgagtagttcgaagactgctcgaacatgctgaatatggtcttcaaagctcgaactgtagattaaaatatcatcaaagaaaactagcacacaacgacgaagtaatggtgctaatgttgcattcatggcgcgttgaaaagtggctggtgccccggtcaaaccaaaagccataactctaaattcatagtgacccgagtgtgtttggaatgctgtcttatgacaatctgccggtaacagccgaatctggtgatatcccgctgtcaagtccagactagtaaaccaggaagcttgccccaattcatccaacaactcctcgatgacaggtaccggaaaagatgtcttgacagtaatagcatttaagtgccgaaaatccacacagaagcgccatgaattatccttcttcttgaccaataatact

SEQ ID NO: 13012 - DNA, 362 bp, Zea Mays
ggccctgccgccgccttgggatcctccgctgccagctccgccaccgccttcggggggccctccgccgtcggcgcaggggctggcaaggagccttcaccagacacagtgggcataggtccggcggaggagccctcaacagcttcagggttgacctcagcctcgggcagcaccgggtcgacctcgacctcgtgccgcgcgtcgttcagatccccaaggtcttcgacatcctcggcacacgccatctgtagcaacagcacactcattcagcaaacccacatgcacccacattcaatcacacgaaacaacagacaagccttacctgctctctcgcccaatcagactgctccctaaccgcctcccgg

SEQ ID NO: 13013 - DNA, 455 bp, Zea Mays
atcgcatactcgagcaaaaatctagatcgcaaatatcatgttcgtggctaaccatgattcatgtgtcgagttgcataatggagccctaatcaaattgagcacaagtcgcagattcgtggctagccccgattcctcgaactcagtagtaacctactcccagtggcgcacctgacactcggaatggacagaagcagcaagcttctctccacacgacatgcaggggcgaatgcgaatccagcacagagcatgtttttgcgaagaatcgaagttagtgtgtaatacaacaatacatgctggaccagatccggctaaaatagcttagcttagagtttggggtttagctcggttccgcacggcgggcggataagggcgtaccaggttggattctcgtcgccggcgaaggtccccgacgaagagggcgtcgccgctcgccctgccgtccacccgaagcaaag

SEQ ID NO: 13014 - DNA, 438 bp, Zea Mays
gcacaataaggtggtgtttggttccagtcatggaggggtaacgttaatggaatcagatgccactgtaatttgattcagcgtaagcgaaaacatattttgtttggttcacgtcactaacaaagtcaaatagctgaaatcggattacagagccgaaggagcggtaacaaaagtatatatcctgtatctgattactttgtatccgattacacaggcggccggcaccaaacaaaattagatggaaacacttacagctgaaatcaaaatacgttacaattacacggaccaaacagcacctaatttcaaacaccgagggaggaggtgagggtacaccgagggaggaggttgagggttccgagcaccgcgcgagaggaggctgaggggagtgcaggagttcccagcaccatgggagtgcgcgacgtgtcaaagtcgtgctttaaa

SEQ ID NO: 13015 - DNA, 290 bp, Zea Mays
ccagctatcgccaaactggcaacctccccatccccaaccttcactctaggcccagtaacaacaaaaccctaatccccatcctcctcctgaaccatcacctgaatccctaaccctaactggagtgtcaccaacacctggagcatccacaaatccctatccccataccaaacccctaacccaagtcctaaactctaaccctaactggactgttcccatagccctgatcaagtgatcattgtcatcgccagaatcaaagatttatctcgttcttacttcctgcatgcaattct

SEQ ID NO: 13016 - DNA, 513 bp, Zea Mays
aaaacttaaaggaatcgcatgttccaagcgattcacggtggtataatccaattggataggttggggagcatcacggttacctgggaatacttaaacggggaagtagaagacgtgagctaactcgaatcgcgctggtcacggaaggattcttgcggcagggctaagaacagggaggaaaggactcgtgggttcgtcagtggaattgagccaattgaatgattgcttgagcgcgtgatgcaacaacgaagcaacgccagggcccaatttatagtcggccgaccgaggatggatgagatccccgagctgtgactgcgctagcgagcacacccgcgcggcggattccggtgacagcgcggtgatcgccgtttaactggagcctgccacctcagtgacactttgacacgtcgccggtaacttttgccgtggccgccgacgtcttacccgagccacggcgacatccttatcgccggcgagccaatccttatccacggcgcgattttactgaaaaccgat

SEQ ID NO: 13017 - DNA, 1147 bp, Zea Mays
tggagtcattcatcaaacacatctggcaacgtagagttgtagttgcggacgactggaggaacacttatggtaaaattgagctattcaactatgatcttcatgacaacaaagaaggatttgttcgaggcgagtgcgacactttgtttgatgagcagaaacagactggtaggctcattaagaagggtatagcgaagctgacatgtatcatttagaaagagaagcaagtggtcagcgtagagatatacgcagatgtgccttgtaatgataaccagttcgttgaagttctgtctatgttaactcttttgatgaggtgtgaggatgaaaacttttccttggtagaagtgtggaatgatagctctagagcctatggtgttttaagtggttcacaaaccatcaatatggctgatctagattgtggtgtttgccttcttctgagatcaatgaatacaaagtttactaagctcgtgaccaattcagaaacaaagagaattgatgtttttgtcagattatctttttagaatggactactgctactcacccgcttcaaccaagatggccattcaaaactagtcatctaatctgaaaggatgtacaattttcaaaataaccaataacaaaagaatttcagatattatcaatacttttgctacgtactgtttttgtcgaccctctccctgactcttcatttttcctcttttttgtgcatttgaactcacctttctctttgtttccctctctcttttcttctggtgccttttgaacacactgtgtgcttatttttcagcgaaagaacgaacatacatggaaggtggaggttttaggtattctttaagaactactttctttttgaaagttgaaagggaagacatgattaaggtcttgcggaatttgagtttgtttcttttgtctagctgcatgactgtggttatggatgctcgcaaagggatatcaccacttctcttgaagtagctggaagatatcttttttgtgcggaatacttctggcaacttgagtaccttcgaaaattgggagaatttagatccaaaaaaaggaacctaattttggtttgtgacatttcaattcgcagagctgctaacgtttaagagacttctgcatcattatatttgcagaagaggaagaagttgag

SEQ ID NO: 13018 - DNA, 911 bp, Zea Mays
acaatatcgaaatatctcaggttcagttcatctcgccgccggcgaccacacgctcggattcgcgccagacgctacgattcgtgctcaacggagtactgatagttgctcgaggtagtaaatatcaccgtgtggatgaacttgagccactgtttcactctgccgccgtgtccgcctgacttacagccgattcggatgaactcaccggagttagccacctatcgaccatgtgccatgtgccttggtgtcttaccacgttgcagtagctcgtattacacacatccagtgatcgccaatgagctcgccacggtgaaagccaccaatctcttgcgacagtgctctcctctctctccgaccgccaccacgccatctcaaattcacgggccaccgctcggggatcctataaattgagcatgtcatcggttccgcaaggtagtcaagcaaccaatacaccaactcgtgcctcaaatcgtccacccgagctcgccaattcgagatttcccccaaatcggtccagagcaccgcaaagtgacctcgtcgtagccagcgtgctacaggtctgttcatgtccgctgctctcttgtttcagtacccgtatgtgcccttgatgcttctcgacccgaccgattaagctagaacccatcagatcacctggaacactttgaattgtccccgggttgtgcggtcaacgtgagcagagaagttgggagctcaaaccgtgcaattgatcgaggggaaacgtttgttagatgttgaattaggtatcagccaagttagagcatcggccattgcgtgtcttggccagtacaggctcaccggagctcggtctgccgccgtgctgcgtcatggaccaggagttgttaagaaatagaaatccggggggggggggtttgtaactgtcagtgaaacacagg

SEQ ID NO: 13019 - DNA, 439 bp, Zea Mays
agatccttatattggtggaccaggatgaagagagaaattgccaagtatatatctgagtgcgacacttgccaaaggatcaaagcaagccatttgaaggtagcaggtaccttgcagccactccctataccatcttggaaatgggaggacctcagcatggacttcattgtgggattgcccaacacctcccgacaccacgattctatatgagtcattgtggatggctaactaagacagctcatttcttgctagtgcataccacccacagggcagaaaaatatgtagaaatctatattgaccaaattgtgcgtttgcatgggataccaaggactatcgtgtcagataggggggcacctttcgtcgcacgtttctgggaatagctacagaagtcacttggaaccaatgtgataagaaactcagcataccatcctcaaacgaatgg

SEQ ID NO: 13020 - DNA, 663 bp, Zea Mays
tggagcagcggccgtcactttccggtggatcctcgacgaggtcgaggtggacgatgactcggaagtgggagccagagcgacgagctggtggagtagctccatctcgaaccaacgacgatctgcgggagatagttagccaagttaccttaggaatgcgggacgggtcctctgtccaggcccagagacagagggcgcgcgtgtcctccttcctcagcgactgaagctcgacatagtccagatcgcaggccctcgccaccacactcttggcaatgctctcgttccaagcgtgaaggggaatcccctccaggcatagccggacgtgatacctgaggtccacagggtctgcttgggtcatcggaagccaccgccgaacgcggatgtcgaggttgccgaagaggaattccctgcgctccaaagccgtctccctgtggtgctgatgggagaaggtgacaacgaagtccgctgggtgatgtcttgctacggagatgtcgtcggggcgcacgcagaactagtggcagaacgccctcttcatcctgtcggcgcttacctcaggccggtcccgccccagccaggcgacgacggcgtgggtcgagagcctctctagctctgcctccatgtcgccggtggaagcagcgacggcgaaggtttcactggggcgcgtcc

SEQ ID NO: 13021 - DNA, 313 bp, Zea Mays
ctcatatatttggttttagttgtactgagtctaaaacctttgactctagagtcttctgccacaactccagttttctatttactcctgtctagctttcgtcaactagcagtacatcgtccgaaaaaacatacaccaagagatatccctgtgacctcggtgagggcgtcacaactctagtttcctatttactcctgtccggctttcttttactcgcactacatcatctgcaaaaagcgtacactaagggatatccccttgtgacccggtgagggctcaaagccgactcttgatgtagttctatcctaatcgggaa

SEQ ID NO: 13022 - DNA, 476 bp, Zea Mays
gtttggagagagtaaggaccttatggtaatgatctttgtatacagatggactgtgggttggttttaaaattccaggagggttcttttgcataatcgcttggctgaagggggtgtggataactacttgccgttggatcacgatcgagcggtgcagattagattggcttcacctgaaagggtacgcaatataaagcctcggatccagatccaacgggtgatatttactgaagatgcgcatcaaccccatcccttcgatccgatcggacggtccacgtttagtttgaacccgatctaatctagatcgttgtttcgcggatccacgaccagaagcatgtcttcttctcctagccgaaatacggcagcacgccggccttgcccacgacggcgccatgactgaccctggcccaaatccacccaagtgcctcagacttcaattcgcccctagaaacggtatggcaatcacaagggaaaagtcc

SEQ ID NO: 13023 - DNA, 464 bp, Zea Mays
ggcattgttgctctgtccggtgactgacatcgtccggcatcaccagcttatccccccttggcggtagaggaagaggtaatggcccctttaatggtggtctagccacccacgccaagtctggccaacgagcatccaagcgcttagccggtgtagtcacctcctcctgcaacaatgccaagacacaagcagtacccagcgacgagggacgttgcacaataacaacatcacgaatatcatctctaagcccatgcacgaaacgttggacaaaatacagcggatcaacatgatgcccatatgacaccaaattatccactagagcagaaaattgatctacatattccttaacagccattgtctgactgatacgaaataaacgatgaataaacacctcatgttcatctttgccgaacctccccatcaactgactacaaagccatgcccacgggaaggactgaaactagtca

SEQ ID NO: 13024 - DNA, 1450 bp, Zea Mays
tccaaatcgaagaacacgtcgctgacacaccacctctccctcgccgcattctccactctctggtcttcgccgtggtcggtgccttccaaatccaaaaaaccccaagccctagctgtagccgtcccccaaggtcgccgagatgtcttcgtggctgcgcagcgcggtgagccgggcagtggaggccggcggccgcagcggcgtcgcccgcgcggtcaaggggtacgccgataccgtcgcgcaccacgccggtcaggccgtcgcggacatcctccacgaccgcatggtgagattgctcccctcccctttgctagcacttccactaggcgtccccttctgcttgaccaaatcctaatgcggggcaggtctgggacgcgaatcggacatgctttatttgcttcgagctgcgaattcgttgcctctgcacacgaatgcaatgcccttagctcttaagttgcaaactggagcttcagttggtgcagtggtggctatggcagccagtgcccctatctcgctctgctccgaagtccgaactgaagcttgggtgcttcagtgtgtcgaaaattcctcttcatgtatgggtggaagatcacataaagtttgaaatgataaattgacattttagtcctggttttatcacagtcatgtttagtatacgatctgaatatgtgaatcgtaaaggtctgttctcaaattgaagttttctacccgactccctaatatgcaccagttcaaagatctatcttatgctaagagtgagatggttttatacttatgctatacccgttcttgtgttgtgaggcatgaaatccttggtataccaaggaagggaagtgtagtgtagcatatttggaccattgatgagtcattgacagcctcggttggtctgatttggttctgttactgggtgatttgcagggcgttcagaactataaaagtttcaagaagacagtagcacgattggaagaggctgctgtatcatgccgtgggggtgaaagagttgaattgttgaaacgttggttaggagcattgcaagatgttgatgctgaaaatggaagttcagatttaaaggtgtctgaagctaatgacccttctggtgaaatggacactttgaaagcacaaactgtgagtttacatgctcataaattaaatctcatggctgttcatttcacaaagttatgtgatacttttgacttttgtccagtcgcttatacacatcttagctgttgtaggctttctcaagtacatatatccatcttaaatttaaaattttggaagcaggttttgttctatgatgctgatattgatggtgcacctatgaatttttgtgatgtattcttgtacagccaagcacttgaaggtattacattgtccatggtaagttagtcgaaccattttctcttagcaacattgctattgtttatttgcacttaggttattgccaattactaat

SEQ ID NO: 13025 - DNA, 412 bp, Zea Mays
agacagtcggcgcactatacactcattggggaaacattatacagaaggggtgcatcaggagttctcatgaagtgtattctcccgttcactgggaagcaacttttggaggaggtccatgctgggcaatgtggaatacatgtagcatccagaacactagttggaaaggtcttaaggtcgggattttactggccaacagcaaagaacgatgcagccgagttagttcaaaggtgcgaagcttgctaatacttgtcaaagcaacaacatctgccagcacaacaactgcagaccataccagtgacttggcctttcgcgtgctggggactggatatgattggacctttcaagaaagctcaagggggatacactcatgtactggtagcgattgacaaattcaccaaatggatagagttca

SEQ ID NO: 13026 - DNA, 734 bp, Zea Mays
gggggaaatggcgcctttgtgaagtatatgggtttcaatcaaatatatgggttccaatcaaatagtatagtggacttgggacggtggaaattgcatgttgatcaaattggagggagcatcgatatctgggggtggttgggattaggtgcagtggctgatgtaaggttaatcgaggtttggtggcttagttcaggtagttcagttgattgtttgttgtagaataatttgtatttcggctgtgaggcattccctgaggattgtgtgttagaagttgtcatcatgacttgttagcatgggcaattagttgtcctgcaatcacaaaaattagggtttccttaatctagtagtacgtacttacgattgcattatttcctctctgcactggtggcaatatgtttctggtgatcttctagtgaagctgtgggaaatagttccaggataccggttccctgtcattgtgtgtaggtgagtagataacatgccatcattgttgaacatcatgattgtagctggattatggcattactatcttatcagttgattatagatgacccagtacacggggctgttatactgtaaggtatgctcgtaattggatttctaatagtttggattggtgaagaagcttatagcttcacatagaaggaactaaaactgaaactggaagctatgtcgttgctaagcattactacttaattgccttgaaacaaaatcagcttgaacatattctcttg

SEQ ID NO: 13027 - DNA, 426 bp, Zea Mays
actcttccggcatggactcctcatcgacgttgtcgcccatctcgttgaggaaaacacccttgcctgtgcatttgtggtctgtcgtgtatttctcggtgcagtgatagcactcgccattggtgcgcttggccgccagctcttccgacgagaatcggttcatgcgagggcgtggcgcacccccgagtttcgatgtggtcgccagaggtagggcctttgaggatggtcgaccggctggtagtgcggcgtgggtgagccgacgctcgtgagcccgggccaagctcatggccgtctggaggttcggtggtcgcttcagctcgacctccgtccacaagggttcacccaggcctgcagtaaagagctcaacttgctggtgaggcgtgacgtcgtgcgctcgacacaagagctgggagaattgtcgctgatagt

SEQ ID NO: 13028 - DNA, 1215 bp, Zea Mays
tgttgcaactattctagaacctggaaaagccttcaatgctcaaaaatctgatagtgctcgcccaaagcgccttcgcccggccagtcatccaactgctcctgccgaggggaagaggaagaaaaagaggcggcttcagcgagtgtcgtgtttgaaccaggatgctggcccttctgctcctactgctgaagaagtaccagtggaactttttactggagctgaccccaatgggtgtgaccttgatgatgctgaacccaatgggtgtgatccggccagagctaaccccaatgggtgtgttgttcgtattgttgacgaggatgaggaagaagaggaggaaatccccttaattcggaagaacagtcggcgttacctagtcagtggggagagtagtggtattccttctccagctttatctgctctcgttggtctgcaagagttgtccattgcaaattttgatcaggctctcgaggatatggttcctaaagatctgctgtccgagccaacagatggtggtatgatggatgtttgctctgacattccagatgtgggattagagttatctcgagcagcgtctcgtgcctcgtcgaccttggagtgtggtcttcagagtcaagaagctggtctaggttgttccattcccatggaggtaactgagaatctttcagccttagaggtggctgctgcaaagaacccggtccccaaggatggtgcaagcggttacccagcccctgagggtgttgccggtaatgatccggctcgggtgggtagtgcgagctgcaacccagcccccgagggtgttgctgctggtgatccggctccgatgggcagtgcgggcagcgacccagcccccgagggtgtccaagcgggctccccttctcatacctctatggatgtccacgttgggtcttctcctccacattctgatggcatggcaacagcgcatgcttcaaataaggaagtcgccttagagaccggcgcacctgacgctagagttttgattcctgctggtgatgttgagttgatccccgatgacgctcttcagattgcctcggttgatattcctttgtcgagtcaccaactggcttctcatgatttggggcttccttcattcttctccaatcttcaggtaatttggcttttcccgatctggctatactcctggcaaaatactgtctttgcactcatttgttttcaatatcaggctttggttgacgagat

SEQ ID NO: 13029 - DNA, 498 bp, Zea Mays
ttttctcttatgctcaaccctttggtgaaccttttggggttttttctgaaatctttttggggtcactttcttactattttttgtagggtatgaaatgtactacaaacttctataattggcctaagtcatgatcatgtggttttcatagccttttggtcatgctcacttctagggctccaattgtccacagaggggtttaaactagggtttgggcatttcctcactatatgtgcatgataaagccaaggcatgacttctaagatgggttgcacttacttaggatcttgattcccaagtttggtgtattttgctcaatttaaaccacatgtgatgatgggttttattagtgtagtcttgagtgaaaaccctaagtaacacctggggtgttacacccacgggtaccggcgaaggcacaaaaatcccctgtgtcactaacaatctcttcaaaggcttcggcttcaccgttaatccactggataactctgtcgaggtcaccgc

SEQ ID NO: 13030 - DNA, 546 bp, Zea Mays
cgtcagtgcgccggtgtagatcttctgtccagctcgtcgcgcgtcgctgtgcttcggtgctgtgcccataacgttaggtgaggcctgttcagcggattttaaaatcaaacaaatccgtctcgtcgcctgtgcttttccaacagcgcaggatcgctgttcttctgtccttcgtcgtagcgcccatccctctgctttctactacatatgtggagccccttcgctggtgcctttgtctttccgtcggcctgctacccggcggaagcgcctttctcctctcgactccgtcgccgtcgtccgttcatttcttccagtgctaatttctcttgtctcggttcctggaactcatgatgtctgttgttcttgtagatctgctgcgtagcagaagggcagacacgcgcaggtcgtctcttctgcgcctattcgaggtgagccactccttccgccattcctctctttgttatgttgatttggtgtccatggatggtctctctgcatttttccagactggtcataagtgaactcattactgtctttggcctgatttac

SEQ ID NO: 13031 - DNA, 725 bp, Zea Mays
ggctgttggaggagggtgccttggaggcaggtgctagggcactcttgggaccattcaccgagttggagtaagtaggcacggatgccttcaactgaggacaattattcttgtagtgactggggtctccgcagtgctaacagacattggctggaggttggttgcttgcaacggagggggtctgaagggagctttgaccctgctgactgaaacgtgacggggtgggtccagctggcttgttgaagcttggtcccttgggtggaaacccaaaggatcgaattctctggtgcctgtcctgctgctgagctcagaggacctagaactttctcttgaggtgacccttttcttcttctttagccctttctacttgtatggccttgtttgagagatgcgagaagctgatgaagtcttggctggcgaggatagtcttgagttctggtcttagcccttcaagaaatgggccatcttcttggcttctgtgttgacatcgtcaggcgcatagcgagctaattctgtgaatttgtgcacgtactcactgacaggtcttcctccttgagttaattcccgaaattcatcttctttgagctggacgatcccttggggcacatgatgttctcggaaggcggcttcaaattctacccaagtagcattcctgacggtagcgctgaaggtatcccaccaggatagggccatcccagaaagttgatgagcagccagatgaacacgct

SEQ ID NO: 13032 - DNA, 322 bp, Zea Mays
ctgccgaggggaaagccgggggagcagaagaaacgacggatcatgaacgtgatgcaagctattgaacagaccccgcccccaccttcagtggaaaaaacaattatgtctgccgatgctgaagataccaccgaagccgaagctgataatcttgctaccacaatgtcggaaattgacagacttatatcagatgtggttcttgagaaagacgtagccgaagggtctcctaataagggaaagagaattgaagagacctcttcggaagataagaatttcgacctttggcacctaggtggccatcaactttccgaagaggatatatcag

SEQ ID NO: 13033 - DNA, 633 bp, Zea Mays
cagcaacttcaccgtcggcgaccgattgccgccgtgattcgtgcgacaaccggtccacgttgttctcagggtaagtgggtaacaccggtgtacgccgccgtggataagcttcaaccgttaaagaactccggccaccgtactatgtcaccacggttgtagccgataagaacgccggtgatagccgtcgtccggccttgcgccgcgtgtcccaacctcgccaccgcatcgccgtgactccctctagcttcccgtcgatcaccggagttactgccacgtcgtggaacacgtattcactgcaccgtgttcttcttcacttccgaccgccgcgcgtcagcacccaaaattcacggtcaccgccgttgtgcgctataaattgacccgcagcaagcttcgcaatatcattgcacaccctcacaccaagaattgctcccagccgaacaatagtgagcccgaatcgcgcattctccccaattcgattcaagaacaccgcgaactaacctcgccgaggccagccccctttccggtcagtccaaccctccctctccctcgtttaagcattctcacatgtctacgatgcttgctgacccgcccaattggactaagggtccactgaccgtcgggaacgcatggatc

SEQ ID NO: 13034 - DNA, 308 bp, Zea Mays
gccggcgccggcgcgttgttccgcctggaggagccgctgctgtgggagtactgagtgcagtgaaatagactgttttgctcagtcgacgagaatcaagcgcggcttcgagctgctgctgcttggtgtgtggccatctacggcctagctatgggctgtaattgcggcggtggaccagagcgcaatcgatgtaaaccatggagcagcgttggagttggaccagctggaatggaaccaaattagagccatttctcctttgcgtctgctcctacagatttagaaagcaaaccacatgtataaaagaaaaatca

SEQ ID NO: 13035 - DNA, 310 bp, Zea Mays
cggtgagctaccagacttgcggatccaccgcttgccgtcgccgtgatagtctacgaggaattgaggagtaagtacccatccatccagttcgtctagcatagagcattgtgtagcaccgatcgaattgaagtttggtgcgtcatgccagagatctgcgcggtccggctatggcaccaccgcgtcgaacttccgcgccgcccggttgggtcggtcgtgggagggaagggagttttccaccatccgatctcgaacgggtggcctacattagatagctcaccgcttcacctatttatgaccagggccattcgat

SEQ ID NO: 13036 - DNA, 325 bp, Zea Mays
gaagaataaggggtctaagcgactcagataaatactttgaagggcattaccatgacagaaggaaaaacaccgaagaacaaactaagtatcaacaaaaccagacatggccataagctccagagccctttggctaccatcatatacaataacatggcctaatttctaatatactgcatgatggaattaaaattagacttatatccctcaaaaacacaaccatttctatgctgccaaatccaccatgtcaccaggatgaggatgaccaaagaacagagcaagaaatagagtcaatgaagtggatattaatggtacaacatagatggtg

SEQ ID NO: 13037 - DNA, 286 bp, Zea Mays
gcgggggattccatatctgtgtcaatggaaggttatgtgggagatacgggagagatgagctggagacgccgatggaagggtggatggggcgccgatggaaggggagatgcggccgcgggcgggatgcaggagggatgagctggaggcagaatgtgcaccgggggtgcgcctggattccgccgttgaaggtgcggtcgcgggcgggcaggatgcggggagggataagctggaggcagaacaccgagggtgtgcacgcctatagtaggcttataattagtagtagaga

SEQ ID NO: 13038 - DNA, 1093 bp, Zea Mays
ggtccttttgttacgtatttgaagaggtatttgacaaaaacagttttgttgcaccattcaacattgatatgagcttgataagtctttaatagagtgtcattatatggaactacccacctattatccaacttgtgaccccctttaatgacgtagcggtcattgttccgtcgtctgtatgtagcaaatccttgttcgtccaggttagtttcttcatggaactcctttggataattcttcgagcatctgttatttttcatacattgagaatttggatttaatgctccgcatggaccgtggatcatatgttctgccaccaaacagtaccctaaagggtcgatgcttggatctggaatctcagcactgatgaaagaatcaataaagttggatgtaggctccgaagtgccatttgatacccaaaatatgatatgcgagtgaggtaggcctcgtttttggaattcaattgtgtagagcactgcatggaaagggtgttagaattcatggtagattatgtaatacgtggggaataattgtctggttttttatgtacggtcgtatgtgtgttgtgggatgagaacggccatacctgcagtgcatgatccaaaaatagatccatttcttatgtcatgcatcaaatcatttaatttcatatgataaactcgaactataacattagatctatcgggagggttctgtccattttcaaacatgctttccaaaatttcaggccagtttgcattgcatgtaaaggtgacaaaaaaatcaggtgggccatgaactcgacagatagttatgatgtcatggtaattttggatcatatatcttcttcctcctgtatgtgacgcaggaaggatgatagttttgccaacttcctcaccactaatacaaccacgactaatcgcatctgtgattccctgtatgctttccatgcgcaggtttttttgattgttaataacatagttcaacctattttcatcgatgcatgctctagcgtccactttagcttgacttgataataaaccgtagcatagatatggatttggttggttttttctgtaatgaaattggtagcaataatattcttgcatggtcatgt

SEQ ID NO: 13039 - DNA, 350 bp, Zea Mays
cctgaactcagaaggaggatattggatgaagctcacctttcaaaattctccatgcaccctggtagcaacaagatgtatcatgatctcagatccttatactggtggaccaggatgaagagggaaattgccaagtacatatccgagtgtgacacctgctagaggatcaaagccagtcatttgaaggcagcgggccccttgcaaccccttcccataccatcttggaaatgggaggacatttgcatggactttatcgtgggattgcccaatacctccaggcaccatgattccatttgggttattgtggacagattgaccaagaccgctcatttcttaccagtgcataccaccca

SEQ ID NO: 13040 - DNA, 333 bp, Zea Mays
gacattgtgttaactgcctcgtccatgcccctcctacggcgcactattactgctctccaacaggagttttcactgaaagatcttggtcatcttcatcatttcctgggcatgcatgttcaacagtatgcttctggcatcactctctctcagcgccagtatatgattgagatacttgagcgagctggtatgagtgactgcaaaccctatacaacccctgttgatatcaaccccaaactctcagctgatggtgactctgtctcagatcccacggaatttcgcagtcttgcaggcgcattatagtacctcactttcacccgtccggatattgtgtat

SEQ ID NO: 13041 - DNA, 450 bp, Zea Mays
cgtttttacacgtttgattcgatcgaacggctctcacataccaacgcgagtgggcacgacatcagctaatcctcaccgttcaccataaatcgacggcaatcgggtcatccccccaccagcccatctccaggcagcggcggcggtgagaccgagctccacccagggagttcgccagagttcctccccgcccagaacacagagaccctaaatcctaaacgcggacgacgctatacactgagggaaggaaggcgaagtgatggagagctcattaccgtgattcggttagcaggattccctggccacggaggtcagtggtgctgcggcggaggaccctcaccggtgaagaaatcccgagctcgggcgcccccgtagatgcaatcacaagcttcagtgtgaccccgtgaagcttcccaaccagatcacggcctccaattgcagatgtcggcaagg

SEQ ID NO: 13042 - DNA, 387 bp, Zea Mays
atgttggactgctgacagactagctcgtcggggcctcgatcacccgaaaagttgccctctttgcgatcaacaggaagtaacagtccaacacattttggtttcctgtgtttttgctagggatatttggtttcaagtcctaagcaaggtggggctgcagtctctttcccctggggctgctgtttttgttttccaggaatgatggagggaggctgaaagcagggtgccaaagctccagaaaaaggggttcaactcaatagtgatccttgtggcctggtggttgtggaaacataggaatgcatgtgtgttcgatggtgcctccccaaacagcaacattgtccttcaacatatccatcaagatgctcatatgtggggaatggctggggcagc

SEQ ID NO: 13043 - DNA, 814 bp, Zea Mays
gtcaccacatcaagtttatagatctataaaaggggaacaatttttctatagagattaagctttggttacataagaaatttggagataattagacccaaggatggcctgtcagactgcttggagtctgaaattcagactgacagtggaattgcatgaacttagggctcgaattcaatcatgatctagtgggaatttgactaggaatgctatagcaaaagtgaagatggtttgtaggctacaactttgctgcagagcattggttgtgttgccatggaaaattgggagaaaatctgtcctaaacatcgactgttaggttgtctattgaaacatcccatggtacaggagctaaatcagatcccagatgcatccccctcgccgccgatgatctttacgtcgtgattcacgctgtcgccgcgattcgtgttcgctggtgcggggataaccacgacggagtaaaaatcttggcactggatcagctcaggcttgggcacggatgaggttcaccgtacccacttgctcgtcgtgcggccgggatagatttcgccgccgttgatcgctcaccgttgtgcgccacgtgcttaaacgctagcccacgtcgctgtgaatcatggtatgcatgtccggtgatcgccggagggctgccacagtgaaagccacttatcccgagcgccagtacctcttttcccctccggccgctagcacatccttgtgaaattgtacgtcaccgccgttggaggctataaattgccgccctcatccgctccgttaggtaattgcgcaaccagtgaagcaactcgtgcctcaaatcccccct

SEQ ID NO: 13044 - DNA, 1023 bp, Zea Mays
ttttattagttttgtctattaatatctcagtaatatttttcatagttcactttgacagtaataattaatgttttttctagtgaggtgccatagtgtgacaaataaaagctagaaatcaacattcagtaattatccattaaactcattttgatacagtgtatttttcagtaattattgtttctttttatgttaacagttgcaagataaaacagttgaagaaagtacagatgttgtgactggaaacatatctggttttcctgccagccaatttgatcatagtgcatgggcatacaagggtgccatggtcaggaatatgccagatgacccgtcccagtcacaacatctcgttcaagaagatttagttgatgtatttgacattttggatgacctgaagaatgaccctgtacagcgtgatttgttgaaagaagtcgagaaacacgatgtaaagaatgtttctacatttggttctactgaaaggagcatccccctgtcccaaggtttcacgatgccccggtacgtgtgccagtaataatcagtaattttattcttttaatattgtataatagtattcagtaataaccaattctatgtcagcaggttgtacctgatgacactgacattcagtacacacctcctcagccacgagcgacacgttctcaagctcaacctctgaaatcttcgctccgtaccaatgagactaggcagattaggaaaggccagaagaagctcaagaagtcgcctaagaaagtctcccaagatgttgagcttgatgacaatggtttccccatcatcgactttgctgctctagaccgttttgatcctcctccacatcttgccgtggatgttgagagttatggtggaccagctgcctcaggttgatatggtggactcgtgtcactattcagacctgaatggcgtcgcaaagtggctgcaaagcaggcagctttgaggatggtggcagaaattcttgagaagaggattgctcacccacagtaatatcttgcaatcacggtacattttttt

SEQ ID NO: 13045 - DNA, 842 bp, Zea Mays
gaaagaagaatagcagccgcccctattgccgccgttggtaatgcccgcgcatggggttctctggctttggtcggctgcttcggttgcatcgcctagagccttgtgattccacgccggtgcgaactcattgtcgcgcctggagagagatgagattgagggagacggtggatgcttctgtgcgactgaagttatgattgcacgatggcgacatgcgcccgaccgcacccacgctgcagggtcgtgaagactggtcaggtgtggagtcctcttcctgggacggtgaccccgggttcacccaccgttgagccttgctgcgtggtcagaccccccaccattaatcatttcttcggtaagacgccatatctagttcattataaattctgtgtcgcgtagctagaggttgcggtatagttggggcgcttggttgcggaaccgtgtgtttgctggtgggaaaacgtcgagtgctttggcgtcgctgctgtgccggcgttcgagggtgggagacgccagtcgccggcgagcgcacctccgcgaacgacctgggccttttatcgctcggcctcggttggggaagaagttcccccagccgtggattctaggatgagcggtggagattagaccacgcgcataccctctcgctaaattcatctcggcagtaggatcgtgatcggagggttagggtcggatctcgggatcgtagaatactggccgttggatctagatccaatagttctcggtgcgtaccgtttcgacaaaacctaaatctaatccccgccatcggttgtcgatcagatggctcagatcctagtgtaccccttcggccatgcctatttacgtaagag

SEQ ID NO: 13046 - DNA, 613 bp, Zea Mays
gtcaaaagatcacgcgggggcgtggatttggacgcagcagaggcttatcactgcgcctgtagccattgcgacgtggccggaccgccggtgtcgccgtggaaactccggtgacctcggttgtgccacaccgtggcttgttactgtgcggtagtgaccgtggcgcacttaagagtacaatcgtggagccattacgccggtgaacgccacgaattctttgtgccattgctcttccccctctccggccaccgcgtgtatccttcaaattagccgccaccgctcaagggccctataaattgagcacaccctcggctccgctaggtattcaagcacccagcacacccactcgtgcctccaattgttcacctgagtcctcgaattgctcattcccccaaatcgggtttctgccaccgtaaaaaggtcctcggcatggctagctcgtttcaggtccgatcttgtcctctgctctcttgtttcagcacccttacatgcccctgatgctcctcaactcgtttgattaagctagtctgccctagatcgccgggaacacttatgctcatccgttgttcgcactgtctccgtggacagggtgatttagagctcaaattatgcaatt

SEQ ID NO: 13047 - DNA, 346 bp, Zea Mays
taggagcaagaccatctcgtggagcatgtggtcctggcgcgccacgttgctccggttggacacccgattaccctatcggtacgtgcaaagaaagcaacgcaacgagaaaacgcctccctcgatcgtacgcagatagcccccacaaaaagccaaaagcgatgccccgccctccattagctcggccggccggtcgctgataaggagctgcatcgatgccctctcttcctcctcatcctccaactccatccaactttggtcgatggacgcgcacggaatcgctcctctctttggactcatgtgtttcaggcccggtggaaaagaaccccgagcgattcccgacaccatc

SEQ ID NO: 13048 - DNA, 458 bp, Zea Mays
aaaacctggaaatccccgatctggaattctggagaaggcgaataggcaggtgaacacaaggagggagaggagggtggcgtcgaagtacaccgaaaaaaaagtttcggacttcgccatgaagcccgcgatggcctagctcaggttctctgcttctcgtgtctttctctccggtcttcttgcttttctgctatggatttctccctcttggactttcggccaggcttggccttcgtggaatccctctgggattccttggaagcttcggtttgccctgctcgcccctgtttgcggtcgcccttctggctggtggtgtcctttggcagatgcatcttcaagttgaattcggtctcggtctgtcatcttctccaggctgctcttggtgggctcgccaaggatttcgaagtgcttcagctggctgaccgcgtttttcgattttcggtttcctcgatggcggtggg

SEQ ID NO: 13049 - DNA, 376 bp, Zea Mays
ctcttggtgaaatccccaatgacgagaggcaggttcattttgagatgcctataaacctgagcgacgcagaaataagtgctatgctggacatgtcggctgaggattcctcagatttggtccctgctgaaacactagctgtagcacctatcccagagcctggaaagaccttgaacattcaaagatctgatagcactcattcgaagcgtcttcgcccgaccagtcatccagcttcttctgctgaggggaagaaaaagaaaaagagacggcttcagcgagtgtcatgcttgaatcaggatgccggcccttctgctcctgctgccgaggaagtgccggtggagatttttactgttgatgatcccaatgggtgtgacctggc

SEQ ID NO: 13050 - DNA, 460 bp, Zea Mays
aactgctattccgaagctagatgtgcccgacgaattcgctgcacgtttaccctgactctcttcttgtatctgttgaactatagatcgaatctgtctaggcatgttgttgcttatatcttgcttaaattcagatctaaacgcatcgaaagaattacgcactccctcagaaatcatacgcgtaatttctgtgacatcagccccatacttgctagctacagaagtatcaatcatgtgagctagctcttcgcaagtgacagatgaacttaccttcttgccggacgtgcttgccccaacggtctgtttgatcacaccattcttggtttttcggaagcaagccaacctctcattccgtttctcttccatctctcgtgcgatttcttcttcaatctcctccctgtctgcctctgtaagatcttccatcgtgactttgatcatgttcaagggatgaacttcagatttg

SEQ ID NO: 13051 - DNA, 584 bp, Zea Mays
ccccgatcttgcatataactccttgaagttgcgcggaggcttttgttgagcggttgtttttctaggcacgcgcaagcgcatctgctagatgtagcctccgacccccccgagtaatccatgtggattgcttggggatttttgcatgtaagagacagaccctttttctgtggtggttcatcacgcactgggcgtgagtccatttgttatttcctagcttggtttttatagccagggtcccgggcgcgcgcaagcgcatttgctagatgtagcccccgaataatccatgtggatttcttggggtttatgtagtgtaagggacggaccctttttctgagatggttgtcacgcatcgggcgtgagtccatttcagccggagctgggtgtggcttctagtacttgttttttcgatcgacagtatgattcctttgtgtgcgcatctccctctgagaaggttccttcgaaatccttgcggcggaggccccccctccgacctagttggtgcgtggagggggcatcaagctacgaacgagttatctaagtgagatccaaccacccttcggctgggcgtagtcacggtgagtggt

SEQ ID NO: 13052 - DNA, 349 bp, Zea Mays
gaagtgctcagccatggcagcagcagggaggggcaaggggtataaatagaagggagagagcttcagccattggaggatatgggcgccaaggctgcagagcttgctttccttagaagcaaagcaacaaacaggtggcaggtgtcactgtagcgacgttgggcggccatttttggcatcttctgcttggattcggacatgggtcactgtagcaaagatatttcccacacaatactctacaagtttgattaagggttctcagccatttgccaactagattaagagataattaagtccaaagttgctactgtcagagggttaatttcacctaaagaatagatgtcaaacctta

SEQ ID NO: 13053 - DNA, 722 bp, Zea Mays
tgaaaaaattaaaattctctgatggttacgcggcaggcttcagaagatctatgaatgtgaagatcatgaagctaactaggttgaagactcatgactaccacataatcatcgaaaaacttattcctattatgttgcagggttatgtgtggaaggcattggtcaagataggctacttcctgtttctgttttaccaggttcgaagcggctcattctcttgcagccacaaccaattctagagttgtaactagagctatcgatgaccaagggaaggtgattaattatcatggaggcattgctctttccaactcactagattgtaattcctagccaagaatgtcagtgagagaggtttggaagcttgtatgtgctcaatatatggttcaaatggccaagcgagatgttcaacacccggactccatctatttatagcactccccgtaaaactagctgttatggcaaactgccccctttctgcgcactcatggacggtgtgcgccctatggcctgatggtccaccccttactttaatggctactttccatttgaaaagtttttacagctatcagaaaaattgaggtgtggatggtccatcgaccccagccgaacggtccgccgaccccaaacctgaacaccccaacctctgcttcactagactttgcactcctgtggatggactggcacctaggcacagacagtccatgacctaggaagatgcaccatcc

SEQ ID NO: 13054 - DNA, 705 bp, Zea Mays
ccgatatagtcattgactagtacactctgttgcttttccagttggaccaggggtacacgttaagacccaactaacattgtttttaatactaatggttacctagtgaaagcatctatagagtttttgagtccatcattggggatcagtaaatttcataagaagaccaatcctttttcagctgacatttgtagttcatttgcaaataatcaattactgattagctacctgcctgctgtatgtgatatttactggcattattcataaaacaagctaagtgaggggaagtacagaaaaaacagtttggtcaactgtaaccttccagctatagagaacagtgtttggacagttcaatgttcaaggtcatcctgactacttgccagctataaaacttacgaagaaaagtcagctatcttccatgtttttttcaaatggaaaagcgtcctaactagcaaaggtcatcctaactacttgcccccaaagattccagcaagccaacttctttgacatttctggggagcacagttcaatgttcaaggcaacgacatataaccaccgtagccaatttctcttcgagctgtgctgtttgtaccaaacattttcagcctgcctagcaccagtcctcgagttgactgttgtgcagcatatgagccatcaagcaagatcggaacatcacatgttacttgcgttaaagactatgccatgcca

SEQ ID NO: 13055 - DNA, 597 bp, Zea Mays
ccgagggtgcttcagcttttgaagttgtcgctaaagacgacctagcccccgagggtggtgctgggggcgacccagcccccgagggtgctaggcctggctcctctttggctgcttctatggacgttcacgttggatcaccactggttcaatctgaggaactcgtggtgacaaatttatctgatgctctcgtcggtccggtcaccttggaggctagtgactaggatgctaggaatccactgtctattgatggagctgaggtctctccgagtcatgctttcaacattgttcctgttgatgcccctcaacaagcagtgcatcgatgcctccagctttgggtcttcccttatttctttccaatctttaggtgaatcaacttttgcttcttattgttcgtgttggcaaacgggttctcttgataatttttgaaattccagaaagtcttcgattttgtatctgcccaggtgaaatcttgtggcgtccctgtccccgaccaagtttagtctttgatgcagtggaatcctctactgcttcagacagatggtagcatgcttttggaacgatcttgattagaagctcaacataccaacctcaaacaga

SEQ ID NO: 13056 - DNA, 446 bp, Zea Mays
acccttgagttcccattactactaggttagtggggaagtctatcccccttatttcaatccttagattcggacaaatcctatcggactgaactttccccccaactaaattaactcttaaaggtggaatcattggttctatggggatgttatgtgattttgcccaagatgtagaaacaaaagaatgtgtggcaccagtgtcaaataatacttttgctggataggattcgactagaaacatacctactgccacgtcctgagcatcctggattgctttggcctctaggttcacctttccacggttgtaggcctgaccacggcctcctggtgcttgctgtggtgctccttgtcttgctggggtattgactgctggtgactgctgagctgctttctttagacagttcttcgcccagtggttttgttctccacaacagaagcatgcatggcct

SEQ ID NO: 13057 - DNA, 485 bp, Zea Mays
aaggcctctaggccgcgcatttattgcggaggaggcgcaccgcccgtgaagctggcaggtgatgtgccgcctcagcattaaatacgccatttctactccactgacaagcgatgtgccgtcttagcatttaatgtgccatgtccactccgctgatgggcggcggcttggccatcctgcaggcggtgtgcccatccgctccggtagcaggtagtacgcccatgctgcggcatacactgtgctcatcatcactcgatacgttgccagtgaagcttccgctgcacgccgatactacgcaggctacggatatcaggggaatgcactggagaccaacatatgttgatccaagtattacacctgttatgtccctatgcccgcatgtcggggctcagcacccttgtacgtgcccccttcagctataaaaggggaggcacgcaacgttacaactcaagctcactgaagctcactgaagctcactcaggctcgag

SEQ ID NO: 13058 - DNA, 482 bp, Zea Mays
gccgaaggagaccatcaccaagtctagcgaaggtgaactggtccggctgaagtatacattcagatatggggataaattcgatgaaccaaacgatgactggctaaaatgcatcgaagttacaagtgatgaactgcttggatcatattccaaggctgaagataatgcattatccatagccttcggaagtcggggaaagaagagattgaacagagtttttgatgctattggcttcgtctaccccgactaccgctacccgctgcgggggcaagggaagaagaggaaagctgctgctttggccgccccggctgaacctgtgccgaaggctgcgggcaaaaagatgaaggtacttacccaccggccacgttatattgaactggctacaatgccgaaggcaccttcggttgagctagttgaaacgaaggttgacaaagataaggttgaaaggtcaacaactgaagaggtgacaaagatgccagggattt

SEQ ID NO: 13059 - DNA, 336 bp, Zea Mays
gttgagagatatgggggtgggaagttggctctgaccgagctgtccaaaccaagacaaaaaccatgtcaagtcgtgtcaaacgacttagggttgggttcaaacttttccagggtgttctagaggtctttaggcgccattttgtcaattgggccataaggttttgaggtttggaaaaaggtgaacatgtttgatctttgaaagagggttggttttgaaagtgagaaaagtctgatttttcatttatgtccttctccttggtgacctttttggggtttttttgaactctttttggggtcattctcttactaacttttgtagggtattaagtgtactaca

SEQ ID NO: 13060 - DNA, 947 bp, Zea Mays
gcttgatccacagcattgccaagttggtgacaaagattatggccaatagattggcacctctgctgcctgttttggttcctccaaatcagagtacgtttatcaaggggacaaatattcatgataacttcctcttagtccagcaaatggtgaaattgcttcatgggaaggaggctcgtattctccttaagctggacattgccaaggttttcgactcagtttattggtccttgttggaagttctgcagcatttaggttttgcgcagcagtggtgaaacatgctatgtttgctactttccacacctctactcaggtttttgttaaatgggcatccagggaaaacattttccatcgtcgaggacttcgtcaaggtgacccgctctctccaatgttgatcattctgctgatgaatgttctgaactccttggtcaagtttgccacagatgaacacctgctgcaacctctcgctgtccaacaagtaaggcgccagatgtcttcatgctgatgatgctgtgatctttctccgaccagatagaaatgaccttgtggtgatcaataatatccttgagtgcttcgggcatgcatcggggcttcatacaaaccttgccaagagttccgggggcttcatacaaaccttgccaagagttccggctccccaattcattgcccggctgaggccctggcccttactgcagatgtgctgtcatgtcagattaaggagtttccctgcacttatcttgggctgccactatgtatccatacaccaacaagaatggggtcatgcctcgtattgataaaattgcagatcatctcccgggttggaaggcccccctaatgaataaggctggacaccttgttatggtacggacggttctgactgccaccccaatccatcatttgattgctcttgaccttccaaaatgggtgttaaaagctattgacaaaaggcg

SEQ ID NO: 13061 - DNA, 755 bp, Zea Mays
gcgcggtgtcagtgattatgggaatcagtgacagtgagcggctagataaagatcgtttttgtttagtactcctgcgctacatctgtttaattcttaaggcggatttctaattgcgccgcgtggatgttttggtcgtagtttatatttggagagagggggggggtgtgctatttgtatttgaatcctacggacggagtagtacagggctttgcaatctggttctacttgtttgatctctttcattttcgggtgcaacgagaataatacgaacgggactgttggactccatgcaggacagcgagacactgacattgtattgatgggtctgggtctgggtgagccaagagttttgaaagcgtggtcagcctacaacgcatggagatctggtccatgcaacgagaacagtcttgatggcagtgacagatgcgtcatgcgtgtgtatactactagtctactactactattaagcacggactcgtctagtcgtctgctacggtgcggagtgggactgtgggagaactgcaacatctcgtctaccacaaaagaaaatggcatggcgcctgcaatcagctttgcatatattttacgcgtccacttggtgaaagaataaaaggaggcaagcagtcagtgcgaccgctggcaattaagacccatttggtagggctcctatggctcctctgtctttttggcttctctataggagacagtggcagagactgtaattttatgaaatattattgtatgccggatagaag

SEQ ID NO: 13062 - DNA, 573 bp, Zea Mays
taaatattctggtggtggtgggagaatgatggtagtggtaatggggaatgaggaaggggtagacgatggatttgaaggggggctgtggaggtaggatgtgtcgtgactagcaaaggatcggtgttcacctgtaccttggggatgccgccgtagcccggtaggccataggaaatgtcttgcgggaaggccggtgtggatgaagatggacatgcctcgatggccgcaacacgagaggagatggaggacatctgctgggcaaaatcgcagagctgacgttggacttcacctagtgtcgcggcgatggatgccagggatggctggagggcagtggctgtcgtgctatcttcatcatcgtgacctgacatatctgataccatattgtaatggtcccgacttctgagtttgtatgagtgggtagtaaggcgaggccttgaggatcgagggcgagagggagccgtgcgcggttgagacacaatggggcaaggagcaatactcttcttagattgatctttgctaatcctcctaggtacaaactaaggactttatatagtccagtacaggcgcacataaact

SEQ ID NO: 13063 - DNA, 274 bp, Zea Mays
gttctaatgcaagagggccgagtaatagcttatgcttcaaggcagttgcgccgacatgaagaacattatccaactcatgacctggagttagctgcggtggttcatgccctaaaaatatggcgtcattatctgctggggaatgtctgtcacatttatacagatcataaaagtttgaagtatatctttacccagtcagagcttaatatgagacaaaggagatggctcgagctgataaaggattatgaattagagattcactatcacccaggcaaag

SEQ ID NO: 13064 - DNA, 344 bp, Zea Mays
gggaggtaatgcaagaggagcaccataaagagaaggatattaaggaggagcatcgtatgagccatacaaagagtgtatggataccaatacgtacatgtatggaggaggatacatataaatgaaaggttgtggaggacaaacattagtggaagggcttcattaatactaggaggaggactgtcggtgattagaggcttagtagtaggaggggcatcgttatttgatcagtaaggatatggaggaggagcatgcggataaggaaatagatgttgaattagctcatggggatgagcagaatcgtcctcttgcggatggtggatgagagagagaaagaccgtcgaaga

SEQ ID NO: 13065 - DNA, 722 bp, Zea Mays
ctcgatgagaaaggagtagattacactattttatttggttgtaggctccaccaaatcgaactcagcagtggaggcgacgaactcagcagtggaggcagaggtcgaagggagggggagacgccatctagccatggagacgccatctagcttgaccttctcgacttgttcttcggaggtggcttttgcgaaggaagaaattagaaccattaagtagattgaagggcgaggaaaaacaatgaagcaagaagagacggtcgtacagtacctgggggcggagacggtggcggattggggctagggttagggttttgggcggggcgctggaggctgcgggtgaagcggaggaggtggtcgttgaggccgttcgacataggggcggcggcagggagacgacgatccttggggacgggttcatcgatgtcgtcgtcgtcgagatcgccgcagaggtcgaagggaggggagacgccatctagccacggagacgccaaagaggcaagaggcaaggggacagaatcaaatcgaggatgcacagtggggatgggtgctcttcctcgtcagttcacacctctctcacttgccgaggagaggaaggagagggcgagaggcagcagcgagcgtgtgtgacccatgctccttaggcgctagacatgcgggggtggcagcgaggatcccgcatggttgttgggatggaggcggctacgcgcatggaggggatgggggag

SEQ ID NO: 13066 - DNA, 701 bp, Zea Mays
gtgaggataatttttaaaatgcaggttatgttgtgagagatgcatcgataggtgtttatgtgaaaagtgtaattgttttatgcatgtgatcggtgattgggatagtcgatgcgaatgaggagtatgattaatcctgttggagttacttgtgcggttgatgtcttgtgcgtaatatggggacacgtatgtgtgtgtgtgccgtggtgtattatagtggtggtggcgtaagatatttgattgaggtgtgcgggtatatgtcgtaatatggttatactcgcaacgaagaaagatgtatgtattgtgtaacacaacatttaggttgttgtcgtataattgagtgagggatgctcacgatggtcatgtgactaaagggtggtgtagtggcaaagcaagaagtaagtttagtatttttaaacggttagctgatggcacctatctgtgtcgtcacgatttctattgtatggcggatcgatgctttgctttgtcaatcattgcattccatgcccattggataaataaatatcttgttgatttattagaggtcttatatgagcgttatcacagcccaataattattggaggcgattagcgttcataagtcggtcctagttaaaattaaagaacaatccgataaaatatacacataagtgatttaggtccttcagtagcaaatgtagtcttatggagttttacgccatgtg

SEQ ID NO: 13067 - DNA, 391 bp, Zea Mays
cacaggtcacttaaaatggcacatttttgggatctaacatagaggcaattacacatggcgtaaaactccataagactacatttgctactgaaggacctaaatcacttatgtgcatatcttagcggattgttcttcaattttaacaaggaccgacttatgaatgctactcgcctccaataattatcgggctgcgataacgctcatacaagatttctaattgatcaacaagacatgtatttatcccatgggcatggaatgtgatgattgataaagtgaagcatcacattgccatacaacaaaaatcatgacaacaccgatggatactatccactaaccgtttgaaaaacttaacttactcctcgcttgccactacatcgctcctcaatcacac

SEQ ID NO: 13068 - DNA, 701 bp, Zea Mays
ggaaaaccaaacttctcagattgtggaggtgaaagaaaaaaaaaataccaataaggacctacagtacactgatgtggctatgtatgcatgcaagattattacattgaaatagctgggacctaggagtggctttggaacacgaaagaattgcacaaggccattgttaatttgaaaactgtgtgggtcagactagcttttcgtcacctttctttgcccgtcctccaatggcagccgtgactcagactagcttattttgatagtgtactagacaggacctttgaaaattgtgtgtcctccgaactttttcatcacctttctttgctcctctaatccaatggcggccgcaagaaccgaaaaggtagcatatgtatgtgcccctacactacaccaacacacgaagagaactacgtagcctacccagcatgtcttcctcgtgcttttcgttccctcagtgctcgtcaaagaatcaccatgcccatgtgaaagggaaaccgatcgaaaccgcaacagatatagctgctgacctgtcacgtaaacttgggcgacggttactcctcggatgccatgccagtgttcacgttcatgccacgcctacaaatcgaccgaccaaggtccaagctgcagctagcgcacgtacaccaccagcaccatgccgccggaggccgcctcgtcaacaggccacatcgtcgcccgcatccggc

SEQ ID NO: 13069 - DNA, 303 bp, Zea Mays
tcgacgctagatcctcctccatcatggcaacccaatttaggtcaccatcggcctccttcaaggtcctgggttcctccacgctcatgacatgcagctcatcctcctcgtcgtcatgatgcaccagcccaggtgctgcaccaacgatgtgaatattgtccagcgtccggtaccgaagctcccccacatcatcggcgtcgaagctcgggtcgatggagagcggcgtcgcgaacttgagctgagtccctggtggcggtggtgttgcaacacagggagccaccgatgtcgagcttggttcagcaggcg

SEQ ID NO: 13070 - DNA, 3012 bp, Zea Mays
taaatgtcttcaaaattacctgcaactgaataatgaaaaatgtatatgtcttcacatactgcacattataaaaatcaccaaactgaagtgctgcaacctgcaaggtagctagaaatataagagagaattgaacacagaatttctccagttggtcccaaacgtaagtgtcaggttagtgtaatatatatatatatacacacacacacacaacacggagctcccaaatactgtacaaaagaaattgtttccacatttgtcgttgaaattacaaaatatggctaaattagacacagaaagcctaggtgtccttacctctgttaggcattgaagtgtaagattccgataagcagccatagggaagaacttcagtaatgtctccagctaaataaaaaaggaaaaggtaagggccagcattttcgtaggcacagttggtatcagtcactcacaaagttcaatcatcaacataccaacggtgactcaaagatgaatccaacagggatccatgataagaaagcatggagtgtcgccaatgtagcacggatgagctctggcctttgcgttgcagataggacatataaacatagctcgtgaatgagccggaactcactgaacgaagacaataagatatcagctaaaacagaagtaacttttttgttaaaacatagattactgaataaactataaaacagaacctccaacgtagccaagaaaatatagaagttgacaacaaacccacctgttaagtgacgacttcagttctttgatcttttgttgtgtcatttcacctcttgagaagtcaaaaatttcttcgcttagaagctgcatgttatcaaattggatactcataaccaatccagtatgtaaattaaagatgccgacgaaaatgtcaaaattgaaaatacatagaaaataacttgccttcaatatagccatgcaattttcacatagagtttcactactctttgcagctgcaacaagatcaggtatgaaggatgaccatctggcaggccactcatgtttcagtacctattacgttgcaaggaagcaccatgagaaataaataaatcaagacacacagcatcatatcaatgttgggaacaagaacatcaaatttttcagtgcaaggttaaaaatgatctggtaaactagctgccaaggtgaagaaaaaagaaaagctaaatgcacagcttacctgcaccaaaataatattgagtttattgacataaagcctctcctgccgaaaggtaacttcattgctggaaagctgtcaacagtacaaaaagggcagtagcacaaaaacaattaaatggatcagattttattaattgataagtgtaatcaaatgttaataaaatgacatatactaatccttgcctgcacaataacatcagatatgtaattctttatgccatcacgttgatcgacgggcaatgcattccacctgtacttgataacactttcaagtatctgcatgaatgttggtacaaaatcatcgcatgctaaatattaaaacactcgaaccgcacgtgcagcagttagcccactcagaaactatcttccatttacatcattgatatgatttttgcctcacgttcctatgctagagaagtagagagtagaaccttagattgaaaaaaaataaagtagaaccttaaaaggctctgtatgcgacaattgcttagccttatttcatggggtacagttataactaatcttgaagataaagaaattgcaccttgtagtgataaacagagaaagttatcatgatacagatagccttgattatgcagttccatttgcggctggacatagttgcaaacttgcaatcatattatggaagtaatggaaacaggagttgaccttggtcagccatgcattctaaggtaattatgtgagtctgtagatatgatattgactgtacaagcaagccttttaagttcaagactggggtgaaaattgcatgtagtattttaaaccaatcaaaccagggcataaacatagcatccatcctcccttttgagcacaagctaccccccccccccatgtataacaacaggcagcagagtggacaaacttacttgcaatgcaaagaacttggtgttgaggttctgggaattctgcagaatgtgtacaacttgtagccacatgtctgggttgttttgtaggtcacgtagtatctgatcagcggcgctcctctggaacgaaaggcagcagatatagttatctgtgttcaatgccaaaaccacgaggctagaaaacaaatacacaaaaactagcaatgttaggcctctggtgacgagaaaggaccagtcagctcggagtgggggaaaccccgactattcacgtttgctttaacatttagtcattccgaaggtctagatagggtaagtgtgaacggagaaggataaggcggcggcggcgcctcagagacggactaacatatggcacgccaaaccatatcgccaacagaagaaaaaaccctaaacactaaagtatcctagtttagcaaaacaggtaccattcgcatttagcaagccgagctcggatagactcgaagctcgagcaaccgaagtaaaccctaaagtcggtcgggggcaggtaatccgcggatggtccggtggaagagattacctcctctttagatccggtgccgtagaaggcagcgacagtagcatcgaggagcgtcacgtctaccggctggcttagatccctgagcttctccgccatggcggcagcggttggagtgagcaggtgaaggaagcttgtggaggcaggggatcgtggggagcagggaaggcaccggaggcgcgagaaggcgcagccctagaagcagcgagcgcggcgacgctagcggcggcggcggcgggccggattcttaccggaagagggagtcgggggagaagaaagaaggcggattttaatttttggttttggggggtttaagagagagaggggcagagctgggttgggacgcggggagttgctgcaaaactacgccaacgtatggtatcg

SEQ ID NO: 13071 - DNA, 935 bp, Zea Mays
aaataccactgtgcagagagggagacgcatgtagaacaagctacccaccaatgcacaggcacacactcaatcgacgccacaagcagaatataaatgcacacacacggatacaaaccgtgggagcgagggactcgatgatgaaccttgagttctccctcccgcgccaacccttgtccttcctgatgtgtgtaggcaatctgtaacgctatcctcttttcccgcgcttcttgctgctcagtacttctggctccccgggaggtttgtagtgtgtataatggatcctatctccgtctctatgtttgtcgatatcttctttcaccttgtcaggtagggagtgcccgatgagctcaagtttcttcaacctcgtaaggttctcgatgctggagaaagtcttcatttcggcgaaggcccacacgagcttctcgagctgaggagaagacccagcctcgaatttgatcccggtgaccgtagggcatctcacaacaagaacattgagtcttgggaactcgtccttgttgacgtcgagttggcttccatcgtaggatccatgtgagagcaccaagcagcgtatgttttccatccttgcgagtgcccgcagatcaccttgcttcagcattgtaccgtgaagagtcaccttggacacttgtttggcactggaaagcaattcgggaagcaacacctggttggtggaggtggtggtttgggtaggattggcagcgctagcagtggtggtagtgcgggaaggggcagggttacggattgtgggggtggaggaggggacatggtcggtggcgacagcggaagcggcagttggggcagagggtgcaggataaggggctgttgcggtggaggggacgggggcgttggtgacaccagcagcagtagcagggtcagtcttgtcgctgtccttgttacatttattcagctcaagctcc

SEQ ID NO: 13072 - DNA, 646 bp, Zea Mays
caatttccagaaaacgcaggggctacggtgcaagactccacagactcagtgaatagcgccccgggacggcgggttggtttattagaaatccaggggcttttatgcaaaacgctcagcgcgaaggggtatgatggattcgtggccgcaggatagaaatcggacggcccaaattaaaagtcggcatcataactgaatcggtacgcgatgtccgcaggatcaaagatccacggtggtaaacccccctgggcgaaacactatgccccggatggatccagcccgatcatcagtcgatcaacggcccacggtgactctctcccagatctaaacccatccctacatcctgaatccaacggaccagatgactctgttctctaccgacgccagagcgtgacggcgccgcccacacgcgcggcggggccatcgccggagtacgccaaatcgaggccacgatgctccccgcacgcaacaaggccctgattcacaatgaggagggtgattagaatacgatggagctactcaccgcagctggagggcaatggagggagctggccacggagaagagcggacccgcggcggacttcagtcttcggtgagcaatcgccgcggcttgggacgagcttccttcacacggactccactatcagct

SEQ ID NO: 13073 - DNA, 1028 bp, Zea Mays
ctcacggtgaccacacaatccggggacaattcaaagtgttcccggtgatctaatgggttctagcttaattgttcgggtcgagaagcatcaagggcacataagggtactgaaacaagagagcagaggacctgaacggacctgtagcacgatggccacggcgaggtgctcacgcggcggtatgtagaccgatttggggataatgggcaattaggcagctctggtggacaattagaggcaagtgctggtgcgttggacgcgtaattacctagcggagttccctgaggcttcaatttatagcacgcaaaggtggtggtgctcaattcggaggagaagtgccggtgaccgaggagaggggtgagtcactacggcgatcaaccgtggcgatcgcagggcaaagagctatggcggtcactaggcagtcactacagctcacgatgacgcgataaatgtcctaaggcatggcgtccccatggtgaatggcgaacatgccggtgatggccgctcggccatgtcaccggtgcgaacagatgaataatcgagcgcatagtacttccaagctcatccgcggcaagatcttttacccggggatcgttatccacgtttatccaagcgtgaatcgcagcgttggcacgaatccgcgtgcaagatcaccggcggcgaggtgcactgcacctgtgattatatccagtgcactgtaccatcagtttctcattcagtcatcctgacataccactttgcagagcctagatctcaaattttcatgtgagtacttactatccatctttaacaaagttgtagctcaaccaaccagctacaaatcgactatagtaactatcctcaatcgagcactagatcctattccaatttgacccaaaagtcttgccaatgtcactagtgaccttaattcagttatgagtgtgacttacagcacaactttgagctcatttttcttcaaactttgtatgtgatcatagcttagttacttaagcaaagttgcactcctattatagctctacaagtttgatgtg

SEQ ID NO: 13074 - DNA, 349 bp, Zea Mays
ggctccgaggattccccggcgggtaagggttgcggtagtattccttgaaccaatctgacttctcgccagcaactcgctggggtcagggacggtgcggatgactccccggtgcagcggcactcccccacacgacggagctggttctctctttcttcgatgacggcgcggcgagcggggagtaagcgagaatagggagcgaacgagtccctgggcactacggttttatatcccgcagggatggtcacgccgagctggcggattacgcgcggcgatggcggcgtccgcagcggctgcgtggttacggcaggggaggacgaccaacagtgctctagagccgatgatagctggg

SEQ ID NO: 13075 - DNA, 545 bp, Zea Mays
gtaatgtaatataaagctgtatattgtctattgaacacttgagggtgtaattctttgatctaacaagaatgtgtacagcttttccccagtttctcttaagtggttttgtagtcaggttatgtcatagttgccaatgtctttttgcttgttatggctttgcctctcaagtggttttgtagtcaggttatgtcatagttgccaatgtctttttgcttgttattcacatgtgacgctccataaatttgactgctcagcataagaggttttgatctggttaaattgccaatggaaatgggagtactgatattcaactcgtgtattcactttttgcatatggttgtgaatgtgcttctgatattaattcttccttgacttaggagatgatgcttcttgtattgggcagttccttggattaatttagttatggttgattgatctattgctcatatagtcatatttcttggcacttgattgatcttgtcatgtttaacttggtcatccaacatgattctgggacaaaaataatttaaagaacaatgcaatgg

SEQ ID NO: 13076 - DNA, 502 bp, Zea Mays
cgccaggaacgaagaggccgacgcgttggctaaagcagcggccaagggcgaggccttgccctccgacgtgttctaccacgtcatcggcacactagctgtccgcaacccagaaggcttacaaataacttaggacgccgaaggccaccgcatcgtcaacctcatcatggccgaagattggtgggcctcaataactctctatctgcaagccactaccatccaagcgatagcaatgaggccaaacgactaaagcacagaagttgggacttcgcattagtcgagggtcagctgtacaagaaggggatcagtctgcccatgctgaagtgcataactgaaatcgaaggcatacaaatcctctgcgaactccacagcggaacttgcggctcccactcaggacccagggccctcgctgccaaggtgattcatcaaggattttactggccctcaataatttgtaccaccaatcgagtcacgaggtcatgcgaagcatgccaaaagttctccc

SEQ ID NO: 13077 - DNA, 926 bp, Zea Mays
gttagatgaggaagagtgtgccgcccgagctgagtaggcatggatgggagtttcaacctttaagggagagtgactgggtgaggtgagtatgatggaaatccataaaaaggtgctcggagagctatagagatgggacaacaatgttcttgggagatttagagaagaggataggtgaggtaaagagggagctagaaaattataggaggagaacaagcatatgtcaggaataggtgaacccggagaacatgtcaggaacatgtgattccgtacctcatggctaaccaaaagagggccggagcacgttcttccatgcgtatgcttcagacaggaaaaggaaggaatcatgtgaggaaattgattgatgatagcagatggtgaatctcttgaagttgggggcagggaactttgcgccgggttttaggtgctccgcaagctggaaaccttggctgtccaaatgagtctggaatgggtggcgcaacttggcatgccaagaacaagtttggagacagatgcaatgcaacaaccttgggactagctgctcgatggaggtgtggaccgaagcccaaatggtttctcgtttatgttactatctaattctgtgcattgttcagtctgtctgctctagattacgtaatagggtagcttagcaggcagcttagctgcccatggggcttgtaacttgcagcctgattcacatgtctacttaagccagccccccagacttttgtaatgtctcgatggtaatgcgttggcttgtcggtccctgagtcattcatccacttgtcaacgtataggagcatatttggggtcgtctgggccatggcccatggagtggaggcccaggcggtggcggcggctcactctttgtctctctcccctagtagtagtccccctcggccctaggactgggcaaaaaacccgttacc

SEQ ID NO: 13078 - DNA, 1020 bp, Zea Mays
cttggggtcctagcctggcaatgtgttgggagagatcttgggcgaaagacttgacgacaatgatgcctgtgggcgccgcttcccatgttgagggtgtcgcattccccagcactatctgtgaaacccgtggccgcgcggcgcgtcgccgtcgacgtgagcgatcacggtgatcaccgaagagaactagaggacgcaaggtaagtggttggatttgtttttgtctattatttctttcgtgaaaagcaagtctgcagtttacctcaccttaaacgatctagtcacgcaggccaacatggccaggccgacacggccaccatcacacaccaacggcccacacggcccaccacacccagcaattcaaaaaatgaaaaatactacttcctcccgcgtccactctcgacgcctgcatccatcacgcgcgcaccacagtgctgtcatcttccccaccttcaagagttgcattaggggtatgcagtgatcaaattgcctcattggtggtagatgtgtaggaacattaaacaattcagcaaactcttgcagcagcaaactgaatatcagcctcattaacttgactgccagaatcagcagtggattccactagcaccatggcccaaatatcatgtccagcaagccatttctgcacttgaagtgctgatacctcctgaatggttgaacccgggtggacatcatccccatataaggtcacctcctgtccaccatcttgaaactgcagaaccttgtgtacccaatcacattccatagggctatgttgcatcaaccaatcataacccaatatagcatcaaaagcttttaaatgcaatactctcatgtcagtatgatagaaatgaccatgagaccaccattcaacatttctaaccatagagttgcaaatcattttgtgtccactggccaccttcacttgtacagttgggcactcttccacctgcaactgtaattgtttagtcatgtgttcactgatgaaagtggaggaactgcctgaatccaccaacattagcatca

SEQ ID NO: 13079 - DNA, 324 bp, Zea Mays
tacactgatgtctccgtcttcaccagcgccttctagacggagctcttttgtctcttgggtgtcaaattgcgaatgaatattgccttccacccgcagactgacgaccaatctgatctgaaaaatcacattttgggcatccaccttcactgcctcgcaggtgatcgtccacgtagttggctttgttggctgccatgggctgcatgctgctacaacacctaccagaccgcacagcggacgacacccttcaaggtggtctatggctgtgagtcgctgacgcctatctcctatgaagccggcgaattcaaggttcctgcagcggatcac

SEQ ID NO: 13080 - DNA, 560 bp, Zea Mays
atcggacgaaccgcagggcgtcttctttctttagctgcgaacctggaggagcaaacgccccggcggtggtgccccgcaagtaggccacacatcgtctgattcccaggtgttttgtgcgatgatcgagcgacccactacaatctatatcccgacgataccttgtgtgaaattcatagcggcaaagatagcggaaagactcaccacgcagagatgaggaagaggctaggtgaaggtgacgcttcaccacacgacacgagctccacgaaagatcaccgccaaggaccccccctcgcacagatggtttcgtcccgcccgaagatcaccaccagcagtctcccaatccgcgagcaatccctcttccctcttggctcctcaactatctagcgatggttttccagcgtaatcccagaagccgacacgtacggagggaggagcggcgcgccccgctttatctcgccttgaggtgatgagctagggggaggtggtccgggtatccagcaggaaacgcggggagagtggttgtaaccaactcccatggaacccgcgagcgctggtagccg

SEQ ID NO: 13081 - DNA, 537 bp, Zea Mays
agttacagagacgaaagtgttggtgttttgacctgaggatcctaccgactagtgattgaatgctgcgtgccctggcccatctgtgtgatgcaaaaagacacaagtctttatcctagttcgggcaaaaaaaagaccctacctccagcagacggggatgagacttatattacctgcacctaagtgcttgcagtagggaaggtggccgaggccgagctcgggctagacaaagtttgtcatgaggccaagaccggcttcgggcgagacgtagttttctccctagggccaggtcatcctctgccgtatgtgtgtcccattcggagttggcagacgacttgggggacagtagccgttgttgggcatgcgtcatcgtagttggtgaaagcggacgagaccgcggtcctgtcgctcctgttgaccgtggcatcacgtggggtagatatgcgtattgaatgctcatgtcccctacggcctttggccgaggcctggctcgaggttgtcctccttgcctgagacaggctcggacgaggtgaaaacatc

SEQ ID NO: 13082 - DNA, 407 bp, Zea Mays
ctatccatttagtgaatttgtcgattgctaccagtacgtgagtgtatcctccttgagctttcttgaaaggtccaatcatatccagtccccagcatgcgaagggccaagtcaccggtatggtctgcaattgctgtgctggtagatgttgttgcttcgacaagtactggcaagcttcgcacctctgaactaactcggcggcatcacttttcgctgttggccaatagaatcctgacctaaagaccttcccgactagtgtcttggacgctgcgtgtatcccacattgtccagcatgaacctcctccaaaagttgcttcctagtagacgatagaatgcatttcatgaggacgcctgatgcaccccgtctgtataatgtctccccaatgagcgtgtagtgagcagactgtctg

SEQ ID NO: 13083 - DNA, 367 bp, Zea Mays
ggctgatgcccttagcaggtccggggttccaaaagtggccatgcctttgatcgctgatctggaccatttggggatcactttgtgctatgtcggcaccgctagcgaggagactcggatgcttattcaatcctccctcatggagagagtgtgtgtggctcagcagcaggatcgattattgcaggaagctcgaaagagggttggcaatggtaaaccctgggagttcaccattgatgagaatgatttggtttgtttcaggggccgcctttgtgtgcctcagaaatcagaggtgaagatggatatcttgagagaagctcataaaacgccttacaccgttcaccctagcgaaaccaaaatgtatagagatttg

SEQ ID NO: 13084 - DNA, 575 bp, Zea Mays
gaaaaggggagcgtcgtgcctggctgggtgagtgagtgtctgagtgacagagtgagagactgagagccagccacgcgaagcaaagcgccacttgtccttcctgcgagcgaggtggtaaactttactctaaccaggtgacatacgtggcgcgggggcagccagtttcgttttcagcacggcaacagtacctttctaacgtctctgtctgggaagagaaagagtcagagagagagccgatcacgttatctccatttgccggccatcacagaattcgcgaaaagacgtgcgtcagaacgtgtaggagatgctctttcgttcgaggagagggggaagctgatctgataagcacggtagtagtactagcagacgtgcacggtaataataagctgaagacaactactccctccgtccggttgaattaggcgctctagcccaaacagtatgtccaatgaatttgtcgttttacctccgtcacgccgttcgcactgccgccgccgctgcgtcgttcctcatgcgccacatattctcgttcacaccctgattgcgcaccataaaggaagccaaatcccatttcg

SEQ ID NO: 13085 - DNA, 426 bp, Zea Mays
gctaaatccgtcctgcgggaaagttcggccgtggcaaagcgtccagagtggtcgggggcaactcccgaagctgtccgtgggcgtatcagggagagctggtcgaggaagcggcctgaattgctcaccggacttcattcctccgccgctgtccgcctcacgtcgcggccggcgtcaccgaggcatcgatcaccagtaatcagcccatccttgtcttcgttatgcaatgcgcattgtgtagctgcgatgaattggaaaacgggggggaaggaatgcgtgattggtgtccgccggtcatgggtccgccgtcgtcccgccgcgggctagttggttctggcacgtgaaggcatgggggtgctcgcgaccgtcgatccggtcagtgacgactctgattagatcttcgcgtaccgcttcgcggagttactcgtg

SEQ ID NO: 13086 - DNA, 570 bp, Zea Mays
gtgtgctcgacataaatgtttggtcgttgtaggtagaaattgtcttggcttaagtagagaggtgatgacatgccgtaagcagtcatcacttcctctataattataagtcgagtctatacgcgttaggcgttccttaaattgtgcttcacaaataagtgtatgattgtgtttatgacttgaatagatgtcttcgagtgaactaataggttcctaaggcaattatgtgtaaggtgtttatagtgacgctttatcccgaaaggtgttaagtctgcgcataaataagagataagtgtattttgtgtagtgtggattgattttgagtgcatgtgtcgcaagaaatgaattagtgcgcatataggcgatgaatgggtgtgatgaaattgtgacatgccttcatagtcatcatgtcgtatgttggtgacctaactgaaggtcgtagagaagggtcgattacctatgtgttattattgtcaccttgcgattctgtatgaattgcaatgtgaagtagtaggctctctatgtgatgctagatgtctaggtagactttcgtgaattgtggtgctcggaccg

SEQ ID NO: 13087 - DNA, 447 bp, Zea Mays
tggacggatcttgatgaggaggcccgacatcgtggtgcctgatgatattgtcgctgatgttaaggctgcacccgatgcttcgagtcatcattcctcttctgttgctcctgtgaaagacattactagcaaagatgttttgatgcaatgatgtcatgcaaaacatctgatgtaatatgaaatctatgtatatgttatggttatgttagaacttgaatatttcgcgaacagggcgccagaatatgcccctagtgccagcaagtaaaacgttctttttctttgaagggttgactattttgctattagggtatagcgatcaccctgaacagtcgtgaaagcaagtgcacaatgctggttttgagtatattcccgattcaggtcgatcgcctagttagtaggacatagtggtcgacctacggtaagtggatgtgaatataccgcaccaactta

SEQ ID NO: 13088 - DNA, 489 bp, Zea Mays
caattcttgtcttgtcgtgtctgcaggactcaagggcagattgcaaaccctcacaaagtgcacactgcgtaggtgcaggggcactcattgagctagccttctcaagcgaagataccatagcgtctctctgtgctagctcagactgcaagccaggacaaacggtacacgcacccaacaggatagacctagatcccaactcatcacgctcatctagcaaggtggagtacttggtctgcaaagtggcgatgtttgacatgtgtagagcgcactcatcacattcagtctcgtcggacacgtcaactgaagctctagcagactcaagttccctaagcgtgctctcgtacttggatctaaactctctcctctcatgagcagcctgcctaagcaacttattctgactagccagagcatcgttcagctcttctatctcagcgacgagatcatcggcggaaggtagtaccttagaagtagtgtcatcgccgatgtctt

SEQ ID NO: 13089 - DNA, 624 bp, Zea Mays
gaaagcgcgaacaacggacaaatcgaggtgttcccggtgatcctatgtgttctagctcaattggttggaccgatgagcatcaagagcacacaggaatgctaaaacaagagcgaggagggcatgatcagacctgtggagagctggccacggcgagctcacacactgcggtgttctggacagagttgggggaatcccaaattagagctctctggtggacaatccgagacacgagtgggtgcgctggatgcgtgactacctagcagagctgatggcacgctcaatttatagggcccgagggcggtggctcttgaatttggcatggcgcgctggcggccagagaagaagaaagtcactggcgcaaaggatgcatggccttcaccgtggcaaggtcaccggcgacgaacggacacacttaagacgagttactgcgacgtggtagagcacctaggcacgtggcatccgatcggcaggtggccaactccggcgagcttatctgaaccggccgtaaggcaaggggggtacggcggccagcccgatgaccacgcccaggtttatccaacgccaagatcttttcaccaccgtcaatatctgcacatcgagcgcacaaatcgcgacatcggcgag

SEQ ID NO: 13090 - DNA, 342 bp, Zea Mays
gctgattttattttgaaattgcatgcttcaactaaagagaacatagaaaagatgaccgagaaatataaacttgctggtagtcaaggtagtaaaacttgaaccgggtaatttagtgtggttacatttacggaaggatagatttcaagatttgagaaagtctaaattaatgccccgtgctgctggaccatataaaattttggagaagattaatgacaaggcatataaacttgagttgccccccgagtttgggattagtcccacctttaatatttcagatttaaagccatatttgggagaagaagatgagcttgagtcgaggacgactccacttcaagaggggaa

SEQ ID NO: 13091 - DNA, 717 bp, Zea Mays
gacggaatcagatgaatcctcagccaacatgtccagcatagcacttatctctgcatcactcgggtttataggcatctcaaagtgaacttgcctttcatcattcgggagatcaccaagtgaagcaaccagagcctcgacttcttcgggagagggtcgcactctaagacccaggccactgtcgctagcaggaggattgggcacaaaactgaaaaaaagtcttagaaggtggcagattccaagcagaatatgcaaccggagcaccaatattcaacactttgcctctaagaagcatctccagtcggctcaccaaatccacaacaggaatcctcttgttggtaacccaggtagaatcagtgacaccactatacaaataagccgggtacgctctatccttcagtggctgaatattcttgaaaacaaagtctgcaaccaccgcttcagcagtcagacctctctccttcaacaagccaatttcagcaagtagaaccctggcttcggttatctccaagtctgtggggggggggattcagtccaactcgaagcacggacatccggctgtctccccgaccgagggggagggtcttggcatgattctctataataaaccactccaagcgccatcctttgatgttgtccttgagtgggatgtcgaggtactctgtcttcctcccatggcgcatctccaaactcgcaccacccacgagctggtgctgcccc

SEQ ID NO: 13092 - DNA, 759 bp, Zea Mays
cccgagttaagtatgcgtgagcatgtcacaccgccttaagtcgttgccgacttaagtcgattgctccgttagcagggcatagtggtcaccccgagttaagtatgtgtgagcatgtcgcaccgccttaagtcgttgccgacttaagccgattgctccgttagcagggcatagtggtcaccccgagttaagtatgcatgagcatgtcgcatcgccttaagtcattgccgacttaacccgattgctccgttagcagggcatagtggtcaccctgagttaagtatgtgtgagcatgtcgcaccgtcttaagtcgttgccgacttaagccgattgctccgttagcagggcatagtggtcaccccgaattaagtaagcgtgccaattgacagtgaacaatctgagtgcctttgaaacctttttattgatgatatttttctcaatttacagaatacatcatcgttccgagagcctccgtgatgtagctatgggtagaacttcctgagatgttctatgttccatgagttcccaatttctgttccatccatctgagtgaggcgatatgatcccggccgagtgacttctgctactatgaatggtccttcccatagaggtgacaatttatgccgtccctcccccgttagaattcggcggaggacgagatctcccactgtgaaggatcaacgccgtatggccttatcatgatagcgcctcagagtttgctggtatcgcgctgattgaatcaccgtattcagtcgctcttct

SEQ ID NO: 13093 - DNA, 389 bp, Zea Mays
gaggaattcgagaaggggaaatccgtctcatcgaagataacacgacgggagatcatgagacattgagtggtgaagtcatgacatcggtacccattgtggtcgagtagtaatcaaggaagacgcgtcagatggagcgaagaacaagcttatgaggagcgatggcagaaaggttggggtaacacgcacacctaaaaacgcaaagatggtcataggagggagtggtgccaaaaagagcaaagcggggtgtgggggcgctaatcgtcgtagtagggagttgattaaggaggtgagtagcagtgtgaatgctcttagcccagtaacaagtaggaacaaatgcctaaaagagcaaagagcgcaatatgttgtcgctagtgcgaatcatgcactca

SEQ ID NO: 13094 - DNA, 676 bp, Zea Mays
gtgtggtttgggacctcatccggcagcaccaggaggagcagtcctagtagctacgtgcttcgtagaaggacccgctgcatggggacctcagccctaggtgggctcaacgacgtagccctgatgaggacccatgagcatcccttcttagggcctccatgggtagcgtctacttgatagggcagacatcgttaccaatcacctttagcaccatcgaaaacttccgcatggagtacatcgacttcgacattgccaagctctacctcccctacaacgccatccttgggtacaccatgctctacaaattcatggtgaccgcccactatgggtatcttgtcctcaaatgcccatatcgtctagagtcatctttgccccaaccgaccggctcgacacggtcaacatcctagagtctagagaggctttagaccgtctcccacgacatcacaaatgatcagcctcttgagttggacctccctcctcaaggaccaccgtctgcatcagtgtcgacatggtagggaaggagggagttccttcctcctcgtcccatcaaccagcaaccagctcacctaaggcgctctgccacacctcctctagctccccgatgtcaaaaaccgcagagcaagcccctcatagacaatgcgcattagggaccgcatgagggtcaaatagaaaagtgtgc

SEQ ID NO: 13095 - DNA, 332 bp, Zea Mays
gcaggggatgggaggatgggtggatgtcgcccgtgccacatggcttccatgtgtttttccttcccaaggcaagggaatgcaacgttagtttctcgtgattgaactgacgtttcggctcgttttctgcctgcgactgcgactgctactgctgctgctacggcccgttgaatccgatgcgaaccgcagagtcagatttgcacgtcaggctttgtggacgaacgagcttctagaactgttcttgttcccacgggccacggcgttccttcccttgttcccccgcgagcgcgaacgtcccgtgctgtgcctgtgcgcgcgagtttggaagaccatgc

SEQ ID NO: 13096 - DNA, 492 bp, Zea Mays
gagacttcgtcgcgtatggagggtgtcgggtgtcttcctagtgcgggtggagggcataggcggcgaagggtggtggggaaacatagtgtgggtgagttttcgcggagtggcaagcgccgtcgtatgggatggagcgtggccgtctccgtgtaaaccgggttgataaacaaaaattgttgtccttgctggctggggcgagcataggccagtgggatctttgaaagctttgtgagggtgaggaattgaggataatgctgtttaattacagggagatgggtatcattctgaaggttgagccgatgtaataggtgatgccctcgccgtgtgtatgtaataagcgatgccctcgccgtgtgtatgtaattgtaatttgtatggtgatgtggcctgttggccgtatttgtacgcttgtattggtccggctgcgtacgtgggcgactttgtgcggagtgtctttgtaatgagagacttcgattaacgttattccggctg

SEQ ID NO: 13097 - DNA, 643 bp, Zea Mays
attgctgcaacttccggtggcacttttggatgcagccggtcgtataacacatgcacttcctcatgcagagtgttacagtatgcttgtagattctccagagctacacttagttccactacccgggttagagcatttgcctcgcaatcccaggcaaaagcgcgcgaatttacgacccaatcgatagctgtgtctcgttccacgatttcctgctgcaagcaattaacctccgctgatagctcagcaatgcggcggctatctcgcgcacgctccctatttccatggcgcagttctgacatgagtcgtaccaccctggcctctagatcccatatgggatcattgcttccgctactgctcccctcatgtcgaggagccaactggtgcggggcacgcctcgaggtccagttgcctttcattgggtggtcttggtacacgccatacctccataagaggggaagatttatttagtgtagtttaaacatgatgcatgcatgacctaatgattatggaatcaacttttcgttgaacccgtacctcctacgtatactattatttggcactctgttacccgacttcaaaatataagttactaccagaaagtggcaagataagaatgaaagaatgtttcaaggtaagtattttaaaa

SEQ ID NO: 13098 - DNA, 404 bp, Zea Mays
cagctatagtatggctaaccaaattgttcaaccatatctttcggtcaaacaagatgtctaatgagtgaagtatattggtaccgatctacgagaataagggagattcaaagttgtactaattaccggagaattaagttgataaagcatattatgaagttgtgggagagagttattgaacatagttttcgaggaataatgaggttctctatgaaccaatttggttttatacttggaaagtcaatcatggaagctattttcttgataagacaagtgatgaagcttccatgttaggatagaactgatgctgttcatgacaagtatggacgtgttaggatggttaatttcaaaagctaatctagaaaatctgctgcaaccattgtcttctagacctttgcaacacagag

SEQ ID NO: 13099 - DNA, 381 bp, Zea Mays
tgtccactccatttctgcaaggatctagcagtggcttttagtctcctatcaaagcttagaactgggcagactccttcatcaatagaaatccaagcatcattgacagcttcctggaatccatctaactttggccaaaaggattcaaaatggaaccgcctcttgccaaaacagttgctctgcagacctagtacaagggggcagtgatcagagtcctccgaggcagcgctttggaggaggttattgggaaaaatatcttcccagtcacttgagcacaggactctgtctaatctaaccaatgtaggagacacttggtgattagaccaggtatatttgcgccctattagaggcaggtcaataaggcttgtatcatcaataaatttc

SEQ ID NO: 13100 - DNA, 619 bp, Zea Mays
cccggctcatattcccagcactacttccaggttccagccatacctaattttgttttcgtcctccaccactgtttagaggacgctgctgaaaagcgtagagaatcgtttgatcctctatatttaaggtagaaaaccttttagaggtctttgctggagttagcctcgacgaagggccacggggcccgcctacaagatttcgcgatggcctacctgccctgttcacgagttctgcagcctgcactgcagacggacggggcaagctctaccttatcttgctcgccggccaggtagtaaaagcacctctacccgctggcctctgtgcgttggacgaaccgatccatccagcggcgaattcatcgccaccaccccggccgagctggcgagcgagcactggacctggacaggacagggagacgctggcagaattcagcaggatcacatcatgcggtgcacacagcactggctggctaccaccaccaccacctcttcccccgcccgtgccttgccgtgcccacttggggagggaaactgtccagcaccaaacgaaacttgcctctgctcgacggtgctcctagctcccacatattttaatgcctttttcatcctcgcacgtccaacg

SEQ ID NO: 13101 - DNA, 618 bp, Zea Mays
gacaacagcatgtgcgccaacatccgacctatcacaggaaaaggagctcgttcactgataactgatgagagatggctgtagtggatagggtagcgggcgtaggccgtaggggcatcagaggcatggatttcgcgagacatgttccgccaccagaaatggcgtgccactacaaactgtttgctggcggggccggggcgcctcgatcgatccacatggatcaatagacggacgcagccatctgacaggacgttgcaggcgtgggtgcggaaacagggcgtaccgcgtacgacgattgacgacgcagctcgtgactttcgttccgcccttgttcctcctgcaaaggctgcaaagtgccgcaagttcgttgggtttgggtggcagtatcagtcaccactccccagaggcaccagaatatcagtaactcgatgaataagatgggagtatgggacaaacatttctttctattaaacggatgcagccccgcgaccataagcagcatccacgtcgcttaaaaaatctcctccgcacacgtgtccccttcgtcaccttggcgatccaacgaatcagccgctaacatgccttctcttcaacttcccaactaaataaaatagattatcg

SEQ ID NO: 13102 - DNA, 524 bp, Zea Mays
atactggttttgatataaaaaatcaatgtgttatgatataatccattgtgtgacgttgctatacatgtgattctcatccgattcatgtatagtggaacatctggttttgtccttagaaccgggtgtgacatacttcacaggcggccacatacttagaaacgtcaaccttcatccgcttccaccagaagttttgcttcagatctcggtacattttggtttcgccagggtgaacggtgtaaggcgttttatgagcttctctcaagatatccatcttcacctatgatttctgaggcacacaaaggcggcccctaaaacgaaccaaatcattctcatcaatggagaactcccggggttaaccatcgcgaaccctctttcgagcttcgtgcaataaatgatcctgctgctgagccgcacgcactctttccatgtgggaagattgaataagcatacgagtctcctcactagcggtgccgacatagcacaaagcgatccccaaacggtccagatcagcgatcaacgacaag

SEQ ID NO: 13103 - DNA, 329 bp, Zea Mays
gctgggtcttctgcagcagtcacttctgaggaggaaggcccttcagccacctccatgggattcaggtaactcggatcagtgtctttgcatgggagactgccctccaaggtcgacaatgcgcgagacaccactcaggttacctcttgcccggcagaaccaagcaatgaaagcccagcatctgggacctctaaacagacggctacgatatcagcttcaggaggtttcgatagtatgtcttcaggaatgacctcctccagtgcttgatcaaaatatgatatcgaaagcccctgaagactgacaagtgccgacagagctggtgaggaatatcg

SEQ ID NO: 13104 - DNA, 400 bp, Zea Mays
tgggatattccgaggaggttaaacctggtttatgttaacatctaaaatctcaataacatatttggggactcgaagacatttcttccattgggacacgtggaacacgtcgtgcactgttgaaggtccttttggtaactgtaccttataggctataggtccaccaaaatctctgtttcaaaccttggtacctattgctacctttagggtgaatggagtcccgtactgcaacccaatcgcaattccacatccctttctggaggcaactagtcaaatcttcgaggaacacattcgagaactccctcacatcaggtatatcctttacttctttcacttaaactcctgatgtagacgaatcttattatttcctagaatagcctgactgaccatttccttatatcct

SEQ ID NO: 13105 - DNA, 404 bp, Zea Mays
ggaaaaaggatggtctgctcaaggtcatctatgatggtacgaatgaatttgggtgagggaggcggatacgaaaacagatgatgagaatgtaggggctaacatatgacaacaacaacgaagaaaaggggaaggaagtgctcgtggtggttgatgattggttattcaagggagggaaataaccatacatgggatgagggaggcagagacgggaagcagatgagaagtcaggggcatatgacaacaacaacgaggaggagaagaattgcacatacaagagataaggcttggttgttgcgaggcatggggagggaaatagatctacgcgcttcgatagctctagtgagataagccttatccacgtggtgggaaataaccatatgtgcttcacgccacgacacacagcg

SEQ ID NO: 13106 - DNA, 407 bp, Zea Mays
tgaaaggcttagaaatgaggtcaagaaacttaagaatgaaaatgaacatcttgccacaagtgtgcaaaagttcaacaaagaccaataccttcaaaatgaattgctcatgaacacactgtcatgaaaaacaacaagagtggtattggatataattcttttgtgcaaaagaaagcaacaaatcaatacaaggcaaaacagactcataagcctatcaaatgctttgagtgtggaaaagaagtacattttgcccacaattgcaaagccaaaccaccaactcccttgccaaaacactcaagaccatttgctttcaatgctcattatgttctaagaaaagtagcaaatggaaaagtcaaagttacattcctaggtccaccaagcaagagtagacctagacaaatttgggttgc

SEQ ID NO: 13107 - DNA, 339 bp, Zea Mays
cgcttggcagcttggcgttctgcgcgacttgctaataggggaaaaagcgtggtccgagtttatatggcctcccagggtaacgaggaacgagtccagcggcggaaagaacggccacggcaagctccaggcatcatccaccgcgaggaagccggatttggttagaaatctgtttgaggtgcgcttgatttgttatggagacgattctgacagcgagggcccgtatgcaagagacacatgaattcacgtgtagaagagagcagtcgctggcacagggacccgcctgccagccgttccgtgcggtgcctgcgttagaagtcagcaccagctagtgggccccac

SEQ ID NO: 13108 - DNA, 649 bp, Zea Mays
gttgaggctttggttgtttcgcttggtgaaatccccgatgacgagaggcaggttcattttgagatgcctttgaatccgagtgaagcagaaataagtgccatgctggacatgttggctgaggattcctctgatttggtccctgctgaaacactagttgtagcacccatcccagagtctagaaaaactttggacatttagagatctgatagtattcgcccgaagcgtccttgctgaaccaatcatccaacttctcctgctgaggggaagaaaaagaaaaagagacgtcttcggcgagtgtcatgcttgaatcaggatgccggcccttctgctcctgctgccggggaagtgccagtgccaatttttactgaagctgaacccaatgggtgtgacccgactgatgctgaccccaatgggtgtggccttgatgatgctgaccccaatgggtgtaatctggtcagagctgatcccaatgggtgtactatctgtattattgatgaggatgaggaagaggaggaggaaatccccttaattcggaagaacagtcggcgctatatagccagtggggagagtagtggtgttccttctccagctttgtctgctctcgttggtctgcaagaattgtctttggcaaattttgatcaaactctcg

SEQ ID NO: 13109 - DNA, 348 bp, Zea Mays
gccggtgagccagaagccacggagacagtccgtggaacgacatggcttcatccatgaggaggtccggaagctgttgcgtgctggcttcatcgaagaggttcatcaccccgtgtggctggccaacccaatcatcgtgccaaaggcaaatgggaactttggatgtgcatcgactacaccagcctaaataaggcatgtcccaaggacccgtatccactgccgcgtatagatcagatcgtggactctacctcggggtgcgactttttgtccttcttagacgcctactctggtttccatcagatctggatgtctaaggaggataggaggcataccgcttttgtgacagtggat

SEQ ID NO: 13110 - DNA, 510 bp, Zea Mays
cgcaaggatgaatcaacttctgtctttaggatgatttagctaatcctgtgatttgttacccaaattacagagattctaaacttgttgttagagcttggtcattttttttgcttgccggctggggggccgaagttatgatggcctggtataaccgtgtgtgtgtgttgggggggtacaaacaaatcctggacataatcggaggccatgttgggctcattgttagctacctaattttagctgggtctaataggcgggctaatgtttttagccaagtccccaaccagttgttagctagccatgcctaatttgaccttatttttagccaaactagcaactaaccatgtgcatccaaccatgtcctgatttgatttggacatggtgctgccatttatagtttgaatacttcaatacactatgcaagtagtgtcgtaatgctatcaatttctttttggtcaaaatttgctcttatctgaaacatgtgcaaattttaacgagatatgttcttagaat

SEQ ID NO: 13111 - DNA, 407 bp, Zea Mays
ctcgtacatgtgaaatggagatgaaaatgatgaaatgtgacaggtacttatgacgaggcctttgcattggtactcctggtgcagctttctttaagttgtgctgagaagcttgtctagatctctgtgaataccaaatttattgattttctgattcactccattccactaagaacattatggactggaaccttctgatgagccatcgcatagacatagtgcttgctaagtatttgtagccctttgatactttttcatatgtgttactgagacatactatcttggttgtgggaccatgaggatatgcaaatctgatcctgtagcaaatgttgcctggttttctgccatggtagctttgcctttttgacatcgccaggaaatgatatgtaccttactcatctgagttgtcc

SEQ ID NO: 13112 - DNA, 385 bp, Zea Mays
gctcgaccatgaaaacgtgtgctatagcttacgtgaggccataaacaaccttagcaatcttagtggccaaatcatgggtggcggacgggaggcatgaaatcgttgtttgacgatgaaaacatgtgtcacgggaggccaaaaatagccttactggcctccggggaccaaaatgtgtactatggtttggacactaaaattctactatgtcagcaaagttgatatggttgggagactcaaatttcagtttaccatggtttcgacactaaactcctttagtgtcgatgtttaagtttagggtttagggataggatttagggtctaggtttccataaaatcgtgtgctatagctcacgggtggcaaaaaaatgccataacgacctccccg

SEQ ID NO: 13113 - DNA, 718 bp, Zea Mays
atggggacagaccccactgggttggcgtacacgtatgcgttacctagttacaaaagggaaacacttcgacccctcagacttgctctatagataaaacttacagagatgttccagcatcgggggaggcactccttcagtcgtagctagacagttgccctcgggtcggagtattcccattaccttgaagggtccttcccagctgggggagtgttgcggagccctaatttggtttggtactaggtcctaaccctgggtttccatctgcgtttgacgaaggagccccgtctttggttgcggtcatttctggatgaacctgtcagaagtctggacccgtggggaatccagaagggtttccggaggaaggcaggcttcagctccataggccaggggacatggggtcccaccggtggtccgtctagtcgtcgccatcggagtgggagtccctagtgaaaacgtcctttaggtcccattcgggtgactgatacccgaggtctcgctcagccgcggctacctcgccgtcgtcgaccttttccttgctagggcgacgacgaggtggggagccatccttggaagactgttcacgccgctcgctgatgcgttcactgacgcgttttgcgagatcaatgatctcgcgacactccatggcgctgtggcgaccattggggtgtacagggcacaagccgctgttacccctttgcggtcgtgggcatttgttgcg

SEQ ID NO: 13114 - DNA, 346 bp, Zea Mays
gtccggtgtgcccatgatgcgtttttaaaaaaactttctctgcctgaggccaagcccaggctctcttttttctccgcgcgctgccaactcctttctcctctgcgctgagcacccttctcctccgcccctctctcatcggtggggatcgccagcgatcgaactccgacgtgttgctctagctggtgctgcttcccccttttcccttggtgagcaactcctctcgcagtctctttgttctctggctgtcatggagctcacctctcacaccccctctcaatctcaaattccttcaaaatctctgtgaaatccatgaatccatgtgtgtttgtgtgttcttggagtttcc

SEQ ID NO: 13115 - DNA, 637 bp, Zea Mays
gccggtatgatactgtttgaggaattacaagggcgtgctggccctgaggactcaaacaaaaaatttgcggagattatcgatattccaggaatgctctaggtcctcaccggatggcgttgttagcctgtacgcgctgggggacgccttcgtcttgacgatgaatggaccctcccactttggctccagcttgccccgtgactctgtccgggttgtccggacgagtacgaggtccccttcattgaattctcttgggacgactgtgtggtcgcgccaggccttcgtttgagcttggtatttgttgagggcctgcagggaaaagacgcggtctgcgtcgatgaggtctttggaggttggttcgtctacgtcggggacggctgaagcgcttgtccatggtgacccatgttttatttcctgcggggtcatggcctccgatccgtatagtaagcgaaaaggagtgaatccggtcgcccggcactcggtcgtgttcagcgcccagactgcttcaggtagcaggtcagcccatttacccttcttgtcgtcgaggagcattttcttgatggcagtgaagatcttgccattggcgcgctcgacgatgccgttagattgtgggtgatatacggaggcgaaggcaagcttg

SEQ ID NO: 13116 - DNA, 491 bp, Zea Mays
gtcgttaagatgtggcaaggatccaaggggaagggggcgcggatgaggcccacctcgcgaatacaagccatattgcatattccatgaaagcttcagtactcaaccaaagactatcgcgcttacagagaagtgaaagaaagaatggacgaagaaaaagggaaaatggattacccagagtagctagtgaagactatagcccatactttccaaccacagtacaaccagcaagaagcataccagtacaaacagtaccagccaaactaccaacaactaccaacacaactagaaaggctactattaccccaccccctccgtaaccaatccactagcaaaggtagttaccctcaccgctaaaagtagaggagggctacccccagcctccagtccatggcatcataaacgtatttagcagaggctcaagctcaaatttcgagacttggagacagtgaagaggatactatcaaagtgtcaaccacatcaccatcagcgga

SEQ ID NO: 13117 - DNA, 750 bp, Zea Mays
aacttacaaacatcataggaggcatgcaagaaagtagagttagtaatagctaataagctccagcaatacctctttcctttaagatgttcctgaagcttcttcactgcatcctcgaggactctctctgaggcattacatatcttgttggcaagattaagaacactaaaatcatctgacacagttacccactttagtagatggaaatgctccttgacctcagggtccttgtagatgagctgagcgagggtggtcttgcctagtcctggcattccaacaatgggaacgaccatgagatcacgactgttaacatggccattgaccaatatgttaacaattttcttcctctcatcgtctctagacctggcaacaatattttcaggatcaacgataatggaatccatctcacgcaactccttccgtgccgttgttgcctcgggctcaagcttgttgaatctaaaggtgtccatttcttttataaggtccttgaaggtgtcaacaactctgcgaagcctatagcccatcctgatatggaaggcaacacgattgtgggtagggaagagttttacactggtcataacgccaagctcggcgatgtgcccattcttcttggctcgacggcggagcgcctcgtactcgaagtcgtcgaagacctcgttcgcctcgtacaccgctgtcttgagctgctcgagccatttctccacgccgcggcgagatgcctgcctctcggcgtcggtgatgactttgaggatg

SEQ ID NO: 13118 - DNA, 430 bp, Zea Mays
agacaacagctagctagcagggcccggccggggtgtccttaaaacacgctctgatctggaccaagctactgcatgcatgcagcgtagtactacgtacagtacagttggtatagctgctactgggtgtagtgtagtgtagctgcttttatttccattccatccgccatcgcttgttgcactactactgctcatatatttccggttcaacacagtgacgacgtacagtacagcccatgtttcgacgaggagacgtgcatgcgtgaccacgaacgaacgagtagcggatcgatcgaccccaatcatccatgcatcatgcgtcaccacgaacgtacgcagccgcctgctactcatccctgattcagtcgccaccttctgaaaaccccacgctagctacttctttccccgcgtacgtgttcgatcgaaacccatg

SEQ ID NO: 13119 - DNA, 544 bp, Zea Mays
tcagatcatgatggagacgacccgacatggacatccatggaggtgtgggaaggagagctcacttggacacccttgggggctgggttgtagcttgcgccacccaccagagctggatcattaccggcaataccctcgggggctgggttgcagctcgcgctacccactagagccggatcactaccggtgacacccttgggggctaggtaactgccagcatcaccctcgggggctgagttttctgcaacagccacctctaaggctgaaggatcctcagtcacctccataggagtcgagcaatcctaaccaacttcttgacatcgaagactgccttccaaagtcgacgatgcgcgagacacttctcgggatacctctaatcccacgtctggaatttcagagcaaacatccatcatatcaccaacagtcggctccgacagtatatcttcaggaacgacatcctcaagggcccgatcaaaatctgctatggacaactcttgaaggctaacaagagcagacagagccggagaaggaatataactatcccccc

SEQ ID NO: 13120 - DNA, 1058 bp, Zea Mays
gtcgtcctcggatccttggacgaccatcgtcacttctaccctgcaataatcatctggtatgttgcttccatgaaacttacatcctgggatcacaatgcatgttcctactttcttcatgcgattattgttaataccatatcttataaccagtgtgcatgtcactcgccttgttatgtcatcaactgaataacgaaccttatttcccgttgacacgacatagcttgggacggttgtacaatcggtgcaagccggcggttgagctgctggaattatttgtagctgtggagtggtcatctgttgaacagacatcgcacttgccaactgctacatcaattctggtggaggatttgatagcatttgagacatcaagtctttgaactctttctttgcctcctgcttaaaataatccgacaactcttctttgtatcgatcacgtttcttgtacaaaccttcccactgtggtccgaatccttccttccatccttccttagacaagattcctcgtacatggcctggatgctcagggttaccgagaccagccattaggatgtctctctccctttgtggcttaaatgatccttggctctgcttacctgccattgcatatatgtttttcgcaacttcttcgacatttggatcatcaaaagatacaccagccttagtttgcctgggttttctagcacggatccaatttgccgtcctttcaccaagttgctcgtaaagcgtcggcaaccctgcgaccttcttctcggcgtcttcttgtctccatttagaaacttgacgcttgtaaccacctgtgcctaagtggtggtggtacttgttcttcttagatagttctgaatttgtatcgtttagagatatgaatttaggactactcctctgctcaagaaatactgcccactgaccttctgagattttatatttttttgtcgggtctaggcctttctttgcaaattttgtattcatctcagacctccagtttcaaaaattgattgcaagctgcttcatcgtgtattccttcacgagttcttctgaaccccgaggtagaacaaacctcg

SEQ ID NO: 13121 - DNA, 514 bp, Zea Mays
aaaaatcattacttaattctgattgtgctgttactcaaataatcgtcgttttagtacgtagttaattagcacgagcgattacagatagagtggttttactaaatcgtgataagacgtgcaacgcatgaagacgatgagcgtgctacgcgcgagatagcgcacgtgatcacacggatggacaacacgtccgacgcgcgacgaatgacgaagacctccacagcgaacgcgcggtgacgacaatgcgacaacaagtgaaaaacaggaacgggcttgcggcgcgaggtcggctgctagggcgcagcggggcaagccgtgcgtgaggcaggctcgccaagggaaggcatagggaggggtagacgaaggagagagagtatgcgggaagggggtggacgctcaccacgcggacgtgctgcgcagcacgacggcgacgaagcgactgcgagggcgagtttgccgatacctccgcttccgagtgcaggggtgcgagcgagctcgctggtcggtcggccggcta

SEQ ID NO: 13122 - DNA, 638 bp, Zea Mays
ggctgtcgtggcttccttaggaaggagccactaggcgatggtaaagttgggcgtcttaccatgttgtaaagccacgcatgctcgcaatcgcttggttgtcctgtattctttattatgggcggtgtgggcagtgtgggttcgagcgccatcatttgggctatgccgacccctagccttcgtagccaggggctcggcacggctcatcgtattatgtcctgctagcgacctgcacgctcaagcctagtccgatagctcttgagtgcgccactggccggggggcacgcatgtcgtaaatgcgccacagtccgaggggcttgtaggtcatgagtgctctatggcccgaggggctcataggtcctgagtgggaggcaaaccgacatctccactatggctcggcgctaggcgcatttaatgtggctagtcatttatgatgggccggtctcagtctaggcgtgggatccactcgagtagtttccctctagtacgctcgccccctatctggttccgtcacgatcgacccatgtttggtgccacgaggtttgtccaggggcgggttcttctagggtggatgctacttatcttctctgactgaccagcggggcccagttgccggaagcctctccccgagcgtgctcttt

SEQ ID NO: 13123 - DNA, 492 bp, Zea Mays
gtatgcaccacggaccgtcggatcagacatcagcggccacgattttattagactggatcaacctacacccgcccgatcacaaatctacgttccacgtgaatcccgactgaagcgttgcgcgcgatctaatcgcatccgcacgatccagatcgaacggcgcccgatcagcacaggacacaatctaatcacatccactagccacagatcggacggctgacgcgctgtcatcctcctcccgctccccacacacggcggtggcgctgacccgaggcccagacctcgccggagcggccaaaccccgttctagcgcctcgttactcgagcgattaggtgctacgcgaagccaaaggaagggtgaacttgattgtggtttcggtaccttgaattgagatggcaatgtcccccaatcacgcaccgcagcggcaccacggcgttacatgacgaccgacgagcaatcaagcgtgattccgccaccatcgcgcgcgcaaaccc

SEQ ID NO: 13124 - DNA, 705 bp, Zea Mays
ataaaactgagccccaagcactctgaattgtatcttgaaaaccctctaatctaggccaaaaggcctcaaaatggaatcttcttcctgatgaattatcccgaaggcccaacagcagggggcaatgatccgagtcctaggaggccgagctctgcagcaggacattaggaaaaagcagttcccaactaactgagcaaaaaaatctgtccaatttaaccaacactggatcagtttgctgattggaccaagtgaaacggcgtccatgcagggggatctccttgagagctacatcctcaattaggcatctaaagcgatgcatcatagcccggttaagattagagttattcttatctgatgcttgtaaaatgagattgaaatccccaactagtaaccaaggcccagtgcaagcctctctaatggctctcagctcctgcaagaacagtagcttctcctgatcatcctgaggtccatacatgcatgttaaccaccaacaactgccaggttctttacaaaactgaacagatacactgtaattatccactctagttgctcatgtaaagcccaaatagttcttattccagattcatggtactattatactctagtatctaaggctgccaccacccatgggttttaaactcactcatgtatctcttggttgtgaactagttcccaaaaatcaggatgggtaagtaaatagtgctgctc

SEQ ID NO: 13125 - DNA, 500 bp, Zea Mays
gttccctctatatgatataataggagaggttttgaagaactttgaaatataccttcatcagttgacacccaatgcaatcgttagacttagtgtctacatatgggctctccgaagccagggtatgagtcctaatgccgaagctttctatcgggtgcacgagctgcattaccaaatgaaggctagagcagatggtcttcatgagaacttcggttgctacaacattgtgtatccaaaggatacgaaggctccggttctcagctatcgtacaaaatggccgaccggttggaaaagcgaatggttttacataaaggcagacaagaaaagaagggagaagctaatgactatggtcttgagtccattgaaaatgagcttcgggatgacaaggcccttgtgccatatgcagcttggctccccatgccaggtagccaaagtagaattcagagtggtagcggcagaagtcagcactagggatctagtgcaagaatatttggcaaatagag

SEQ ID NO: 13126 - DNA, 556 bp, Zea Mays
tgatgatggatgtacaataggaacagcaatttgagaaggcggagacggttggcctgcgacgacggctgtcgtggtggatcaaccaattcgacatcccttcgaggccaaaggataaaattcttgatatcttgtccaagtgtctcgataccttcgggcccagggatgtctagcatgtcgtcctcggatccttggacgactgtcgtcacttctaccctgcaatattcttctggaatgtcgtttctatggaacttgcgtcctgggatcgcaagacatgtggctactttctttgtacgctgattgttaatactatatcttataactagtgtgcatgccacaggccttgtgatgtcatcaactggatagcggaccttatttcccattgacgcgatagagcttgggatggtcgtaccctcggtggaagctggcagttgagctgctggaattatttgcatatgtggagtggtcatctgttgaacagacatcgcactcgccaattgctgcatcaattctagaggaggattcgatagcatttcagacatcaggcctttgaactctt

SEQ ID NO: 13127 - DNA, 282 bp, Zea Mays
gaaatatgttgcaaagtgtccttgcaagctatggtgggtaaggataatgagaacaacatggtgataagtgcaactatgagcaaacagactttagtgatgttgattgactcaggaagttcatcaaatttcatcagtgctcacatggtgcatcagttggagttagtagaggtggtctgttctccagttaaggtgaaggtggctaatggagaaactatggtgtgtgatagaatggtaagaggagtggaatggtgctctcagggtttttcattttgtactgatatg

SEQ ID NO: 13128 - DNA, 590 bp, Zea Mays
aaaatatccaaatccactgaacctcgccgccgacgagccatgcgcttggattcgtgccagccacggtgattcgtgctccgcgcagttggataacatagagaggtcagaaatatcaccccgtggatgtactccggccgctattttactccggccgtcgtacccgctcgtgtcacagtcactctggataggctcgccagagttagccccccacaactttgcgccacgtgcctcggtgctttaaccacgccgccgtgagtcatcttagcccatccggtgatcgccggtgagcttgccacggtaaatgccaccaatcgcttgcgccagtgcacctcttcctctccgaccgccaccgtgcgagctgaaattcacgagccaccgctcaagagccctataaattgagcacatccttggctccgctaggtattcaagcacccagcacatccactcgtgcctccaattgttcacctaagcccccgaattgcacacttcccccaaatcgggtttccgccactgtaaaaaggtcctcaccgtggctagctcgtttcaggtccgatcttgtcctctgctctcttatttaagcacccttacat

SEQ ID NO: 13129 - DNA, 513 bp, Zea Mays
ggcggacctggaagcagctagccgcgatgaggcagttcacggcggcgcagtcgaccgaattaggggaaaagggaaattctctggctatggtggctaattgaaggcgggaatgggtgctctggcttcgtgatagtatggcacagcagaccagaccatcaatttataggtgcgcaaggcggtggtgtccaatttcgcgaagacgcgctggtggccggagagggagaaggctacatcggttatccgcgagctggtgcggctagaagcgacatggttaaaggcctggggtgtggcacaaccgcggtgaaagacgccaactccggtgacggccgtaaagccacgtcgccggtgcaagtgattgaggaacagcgaggccacagtaacttgaacccatccgcgacgagatcttttcaccgtcgaactcaatccacagaccagatgcacgaatcgcggtgagcagcactaatcccggcgaagggtcaccggcggccagttcactaaatctgctaatttttt

SEQ ID NO: 13130 - DNA, 377 bp, Zea Mays
cgaaggtataagaaaggtggtgtgacgtgttctcctttcctgactcggaatttccttctttcggttgatccgtgtccactccttagtgggcgaggtggacaacgaagttttttgggtaagcgaaatctcgaccgaccgatctttcttctcctgaggactcctgtgggtctgcaagggatcatcttcccccgagctacgggcgggggcgctattcgcagtcttgttccggcttccctcgggattcccgaggaaggcttcttctcgggtggatccgctatgcggtgaaaaataccttcttcgtccgtgatgcatgagatggttccaaataggaacatagctcctgggcaaagagtgatctttttcttgaagctgatggc

SEQ ID NO: 13131 - DNA, 444 bp, Zea Mays
tcagctaaggcggtggaattcatacaagacataatattcaggttcggaataccaaatagcatcataaccgacctgggatccaatttcacaagctcagagttttttgatttctgcgaacaaaaaagcattcagatcaaatatgcctcggtggcgcacccaagagccaacgggcaggtagaaagagccaacggggtgatattggaagcgcttagaaagaaagttttcgacaagaatgagaagttcgcaggaaagtggattagagagttgccgtatgttgtttggagcctgagaactcaacctagccgagctctgcatggaaacactccttttttcatggtctacggttcggaggcagtgctacccgctgatctcaagtttggggcaccgaggttgatctttgaaaacgtagcataagctgaggctaccagactagaagatgttgat

SEQ ID NO: 13132 - DNA, 662 bp, Zea Mays
tcgcccccaaatgtgctctgtcagaccgactgatgaagatggccatggtatagtgcacgaaaagatcttcagatgcagtgtatcgtgccgccggtgaactccgctctgcgatcctcgctagtgtcacgattcgtgctgagcgcaaagtggataaccgcggggggtaaaagatctcgcgcgggggatgagtttggggcactatattgccctgtcgccgtacccacttgcccggcgacgtggtcgcacggtaatcaccgaggctgccgccgttttccccagtgtcccgcgccttaggtggtttactacatcgctttgcgccgtggaggttaaccagtaatagccatacgcctatgttcagtgaatgccacggtagaacgccgcggtgactcagtccctcttctcggccgccagcgcatcttctcaaaattgggcgccaccactgatgaactctataaattaatgccccagtgagccctgttaggtggttacgcgtccagtgcaccagccctcgcctccgattagccaccgtagctcgggaatttcgaacttcccccaattcgattctccacgccgccgtgaaccaccgcgtcgtgaaccgccgtttctaggttcgttcacatcctccttaccctcgattcaacacccttgtgtgctaaggatgc

SEQ ID NO: 13133 - DNA, 540 bp, Zea Mays
gtaggggtaagcaggacccgtgcgtagttttgcggtgcttaccgtgagttgggcgcggagatgacacgcttcgacgaagatggggcagacctaggcaatcgttttcttgattggctataggtcgaattcaggaatcttctgagtgccgtgaacgctcttgcgctcgagggctgccgccacttcaagccccttagatatattgacttggactttgaccgcgcgtgtacgacgttgaagacttaactctgaagttgcccacaggtgtttcaaccagatatgtggggaccgcatggtctctccattgcgcgggagagagtcagccgggaagtggagcatgtgagttttctctctctctctcttcttttttaattgctttgtttctattgattattttaggctcatctggtggtagaggtcgcgaacttgggggggggggttcaagacggagtgtgactgggggactccgcgggatgctgaggctataaccgtcgccgccacagagaacatagatatttcgcgcgctggtgatgacatggcgaa

SEQ ID NO: 13134 - DNA, 438 bp, Zea Mays
ccacacatacccaaacatacccacacatataaccacacaaataagcctttagctgatctatcgcccgatcggacctctcccggaccgtctctcgaccgtgagggccccacatcctatcgaagagcgaccccgccgaccgctttagcaccgggtcctctacttggaagattttgtgctcgaagccttcgtccgactggttgaagacctcgaagtgcccgcacccctcacgggacaaagcattcacggccccctcgcaggtgacgagggaggcaaaggacatgaggcccatcacgattgatgggagtacccccagctcctcctgtagccactcaaggaagcggaggcccacctcttggtcgggcgcttcgaaggcggcggtccgcacacccagctcccgttacgcgtccacgaactacgcatgcgtccgctagacctcca

SEQ ID NO: 13135 - DNA, 634 bp, Zea Mays
gtgaggctagagctgatgatcactgtcttgcgtacgtcggagaagtcgaggttggttttcttggtttcttgaaccggctgcatggtagtactggtagatgcttcattcgctgggattcaaagggtatcccctcgcgatgtgttggcgctcgtcgttggggtgctactgagggtctggtggtgagggacatctagatggccccatgatagcactccaccactccttggaagttggcccggatggtgatgatgcctcatgtatgtgtagtgtagaatggccatgaacttggccagtcccgacatcccaatgatggtgttgtacctgcacttgaaccgagctacctcaaaacgtaggaattcggttcagtagttgcctggagcattgaaggtcgccagcatgaagaggtgccatatagggtactctcctttggtcagtacgatgccgaagaatggggtatctgacttaatgaggtcagcagtcgggatccccaaggcatgaagtgttctagggaaggtgacattgatgttgttgccatcgtccaccagagccttcttggcccggctttcttagatcacggggtcgacaaccagagggtacatgatggggtgatcaaacttaagccactgattgactc

SEQ ID NO: 13136 - DNA, 1206 bp, Zea Mays
tatgaaccggtacgccaagacgaccatcggatgtgaaatatacgatcacgatttaacatagcgaagaggtaagatcgatctgatcctgaccattacttcatagatcgacggtcgcccacgtgggatgtgctcgcctaatcctgaccgtttgatcatcaatccatgatcaatacccagcgcacgttaatgaccccacgatcctagatctacggctagtcctttctcctctaccccacacacgcccggcgctccccccagacagcgacggcgacggtacctccccacggcggagcgccattgccgcgattcggcccgatccacgcagtaatcaagcttcaagtaggaactgctacacgatatagagataagggagagactagcagcggggtcctcaccgagattcgccagcacaggagggctgccaatgacacaaggtggtccatagcggtgcccagtaactccggcgaggaaatctacttcaaccagccatcctcctgacttggcacggccctgagcgcctccctggtgacctggtgaggttccgaaccgacacctgagagcccgttgctggcgtgaatccggatgggagcaaatatggcggccaccatggtcggtgtgataggagaaccgagcagaggataactcgagctcgaaggacaggggcgtcgagcatccggccatgggatgggcaaggtggccatggagttcttgttttatatcccaggcggacctcaacaaccccagcgatcccggcggccggccttctctccctctcggtctcttcttccgttcacagctgaccgcacggcgatggggggggggtcgcgtccagaatttataccagaggataggggcaaggtctgagcggaaaaggaggcggtgaccggtaagctcggcccgggatctacgcatcgagatgaacagacaccaagtctgttacggcgacgttgaagatgaccctgacaggcggccccatacggcagtgacacagttgtgtgggcgaaggggatgcaggcgctgggttggggttttgggccgagagcgcggctgggctaagtggcgagttgggccaaaactgaggaatccgacccaacacaagtttttctcttttctttttattttctattttatttcccattcatttcaactattttaaatttaaatgagttactaattcaaatatagatgccaccacaaggaaaatcc

SEQ ID NO: 13137 - DNA, 406 bp, Zea Mays
atctgaatgctttttcgttcacagaaatcaaaaaactctgagcttgtgaaattggatcccaggtcggttatgatgctattcggtattccaaatctgaatattatatcttgtatgaattccaccgccttagctgaggttagagaagcaatgggtttgaactctatccatttagtgaatttgtcgatagcaaccagtacatgagtgtatcctccttgagctttcttgaagggtccaatcatatccagtccccagcatgcgaacgaccaggttacaggtatggtttgcagttgctgcgctggtagatgttgctgttttgacaagtactggcaggcttcgcacctctggactaactcggctgcatcactctttgctgttggccagtagaaacccgacctaaagaccttcc

SEQ ID NO: 13138 - DNA, 631 bp, Zea Mays
caggcaccaggccagctactgctagggcaattcatttgcctatcagggcgtcggctcatagctctttcgtggctacgggtaggtaagcgttggcgatgggtggtgatcatggcggccgtggaggtggtagatgtgagggacagatatccccgaatccactagaaggcgaaagacttttgcatggggccacagaccaattaccccgcaaggccatctcgtcgtgggccgggcaaagactacaagtggaatgggccgacccaagaaggcaatggactcatgtccggatcgtccgtcggatcgtgcacaatctcaagaaaccgttcgtttttcccgcgcctggcgcccttgaatgccagggtggttcggggtagactcgacgggtttttctggagatcggttgagttagttcgctattagctaggagatatgctgaaagaatgtgatcatcatgtacgtagggagtatcccacggtcgtgtatataaggcccaggggaaccccatcattttcatctcattagcctttctccatttaggagatgccacttgtaacacatcacacatatagacccatcccaggaagtagggtattacacctcttaaagcggcccgaacctacagaaaatcgtcggt

SEQ ID NO: 13139 - DNA, 1071 bp, Zea Mays
atctataaaggattatcaactaattctgtaattgtttatttggtttattacagaattcggacgacgggcataaaaaaccaggaatcacaggggttgtttcataaaaccgcagggcccgatggtaaataatttacactaacagtggatggcaggtttattaccacaaaacagatggtctcttttataattctgcaggctcgaaagggtacgggccaatatgagccgtctgatttgaaaccatggctcggattagacgctggtcaggctgaaacagtgtactatggtgaccgcgggatctagaatttatgacagcgatttaatggatcaggactccatcctggccgcccgttatagatctacgtcctagatcatcctaacgtgaaacgttcccccagatctaatctagaccgttgccacagagaccaacgaatccactatcccgacgtcgccccaacgcccgagctcaccggaccgaggcggtgccacccgcttccgcggcggagacaactctagcgcacatgcgatcgccctgaggtgctcccttacccgactagaccttgcaacgagatgcggtgaacaacccaaacacattccccgccatattaccttggattgtgcactgtcgtgctccaccgatgaggaatgcggcgagtacaggcgtatgtgagtgatcatcgggtgagtgacaggcaggcccgtgggccgaggctcacgagcgcataccgaatcataacctggtcaggaccttcgccacgctaagttgctcgacagggacttggtctcctgctctgcctcgaaggtttgttcggctagggcttggtcgtttgcctcgcctcgctaagtttttcggtaaggacttggtcattcgctccgcctcgcaggttgtttggctgggacttggtcatacgctccgcctcgcagggttgctctactgggacttggtcatttgctccgcctcgtagggttcctcggttgggacttggtcggcttagatgggtcgtttaaggatcatgggcttactttaggtaccccgttcctcggtattcatcaacatgccacatttgtggaact

SEQ ID NO: 13140 - DNA, 493 bp, Zea Mays
tattgatagcagtgaagcagacccacttgagattatcaaagtggtgtccgagttcccagatatgttcccaaaggacttatcaggcatgccacccgagcgaaaggttgagtttgccatagagcttcttcctggaaccgcccccatctttaagagagcttacagagtatccggaccagagttggttgaactcaagaagcagatcgatgagctgttagagaaaggttacatccggccaagcacctcgccttgggccacccctggcctatttgtggagaagaaagatggcactagaaggatgtgtatcgactatcgagctctaaatgaggtcacaatcaagaacaagtaccccttgcccagaatagaagatctattcgatcagttgagaggagccagtgtgttttcaaagatagatctgaggtcaggttaccatcagcttaggattcgaccttcagatattccgaagacgacattcattaccaagtatgggttgtat

SEQ ID NO: 13141 - DNA, 640 bp, Zea Mays
cgaattcggccgaggggtgctggcggccggagaggggaaagaactctggcgccgtgggtgcgtgtccacagtcgtggcaagctcaccggcgttgatttaacggttgtaaagaggcacggtgacgcgacagaagtgctcggatatgtggcacacaaccgagcgacggcggttcaccggcgagctaactgcctccagccgtaaagcagaaggggagccacggtgagtcaccggagtgacccccaactcaccgtcggcgaggatccttatccccgcggcgttatcaatccaccccgagcgcgaatcctggcgccagtgacacgaatcacggcgaggcttcatcggcggtgagatgactgagctggcgttctgatccccccgatagcactgtaccatggaggagttcagttaaatgaacctgacagccaaatttgaagccaagttttctctcgatttctgatgataactcataccaagctctgcagcaaagttgtagagcaatatgccatctacaatattgccatatgatgttgccccaaaaagccactgcatctagtttgaaattgggcttgaagttcagggcatccacctgtcagtctgatttttagacctaatcagcctgacaacctgactttaggcttaa

SEQ ID NO: 13142 - DNA, 638 bp, Zea Mays
gtcgatggtgggcgctggatggaatggcgacctttttaatgagggcgagcgcgaaatttgggggatagttgttgtgattgcttgaccgagatcgtgctttccaatttggtgacgtagattgtgctttccaaatttgtgggtgcatcgcataggagaaggcaatgctggagcctagagcacgtaggggaacacgatgctggggctaggcgccattgaccaagcttccaaatttgtgggtgtagcgcgtaggggaaggcgatgcggggtcttgggcgccattgtcgcgcctgccaaatttgtgggtgcagcgcgtaggggaaggcaaagcagatctgggcgccattgtcgtggcttccaaaggattggtcgctggtgcacataggggagccgggaaggctttgcgggggcctggctagtcgagcggctgcgctggcaagcctggcatggctggtcgggcatgtgcgctgagggatagccgaggtgggtccagttggcagtaggaatatgtgttgtcgaggtgggtccacatggaagtcggcaagctgcgcgtaggtggagtcgaggcgggggcattggtcgcgccagcgcccacactggtgtcttaatagtagtagggattggtgcctatcatccctttg

SEQ ID NO: 13143 - DNA, 497 bp, Zea Mays
agctgatttcaagtggcttgcctttatcctctgacaggtgtcacattctgatacatattgggctatctccctcttcattttggtccaccaatataagggcttcaaatcatggtacattttggtgctccctggatgcatagagaatttggagagatgggcctcgtccaagattttcttcttgagatccttgtttttaggaaccaccgatctgctttgaaaccacaatataccctttccatcttggcagaaacatgtatacttctcagtcttttgatggagattctccttaataatctgcacttccttgtcactgagctaggccatgatgatctggtcttgcaaagctggctcaacagaaatgtgagacaaagcaccataaggaatcacttcaaccttcatcttgctcaactcatcacacaaggtgtcaatgcgagaatccatcataacacaattgcattgcaacttccgactcaaggcatctgctaccacattggctt

SEQ ID NO: 13144 - DNA, 492 bp, Zea Mays
gcaagggctgggtgcctacgtggttgtgggatacgtggttgtgcatgtccttcgagcattactatccatcatcctcatgtcaacgagaaggtcaacttttgccctgatttggattggagtgcttgctgctgatggttcgagcaatttctagagtttctgacatggtttgggccttgttcagtttcaggagaatatggcagcttggacatgtttccatgacaggaaggatgcgttcaaggggttcttatggcgggttctcaagctcaaggaatagatttgtgttgattttgctttgccattcaaatttgtttcatgtgaaatctaatttgtgatacatttgagtttgggggttcgtctacacgtctgctttaaagtggtccaatatcatctatgaactgtggtgtggtgggggcggtgattcctacaacatcctgctgaagcttggtcgaattcttttcatttgaatgcatagcgtgtagctagggaacatcc

SEQ ID NO: 13145 - DNA, 519 bp, Zea Mays
gccgcgtcggtgaggtcatcatcctcaacaaccgagaccgggtctccgtgagattgctagggaaagcaggcaggaggttgcgaactagctcggtgcacaggaaggcggtccgggtgaataagtattggtgccctatgacccgtggggttattggagagaaaaagggaggtctatccgcctgacagtgagagacacctcggtgggcagaagaaggtgcgccgctgccgcaccattgcttctctcgacatcgctccgcccccgatactggatctaggagtgcggcagggattccgagtgcgtgtgcgtcgagaatcatgatggttgggcgctctgggactcggtgattgctcgttggagttcgtttcccctcgtcaagctgttggccaccacggacgactcggaccggcaccctaagtcatggtaatgatagcctctcttgatttcccatacttccctcactgttttgcattccgccgcgtccgcgtaggagctccgaatcgggcaaattgcatgcgcgag

SEQ ID NO: 13146 - DNA, 395 bp, Zea Mays
agattaaaacaacgtgtaccggttgaatctcctgatccatgccgtggatccgcccacggatggcggggatcgtactgggcatccggttcggccagatcagatcggaaccgttgatccgctgatggacgtgggccgttagatcgtggcactttaaaatcctcaccatagatctaggatccaacggtccattgagtgtaccggttcatttaatggccagtctaatctgcgccctcgactttggatctgacgatcagaaaacccccataccctttcgcatagctcatcttgcaaaagagtccttgtagtattgatgaataaacccgccgtcctctcctagtataaagtaattatggttgggccctggtttcttataaaacagcccctggacttccctg

SEQ ID NO: 13147 - DNA, 635 bp, Zea Mays
aagaaccttgtaagagcggggtaagatgcttcataatttatattccaccaccaccctgagagatagttgtagggttcacattatttgttgcctttttgtctctgttttgtggtaacaatgataggaccaaagaatcaaatggacaaggacaaggggcctaagtttaacgacgatgagtgtgtctctcagatggaattgaaggagatgatgcgcgcgatgactgaagcttttaaaaaataccaggactctgcggcgacatcctatgagcaacttgatcaacgagttgctgaacttgttacacgcatggacggactggaggctcgtcccccaccaccaactccagccccagctcactctccggtggacgacgacgacgatgacgacgatgtttatgcaccgctgcgacaacgcctcgcacgtaatcgacaaggtatgggaggtaatggtagacgttgtcatcataatcctgaaccagaccatgatccatttgctaagattaagttctctattccatcgttcatgggttcttatgatgttgaagcttacttagactgggagatgacggtagaacaaaaatttaattctcatcttgttcctgagcagcatagggttagacaagccactagtgaatttag

SEQ ID NO: 13148 - DNA, 455 bp, Zea Mays
ttaacttctttctaggcttcatagacctctttctttttgcttgtacttgaacttgtgcttgtgatgtttgttctccctgtgatcttccatcttgcgctggttcaacaacatcattcggaagaggtacaataccagtaatgaattcattgtcatcatcacaaacaacatcatctacttccctctctaaaggatatctgtccgttctctcctttcaccttagcttggagttaaatttaacaaacacaaggtctctcatcctatcatgaagtagtatgtttctcctttttgtatgaacctatgaatgaaatagtgaacataagataacaggtttgaaacaagatttgaaacagtacaataaatatggttttctatgcatttggatagtagagcttggagttttactactaaaaatattcacaagtggccaaacatatcccacataagtgtatttacta

SEQ ID NO: 13149 - DNA, 278 bp, Zea Mays
cggcttcactgcgaacactccccttcgtgtataaatagggcagtggtccctccagggatggagagggacacacgtagacaggagctcactcctccactttgtctcagatattggcacttgcctcaatcatctctagggacttcccctctcccgtcgtgcttgtaaacccctactacaggcaccacagtgcgagtaatataagccatcatccccctctgctggaattagagccttgtgttgctcgaactaggataactgcttgtgtcttcttgcacacc

SEQ ID NO: 13150 - DNA, 455 bp, Zea Mays
gtcggatcgggtgcagggtgtatacatatgcaggtagaggaggtagttgtccatacccatatatgacgatggtggtattggatcgggtggtagtgcccatgcactgtacaagtgttggtcacgtcgaggtggataactgtaactcgagccgactgagctatggctaccatcatcaacaagtccgcaaaccaaatgacataattgtgaatgaggtgctccccctagaactatatgctccagcgtcatatgttgggaggcatggctacccctagaactatatgctccagcgtcatatgttctagcatggctacccctagccccaacaccatatgctccagcatcacctccaccatcctcgtggctaacatcacagtcgtctccatcatcctcatggctatcatcattgttgtcgccgtcaccttcactactgctttcgttagtgtcaaactcttatt

SEQ ID NO: 13151 - DNA, 458 bp, Zea Mays
ccaggtgtgtccaagtgaagtgaagataagccaaagatggtcgtggaaggataactttgggcaggttcactgccatgatgattaagccacggaggtaaaaatatctagccagcgtgagacacttgcttgggtgctccatgccgaggtgtcatcggtggccgagctctacctcactgtgcctccatattgtgtggtgtccatgcacttgtgtcgtaccttggtgaccacgggtagccaaccgtgtcgtcgttcccttaaacatagccaagagcaactgtgatgcactcagtgccttcttgtgtggtcagtgccgcgaggaagaagaaaaaattcgtcatgccctcacctcctcgacccaaattttccgtgcacagtaaacatgttgtcctttatggttgtgtagcccaagcatgatcgtctatccttgtctgagttcaccacaacgtccattgatcccg

SEQ ID NO: 13152 - DNA, 949 bp, Zea Mays
gtttctaattcttcaccgcactgagtccacgacggcgtcgcgcgcggccgagctccggcgagcacgcagactggcaggaggaggccaagaccagtgttcagcttcggactaaaccaaattcgctacctggagaacgtttcccctaacttaattgcacgaatggtgatctattctcttctgtccacgagaaccgcgaaggccatgagcatttgatcgcgttcccgatgattggtggtctctcagttcgaattggtgactcggtaagcatcacagagctatgagagtgctcaaacgagggagagagagggataagctgaccggattggggctggccgcggtgaggttagtttctcggtggcggagaactgatttggggcgaaaccaaaattctagctctcggatgcacggttgctagcgattcttggtggcggggtggatgatgaccttgcggagctggtggttgcttcaatttatagggctcaacggcggtgaccggaaattcggatgataatgcacggcggtcggaggaaaggaagggcactggtgcagtggtttcgtgtcctcagtcgtggcgatggctccggtgatcaacggagagcaagggtgagtcacgatgatgcggtagatggacagagacacgcggcgcaaggccggaaggcagtggttcactggcgagctaatctgctccagccgcaaagcagcagagtgcggcagtgagtcaccggagtgacctccagctcaccgacggcgaggatccttaccccgcgacgttatccatccaacccaagtgtgaatcctggcgccgatgacacgaatcacgacgagactcatcggcggtgaaatttttctggcgctggcgatctgatctggtgcagacactgtaccatggaaaatggtattcagtcagtctgacagaccgtttttgaacatgattttctcccaaacctgt

SEQ ID NO: 13153 - DNA, 389 bp, Zea Mays
caatttttagtacaagcaagataatcatgttatctacaactcttatgtatgacttttctataaaaacatgatttggtttatcaaacaaacaacacaacaaaaacaatgcgtgcagcccagaacagcaatcaataaattctagcttctatataattcaagaattaccgcattctagagacttgaatcattctagcactttaccacttcttagagttaaattaattaaataaggactagcaagtaggcttacaaattttatccaaatcatttagtgcactaaaattactacaaccaattaacaacgcattcttcacgacaatcactcaacaatttgtgttttaaattagacatcacatgagcactactacttttcatccgcgaccataaac

SEQ ID NO: 13154 - DNA, 570 bp, Zea Mays
ctgaaggatggtaggggcacccaagttgatggggtgctcagcgccacttttacgtttgatctaaactcaaaacatgtttgccaccagaaggaacatatatggtgataagggatcaccttgtttgaggcctttcttgcatgataagcatggaccggaggagccattgaggagcacgactatttttgaggaggatagaaggtcatggacccatatacaccaaagctctctgaagcctctgactcgtaagacagtgagaagggtagactagttgatggtatcaaaggctttagcaacgtccaatttcagcatgagggtggggagtcttattttgcgacaacattgcacatgctcaagggcatgcacaaaggtttctgagatgattcaacctttgacaaaacatgactgatcagggtctaacagccttgaaatttacactccaaacacgctatcaacacgctatgcttcttctcttgactatccgaaaggagaaaaagaagaacgagaagaaggcagttcaagttcgagttcgaaaaaggaagattgggaagtgtgatgccactcctacgccac

SEQ ID NO: 13155 - DNA, 393 bp, Zea Mays
gacgaaccggtaatgagagggggaggtgcgagcttgaggggatgaagagggtaggggaagagagagggaattcaccttcatgtgaacggacggcgaggccacggtaaccacctccagcggatgacggcgagcgttgcgacaaggtagggcggctggtgctaggtagtgagagtgagttggggaagagggctcgagtgggttgttttggcgacatgggggtgggatgctcgggaggcggttggcgggcgccgggcggggaagaagaatagggactagggcgcggctagacgcatgggacccactggtcagtcgtagcatcggccaaaccgtccgtgcgctgcacatgctggagcgcggcgtccgtggaggttggcgagcagcacgctgggcact

SEQ ID NO: 13156 - DNA, 1531 bp, Zea Mays
ttattttgcattcttactaacatcagttcatggcttatgtactatgtgcacatatggtttctcccacttattcaaatccctccacctatgtgtttaggtctttaaggtattagcgaaatatgtgaagtaataaatactctattttcactgtataagttttattcaagaataagttaggtgtgtactcaaaggactttatttcaataatcagttaaatacataatgcttaaaacttatggaagacatgttctagcgccaagttaggaactattgcacatggtactctagtgctatgtctgatgttgttttgaacatggttcaatttaattgtatttcttcaaaaatggttttgtcatggctatataaattttccttaccctgcaatgatcttatgatcgttttggaaccatttatcagtttcctggcttatactagttaatataacagcaatttcggttgcattatgtcacttcaaaatataaaatgtgaatttagtggggaccattttttcagagatcttgtgataaagtgagaggtaacattaaaaggatttggagttcagagtgcaatggctatacccatcacttagttctggagggcctccagctttttgacttccagaagaaggaaaatgaaccacttggaccagaatatcttggtgtcatgcaggacacaatcagcaaattgacctatgaaacacttcagtcagtggcttgtgttgtcagtcatgacaaggttacttttgataagactaggtctgtaatggaaaaaattgtaaattctcaccttccaagttacttggccagcttggatcagaatgatattgcatgccagctattcaatatttttagaaatccatgcagctatcgatctggttctgtgaggcttgtcacacctgtgtcaccacaacttttgtcttctattaagcatgcgttggatgagcttgatggaatgccaatgcagggtcttgttgcaatgaataggaagattaaaggaaaatcatgtgccccaaaatttggattaactgctagcttttccaaaagaatgcatataatcaaaatgataagaaaaaggtgcaacaagattttaacagaacttgaggaaggtaattacctgccaaaggaattagcaaaggcaatgtcagtggtgaacttatatcagaagcagaagctgaaaaatgtgagtatttcacaatcagagtttttcccctttgcaaaagaaactatttctttgcagaatgatatcctgaatgccctttggtcacttccaaatctcaagcatgcgaagctgaaattgctgcacaccatactggatcatgattctaaatttgaaaggaagcacttagcaactttgaggaactacttgacagaatgtttgtttggatgtgatgatggtctaccagatgtggccctccaagccatagcctctataaatcagatttctagatgtcagcatgttgtgttaacggaagagagggaggatgctgaggtagatgctgtactgaacttgagcagtcatctcaaagctttag

SEQ ID NO: 13157 - DNA, 591 bp, Zea Mays
ctcgggtctaggacgggcagaggggcgtgagccctccatcaccaccatcttcatatcagataccaccaccgccgccgcctgtgtcagaccgaccgccgtcaccgcaagggcagcgacaacaacatcagcagggaccgcaacaatagcagcaacagcaacgtgtgccccgcttccaaggccactggaaggttcacggtcccaagtaagcttaggccctcccaatgttcgctcgatcgtagcttttatgtcgataggtcttgatccgccctttgcctgtcagggcctcctcttcctcggcatccgtagacgttccctccccgccgcccgccatgcccgccggggggtctggttcccatcggcatacgcctgctgggaacatcgtcggcgatccgtcagcggctaccatggatgctccttccttgtcggccaccatgcccgccagcaggcctagtccccaccagcatacatctgctgggaatgttaccggcgatctgccaacggctgccgcagccccatcagcgtcggcgccaagcccaccatcggtggcggccgagggggttccagctgcatctgcccccactgtgcaggatg

SEQ ID NO: 13158 - DNA, 421 bp, Zea Mays
aggatacaattgagccctcttgagaagaattacaggatatgatgtataagactgtagcacatgtataatgaggttcaccatccatccaatatatccaagggtaattgtagtcattaacatgaaccaatcatatgtttggaaataatgaagcccagcaagagccagccttcggagctcctcagattgctccatggcagtttcatagtcccttccagatataagatcctcaatctgactgagcactaaagaaaagttcgccagtggcttaaaaggtttgaagtagagtgaactggattccttcagctctgagatcgataagggaagacatgcttaggggtaacagtatggtttgttgtttaatttggtagtcttggtcatcatactttttcattaaggaaaaaagaaattgaatgactgctga

SEQ ID NO: 13159 - DNA, 391 bp, Zea Mays
tcagacagtatcaagatatttttctagcttcgaaacccttgccttactgtttttatcaacatgttgtgtgatgacctaggaattagattcatgtatttctcttatgatgcccctggctttgagcttccaaagtcctaaaagcacaacttcgtactccgtgatattgtttgtgtattgaaattctagcttagctgcataagaaatcttcatcattgaaggtgatatgagaattgcagtggccctgcaccgaaggtgccccaagatccattgcagaaaattgtccatatttcttcatgtggaataggtgcttcgtcttgagcccctagcgtccagtcgacgatgaagtctgcaagtgcttgagactgaattattgatcgatgcacaaaattaa

SEQ ID NO: 13160 - DNA, 457 bp, Zea Mays
atttcatgtatttgatgaactcagtatttatgccagagctagacaaatttatggtggtcttcattgatgatatcttggtctactcaaggaatgaagacgaacatgcatagcacttgcatacagtacttcagcgactgcgcgatcatcacttgtatgccaaactctccaaatgtgatttctggctgagggaaattaaatttttgggtcacaccatttctcaggaggggatatcagttgatcctgagaaagtgcaagaggtgatggattggaagccacctaccatcgtgcgacagattcggagttttctgggattggcaggatactatcgacgattcattccggatttcactaggattgttaaaccaatgactggattattgaagaagggagtaaagtttgaatggagtcagaaatgtgaggatgcctttcatgcattgaggcagcatctgacgacagc

SEQ ID NO: 13161 - DNA, 891 bp, Zea Mays
gaagaagtgtacaatatgtggtgagcgtagattcgtagaggttgaaaccgacaatggtttgaccgtgacgaccgaggtagaacgtaagcagcttcgttacatgcctcttatacctcggttgaaacgtttattcatctccaagaatacagccaaccacatgacgtggcacaaagaaggcgtacgtgagaatccagatgtcatggcacacccagttgatacagatgcatggaaggcactacatgcctttgattctagctttgctgatgaagtgcggaatgtccgcttcagtttggcaacagatgatttctcggatttcaatctaattgcaccatcctacttatgctagcccgtctttgctgttccatacaaccttccaccagctctttgcatgaaatatgaatttattttcttgtgtcttgtattgcctagtctggatcatcctggaacaaagatcgacgtgatgatgagacccctgattgaggaattgaaaattttgtgggaaggagtcgaggcgtactattgttacaagaaacagaagttcaactagagagttgtgtttttgtggtctatccatgattttatggcctatggtatctttgctggatggagttgtcatgggattctgacatgtccgatatgcgctgaagacactttatgcttctgactaaagtttggtggaaagatatattactttgattgccatatatgttttttgccagaggatcacccattcatgtttgataggaacgcttttagaaaggacatgattgtgacgaggggaccacccaagcatcttagtggtccagagattctcgcgagacttaatgatttgaaactaaatgaacatggaaatcgttttgaaggttttggaacggagcataattggactca

SEQ ID NO: 13162 - DNA, 482 bp, Zea Mays
caaaaagcttgtcattatgaccaaccaactttctaggcttaaaaaggttgaatcttggcaatgcttttgagacgatgctgtactgaagtactggtagagagagtatcctccatggcctttgttgatcccagaaccacaaaagatagtatttcgctcgcatttggttagtggaggtgttctgatcatcacttggaggatggagctgaaagttcctatcatcatgaccaactttccatggcaaaaggtttctagttccaagtggcaggacgatgattactgagtgactgaatggagtaactgtcatcttctaccactaaccatcatttattaatacataaatcatcatccggagcctaaactcagaaaggctaatcaaaagtgcaatctttctcaaatggctgccatatgccagtggtacatgcctggccattgtactttttcggtgaaccatctcgtctcaagcatgagatgaaggcctgaac

SEQ ID NO: 13163 - DNA, 747 bp, Zea Mays
ctcggaatcggcgttcctcgttcccatccgtcccgtggagagctctcggtgatcgtggttgctatggcgggcgttgcgaggaaaggtgcagtgactgcggatgatcggtgcgggtggaattgctcgccgtagttcgaattccaccgcgggacttcaccaccgtgtggccgggaccgccaccgctataattcgaggtgataattccctcaccttgttcatcttgtcgttcatgttgagtagtgcttgaccatagtggattcggggcatcgctgtagctaggcgacctcgccggacaccgcgccatggggcggcgccgccgtgtccttgggcgggttggagaagaatgccccgggaccgttgatcaacggattgagggcagggatcggttagagcttacccatccgcgtatctcttctgcaccattgcatccatttgtagcaaacacgattagaagatctttacctttttgttgaatcgattgcgaactgtgcgatctgcatctagcagatgggattaaatcctgggagtgtacttcacattgtagatctaggccgtcggatcccgatccaccgatcggaattgcttaccgattcatatgatgcgtaggtctaatcctggcggccgaatctgatcggacagccgtagaggcttcataccccttcgtcgaggacttttacataagaaaccttgggaaatagtgaaaccaacccgcggtcctgcgctgtgtcttaggaacttttactccag

SEQ ID NO: 13164 - DNA, 1529 bp, Zea Mays
tgcgctcgctctcggcggcggcgcgcccccacgctccgcggcggtggtggcggaacactcgctcttagagaggagtggaggggggagtacagttggctggcatgatggcaaccggagaagacggtgcagctcggtcacatgactaggaagcggaagaagggccgggagaaacctgggcaaatgataccatgtaagattaggcacaaagaatagtagatagattataggagatatggtgttacacatatataggcaaggatggccgagggtttatagcataagaaccaatcaatggagatcattgtctaatagagatcaatctatatatcctagccataaagacattatgcccaaatagaggcgtgcaggcccagcaagggctgccgcaccctgtctaacagtagccaactatcatcttgagctctccatcgtatatccctctatgcacataatatggttctttttatcccctcagaggcaatggatattgctgtcacaatgagcattctctggatccaccttctcatggcttcctccgaatgcaggtccagggctgttagagtggtggactcgcgggagccttcattgtggcgctttcgggagtgaccgacacagcctcgcgatgcaggacagaaaacagacccttgatatagcttgtggctccacatgccaaccagacacccgagcctggggaatattcctggaattggccagggttggagtctggtctgagccaagatcggggcaagcctcgcggcgcttgcttggcagtcgtcctccaaggttgggagccactttagcatagccaagccctagtgcgaaggtcatctgcacagggacttagcttctcagctcttttcccgaagtggccttttcaaggaccaacaagccatgcgctaatgagcaagagggtgtgcgtgcacacccgatgagtgtagccaccaagcccctggctaattagagaacagagagttaatccagctatagtggcgctaatccaggagcttaatctacctctatgtttgatgctcaacagagcagcttatagaaacagaaccatcctctcccttaccaatctacaatacatgaaggacttagtccaaggcacatagaaggccacaaagcccaggataagtcatctaacaaatgtgatgtgttgtgctctctattggttttgcctaggtcgggccgttgtttcattgtgctttgtttcttttcttcttaatgaaatgatactacatagtattagagacaaaaattgaaacaataagaagcatcgcatggtcactgaagatttcagtggctagtacttatcctcaacaaatggaacatcaaattatgtatcttaggcagcaaagaagataagaagttcacaccgtacagcagctttgctatacatgatagttgcccaaaacggtagtgcttaagtactactccctccgtccacgaacgttggacgttttggcctaggtacggctaaagctcttcaaggttggggtgagaaaaaagttggtcatattagatcgcag

SEQ ID NO: 13165 - DNA, 668 bp, Zea Mays
atttgccacatgattggctgtgcgctcagggtgcaggttcgcacgacgctggccggccagaatcagatacggcgttttcggccacatacggcgttttctggcgtatgtgtgggtgcagataaatagttttaaaataacttgttttgcatctgttcatacaacatgtgtcttctacgtgcagtcaaccaaacacgttttgagataaagtcaacgcatatagtggtgcaagacgagacagtacatacaaccaatcaaatacttggatcttggtcagcttccacatctccagcctccttaacacattagcaagaactccagtccgctccccttccaaaataatggaagcacaagcaacgtccccgtcccccgctcgccgcgtgaggacacacacacgcaggatgcagccaagcaaaaaagcccacgagccaggccaggacacacatgcatgtaccgcatcgggggcgtgagccaaggggctccggttcataagctacggcccaacaacggcgacggcggcgacgacgactcttcctcctttctcggtcggtctccctctctcatggcctaattaagaacgcacggcaccgccagcagtagagcttgttagccgctgctgcttgtcgctcttgcccgtcgtttcgtttcatcccctagctgcctagctgaaa

SEQ ID NO: 13166 - DNA, 306 bp, Zea Mays
tggcttcacttcacaataggtagcagttaatcttttgtacagatcgaagaggaaccaaccaccttgtgaggctgagaagcaccagtcgtggcaacacatcatgattgaagagatagactctattgagagcaaccaaacatggcgtctaatgccacttttgctcggttaacatatgatcaggtttaaatgggtgtataagatgaagaagaacatcgtcgatgaggtgatcaagaccaaggcatggcttgtcgcaaagggatttgtccagtaggtagtcgtgggcgtcaacgaggtcttcacactttt

SEQ ID NO: 13167 - DNA, 434 bp, Zea Mays
ctggggcgcccctggtcagcgcatcgccgtctctgggtgggcgccagcttagtcttttggcatgggaaggaagatgactcactgccgtgcgatctattttgaacggctgggattaggttgggcatacccattcgatgcattaaatccctgacgtcaaccagtgatcggacggttttggggtcgcgtgaaactctgaccatggatcccagatccaagggctaatagtgcaaaccagttcaatgaaagtaacatctaatctaggcggttggtgattaatcggatggtccagatcctctggtgcccctgcgccgtgcgtttttcacaaaagagccctcacattatacacaaaacaacccgccatcctcatctgcttaaaaaccattactatgaggccctagaatttatggattaaaccctgagctctcctgaaatag

SEQ ID NO: 13168 - DNA, 420 bp, Zea Mays
cccgactgatgctgaccctaatgggtgtgatccgactgttgctgaccccaatgggtgtagccttgatgatgctgaccccaatgggtgtactgtccgtattattgatgaggatgaggaagaggaggaaatccccttaattcggaagaacagtcgtcgctacatagccagcggggagagtagtggtgttccttctccagctttgtctgctctcgttggtctgcaggaattgtctctagcgaattttgatcagactcttgaagacatggtccctgaagatctgttgtccgagcccatagatggtggaatgatggaagtttgcgctgatgtgcctgatgccgggttagagttatcccgagcagcatctcgtgcctcgtcgaccttgaagcgcggtcttaagagtcgagaggctgatctggattg

SEQ ID NO: 13169 - DNA, 636 bp, Zea Mays
tcgtggatattgcgccatcgtcgacacttcaccgtggctgggccgctcggacttcgtcgccggtaagtgtttggtcccatggtgtttgccttggcctccgaaatgcgtagcataatcgggatgggagttctcgagtctgtgtggggatgggactgtctccgtcaatggcaccgccgtgcctcagccttgcgccgtcgaactagcatcggtgggagagaagggaacaagggaggaaagcctttagccgttagatcaacgttatgcggtttggattagattctgggtaatgcttcgcccgtacagatcctggccatcgatctcttgatgaacgattcaaattagatcggcgataacatttaagatcggatggtgtggaccgttgaatggtgatcgaaccgttctaattgggttagggcgtggcgagtcaccggccgtagatcccagatccaatggccctagctgcgtaccgattcaaggtttaatccggtgcaccggattttgatcgtgcggccctggttgtttggtacctcttcggctgggataatatgcagttctgcagaaccaacccgcaatccatagtagtgtgaagatcattgcatattagtccaaatatttgcgcaaaccaccctacattcc

SEQ ID NO: 13170 - DNA, 714 bp, Zea Mays
catgccataacttcgtatgaattattgacatgtatatgattcacatttttatattcagttatgtctctctgactcatgtgctcacctcttctgttattttcaatgtgacgacatgcccactcgcgtgacttgtcccctgcttgacttttctcgagaaacgtgccccaggtacctagctctttccttttctattctcatctcctgctttgctacacttgcttatctctctggttcttgtgtagcgtgtcaatgttcagtcaggatggtgaggaccaagaatgtcaccccagtagggggaggcgatgaccaggaccctatttgccccttcagactggacaagggaaagtatgtctaccttgagcagcagggaggcaagaagaagagaaagatggatagagctagtcgagcagcagtagcagcagcaacaactgagagagcagagcagggaggccaattgaggatttgctctaatcagatcaccttccgtgtctgtcgcctctcgtctcagactcgctccactccagctcggtttgacccctcatctccagtcaccactaccactccaccttcctccactacgccagcttccgccactccagtgcctatcaccacaatcgctacgcctacagcctccaccacacctacttccaccattctcactccctctaccactccaccaattcctccacctcgtttccgagagcgtgacaagat

SEQ ID NO: 13171 - DNA, 693 bp, Zea Mays
cacccattcccaggctcggattcctcaattatgccttgtcgtcagccaatttcggcttcgccggagttcggtcgtggcagcccaccgcgctcgcgcggtgaccggccgaattagtccggtccagcatccccacgttagtccatgatgttccccccactctgctgaagctagtccaggccctagcgcgcctctgaccccctctcctcggtcgcgattcctcatcggagttgccccgacccgcccggagcctttcctccatcgttctcccatctttgaccccagtctcgtggccgaagccccaccagtgagttcgtcgagtgctcctctttgtttctggccagccctggcgatcctagaaccgccgtagcacgcacccgtcccaactctggtgacctcaccgccgcgagaaggagcggcaccgtcggcagccatcaatcctctcggcattgatctccaccgtccgattcggatcgcacgacccaaatcacaagataccgctttgcgcacgcgcgtcctgcgtccggacccacatgtcggtcgcctgtgcacctggtactccgccctccccgcctcggtcgatgaccgaccgccctggccagctggttagtgcgcgctcgcgcccaaatctacgcgctcgcccacggatctaatctcggtcgttgattttagatctaacgattgagcggacctgat

SEQ ID NO: 13172 - DNA, 668 bp, Zea Mays
tggtaggggtccggactcataaacccagtctgctagtatacaaccacaatccagtaaggtcactcgcataaacccagtttcttgtaccctctgtggtccagcccggtaggggccacccttgtaaacctggtccttcatgtccacgtagggtctcacatgtcaggtaataaaggaaaattttctctcagaataattcctatgcactggctccaacgtcatatatatgaccaaggtatgatccctttttctacccccactcaaatcctcctttttgttgttatcatgaaatctaaattatgtaactagcatggccgcttagtctgtgatcctgttttaaatactgaacaaggtgcagattgaaagggtcctggcttgagtaaaaagtccacattctcccgggaggtctagagttgggtagccgcttagcctggttccgtactgtaagcctactctttccacaatcccagaatagtcgacttagtaccttctaggccaagaacctaaatgtctacgcttcgtttaaaatttacgggcagaatcccaaaactcttcttggcaaaagcttagttgcatagccgatggattgagacacaacaaaatgaggatcatgagggcacgctgctaagctctattcctgaactacacttagtaacaacttcgctggtcta

SEQ ID NO: 13173 - DNA, 311 bp, Zea Mays
actagatctatgtagaactccacttctctttctagtggcattcctggcaattcttctaggaatacatccatgaattcttctaccatagatatgctttctgctgctagattaaacaccattggatccttagcgggtggctgagcctgacaagaaactgactttccttggtggtccgtgagaagaacagtcttatttgcgcaacttatgatgcccttgtgtttggttaaccaatccattcctaatatcacatcaatcctttgggatggcaatatggttaagtctgccaagaacactaccccacttaaaaaaat

SEQ ID NO: 13174 - DNA, 1097 bp, Zea Mays
ctagtacccatacccgcaaacccatgggtttctaaaacccggcataatattattaaacaaaccaaaagttcattttatggcctagtaaacatggttggcagcccagcccattagctatctatgaaatctagagcctcagtgcaggaacgattggctagcatccgaatgagcccaacctagtaaacatggttggcagcccagcccattagctttcttgtcgggcacgggtagcccgcgggtacccggtacccgggtgggcacgggtacgggcaaaaacttgtacccggctgcgggcatgggtttcttagcgggtatattttaatttcgcgggtacgggtttgggaacatagtacccagcgggtacgcgcccgttgccatctctaccaaggtcctcatcatcatctgaagatgtgtcagcaactgcaccctgggtctcgaattatgtgaaggtctcatcctcagcccgaacatttgatattggatctggcacagggactaggtcctcaggggctggacgatacgaaccaaactagagttgagaggccttgagggtgcccaggaactgaggaggcctgatcagctgcacgaagatgtgatagagataatgcgcatatgatagctgacggcgagcacggagaccatccaatattgtatcctcgatctcacaaataaggaagtcaaccacatcaaactctgaatgtgtgatcaaggcaccaagtagccatagctgaatatgagcagtggcctctctatatccatccttagtagcagtgtccgtctcataagctcatataagtacttcgctgcaggagtgaagtcagcaggagagcgccgcgacccatatgtgaaaggaagtctgaacatggccgtgacatgagatgtagtaggtgcaactccatcgtgagggcgacgaagaggatccgagctgccgtagcacagactgtggagtcgagtcgatgactctagaaatccaaagagctggcgaatctggctggcatgcaaagtgacatcctctctctcgaagcggaaacgcatccacagggtcaatccacactgtagcataaaacactttgacccactcctcaatatacctgcca

SEQ ID NO: 13175 - DNA, 434 bp, Zea Mays
ccgccgcgcaagaagcgtacaaaccgccccgcggctgtgtgccccctcagcttcgctacaaccggtggtccaacacgggggcccaggcccacatgtcatgcaactggcgcgccggttaccgggtgcgaaaaaactgcaccgccgcttgcaccaatgccacgccttctcagggccgtcacggaagtctaaaaaggtaaatttttcagaatcagtgcatcgactcgaggcacccccgcacatggcccaatagtgacattaagtacgatggtcacgggccaatcagccgtgggaataggcatagcagttggcatgaccatagacgggccggcagtaattgcatcaacaggcacgcaggagcagcagtccaaccgccaatcagactctggtcccacctgcatgctcgcatcctcccctgaggcgggcccagggggcac

SEQ ID NO: 13176 - DNA, 640 bp, Zea Mays
gtaaattttgttttaaaaacataacaaggcatgccatctaggttttgtagcaatcagtgacaccattaacggagcaggagcacacagttcacaggatgggaagaaattaaaggaggaaaagtgatagaacatgatgaactcacctgctcccaacgaattgctgccttctcggtcagtggtcccactgtcgtcagagctgcaaatcagaaggacaaatccaccactgcgcaccgaggggcctgtgaagagaggaacgcaagcgcgccaccagcccaccacaccagtcaagggaagtcgcagaacctggtgtcgaatcagggcagatatgaggatcctttgaactgaaagaaaactacaatttaatttccttgagttgtccttcagagttcagagtgaactatctgtcactaaacttggctaatttttgaacttgtaacttactgcttacacttatataaaaatggatcatatgtatatgtacgtgcaaaattgtagaagactaagtgagactagcagcactgggggccaatcttcataataatggagagagaatagggctacaattgtaaaacagatcgagcacccaaaaatcctcagttaattacagaatgtagtacaagctatgtggcgccaagaagaa

SEQ ID NO: 13177 - DNA, 622 bp, Zea Mays
agcccgccagaagtcacgccaagccgtcccaagcaccatcccgaggtgaggaactcgttcctgtgctcagttgctctcaattccgctttgtcttagccaatttggcctcgccagagtttagtcgcgcccgcacgatgactggctgatacagccctaccctgtgcccctgctttggtccgtaaggttcccctcaccctattggagctagtccaggccttaacgcgccctaaaccactctccccggcaggaattgctcaccggagttgcccgacccgcccagagcacctccccttcatcgttctcccgtttccgatctggtccttgcgaccggaaccctgccagtgagtttgccagaccttcttcacccattccagccctcaccggtgaccctagacccccatcgactgagtctacctcgcctccggcgacctcgccgccaaggagcgagcaacgccggtcatcgagctataaaacgcccgcgcgccccatcacaatcgtctgtccccgatccaacaatttagatctttggacatcgattcgcgtccgcgtgctctacccctaggccccgcctgttagtgcctgcgccccctggcactgggcctgcctggtcagcccgtctccc

SEQ ID NO: 13178 - DNA, 819 bp, Zea Mays
gaccagtatacatagatctaatcctagcctttgctcagaagatcaagggttcacgacgctctgcccgaacacaacgccgacgacgacggcaaccccacctcagcggcggcgccattgccaggatctaccagcactcgactccacgcctaaacctcgatccgaaccgggatacacatagcaagggcaatggtatactactgaaacccgtactcaccagcggtgacgccgcagaagcctcctaccacggagttccctgtcacgcgatggagtttgaatgaccgcgaggacccccggttggtcttcatcacccgacaggctacgatcacgcgtggcccaacggtggttctccctggtatttcgacggcgcccgcccaatggtgtccagcgccatagcatgatcttcacccctcggtctcgctcacgacggcggggcgcagctgcccaggagctaaaggaccatgcaatcggtagatggcaaaaggaaattgagggcgctcggttttatagccccctggcccggccaaatctccaccccgcgcggccataacaaactcctagatagcaatttctctggcggttacaagaatctgagatctctgttagctgagcccaaatcacacgcgatgaaaacaatggcttctgacaaggcgtgcccaccgtacaaagaaacaaggacatgtgtacgcgcggataaccaatcgtccgcgacggccaacgtgcatccaaccagcacaacgtgcatggctagagatacgggattagttcacccctgcggcccacatgtcattgagacatggctgtcatcatctccgatgtcac

SEQ ID NO: 13179 - DNA, 452 bp, Zea Mays
tgtacatgtgtatacacgtctttcactgggttcgtcaccttgttgcagttatgttccaggcttcctgcaacaagccttgatctctggcccatttctgcacatagaagtaggaaagagggcataggatgttggcatgctgcagcttatctgagaaccatcgtgattagatactaaccgatgaacatcgagctgggaagcaagggacagttgctaaagtcctcaaattggtgttagtagtagcagcagagtcaagaaaaaactttgatagtgaccatgcttaacatgagtagtctttttttctcccaagtgatgccttgctgtactttagcccatttctgatcctgtcctactaaaattgccatcataggttcgtggtgtattatttttcctaggaaaacaaaatcttctacatacacaaattcttttgtattaaacttattgtacagtgtcaa

SEQ ID NO: 13180 - DNA, 490 bp, Zea Mays
cgttgtgacttcggctcggcatccacatatctaggtccctccgcgcacctcgtcccatttgagccagcgtgaacgaccctaggtttatccatcgccgagagaggagccgagtgtccatcatcggagagcaaggacaggcttgtggccgccatcgtgcgttttcaccttcagtgtcgaccggagaccgtgatcggctcaaagtggcgcacaatatcttggggacgtaatccagtgggtaattgtgcatgggaagccgagggtctcacgcaattggtcgccggagttagggcgcattcgcgaagccagggaacgctgtgggcagcaccgtattctccacggccgtcggtaacgacactttcctctagtccaccctaccttccatttcgtgtagcactcgttcacattaggattctatcaccggagcaccggggcctatgtgcgccggtgatggcgccgccgcaacagggcctgcgccgccgggctgagctcg

SEQ ID NO: 13181 - DNA, 483 bp, Zea Mays
ggttgctacagcttcgtgcctcgctctgaggtgagctacctagttccaacatttcggaagagatggtcgggggcctagatgtaggagtggttctacgtgaagaatgacctgcctaaaagggaggacattaaggggattattcaacgtcctatatggtctcgcttcggcattaggaggccatccactgcccttgggaatgatatacaagcatgccagatggccttcaatacagtatgtacttacataggcattaggagcacattgcttataaagtgtgggcactcgcaagtgggtgggaaatgccgaaagaagctgctgctgggtctagccaaggtggtttggtctacctgaagtacatgttcaaatacaggagccagtttgatgagccaaatgatgactggttagatgccattgaagcaaccagtgatgaattgcttggtgcctactcaaaggccaaagatgacgctatgacaacgaccttct

SEQ ID NO: 13182 - DNA, 611 bp, Zea Mays
ctgtatagtgtgtcccctatgagggtgtagtgggctgactgccttgtgatgcgttccgctgccaccttgtcatccggttcttcattttttatgtacctgctgataggctctctccagtcattggggtccgactccggttggctcaaggtgtcgcattcttccgtctaatctgagagaatactcgagtgtgatatttcttggacgaagatcccgggtggaacctcggcccgactgaatcccagcttcgacaacgcgtctgctcctgcgttgcggtctctttccacgtgatggaactccaacccttcgaatttgtcctctcattttcggacggctgcacagtacttgcccatggaatcagtcgagcaatcccagtctttatttatctggcttatgaccactagcgaatctccatataccatcagctttttgatgctcagtgatacggcgatgttcaatccgtggatcagtgcttcatattctgccgcattatttgatgctggaaataatagctggagtgcatacttgagttgttcagcgagccatcaaagtacattctccatacttcgatagtttctggttgtctaggacctgatgctcagtccactctgaca

SEQ ID NO: 13183 - DNA, 532 bp, Zea Mays
aggagatcaagacgatatgttatgaggtgtagggtctcaagaataggatgttggaagcgctgctgctccatctcgtggctaccgtgggacgaggtgcataaggctggcaggacggcggttgggaacataggcaagcgaggatggcagacgcgataaggttggtgcatgcgtcgaacacgggctgacaagggtggagggcgcgataaggttgttgggtgagcgcaaaatgcgtagacagcgggcgagcgaggatggcgatcgcagcatgcacggacgcggttggagcaaacacatcaagatcggagcacgacgtgaattttgggaagccacagttggagcgcctgcgggcgaggatggtggtcgcggttggagctcctgcgattataggtgggttcatggcgagcggaggggttgcgagatttctggggcgctcgggtcagttgcaagctccatgttaatagaggcgtggtggaggcggcttggggaaggaggtcacaaagaggtgacatgtggagcagcaaagtggggaggg

SEQ ID NO: 13184 - DNA, 372 bp, Zea Mays
gcggcagttgctggtccttggatccaggatccatgaccatggttcagaatagacgaagagagtatacactttctaatctcgtccatccgtatttgatccaacggccacatgtcccgcacgacacgatctaatctaggtcgttcatacttagaccaagggctcacgacaaatgcttttcctccctccccccctccggccacctgtgcgcccaggaatagggctcccggcgacgtaccatgccggcgcatgccatgccatgccctggagtgataatccccatggaaaactgtgacacatgcagagatggataatgtgaagggttgggagagtgctcaccatctgcggcacatcaacgagctcttcccgccgcat

SEQ ID NO: 13185 - DNA, 496 bp, Zea Mays
tgccgattcagagtctcgtccgagctcacagtcgacaacggcaaacagtttgacagccaggactttagggacttctacctctccatcggcaccaagcttgcctcgcctcggtctaccacccgcaatccaatggcgtcgtcgagcgcgccaatggcaagattttcactgccatcaagaaaagacttctcgatgacaagaagggtaaatgggccgaccaactacctgaagtagtctgggccctaaatatgaccgaatgccaggcaaccagattcacaccttttcgtctattttatagatcggaggccatgtcgccgcaggagataaagcatgggtcgccccgaacaagcacatcagcagtccccgacgtcgacgaaccaacgtctaaagacgtcatcaatggagaccgcgtcctcgccctgcaggccctcaacaaataccaagctcaaaccaaggcctggcgcgacaacgcggtcgtcccaagagagttcaacgaagg

SEQ ID NO: 13186 - DNA, 366 bp, Zea Mays
aataagagttgtatagaatacgattagcaaatgttacttatctatgtcttagtgaacttagtgaacatgaatcttgtctactatatattgttagagggaagataattgtaaaacatattgtcgaggaaatttcggtggtgaatttatagggtgggtcatgaaacgaagaactgaaatgaatgcacaaggacacgaggatttagacagatttaagctctcaatgtacgataatactctatgtcctgtgcgttgcagtgtgacagtgtctattgcctatgcaatatgatcagatgatctaccctagatgggtgttgccactcccctttttgttacagaaagactatctagccgctagctatataagga

SEQ ID NO: 13187 - DNA, 616 bp, Zea Mays
ggccgctcggccaactaacctgggcggacagcttcctgcagtcacgtttcctctcccttctttttgtctctcttgcttgtggaccccacacgtcaaggctattttcttctccatcgttgcttccagttccagaccacacgaacgcgccgccgctcgcatggactcgtcacgcaccacgctggctcatccctgcgtctcctcgactgctcgccttacgtggagcgccttcggctaccgtttctcctcttctctccccactcacgtcctcattcaagcgaccgttcctctgcagtaacaccgccaccgcgccattaatggccaatgaagctctaccggcgtccgttacaccttcccacacctctacaaaactcgaccgtgcccccatagagccagtccccatccgtcctaagcccactccgagctccccagccgcacctccatcgaactccctcctccatagcttggtcctcgccgttcaccgctgaccggagccgctcccgatagctgttgtgctgtcgacaccagagccgctcgccgctggagccgttcaccgtcgaccagaactccgaagtcgacgctgcgtcccgacgaccttcccccgacacctgactacctg

SEQ ID NO: 13188 - DNA, 386 bp, Zea Mays
ttgggccgctgctcgccgtgatttttgccagagagggagggccgactggtggccggtaccaccagttcttagcgtggcttgttgagcgtgagagacagagagatggggaagaagatgttgtggttgctggtgggagatgttggggaatgctctctgttcgtggggatgagttccatgccatggttaactatttcccaaaaaatcagcaggtttacctggcgtaagctacatttcttcctagactaacatgcttgcatttcctaaaggtttgacaagaggataactgatgagttccatgccatggttaactatttcttcaagtgtgcaagtgcgtctatcgactgtatggttctttggtttttgttgttcgctgaggtgcaaagtag

SEQ ID NO: 13189 - DNA, 1198 bp, Zea Mays
agcagtactacctgctgatctcaagtttggggcaccaaggttgatctttgaaagcatagcagaagccgaggctactaggctggaggatgttgatgtactcgaagaagaacgactgaacacggtaattcaatcaacacgataccaacaaactttgaggcgttatcacgataagaccatgcgatgtcgatccttcgcagtgagagacctcgtcctccgccaaattctaacgggggagggacgacacaagttgtcacctctatgggaaggaccattcatagtagcagaggtcactcggccgggatcatatcatctcactcagatggacagcacagaaattgggaactcatggaacatagaacacctcaagaagttttacccctagctgtatttcaaaagctatcgagacgacaatgtactctataaactgggaaatatatcatcaataaaaagacctcaagtatactcaaattgttcatgatcgacctgcattcttacttaactcggggtgaccactatgccctgctaacggagcaatcggcttaagtcggcaacgacttaagatggtgcaacatgctcgcgcttacttaactcggggtgaccactatgccctgctaacggagcaatcggcttaagtcggcgacgacttaagacggtgcaacatgctcgctcttactcaactcggggtgaccactatgccctgctaacggagcaatcggcttaagtcggcgacgacttaagacggtgcaacatgctcgcgcttacttaactcggggtgaccactatgccctgctaacggagcaatagacttaagtcggcgacgacttaagacggtgcaacatgctcgcgcttacttaactcggggtgaccactatgccctgctaacgaagcaatcggcttaagtcggcgatgacataagacggtgcaacatgctcgcgcttactcaactcggggtgaccactatgccctgctaacggagcaatcggcttaagtcggcaacgacttaagacggtgtaacatgctcgtgcttacttaactcagggtgaccactatgccctactaacggagcaatcggcttaagtcgacgatgacttaagacggtgtcacacgctcgcacttgctcaactcggggcggccactaaaaagagcgattggcttgagttaatactaacttaaactagcgcagcacacttggcgcgca

SEQ ID NO: 13190 - DNA, 1487 bp, Zea Mays
catttagtatgtcagccatagtaaatcgttttgttgatggtcttagacaggatattaaagcagttgtgtttatccagcgcccattagacctcgatactgccgtctctcttgctcttttacaggaggagttactgtccccaagagttcagcagcagtttaagcgttctgaggaccaacgcagtagcagcaacacttcggggtttctaccaacatcattttcaactgctcaaatttctgataagttgattcgctcaccagagacaaattttcgtacaccaggggactgtcaaaaccagaataccgagacaagaaaagcctctgctctgatggcgtatagaaaagcaaagggattatgctataagtgtggtttaaaatgggggcctactcatacttgcagcacgacggtgcctttgcatttagtcgaagagttgtggcagatgtttgatatgcctcaagtggtcgaagatcatttcagtcatcctggagaagcgcatggaaatttgatggttttgtctgtgaatgctgttctgggcacagaagcaccacaatcgataaagttagcagccactatgtttgcgaaatctgtcattatgctagtagactcagggagttcatcatctttcatcagtgagcaactagcacggtcgggctcacccagagtccctttgcaacatccagtccaagtgcaagtagctaatggacaagttattcaatgcacacatcaagtagtggattgtaaagtgtatgtgggcggctattgtttcaagatggatttgaaaatattgccattaaattgttatgatgtgattttaggtatggattggctggcttctaacagtccaatgcatattgattggcaagaaaagtggctagttttttacaaggaacaaacaaaagtggtgttacaagggctaagatctgacttatgttctttggacccagtttcagtgcctcatcttgttcatttggactctttggatgaattgtggtgtataattcaattacaaacagtgaaaaaacttcctgaagacaaccttccagcagaaatccagcagttgattcaagagtatgcttctctgtttgacaagccaacaggactgccacctgcacggtctcatcagcacacaattcctttagtaacgggtgcagttcccttccgtctacgtccttaccgttataacccagctcagaaggatgagattgaaaagcaaatttcggagttgcttcaaaatgggatgatacaacctagtagcagcccttttgcctctcctatcattctggcaaggaagaagacaggtgactggcgtttgtgtgtggactatcggcgcctcaacgccctcacggtgaaaaataagtaccccttacctgtaatagatgagctattggatgaactacagggagcagtgtggttctctagtttggatctcagtgctggctatcatcagattcagatggatccgaaggatattcctaaaacggcgttccaa

SEQ ID NO: 13191 - DNA, 664 bp, Zea Mays
cgggaggaccaggcgcaacaggagcgcgaacctccgagaaccgaaactcaactggataggataacacccgtttcacaggagggacttcaacgatgcccgacggcggttcaactacccagagatccctggatgaaggaagcttggacagatcagaacaccaagccagacatctgaaacttgacaggtccaacagccccagcgtatcaggatgcacttgctgtatccaggcataagggcacagaagacgatcagcagtagacgtctcccacacatgggcagggatgccacgaagctccacatcaatcaaggacggcagcacacgaccaagggctccggccaaacgattccaacgtttgcacagaagactgagaccgccatccaaggaacggaccggttgctgaatgccaatcaaacgctcaaccagaaccaggtccggaaggaccaacaagaagctcgactgagaggcccgacggagaaccagagagcttgcggcaacatcgatcatggccgcaatcaccgccgccacctctccagcagagaccagaggcacatcactgataacagaaaccatgatcgcattagcgagatcctcctcgccactagccacctgatcgctccagtcaatgatacaaggaggaggcacatctccactaacaggcacctg

SEQ ID NO: 13192 - DNA, 846 bp, Zea Mays
tggcaggacttcatccgtgaggaggtccggaagctactcgacgccggctttatcgaagaggtccatcaccccgtatggctggccaacccagtcatcgtccctaaggcgaacgggaagctttggatgtgcatcgactacaccagcctaaacaaggcatgtcctaaggacccgtatccacttccacgcatagaccaaatcgtggactctacctccgggtgcgacctcttgtccttcttagatgcctactcgggtttccaccagatccagatggctagggaggataggaagcataccacttttgtaacagtggatgggctctactgctatgttgtaatgccctacggtctgaagaacgccttgccaacatttgtacgggcgatgagtaagaccttcggggacctgatcagggacaaagtagagatatatgtcgatgacatcatggtcaagactatgaaggggtcgactctggtggaagacctgaccctggtctttgataggctgcgggcgacgcgcacaaagctgaacccggacaaatgtgtctttggtgtctccgccgagaagctgctgggattcctggttttgcaccgggggattgaagcaaacccagagaagattagggcaatcaaggcgatgaggcctccgacccgcatcaaggacgtccaaaagctgacagggtcgttagccgcccttagccgcttcatctcacggctggctgagagggtgctacccttcttcaagctcctgcgcaagaccggtctattctcttggaccgaagaggcgaaacaagcctttcaagaattgaagcggcacctggtgtccctaccagtactggtagctctagaccct

SEQ ID NO: 13193 - DNA, 685 bp, Zea Mays
agaggagggcgccgacacttatgcgcatgcacacatggacgttagttccattttatgcgcacgcacgacacaaaggtgcgggcggggtcaagaagagaggcggttttggaatggatgattatgacgtgtggggccgatagatcagtgaaacggttgagcaagggggtatgcttgtgctgctgacgggctggactcaagtcaggaacagtttcaggtgatttggtgcgcgcgacatggcacacaactgagctgaaccgggcgtgaggagttgtcgcgcgaggatgaaaagagaggtggttcgcgatgataaggtgtgtgtatatatagaaagaagagggcgcgaaagtcagttgcacgatttcgccacggctcgtgatgggaggcaagacgaggagaggctgttgaggctttgtccaagtcagacgcgtgcacgcgaaatagacaacttttagagaagataaagctgacacttggggcctcagatgaccgcgagaagaacgagtgagggggaaggcggttgcgtgcacatcgcgtgagacgttgcacgacaaggtgagaaaaggtgaagtttacgagtatagacaaaggtagacacatggggagacaggggtagacggagggtagacagggatagcagatgtgagcgacatgttgttcgcgaggagaagcagttcggtgatctcgc

SEQ ID NO: 13194 - DNA, 365 bp, Zea Mays
ttctttcaaaggtcctcaaaacactaacctgacagttatcttctagcatgtttaaagcgttacaggtagaacaccgaaggtccgactcggccggagcggccatgagcgcaagtacaaaggcaccaactttggattaacaaggtgtgtgcgtagccgatgaagcaagacaaatcaagacaaaacaacgggacaaaaagacaacgctacccttagtttgttcactagctcaaatgtataagtttaagggcatacttgtaatttttccaaagctatacctcacgactataaatagagtaacattgccatgcattaaatgggtctttggataagagaacatactactctgtctcagaagttgtatttac

SEQ ID NO: 13195 - DNA, 419 bp, Zea Mays
cgctcacgcccacacacctagtcccccgctgccacctgtcaccacgggcaacaattaggggtggatttaggccttgggccatggcccggggcctggtccatgtaacaaaagtaggcagaccatctttattgggccttttatcttatttgctggcagctggcgccctcccactctcccacagtcttcattcctcgccttaagtcccacagccactcgccaatttgcttgactcaagtatctcatcgtcggcctatcgtaggacggttgcctcaccatgacacccagcgctgctctctcttagctccgccagcgcttagcactggtcaccctgctccctcgtctggccagcgcaccgatggagtgtcctagggcttgccagctacgtcgttccagcctccaggcatttgcgtcacgtcccc

SEQ ID NO: 13196 - DNA, 499 bp, Zea Mays
gtaacatagtgcaatatataggaagttggggatcaacgaaggatgattccataattattggaatatgcatgcatcatgttaagaatatactaataattttcccctcttatggagacatggcgcgtacaaggaaaacaacacacaaatcaactagaccttttggtgtgcctcgtcatcagctagcccccagacatgaaggaagtagtagtggcagcaatgaaccaattggacacctggaagccagggtggaacaacttcggttagagctacatcaccggaatagggcatgggcgcaggacagccagcgtgtagctgaattgttagctgacgtcagccgcttgcaatatgagatttcagaacgggactcggccattgtttgggccatcaactcgcgttcgatcgcttgggaccgcaaagcaaaagctcgagctcgtgtggcagagcttagtgcggccctcgacagcctgcaagtgtactgtaatactttacatgaagaagt

SEQ ID NO: 13197 - DNA, 467 bp, Zea Mays
actgagtatacatgtgattaaatgttgcactcattgcagcaattcaaaaggctttggtggcgcggaacgatcgtcagtttgccgttagatatcttgacgaccaaaggcgtagatagagtctgtaacttttgcaaatctgcattttatgatggaatacatgtactgttattgatgctacttacatgtgtcaatatttgtaaaacattttgttctactgggacatatcaatgaatacgtggaacatcaaatcgtttagcccgtacgttttccatttacaacattatattggtttaatgttgtgtcatttttgacattcaaattgtaacttcgctcgtgaaattacgtcaaatatacagatcaaatccggaacaattttaatgtacattcggtataccaaagcccatctataggagctaggcatgctacaggaagatattccacatcaccagagttatgaaaacaattac

SEQ ID NO: 13198 - DNA, 448 bp, Zea Mays
ggaggaggaaatccccttaattcggaagaacagtcggtgctatatagccagtggggagagtagtggtgttccttctccagctttgtctgctctcgttgatctgcaagaattgtctctagcaaattttgatcagactctcgaagatatggtccctgaagacctgttgtcggagccggcagatggtggaatgatggaaatttgtgctgatgtgcttgctgtcggggtagagttatcccgagcagcgtctcgtgcctcattgaccttggagcatggttttaagagtcaggaggctgatctggattgctctgttcccatggaggtggttgaaaatccttcagccttagaggtggctgctacagagaactcggtccccaaggatggcgcttgcgtttacccagcccccgagggtgttgccggtgatgatccggcttgggtgagcagcgcgagc

SEQ ID NO: 13199 - DNA, 644 bp, Zea Mays
gggatctgggcgaggtcagacctcgcccgatgctgactttaggggatcagatggtgcagagctcaatcttcgctattgattggtggggacgggatgcggtcgccttcgtgcgggaggtggagtcagaggcaattaaaattgttggaaaatacgtgctgaagactgagatgttgaggagctaggatatccatggttccaacgtcaggttgaaccaagtttttgaactgaatagattgccatacggtccttacccggagggggactctgctgatgccagggacgatcgaggaaaacaggtgaagacccggtctgaagagggcacctcaaatgggaaggctatgattgcagctattcgaaaaaggaaaataaatgtggaaggtacggtgggtgaaaagatagggccgaaggcctctagactttttgttgaggagttttcactgggacgtgcgcgggtcccgaggagtttatcacttcgcccgagctccgagaaacatcttcatgcatgctgaaggttaccaggggtcgatggcataggaaggaccctataccccgggccgccggcgatgacactattttacgtcctgtttggctcgcgagctaaaaatctttccttacaagagaaaaattggtgctattgtgtcagc

SEQ ID NO: 13200 - DNA, 526 bp, Zea Mays
agaaactctcccaggttgggttttttaagtcccaagggaagcccaagataggtgaaaggcatagctccaaccttgcagtggaatgtatttgctaaaatcgctaatttctggtatgagacattgttgggataaattttagacttgtgataattcacatggaggcctatagattctgtaaatgagttaagcatcgccttaaggaagaatagttattcagggcaagcctccaagatcaagatagtgtcatctgcatattgaatatccgagaagtcagtcccacatgcagtcggaagtggaagcctgaggatgccacagtctctagccttgttaacaattgaatgaaggagatctgctgccaggacaaagagaaggggggacagggggtccccttgtctgacgccgcgcctgcagtgaaagcgtcttccagggacaccatttaaaagtacttgggatgtaccagagcctaaaatcaatgagatccagtgaatccatttggccccaaaccccttatgcctcaatatgtcaa

SEQ ID NO: 13201 - DNA, 803 bp, Zea Mays
agaacctagggtctttttaataatttactcggccgaaggggtagggataggtctcagccgctggattagaaaccaagggcccagatgaaatcttcatttactgaaccggtatgcaatctggttctttggatctgtgatcaagggttgtgatctattatgtgcacaatttgatcttgcccatatgtcgacaatccaacggccgggacaagtcctccccagtcagtacacaacctctaatctcattcgttggccgccagatcaacggtccccatgattaccccctctttcctgctctccgaccaacccgagacgacggcgccctggttttcatggaggcgccatagccggagctcccaaacccccaatcccgcatctaaactccgatccaaaggtagcaactgacggcggtaatgacggggaattactacggaaggtgctcaccgctgatcgaagtcgtggaaatcctgtccacggaatgtcgcggactcgcagcgacagcgacgaattgggggctcccagatcgctcccgcaccacgattccaccgcgaaagagttccgggtgaccaggcggagcaccacgactccaccccgggtacccgtcggtgatgctctctctcaaggcaccaatttctttcctctctgaaacccgactggacaacacggcagcgccgaggcgattcacgggtgtcgaaaagcgaaaaggaagaggagaggagggaaggagaggcgctacgattcggcctatattggcgcaaggtcgtgcgtgaagctgagctatgaagccccgggtcttcgggcgtacc

SEQ ID NO: 13202 - DNA, 549 bp, Zea Mays
cctcccctgtgtatttactctctcaccctcattgtaatgggcttggcccatctaactcaggctatatatcaatctcccaaccccttgagtgggttagggtttccattattctacatcggtcagccccatgcacacgatccttgctacgtcgacgcacctgacactgctccttagtgaaaagcaggcgcccaagctcatctgtcgtctccatgcagaagcggctctccgccacatggagccacccgacgagctcctccaacggcattgtcttgaggtcgcacaacatctcgatggatgccgcgacttgattgaacttcggtggaacgacgcgtacctcctccacctcctcgccgagctcgcgcatctccgagacgagggagcttagtctcatggcaaagtcgtccaccttctcaccatccttgaacttgatattctcaaagaccttgagcagcctttcggcgttggcctcccgaacacgtgcatctcccatgcgcatgcttctcacagccacccacgcctcctttgcgctcttcttcacagcaatccccg

SEQ ID NO: 13203 - DNA, 592 bp, Zea Mays
cggacagcgtcgccgccggtttctcctctgcagtgcctctttgccttctgacgatacggatgcctactgctgccgtggttgccagcctcctcttctccacactcaagtgcgcatgtctgcctcttctctattaaacagcgatagcgtcatctactctccctcttcatcgtcgtgggctaagccattaatagccgcggctgtttcttcgagtaggtaacgctgttcttcaatctgcatcaatggagtattaaatctgcccgcaaaccactctcctccctcgcctataaagcttgagccgtgcttgcttcctacctcctactcccttcagcttcctccagccgatccatttcttctctgctttgttgcctgtgcgcgtgcctgctctttctcctacccgtaaagtgctctcccgtctgctcaatttcatactagtggaggacaggtgaaccataaggcatgcggcacccaaatcgcctcctctccaacgccaggtctccattccctcgccgattctacctccttgaaatcgtcgttcgtcgtcgccattcgtcgacatcccccgccatgctgaagtcgtgacgccatccttgag

SEQ ID NO: 13204 - DNA, 849 bp, Zea Mays
aactttagccctataactttggtgcagagagatgaccaagtcgtaatgcaaaattttgagaacaatggccctaaaccgtggctgtcaggtgcatttgactgaattttccccatggtacagtacacggatcaggatgccagatcggacagctcaacgccggtgatcccgcgccgcgatccgcgtcgccgttgcgattcgtgcgtcgtgggttgcagatagctcataagggtaggaaataacgcgacgtgggtgaactccggtcactattctactccggccgccgtaccaagcttggatcacgaccacttcggataagctcgtcggagttagccacttcgtgaccgtgcgccacgtgcctcggtggtttaccacgtcgcagtagttccccttgtgcatatccggtgatcgccggtgaccccgccacggtgacagccacctattccttgcaacagtattcttttcactctccgaccgccaccgcgccatccgaaattcaccggccaccgcccttggagcctataaattgagggcggggatagttgcgccatgtaatcgtcaagctatagcacccactctcatctccaatcgttccccgtagctccccaatttgggattacccccaaatcgatcgaagaacgccgcgaaaccaagctcgccgtggtcagctcaattcgggtcagctcctcccctctgctcccttgtttaagcattcacatacatcggtaatactcgccaacccatccaattgaattaggagcccactcgtcgccaggaacgcgttcatccacccgcaacatccatggtcgtcgtggccagtgcaaaccatagggtcattagtgaaattaggtt

SEQ ID NO: 13205 - DNA, 365 bp, Zea Mays
gtgttcagcatgcatggagagctcagtagacatacgattacgatcatcaaggcatgaacttgagatgccatactcggttcggcgagcgagccatcattgtttccatcactgtccttccattaaaatccacacgaaaacgattgcggtaaataaactcaatggtaaacagaaaaacaggtgaagaaaataggcatggtaaaagtggaatcgtagttcaaggaaccagaagcacggggactttggaactgagagcgagaggaagagctgtgggaagcataaccaggatacactgggataatcagacagagacagaatgaatgtgtttcactgctggagcaagacacaagttgttgaggggaggggcg

SEQ ID NO: 13206 - DNA, 332 bp, Zea Mays
ttccctttcaatttttgtggtttggatgacaaccaaattaaaggactaacatgtgtgctaagttatgcaaccaaactgaatcaacacccatgcaaaaaagtgagatagggtggtgaagttgtcagacttggtggaggagaaaagtccaccagtagtgagagaagtcatctaggatgaccagatagtactagtaactagaaatgctcggtatcagggatgtcgaaaaggtcataatgaatgagatcaagggggtgagcagtgcaggacatggaagaggggaagggtaagcgggtgtaaatcccaagttgacatgaatggtaaggcaaggaagc

SEQ ID NO: 13207 - DNA, 523 bp, Zea Mays
cgaccaaggagctcttgctacgaattctggtaagtcgctaccctatatggttcgccttgtcgtcctcatcatgtagcaccgttgtatgtggggtttggccgttggtatggctggagggggcctcgccggtgatgctccatcaggcaggcgtggtggcgccgccgcttgcagactaacgtggggaagaaagggctggcgaccgtcagatcttcaatgaatggataggattagaacgttgtaacgtttcgagtgaatcgatctggcgcgttgatctctgcgcgtatggtctagattagatccctggataatggttcgatagcgggatctggaatgttggcacggtatcggatggaggaggattgatcagggcggggtcgcttctcatccatggatgttagatccaacggccaaggtctctgcgtaccccttcgcagtgacaattcagcataagagcccctcgatttattccaaattaacccgcagtccacactgtgggaagcctgagtcttagggtaattgtgat

SEQ ID NO: 13208 - DNA, 637 bp, Zea Mays
gtccttcttctttgggtgtctgaaggggggcgttgtgtcaagccttgtcttcccaagcacccgtatcaagttgttgagaccccccacaccacacgtggccaactgggttttgcctggccgaagaccccccttctccacgagtatatataaatcgtaggctccctctccttaaccatatccaagtcaccgatagccttagaacacaaattgccaggcatagtcgtccgtgtcgcgctgcctcgagctcgaagagagagagagagatcgccgccaacgttgctcctcatctccaccgtcgtctggagcagcagtgtgaccaaagacgttcgcgcaagaacatcgaccgtgtacaaggagccaccaagagcgtgatcaatcggagtacccataattcctcaccgacgcgaatcaccgccactaaatctgccctgtgtcgcggttgggcatctccacaccttcatctctggtgagaacaccccctccattagtccgtgtttgtctccgcttcgattgtgacgttgaattgatgtttcgtgcttggattcacccagaatttctcatcagcgttcggggtttcgcaataattatgccatgaatcatggacgaagcgcatgcatgtattattcgtagtaatcac

SEQ ID NO: 13209 - DNA, 738 bp, Zea Mays
cgagcattccggagcaaaaggagtctggcaccatgggcagcgtcaacgtacaacacaggctttccatttctttagggagcaccaaaaaactgcattagcggtgagtctcacgaagaagacaacataggcttttaatttcttcttcgtgcacccttccgtcgttgctttcctttggcatcagcggctgttctcccggcgtcggtcgtcgacgcgccagatccagtggatctgtccggcagcacacacctgcagttccttgcggtcgctgctcgcctcgcttaatctgaggaagcatgatggagaaggatagttagtaactatgggaagcggcgagacaaagaagaagactgcgtggggactagagagggaagaagggggagggggtcgtcactgtcctcgaacgtgacggtggcgactgccttctacttctagtgccgacggcgaggcgccaacacgacttctctttttcaaatcgaccattcgtctactgtctagaaccctcgttgtctggaaccctcgcgtcgtatcggtggaccgttcgagcatgatcgtgtggctgaataaaaaatgcgcgaaatctccagaagctttctgggatatatttggtgttggccactgatgtacgatccaacgacggaaacgaaaaaaggtgacgtggcagcatggttggcgagctttccgtccgtctttcatatatagaaatttagaacagcagctagccggagaatgtctaatgta

SEQ ID NO: 13210 - DNA, 295 bp, Zea Mays
caaatacaacgtggcgggagatgatgatcttgcgagtggatagatcaagacaccggtagcccttctgagaaggaggataaccgagaaagacacacgccttggatcgaggggacaatttgtgggggggcgtggcactgaggtttggatagcacaggcaactgaaaactcgaaggagtgagtaatctggcatcttgcgataaaggagatggtagggaataccattatgtatggacgacgaaggtcgccggtttgtgagaaacacggcggtggagagagcctcggcccaatagggagg

SEQ ID NO: 13211 - DNA, 320 bp, Zea Mays
cttggatgcgagaaaaatctcctcgttgctaggccctcctttatctctcctcaccggctgggacaagaaaacgtagagagagcagcagatctgagcagtagatcgtcagtaaccaccgctaatgccaaaaagccttcgctgctagcaacaccctgcaccaccgctaacgccaccggtgctcagcaacttccggccttccgcccatggtgctcagcaacatcaagaacagtaggcgagaataggagagggaaagaaaaagagggcagtgtgctggtgagaaggtggcggggagggtcgtcgtcgaggctacatgccaccac

SEQ ID NO: 13212 - DNA, 919 bp, Zea Mays
gatgccggtccttctgctcctgctgctgaagaagtgccagtgccagtttttgctgaagctgatcccaatgggtgtgacccgactgatgctgatcccaatgggtgtgaccttgatgatgctgaacccaatgggtgtaatctggccacagctgatcccaatgggtgtaccgtccgcattattgatgaagatgaggaagaggaggatgaaatccctctaattcggaagaacagccggcgctacatagccaacggggaaagtagtggtgttccttctctagctttgtccgccttcattggtctgcaagagttgtctctggcaaattttgatcagactctcgaagatatggtcccagaggatctgttgtcggagccggcagatggtgggatgatggatatttgtgctgatgtgcctgatgccgggttggagttatcccgagcggcgtcccgtgcctcatcgaccttggagcgtggtcttaagggtcaggaggttggtctggattgttctgctcccatggaagtgggtgaaggtccttcagcattagaggtggctgttacagagagctcggccctcaaggatggcgctagcgcttacccagcccccgagggtgtcgccggagatgatccggctcggatgggtagcgcgagctatgacccagcccccgagggtgtccgagttggttctccctctcacacttccatggatgttcacgtagggtcttctcctgcgcattctggttgcatggcagcagctcaagcttcgggtcaggaagtcgccttagaggccagcgctcctgatgacagagttttgacttctgctgatgacactgacttggtccccactgatgctttgcgggttgttccggttggtgatccttcatcgagccatcaattaacttcccacgacttgggagttccttcgt

SEQ ID NO: 13213 - DNA, 559 bp, Zea Mays
tgatatggtcttccattttgctataggatccttagtccaaaaccacatgatctggtcactaaagggctccaaactttgctccatttacaaaatttcaggttttcagttttgaacataatccagccactaacacactgacaatccatttttaggagcctgttactccactttttgtgtagcaccaagtccatctcactctagaaaacttgtttactatactgtagtctccaacttagctatagcaactttagtccaaaaccacttgcattaatcacaaatgagctctaaaccaggcatcgtgcagcaaattcagttctcaaaactgaactaagttcagttgaaacaatgtctgccagtccaactttgaacaagtttttctccattttctgtgtggaatcaagtcaaagacactttagtagattcgttcactatcatataggcttcaacttctctataaacacccaagcacaaaacattatagaacagccacaaaccagctccaaaactgcactaaaaatgctgatttcagactttcagttctgaataaaataagtcaaca

SEQ ID NO: 13214 - DNA, 405 bp, Zea Mays
gggcattcatcatcaagtaattgccccactaccaatggagcattcccgggattcacctggaaacaaggaaaaagaattaatcgttctcatattcaacctattattaggaacggcgcacgaattaacagagtcgaaacacacaactaccttctgaacatagccttcgatatatcgaagcatgttgtttgtgtacagatagtgagtgagatctggcacaaaaccaaagcgatcacaaacattaatcagtggacgggcattaggtaattttgcttccatcaaaaagttcattatcttctcagcatcatagaagtttgactctctggttacacgttcaacttctttgatttgtccagtccttgctgctgcttctatgtacttgaaatggatatctgggtcctcgctgtt

SEQ ID NO: 13215 - DNA, 875 bp, Zea Mays
ccactaaccatcacaattggttattcaacgttgtcgtatttcaaatagatggacaattttttgggcatataccatggaggcatcgttgaacaagatcgttatggaaatggtgagttcgttgacatgcaacgtgtggctgtgatatttgatgatagaccttcctttagtgaggttgttgctacggctaaggagaagattggttgacatgatgttgacgacattgacgttgatgggggctaaacgtaggtcctccacccaatgtgcaaagacttatcatcccaattaagtgtcagtgagagtgggataattatgttaaatcagctatgaagacacaaaagcaagtcatggaggtagtggtacgccgtttgttagttgcctctcgccctggagatgaaaactatgatcgtggtgccgaggtcgtgccaactgtgcatgatgctcaatctgcccccaatatgatcccattaagtgatcctataaatgattgtggcactcatgacctctacctagattctactgagggtatccctttggcaggcaccccctgcagtaagtctctttgcagctggtaatcattttcaagagttcctactttgttcttttcattgcctccactttattctttcctcggtccttgttgcaggagacaatcctgatgttcttgttgatcatacgatcagaacacatatccattgtggagatggaattattgcatccaatagtcatgagtttaggaatgaagaggagccttatgcctttgctatggtcgctgattcagatgatgaccgtccggatggtgagcttacagagagtgatattgagatgttgaagcttattattctagagcaccgggatccaagtgttcatgagttcag

SEQ ID NO: 13216 - DNA, 796 bp, Zea Mays
attaacacagagaatgggtatgcgatggggcgaaatcagtcgctcactaaggatccaacggtccacagtgcgaccaaccacacctcctctctccccgatgaacaataggcggcgatgccgatgcttctcacggcaaagctacgttagagcccggttgttcgatgccctggtgccgtattccaaaattggataggtgctatgcgcagtgcaaagagtggcgagctacaggtggtggtcacactacaaatcgcatcgtgatgacgccgagccatagtgaggtgcggatccatggcggtgataaacaatggcgagcaatcgccaatgccctaatgctctaatctaacctaaacttggtatatacactagtgaagatgaggcgagcacaggatggaagcattaccagcgcctggagttgcggaggtgaccggccatagcgtggaggaggtccgctgtgcccaccccactccagcgagcagttcacgacactgcggtgctccacaatgatgttgatagccacaaccggcccacaacagaccaaaggtacccccaagctgcgctcctagggccgaacaataccgaatcatcgcacgccccacggcagcgcccgtgttcttcgtcttctctgttctctcttcctcgcggaaattgggcatagacgactccatgaacccgagctaaccctaggtgcggttctagtggagggctatgcggctttggtatttgtagcccatgaccaaggtccccgccaaaatcgtgtcgacaggcgtggaccgaatccaccccggatacatgctct

SEQ ID NO: 13217 - DNA, 387 bp, Zea Mays
aacttattcaagaggcagaagagcaagtgtgaatgataagggagaatttgagaattgcacaatcaagacagaagagctatgctgataaccggagaagactactggagtttaaggagggtgatcacgtgtatctgaaggtgtcaccactccagggtatgaggagatttaaagttaaaggaaagttgcccgctcgctttattggacctttcttgatcttaaagcgagttggagaagttgcatatcaacttgaactacccgatcacctggcagatgtacatgatgtattccatgtatcccagctgaagaaatgtctcagggtacctgaggagcagctaccaatggaggaccttagtgttcaagatgacctgacttatgctgagtacccta

SEQ ID NO: 13218 - DNA, 466 bp, Zea Mays
tttttacccagtcagagttgaatatgagacaacaaagatggcttaagctaattaaagattatgacttggaaatccattatcacctaggaaaagccaatgtggtggcagatgcattgagtcgcaaagcttcctgtcattgtcttacagtaaggacccctgacaccacactatgtcaagaaatggaaaagttaaatctagggatgatacaacacggaactttgacacaattaaagcttgagtcagttcttctacagagttattgatgcccaaagaaccgacaagggtatgaaatacattcatgagaaaatagaggccggcaaaacaaattgctttagaaaagatgatcaaggaataatatggtttaatgattgcatagttgtgcctaaagatgtcgaggtccgccaacaaattttggatgaagctcatcttagtcgatattccattcatcctggaagtactaagatgt

SEQ ID NO: 13219 - DNA, 723 bp, Zea Mays
acgtagtataccggcatctggatggtttggacccctgcagtcggtcccgagtcctcaaactcctggccttccatcaacatcgtggtggtcggaccaccaccttctcctaggggaactttctaactcccctggagatgtcgtgctgccctttcggcgaccagcaccatgctcaccgcctcggaagccactgcaatgtataagtgcaatggctcccctggctccggagctaccagtattggcagggacacaaggtgctgcttcaactcttgaaaggctcgttctgcctcttcggtccaagagaatggaccggacttccgcaatagcctgaagaagggcagcaccctcttagccagtcttgagatgaagcggctaaggggcagctagtgatcccgtaagcttctggatgtccttgatgcgggctggaggcctcattgtctcaattgccttgatcttctctgggtttgcttcgatgccctagtgtgaaaccaggaatcccagcaacttccctgcggagacaccaaagacgcacttgtccgggttcagctttgtgcgggttgcacgcagcttgtcaaagaccagggttaagtcttccactagggtcgaccctctcttagtcttgaccatgatatcatcgacgtatacctctaccctgtccctaatcaggtcaccaaaagtcttactcatcgcccgtacaaatgttggtaaggcgtttttcagaccgta

SEQ ID NO: 13220 - DNA, 679 bp, Zea Mays
gacagcgtctcgcaaggccgcgggggctgttgaggtggaccgacgcgccgaagatgtatccgaggaaaagacgtcggatatgacgatagctttggatcaggaagctgaggtgttagcggccgcatcaaaggaggagaaggttcagcaagacgaaaagaaaggtgcgatgatttcatttgccggatcgacttgcttctactatccggttgtttgcggacgagtttctgatgctgatttcgttatgtagctgctgtttcagatgtgaaatgtgatgacccaaaggaggaggacaaggtgcagcaagaggaaccaaaaggttagaggatttcagttacctgattgctttggttccgctgttcgatttcgagggggcagcgttttgatgctggttttgttatcacgtagatgttgcctcagatgtgaaaattgatgacccagagcaggaggaagttgccaataaagatgaggaatcggaggagggcgacgaaggtgaaatttgtttgttgtactctatatatgctatcttaaaagtttcaaagttccatgttttggcgtatttcgaaatttactgttaagcattgttcctgagcagtcattgactttatttctcgaatgtgcatctaattcgtgatggaaccacattgtctgcagatgtttcggttaagagctgcaatgatcc

SEQ ID NO: 13221 - DNA, 460 bp, Zea Mays
cggtgcgtgagcaattccttgccggagtagatagagcaccaccgagccgccccaacgcgagaacaacctgtctgcgcgcccgatttccggtattcttcacctccttcgtgtttgccatggtcttatgtcagtgtagcacaagtaaattgcgggatggcgacaggattagtgtgggtgctgctccggtcgtggcgctccgccgcggtgggcacgaccatcggggtttggggatgactcaggaaggggggttttgtgttggccgttggattcgggccagacggtcaggattagagttggcgtaccctttcgccacgagtaatggtgaccgttgatctagatccgagggctgcggcgagatctcagcttcattatatccgtaccgtaggatccagatccaagggcgccggtagaatacccattcggagatagtaagatctaatctggttcatgtgtctcggat

SEQ ID NO: 13222 - DNA, 363 bp, Zea Mays
ggcaagattttcactgcaatcaagaaaaggcttctcgatgacaagaagggtaaatgggccgaccagctacccgaagtagtctgggccgaaacacgaccgaatgccgggcgaccggattcacaccttttcgtctactatatggatcaaaggccatgacgtcgtaggagataaagcatgggtcgccccgaacaagcacatcagcagtccccgacgtagacgaaccaacgtccaaagacctcatcgacggagaccgcacttcgccctgcaggccctcaacaaataccaagctcaaaccaaggcctggcgcgaccatgcggtcgtcccaagagagttcaacgaaggagaccttgtactcgtctggac

SEQ ID NO: 13223 - DNA, 1881 bp, Zea Mays
atccaacctcacccgccggctgccgctcggctgccctccggcctccgggcatcgccatcggagtgtgcaggaaccaggaggaggccggtagagtccgtgcacccgggtcccactcccctgaggccgtccgtggctccgtgcaagatggggattgcgcaagggtgcgaggtcaccatccccgcgcctggtcatcagtgtgagttgagattctgcgtctcctcgctcgatttacttgcagccacatgcttgcgagttgcggtacccagcttagctttttcgagtccttgctaatcttggtggggacgacggagacctgatgctatgcttccttccctccctgtgctgttgagttccgcttccacagctcgtgtatggccgacacggtaatcgctgcgaaacgaggtcatgcgcgtcttccttgtgctttcggatgcaccgaggcttgccatccaaaattcgctgcaatgcttagctagatcgaaggcctacttacgctcagaggtgtcagcttggggatccccatcttttatctcttgtcgtggttaaaacagcggcctgatatgtcaggtgtttgttccgcaaaagggttggacttcccacgttttgggatgagagtttgttcggaatagcatgctcaaagtcatggaatttggtcgcagggagtgatcaagtaggtactaggacagtcctctccctttggtggtgctgttgattccttgcaagacctgtacctctgtgctcagataatccagcatgtgctgcattcagatgggagattgaatgaaagtgtgtaataccagtagcttcctcaaatactgcagattgaatgcacgacaggaacattccaactttgttgtcggtatccattcttcatgaagacgtcagtatagccggctccactgaattcttcaaatggaataccttgttaattatctgcaaaattttgtaaccaataatggagcacttggaggctcatagaagctacatttactagctggatttttaaattggtttctctttggagaagtaggtgcaatcttttttgtaagcatagtcaaatttttaccctttcagaaagttcttgtgccgaaagcttgtggaatgtggtactgaggaccacttaattcaaaactaaagtggctaggtgatcatatttcaaggcctaaatatttagaatgcctcccctaatcaagacttttttccccttgtcaatctacatcagttgcactgtttcatagctggaaggttggtaatccaggctgtcaatcagtgaattagtctgacgggatgtagcgatacccagcccattctcttttagtggcatctcctaaagttagtcttcgtaatgtgagcagtagtcatgttcatggaagattcaggaataccaagtctgattcaggaatacaagtcttttgctaggatgttgcactatactgtggttttatacttttatctgtcagtaactgcctaactggtggtgaatttctagtttcttctgcgtgttttgtccatttcattgatcagcttgatcattggtgaatcacaattgaacttggaatgataggctaatactttcaagtagggaatttggtagtttgattcatctggtagggttacatagaaattgaaacttaaatggtttggtaaaaagtaaatctgggacaaaattttaccattaagaacctatatgagacgatatcgcttgtttgattcatcttgatgtaattaacaaccatctattgatgaattctaaggggtaaaggatacaaacagaagttaggatttaggattgacacacttctccccttgcctttttctctactcaactgaattgcaatgtgaaactgaaaattcgtatgatggtagatccttgagtactac

SEQ ID NO: 13224 - DNA, 510 bp, Zea Mays
ccggggagacaatagatttgagtttggtggggaatacaggcacggactcacaccgaatggtgaatcacgagcatccaggctaaggagctgagacatagggagttatactggttcacgctagggccctagtccaatatagtgttgatcgatgtattgcttaggagcgtgttacaacaagtgtgcttgtgtggagaaagaatgttgtccagcacttttatagctaaagggtggactttacagttgggacatatattctactcggaggtacttggcttgttgcccctaggttgctctagccctccttgtgtcgtttataggggggctgtcgtactcctgatatggcgttctgtcccgtccgttgtccatatggatccctgtagcttgtttggtgtcaacgtttcggtaccttgtgggtcccgcaaagtgggcctatggtgtgatttagggtcgtgttcagtacaacttcatctttcgtcataccgcctgcgtcaccttccagcacgtgtagcc

SEQ ID NO: 13225 - DNA, 1621 bp, Zea Mays
ggacttgcaatttggtctgttagggttagaataggagtaccagtgcacccaaaaacgccagcaagcacctgccttaaagctgcgctttcagagttggagccctgcctgccaaacaggctcttattaggctctcttaaggattttggatgcactttattaaagttgcgcgcatgacatgactccatttcactattctgtgctacaacacaaaactattgtttttttcacttgtccagtctcacagtatgcacatcagattggtaaaaggaaaatctaagcaacattattccactagtgaaagcaaagttttgaggatatggtccatgctaggtcttttggtcctctcctcttccacgcatgacactgctatctctaacatcgtggctgcttgtaagtagttgaattctccattcagtctgcagtcaacaaattccatgagccatgatggatctttggctgccaatttctctttaagaatctcagcagagcatcgaatagacatttcctccaccccctcgccttcaattacccaactggaaacccgaacccctttcactaactcgaggagcactacaccatagctgtaaacatcagccttccctgttattggaagatttagagcccactctggtgcaatgtaccctctagtcccatgcacccttgacagcatctgtgctcctgttcctcgacttagtaatttaaccaatccaaaatctgcaatttttggttcaaattctttatctaacagtatgttctctggttcgacatcacagtgcacaatccattcatgatggagatatgccagtccttttgccactccaagtgcgatattgtacctttggctccattggagcacataagttaagtcctgataatcaaccagatatctgtctaatgaaccattttcaacaaactcggaaaccaatagcttgtgagtttgctcagcacaaaacccccaaattcttaccagattcatatgatatattcttccaatgatgctgagctcagatctgaactcttgttctccttgcatcatatcacttagcttcttcactgcgacctcccttccatcatcaaggactcccttgtaaactgctcctgatgtgccacttccgagctcttcttggaaactcttggttgccctctgtaactccttgtagctgaaccttcggaactgactggaaatgatcatgtaaccttcgtccataatttctggtcttctctcccatttgtaaacaatccaactaccaactatgattaagatcacttcaataacgagcaatgtcaatgcagaagatagaaagtatccaaacttgaaactggaattggcacccacgaacatttgtgataaggggtatgcttccttttcagtaactttgcaagcatgtcttaatccaggagccaattctggtgaagaccatactgcctcttgagttttcagatagatatcattgtaaggatctgggaagtccctgccattgaaaagaaaggcctttggataacattcgcctgttcccttccggtaaccaaaagcttggcagtccgtatcgttcaagcacatgttcctgcacatcaaccatggcaccagtttggaatagtttaagtcatagccccataagtc

SEQ ID NO: 13226 - DNA, 642 bp, Zea Mays
atcagttgatggctcgatgaaggatcaacacccggagcaaccctcaatgcatcagaggggaccaagtcagtatcatcagcagaggtcaaaactctgtcatcaagaacgctggcctctaaggcgacctcctgacccgaagcttgagctgctgccatgcaaccagaatgcggaggagaagaccctacatgaacgtccatggaagtgtgagagggagaaccgactcggacaccctcgggggctgggtcatagctcacgctacccatccgagccgggtcatcgccggcaacaccctcgggggctgggtaagcgctagcgccatctttgagggccaagctctccgtaacagccacctctaaggctgaaggaccttcacccacttccatgggagcagaaaaatccaggccagcctcctgacccttaagaccgcgctctaaggtcgatgaggcacgggacgctgctcgagataactccagcccggcatcaggcacatcatcacaaatatccatcattccaccatctaccggctccgacaacagatcttctgggaccatgtcttcaagagtctgatcaaagtttgctagagacaattcttgcagaccaatgagggcagacaaagctggagaagggacaccactactttcc

SEQ ID NO: 13227 - DNA, 497 bp, Zea Mays
ggaaagtggactatctcgatatccccctcaaggacagtattaagggatggtgtcttgattggttcatcgtggaaaatcatggcaaatccctcccccctcggtcagggaggtaaccagatgttcgcacgcccagctgggttgaatctcccaccttttcagagataattgaggccaaagtgctacttgctgaagtctgcttattgaaggataggggtctaactgctgaggtcgtggtcgctaactttgtcttcaagaacattcaacccttgaaggacagagtttatctcgcttatttgtatactggcatcaatgattccacccgattcacaaacagacagattcccaatgagggtttgctgagtcgattggatatgattctgaggggtagggtctcaaatgttggtgctcctttagcttactctgcgtggaacctgccttcagatagactattctctgaatttgtctccaaccctcctgctcgtgatggtaacccgggc

SEQ ID NO: 13228 - DNA, 731 bp, Zea Mays
ctttgcttaagaatgtgagctcagttgttaagaagaatttagagataattaagtctaaagttggactatcaggttactagggtctgaattttcagacagaccgtgcaatcactacgactttgagcataaattcaactatgatccagcaagaatctgcccatggctgctgtgacaaacttgtagctgatctatagctctacaattttgctgcagaggatggagtatgttaccattgaaaattgagagaaaatcgtgctccaagtcgctctgtcagttcatctgatgggtgctctccatggtacagtgtcccgtggatcagatcgccagcacggcaaactcaccgccggcgacctccctgcgcaaagattcgtgccatcaccgccgtgactcgtgaccaaatcaactggatagcacttggagatcatcgccgtggataactccggccagtaaaatattccggccaccgtacaagcgttcaccgcggcggaattggataagtacgccggtgatcaccgcctctcggccttgtgccgtgtggctctgcctttccaccgcgtcgccatgactctctgtggccgtcccatcgtcgccggtgaggtcgccacgacgatagccacgggttcatgcgcgccaataactccctgccctttccaaccgccgcgtgtccccattaaaattcccggccaccgccgttgagccctataaattgaagcccccaccagccccgcagg

SEQ ID NO: 13229 - DNA, 624 bp, Zea Mays
cgtgaggtcaaggtggcggccgcggaggagacaggacggcgcgatcggcggtgctagtgcatttagcgttttcagggtcggggatatggggccgatcgacggtgagcgtggaaggggaatacagcagccagacgtagcagcagccatctgtggagggtgcgccgtggtagcaggtagtggtggcagaggccggaggccagtcatcggctgcagtgtcggagcgtgacgtgaaatcaagagggggcgacgaacgatttggcttctggatgtagaatcggagatagatcgaagcgcgtggcggcgtgtttccgtttgtgaaaatataggagtgctgtatggtcgatggcgtgcgcgacggtggagcagcacggcgtagtggcgggaggaggccgtggccgcgccaaccattcacttgggactgtcgtgcaagctgcccatccctgcgctcttgctgaagtcctgtgttgcagctgctcagctgtatgcttgtgacgagcatgtggtgctgggggccggcggggcacataatttcaagcaagcagatgaggatctacaaccaggagggtgtatccatccatgaattctagtccaacacccgagcatttaaccaaactagcacctttg

SEQ ID NO: 13230 - DNA, 1439 bp, Zea Mays
gcaaagctgtcaaaggttggcaaatgaccccaaagtgtttgataaacttcctataataaccggcaagcccaagaaaactgcgcaattctttgaccgaattgggcacaggccactgcgttatagcgttgattttcagtggatctgtggctaccccctcagcactgaccacatgacccaaataagctaccttgcgttgagcaaacgagcacttagagagttttaccttccactgttcacggtccagaagttggaatacttggtgcaggtggttcaagtggtcttccatggtaggactgtaaaccaaaatgtcatcgaagaaaactaatgcacacttgcgtagaaggggagccaaggtattgttcattgcgcactgaaaggtgccaggtgctccagtcaatccgaagggcatcactcgaaattcaaagtgacccacatgagtttggaaagctgttttatattcatcaccctctttcatcaagatctgatggaatccagcgcgaagatccaaaatagtgaaccaagcagcaccaaaatgttcatctagcaattcatcaatgatgggcaccggatatttagccttgaccgtgagagcattaagatgtcggtaatcaatacaaaatcgccaagaagcatctttctttttaactaaaagcactggggaagaaaatgaactagtgctatgctgaattaggccagtattcaacatttctgaaatttgggcttcgacctcatctttcattgcaggggacaaccgataaggtctgatgtttaccggtcgagcaccatccaccaatggaatagagtgatcacagaatctgcttggtggtaaggatgtaggtggatcaaagacggaagcatattgctgcaacagttgtaggactggtgctggtagggataattcttccaatgagcacaactgaggcatattagactgatgttctaacaccgggtagacttggacaatagatccagaaggcagtgatggaggcacaccttgcagcacaataggtctgtccccgtactgaattgtcagtcatttatgtttccaatcaacaaacatggggctgaattgctctaaccagtccatgcccaagatcatatcatagaagggaagtggcaccagcttgaatgtagaggtaaatgtaagtccgtgcatggtccacgatgcatcaggaagttgagtgttacaatagagcagctcgccattggccaccttgactgttaatgcttgttccatagcaacaactcctgatagcttagtactataagaattatccagaaaacagtgagtacttccacagtccaatagaattagcatgtcaacaccttgtatactgccacgaagccgaaaagctttagaattggcaggaacaactgtggcctccttagatattgccatgaggaattgctcagctgaatcttgaaactccccatcagac

SEQ ID NO: 13231 - DNA, 926 bp, Zea Mays
tacaatacaagcttgcactaggctctcggttgttccccatttcaagcattgtatggtagacaacctaggacccttggtctcaccatccatgacgcagcgccaaccaatttgttagcttggttgtaggaacgttcagtgacacatgagcttcttcgtcatcatcttctgcgcacccaagcccgaatgaaatgacatgctgataagcacaggtcagaacgtacatttcaagagggcaattgggtatatctatggctcgaaccatatgtccaagcttctgttttgccccgtgcacatcacaaactgagtttcatgtttttggtccctactagattctgggcagaattggacatgtggcataccgccttggattacctgcttctagtcgcattcattctgtggtgcatgtgtctcaacttaagctggctaaaggattcaaaggtccagcacattttccactacctgatgacatacctgagctcagtgttccactgcagattattcagtcgcgcggcctcaccaagggtaaccggctcgtgcaacaagtcctggtgtcgtggtccgggcttccatctgaattgacgacatgagaggatctcaaagcacttcaacgatgctttcccttcgctcctgcttggggacaagcatgccttccagagggagggaatgtcaactccgatgtaccgacccaacaacaggagacgagtgtacctaaaggacgtggatgccgtgttcgatgtagtaatcctcatgtgtgtgggtctgagtgggtctaagtgccagatggtcatgtgggcctgtgtgtaggcacgacttgggtctctatggagaatatatatatatccgtgtactgtgcctaagcaaaacataaacactgtaataatagaacttccctagccgtattcccctcatccctctctctcttcctc

SEQ ID NO: 13232 - DNA, 657 bp, Zea Mays
ccctacaaaatggtctatcaggctgactgaatgagttgcacgatggtacagtgcactgatcagatcgccagctcagtgccctcgccgccgacgagccgcgtgcggattcgtgctatcgccacggtgattcacgctcggatcaattggatagcgccggggtaagaaatatcgcccggggatgaactccagccgctattttactacggccaccgtacccgagcgtgtcgcggccgccttggataggttcgccggagatagactctttgtagccttgcgccacgtgccttggcatgataacctcaccaccgtgactcatgttagtcgtccgatggtcgccggagagcttgccacggtaataggccacgaatcaccgcgccagtaaccttcttcttctccggccgccgcgcgtctcaatccaaattcaccggccaccgctcaagcctgctataaattgccgacctgcctgctccactatgtaattgtgcaaccagtgaagcaaactgtgccttgaatcatccacaagagctcactaatttctcatttctcccaaacctgctctccgccgccgtggtatagccctcgccgtggccagcgcatctcaggtccgttcatgccctctaagtcctcgtttctgtgttcttggatgcttctgatact

SEQ ID NO: 13233 - DNA, 577 bp, Zea Mays
aattggctcggcttgggttgagttagacgattccccagccggcaaactaagcacatcatctatctccacgtcatcagtgctagccgacatctcaaagtgagtctgcctctcatcctcaggaaggctccgaagtggggcaatcagagcctcaatatcctcagaagagggtcgcactctaagacccaggctatcatcgcgagcaggaggattggacacaaacttggaaaatgacctatgtggtggcagattctaggcagaataggcaacaagagcactaacatttgacactctgtccctcaggaccatatccagtcggctcaccagatcttcagtggggattctcttgtttgtaacccgggtagagtcattgatgccactatacagataaactgggtacgccctatccttcaaagactggatattcttgaagatgaaattagcgaccatagcctcagcagtcagacctctgtctttcaacaagcagacctcgacaagcagtacttttgcctccgttatctctgaaggggtcggagattcgacctagcttggagtgcgtacatctggctgccttactgat

SEQ ID NO: 13234 - DNA, 879 bp, Zea Mays
ccgtagcttgcatagttgcatgcttgcatgcagtgtgagtgggtgagtaggtgcatggtgagcgggggcatgttttggtctacattaccttcttaatagttagtagagactagcatgttctggacttttatcgtcctgttctgagtctttgtcccttccaccgtcaccatcaccccgaggctcctccctaaatattacaggggaagccgggagaaaattcttctcttccatagcaaaggtgatctcatatccctttctatcaaatacaatatcaatggtaaggggtaaatgatctctgctcatcatcccaaccagcagcctaattattccccttcttcctgtaagtgtacatatctacctctatagtggtacctatgaccgaccctagggcccaaaaacctaagtaattcctccaagcatgaggcactcctttgacatgcacccaaacctcatccaattggtagctaagttctacatcacaagcatctttccattcagatatagtgattgtgactccatgattcttaagattgaactccacatatatgccatcctattaagttcttccactgaagggaaacccaccagaaatgaatcgtcactgtgttggagggcctcccacacccactccttcgagcaagtttagattgcacaaccacagtcgacagtttccccctaattactttgatcagagcagctagggcaggatcatgtgtttcaagtctatagtcgaattccagaatacgaaaaaagcctaatccattatcaccgaatccaaggaaagaggcatcgggcttaggcaatcgcaataaggggcacttggccactacgtgcgaattcatcttgttgcaaacaacatagtttagatctgccttgcac

SEQ ID NO: 13235 - DNA, 538 bp, Zea Mays
cacgattaatacacatgaaatagacacattccctagtcgacttcatcaaaatcaaactcaaaacaaatgaataacacattgttaaccataaaccctaatatatattactggaatggaaacacttacccgagctcccctgcaacggaagtacctttggccgaggttgtcatcgatccatgatgtcagctttgctgccttagatccacaatagcaaaacactgcaggttcatggtcgaacgacccctcggtgtatgggaccaacagttctttcaactccaaacgacgactaatgcatctgattcccttggaccatggagatgaccgtgcgcttgacaactccatttcactgtcgctcctcttcctatgcacccaagcccacgcttcgtcgacccggtcaccgtcgccccctgttagtgttcagctaagattggcaccaaactcctcaataaatcccctattcccgccagttaacaggtcgacatgccatgttgtacgggaaaacctataaacaagtccacactgtcctacacgtcatcaa

SEQ ID NO: 13236 - DNA, 400 bp, Zea Mays
ccaaagaccaaacatcattccctgagatccatttttgcacatgtaatgctgaaacaagctctacctgagaactggtctgattcccatcaccatacagagtaacttgttgatcctcatccttaaactgcaacactttattgacccaatcacactccataggattgtgttgccttaaccactgataacccaaaatagcatcaaaagtccccaaaggtagaattctcatgtcagtgtgataaaaatgcccatgtgcccaccattccaaattcttcaccatagcctggctgatcataaactcccattggccaccttaactaaaacaaatggacaagatgtcacagctaaccctagcttttgcaccatatgttgactaataaaattgatggaactcccaacatca

SEQ ID NO: 13237 - DNA, 439 bp, Zea Mays
cgtcgcacacaaattaaatagaactcgatgactaaagttttcagtgcaaaataatttagttcatgcttgccaaccgagaaatcatcacgtccgaaatttataaatgagatttgtttctccagtaaattatctatagccatggaatcatgtgtttagatcacagatgaaattatttgatttcaaatcaaatcgaacgcagtgtaaaatgacgttgttgacatcgtcccagttcgttccgattgtatatcgcctagattcaaacgttcgggtacaaatatctgataaaaatttatctgattatgggaatgcctaccaaatcaaacatcatttaaatattatcgccgatctcatttcagtctaatcgatttgtgtatctgttaaatgtaaattcgagcaccgtatttatccataggttattgtaaaaaagagaagaattcta

SEQ ID NO: 13238 - DNA, 849 bp, Zea Mays
aaacgcgtcgcgcgtgcgcccgcgctggaaaacttgcatagagagcctcagggatttaaataaccggtaaagaacccttggcactatttcactgtctctctgacatttgcactaaggcccccagacttctatttcttcatagcactcggtccacgacggtgaacggcgacgagcgtgccctccgacgaacttgtatcggccggaatacgcaatgaccggtgccctaacttggctaacaccaaatcccacccctagcgatcctaatctgacccttaattgcacgaatctggcccggagtccttctgcccacgatgacggcgaaacccgagggaaaacggaggcgttcttggtgactcagtgcggtctagttcaattaatcgggtctacaagcaacagaagactcatgggatgctagaacaccaagcaaagaagcatgaactaacatgtagatggatggccacagtgagatgctaatggcggtgtggagaaccgatttgggggaaacgaaattggggctccatggtggatgattagaggcgagggctggtgctctgggttcgtaacaacttggcgaagcagactggggcatcaatttatagaagctttgagcggcggctccgaatttggaaggcaaacactggcggtcggagagagggggtgagtcacaggcgcgagctaccatggctgtcactagggcgatgttccaggcaatgagcacgctaccaacggctatctactgtgacgtggtaacacttctaggtacatggcatggctacaaagggcggcgaactccggcgaggatacctcggtcaatcgcgcggcaagtgggtacggcggccagctcacggc

SEQ ID NO: 13239 - DNA, 516 bp, Zea Mays
atgatcaactaagttaaaatactgtaacacctcaagtgttagctaggaagtttaacccaacccacacccatataacctattatcacatgtggatcacttagaacaaaagtcaccaaagtcaaggatcaaaactctaattaggtactaaatatcctagaaggcttagcatagccatcccatagtgatcaatgagaaggagtgaccaaaaccctgaccttaccattttaagagcatataggccctaagatagagtggttaaaaaactacaaaatcaccttattacaaagtggaccattaacaaaagttataactcactaaatacttagcaaaagttattaagggatggtcaccaaaaaggtaaagcaaagaccctaaataagtcacccaaagtgagagaagggggagaaaatctggatttgcataaacaccaaaatcagcccttagcaaagaccccatgtgttgactaagctacaaactccaaacctgttgaccctaattacaaaagatgtgcctaat

SEQ ID NO: 13240 - DNA, 504 bp, Zea Mays
atttgggactagctagacaacatcccaggccgatttcctcagccttatctcctgggatgaaccattttcttttgcatgtttcttttgggtagatgaatgaggtcgctttgctagctggtcatggggaacaacctttttgttgacatatttagctaataattgatcaaaagtatggctagctttaatcagccaactaggtgccttaaccatgttttgtttccacgtacctattttggttcgtcatggtttgaaggtgtgtgggcatggttacacgcgtctcttgtcacctccgaattgtctagattaagaacctggactgttcgctctagcaccagaccatcaggccaaggtcgtcaaactgtccacgtggcactggatagggagacatgattggttatccaatcgagcttgcccctcagtgccttatgttctaatggtgatttttagtgttcccctccattaggggtcttctcagctaccacctctctagagaggaccctcctg

SEQ ID NO: 13241 - DNA, 550 bp, Zea Mays
tcacccgtcggacggcttcgctctcttagtatcccgcagcgcgccatcgccagtttgggatgcccgtgtgccagcactcgccacattggtaccattgtcggtgaagactccattaacagcgtacgtcggctcctaacagcgcacgccgacggtaaaagacatcgctaccctcacattcattactcagctccccgctcccctcgacgttcgaacaaaccctaacttctccctgtttttgtccaccgccgccgccattgaatgcagcttcagcactgcaatggcgtttcgggggaagaatcgccaggtcctcgaggtcgatccggcggacgatcctacagctgaggtggccaccgccttcgatcgtctctccgtttcgcccatccccaatccgtctgcatctgccgccgtcgttcaggtctgttctccttatgccctcgacaacagtggtacccagcagcctcagtcatcgtccactcgtgatgccaccatggttcctttacctcctgcaagtgtgctggtaacaacatctttcagctatattggttcatct

SEQ ID NO: 13242 - DNA, 353 bp, Zea Mays
ctaggatttagaacggggaaagttgcaccacgaccgttgatccttgatcgtgcgggcgtgtaatgatcctagtatttaaaatctgcgccgtcgatccacgatccaacgactaataatgtgggcgggttcatgggtgtctcggtctaatctggaccgacgatcttggatcggtcggctcaggatgcctaataccccttcgcgggtacattttgctaaagaaaccctagggtatttgataatgaacccgccatcccctcggggtgtttcctgagtctggggatttattgcaccaggacccctaaacttctctgtattagtgcgcccagtcctgagagtcagaaaaatcagaaaac

SEQ ID NO: 13243 - DNA, 425 bp, Zea Mays
tttctagctaatgtggacacatgtgcccttgctctgcatatgattagagagtaaatgacagcgatgaagtttatggcggtttattccatgtacggtggttttctggctaatgtggatccactactgtttatgcatacacacacaaggcaaggtagagattctagggatttttaattctattcacatgcaggatgtcttcctagccatacactcctagtcttgaagcagcaaccatacatctaccacaaacatcgaagcagccatacgtctagctagtccaaatggatcctgcgtcgccgccgaggggtgaaaatacgacgccaaaagaacttccgattgacgtgctgctggccggtctacacaaagcggtggagggcctcaacgaagcagctgcggatggactccaagcagcagttgtcgatggc

SEQ ID NO: 13244 - DNA, 399 bp, Zea Mays
ggaggttgtggcttcatcatttatatccctgccaggggcaagaccggcacggatctcgggttccattggtttcagccgaggtataacaaacttggtggagcttggagatctggtttaggaagggggtaggtctgccaagtggtgtccacccattggaagggacgagagatgtgagcggcttcaccattatacccttagtgaggggaaatcgctaaataaatgtgtgcgcatgctgtggctcgtgttcgtcgcgaggaagaagacgggcctgtgggcatggccccatgcgtcggcgtcacaggctccccacgcgatagcacagttatcagacatagcggagcggccccagcgattagtgaggcaagtgcgatgcgcgcggtgacgcgagccgctggccag

SEQ ID NO: 13245 - DNA, 402 bp, Zea Mays
gtagcttgttttgcttcggcagtggaagaggtcccttcaccaaattcaggcactacggccgtttcaatatatcgaggccagtgggttaaaacctttattttcttgcccttcggcacgacagtggtggctgaagcggcagttttcctcttttttccttgccttctcaaggggtagtagtaatcaggatatatgaagccaattgcataaaaaaccctgttcaatcttttcttgcccagacccccgaaggctgaggacaaggcatcatcttcggccctggtatatgtcccaagcaactcgtcgctagtagcctcaatgcatttcaaccagtcatcatttggttcatcgaacttctctctgtatctgaaggtgtatttcaatcgaactaatccaccttcgctggat

SEQ ID NO: 13246 - DNA, 684 bp, Zea Mays
ataacaatgccccccgacacaagtcaagcaaaacacaagccgtttttacctaataagtcaaaaaaagaaagcatgaataactttctgtgggatagttcttttttaagcatggtgaatagcaaacaggtggcaacaatataaataatttcctgaaaagtgaagagaaaaagattgcagcagagatatacgaacatgtgatggaaggtaggatgaaagataaccagcacaagctctgagaagaggatgaaaaactgatgacgatactgacattgtaacaatctgcagccatagtaatcttcaggaatggtataacaaatcatatcaatcaaacccattgaggtacctgggagagagcattctgaatgtttggatggttccattggctaaaagaatcatcaatatgttcaataggaccagaactgattggaggacgaagtgctacagacacacaagagcaactactcagcaaatgcatgcttgtttcaaaaacgaggttcacttcattatcataatcatctttgtggatcggcaactaagacaccacgagaacatatcagaccaaaataaatcagctgcgacattttctttagccaaactaaaggagtaaccattagccacaaaagacacaagagtcatgacaattagttagccacataggcctgccatcagttagtacaagatact

SEQ ID NO: 13247 - DNA, 605 bp, Zea Mays
cgcgttgggctcgacgacccgttcgaactcgaggaattgcgcgccgtcgcctatcctccgccacagatccatcgtgtgacgaagctggggagcattgcttcacaatccatggtatggatcccctcctccatttcgttttgccttcaattcggttttacattaagtagggatcttggtttgcgctccgaagtgggttcttgtgaggttcagcaatggcgccgccgtctgtggctcgggcgccgtcggtgtctggccggagaagttgggaaagttgcgcagaccatagatcctgtgacgtacgattgagattagatggcgaataacgcttcggtcggaatccgcgttagccgtagattcccgatcggatggatactgggtgatttgccccctttaaaactgtgaccgttggatggagatttggcggccttagtttagtactggttcggttagaggtagatgtaatctgatccgtgggttgcgaatcgtgtggttcccgtgcgatgataccccttcgcccgaaacaatttgctaaagagccctcgtattttaatggattcaacctgcagtccactgggactgttcacagagtcttaggaattttctgt

SEQ ID NO: 13248 - DNA, 394 bp, Zea Mays
gcctaaatttaccgacgctgatcccaatgggtgtgatccatcagtcgctgaacccaatgggcgtgctccatctgtcgctgatcccaatgggggtcctgtctgtgttgctgacgaaatcgtgggggaggaagaagatgaggtccctttgactcggaaaaatagtcggcaatatattgccagtggggaaagtagtggggttccttctcctgctctgtcagccctcatcggtctacaggaattatctctggcgaactttgatcagactctagaagatatggttccagaggacctgttatcagagccagcggatggtgacgtgatggatgtttgtgctgatgtgttcaacgctgggttggggtcatcccgggcagcgtcccgcgcctcatcgacctta

SEQ ID NO: 13249 - DNA, 413 bp, Zea Mays
tgaagatagcaaggaaaaggctttgaggaactaagcgaaggtgaatgccaagcgacggcttgtggaccgaggttgcactaagtcgctccgtcacatagcagaaaaatccccaaccttccacacctcgtaagtgtcgtccatgatagagggcgcaatcatcgccacgacgacaacaatgtggttctgaaagagcctacgcgtcctctacgaagtcgagctctgtctcctccactacaacctccctgccctgccctcgaccgcgccccactcgcttgccatcccctgcgcatccgctcggccctgctactgcctttgcacttgtcgtcgttgaggccggtaactatgagtctacgttcgacgttgctgtgatgcatctcctcatgtacttcgtcttctctgggtctcctagctcc

SEQ ID NO: 13250 - DNA, 560 bp, Zea Mays
cgacgacaatgtggatagggaaccgagcaggcgaaaccctagcagagagattgcaggcgagtgaatgcggaacgagaggggcacaagtgtaaataggtgccggaccatgactgacggcggcagtgaggacagggaaccgagcaactgaaaccctagcatagagattgcaggcaagtgaatgaggaacgagaggggcacaagtgtaaatagctcgaggaagcagtaggcttctcgcggacgtggccaccgaggacgactggcaagttgctccgtggccatcgcgaagggtggttgtgacggctactgcagagcggaggggaggatggggacctcggtggaggacgcgacgtcaaaaacgcacgaaactcggcgtggtccagcaggattctcaggggcaaggatgcgcatgcgatggttctgttcgacggtgaggggggagggcaggtcggggcatgcaatggtctacactgccgtcttattaagtagtagagatacacctatacacacgagagtgtcaggaacaattgattagaactaggccgttcatccggatgttgccc

SEQ ID NO: 13251 - DNA, 302 bp, Zea Mays
atttataaaagagcctacagggtatctggaccagatttggttgagctcaagaagcaaattgatgagctatcagagagaggttacatcagaccaagtacctcaccttgggccgcacatgtcctgttcgtggagaagaaagatggcactaggaggatgtgcatcgattaccgagctttaaatgaagtcacaatcaagaacaagtaccgcctacctagaatagaatatctgttcgaccagctaagaggagccagcatgttctcgaagatagatcagaggtcaggttatcatcagctcaggatctg

SEQ ID NO: 13252 - DNA, 809 bp, Zea Mays
tcgattgagcccagggggagggagggagagtggccgaggccgatgtgaggagaggtggagcttggggaggcctttttataggcgcccgtgggaggggagcggctgaagcgggttggcgccaatgagatgcacaacgacgacagtaatggcgacaaagctggggacgtgacggttcggggggggtgtcgtgtgagggtgcgagcacagtgggcgggggacaaagcggtgcctaacttcactgatgtagaagtaatggcggggtggggagaggacggcgaccgacggtgatcgcagtgatgtcgtgcgcgggtgaggaagagggacctgacatctaggacccacttggcaaaggaagagcaggcgcgagggagcgagagagagcgtggctagcaagtggggacgagcgggcagtgagagagagagagcataagagtgggtgggcgccgcgcgtcgatgggcccggaattgggctgagggagggagagagctcgggcatgggagaggggggtttgtgggcatgggccaaagtaggcacagggtaatttaactcagagtgaggcacgaagccatagcagccaaagttgttatgatattgctcttttccggtcaccttcgtctggtaagatagctcatgaatgttgcagaagcacctggcatctggctccagtccctgactcctcatggcccatatgaaaacccccactttgataagagcttcgggggtaagctgatgaaggtatatctcgaatgtcttcaaaacctcgactagcattttgtggagcagaaagtgaagcccagctttcatgaag

SEQ ID NO: 13253 - DNA, 605 bp, Zea Mays
gcaggagcagtggaagctggtgtggtggaggtagtgggcacaacaggtgtggtggaaggctcaagagtggcaggagctagcgtagtggaagaaggtggagtggtgactgggtctgcagggtcgaaccgagcaggagtggagcgagcccgagatgagagtcgacgaactcggaaggctatctgatcagaggcgatcctcaactgaccaccctgctccacctaatctactacggcaactgctgcacgagtggctctattcatccgtctctttttcttgcctccctactgctcaagatagactttcttgcccttgtcctgtcttaaagggcgagaagggtcctgatcatctcctccccctaacggtgtgacattcttcatcctcaccatcctacactgaccactgatgggtacgtctcgagagagaagaaccatgcatgagaggagtcgcgcaagcgggcaagcaggcacactaaaatgacagaagatgtgagcatgtattagtcacagtcataagcatatgaaatgcgagtaaatatatacacagagagttatgaattgaaatctgagagatttggaaagacagaggtcaaacggtgcgaaagcgac

SEQ ID NO: 13254 - DNA, 467 bp, Zea Mays
cgagggtgactcgtgaaggagaggagactaaggctaccgagacagctctgatctccaaagtcatgagacaatcgggcttagttgtgacagagggagtcgttgacgaaagtacttctgttgccaaagctgagcaggttgatattaaggaagaaaatgctgatgaagaagaggaagactatagcattctgatcccgtcaaaacccaaccacttggattttgaaaaatctactatgtctgaagccgacatgcccatgatgatgaaactgggctacttcggagaagctgaaaagaagcttattcgttttgccggagaagaaaccactccaacgccgaagaataatgaagtagtggttttcaaaagctttttcagggcaggattacgatttcccttgaacgagatgattggagaagttttagataattttgaaatttttcttcatcagctgactcctaacgctatcgttagg

SEQ ID NO: 13255 - DNA, 707 bp, Zea Mays
gccgtgggaggaagacatagtgcctcaacatcccactcaaggacagcatcaaaggatggcgcttggagtagtttattatggagaatcatggcaagtctctgccccctcggtcagggagacagccggatgttcgtgctccaagttggactgaatcccccacggacttggagatagctgaggccagggttctgcttgccgaagttggtttgttgaaggagagaggtctgactgccaaagctatagttgcagactttgtttttaagaacattcaaccactgaaggacagagcatacccggcttatttgtatagtggtgttactgactcaacccgggttactaacaggaggattcttgctatggatttggtaagccggctggaaatgatccttagaggcaaagtgtcgaatattggtgctcctgttgcatattttgcctggaatctaccaccttccaagacttttttcagttttgtgtccaatcctcttgctagcgacagtggcctgggtcttggagtgcgaccctctcccgaagaagtcgaggttgtggttgcttcacttggtgatctccccaatgatgaaaggcaagttcactttgaaatgcctataaacccgagtgatgcagagataagtgctatgctggatatgttggctaaggattcatctgactccgtccctgctgaaaccatagctattgcaactatccccgag

SEQ ID NO: 13256 - DNA, 745 bp, Zea Mays
atgtgctgcagtggaatgccatcatctctcgccgtatagactgcaatggtaagtcatggacattccttaattaatcatgtgggggtaaagactcaagcatgcgggaatgcagcagcagcgtagccggcagggaatgctgctgctgggctggtagtggtacgataatgatgagagtctgctgctgctgggctggttgctagtgatgagagggacgctagctagctgctctgctctgctctgcgttgctcttctctgttctgtgtccccgatcaaacgagagagggatggcccacgcagacgcagttgcgtcctactgtttgcatgggctataaaatggaccaccacctcaatcgatatggacgaccgggtcacaatcgccactactctacccactagtacatactagagcagctgatggcctcctcctccgtttcgctgctcgtcaccatcatgttgttgctgcttctgccgacgtcacttgcttgctcctcgctgagttgcaggcttgacttcaccagcgtggcgctgctctcctgcgaggagatggcaccacaaaaaccctactgcctcatgttgcgatgccctcctctattccatcgacatatggtcaattcatgaaaagggaaaaaggtttttgctgcctatgttgttacatggtttaaaggaacattacctttgacctgcatacgccttacgtctcatgcgggggtaaagactcaattaatgtgctgcagtggaatgtcat

SEQ ID NO: 13257 - DNA, 408 bp, Zea Mays
ttcaccggcagatttcactacagcagccaagttcttatttgagcttatcagacggactcttctgccgaggatgggatacagggaggctaccacacatatccagctctggctccttggtgccctggtctctcactctgagtttgacgtcgtggattttcttatttgtgagatcgaggacaccgttttggatggcatatgtgctcatcgacagttgccatatgctcactacatgtttcacatttttgagcagctgattcggcctccacagttccagggtacacttgaggccccacgccttgtctttgggtcctaccgtcctgcgcctgaggctcctgtgccagcttctgctccagtttttgactctcaggccgaggatgttgctcttcatcagttcgaagctcaggatgc

SEQ ID NO: 13258 - DNA, 362 bp, Zea Mays
accccaagttaagtaagcgtgagcatgttgcaccgccttaagtcgttgccgacttaagccgattgctccgttagcagggcatagtggtcaccccgagttaagtaagcgtgaacatgttgcaccgccttaagtcgttgctgacttaagccgattgctccgttagcagggcatagtggtcaccccgagttaagtaagcgtgagcatgttgcaccgccttaagtcgttgccgacttaagccgattgctccgttagcagggcatagtggtcaccccgagttaagtaagcatgagcatgttgcaccgccttaagtcgttgccgacttaagccgattgctccgttagcagggcatagtggtcacccca

SEQ ID NO: 13259 - DNA, 1139 bp, Zea Mays
gatattttttttggatgacaggtatctgcctattttccgaatgatgaattgcctactgaaattttatttttctggtggcaaataattaatccaaaaaatgccgagctaaatccaatcacgtggccacgtgggcgcctaataacaccagtcatcatcttgtgtggctgtctctcagttgccgccattggatcttttcgttacggttagatgccatttgcaaggtgcgcggactttagagcaataatacaagacgagaggagagagagggttaattcacgcaggggcgcaagagatcgaggaagcaacgagtcgctagctgttggttgacgtcgctaccaagcttagaagactttggtggccagcagcagccatgcaccttttgcgcgcggtgccggccggccggcctccctcttgttgttttcccgccagatgaattcagcacgtgtgcgagcgagcttctagatgtttgttgccagctagctgatcctgcctcttgcgattataatgaccacatcatgcattgcaccagcagctccttacttatctctgaggacgattgtactatagtactatgcatggccagattcagtgcactggatcagaagttcagaacagatgtgtatcactcgtcagcttgtgcagcatgcatgcgagtaatggacatgcaacagtggtgtgccgtggtggttgcttgatccagctttggttttgtttgtttgtttttttttttttgagggtggggggtgggcggggtggttcaaagttcatgtcaactttataaggttcagacatgcaaagggggccggccgggactctgaaaaccggaggacgacgcagcatgtttcacacagtgatgtttccactagctagtcatctcttctcatcgatcatggctgcttttgtgtgtgatgtgcatgccgtcgattcttgcattgcaccactcaccactgaaaaacgtccttgtagccccgatagatagattcattttcagcacgctttcgatcacttgtggcactgtcgaaaaaaccaaagcacccatgtctcgtccatgaacgtgggtagattctttccacaacgcacacgcacagcatatcctgccagcatctcgctgcagcactagcagaggatacatggctggc

SEQ ID NO: 13260 - DNA, 396 bp, Zea Mays
ccctaagactcaggcttccccacagacaggactgtgggttaatttgtgaatattacggggtctcttttataaaaacacacggtgaaggggtatcctccgatttcagccattggatcagatccaaaggccgaggttagatcgtggtcttcctaaaggctacgctctgatcaccgctggatccaaaatcaacggtagaaaccgaagccgatccgaacccacacactggccatccgatgccgcatcgacgcccaggattttaaaaaggcagtgaccaacctcgcccatgcgatcgcagatcaacgacccaggctccaatccctaactcctctaatcgggactgttcccctagaatcaaacggccaccggtgcgtcttcctaccccagttcgagcagagc

SEQ ID NO: 13261 - DNA, 420 bp, Zea Mays
tgctgctgccagcggccaagcacccgatcccctctcttccctgaccgcagcagcccttggaagaagcatcgtgctgccccaagttgcctgctagtcttcgaattgaatgtcctgatgcagaacaagcttcgtggtgccagatagagatcctcgatgcccaacttgattagtcttctaagatcttccccacgtagatcaagctgctgattccatcttgccttgaatcaaccttgtttcctctggaatcaatctcttgccaagcagaattggcttgataagattcaaatcgagcctgctgctgttgtatcaagggtctctgtcctaatcttgctcgtcggtgccggtgtcaggttctccccaagatgagcctgcccggcgccccggcgtgcagacctcgacggcaccctcgcccagtccctc

SEQ ID NO: 13262 - DNA, 529 bp, Zea Mays
aaggtggtgatgaagtctttccatgtgagtggcggcacggtggtggaattagatctccgtcgagcaattctagtgactcaccgcgcagacccgcgcagatgaagccttgcacacgctctacgtagcctagcgaagcctcctggcccgactctggggccccgatggttttgaagacgtggggcaacgacgatggcccgaagctctcccgcttcacactcagcggcttcctaggtccccacgacgatgatagcggctctcggtcgacatcacagatggaggaggagacgaggttgtgacctcgccattaactctactaatccttaagacgatagtgtagactaggcacaaccatgcccccgcttccatccccaccatccgattgcgatgccatcctcgctcgcgcttaacgccgaatccgcccccacatgcctcatctgccatccatcctcgtgccccctgcatgcctcactcccgctccagccccagcatgcctcgctcccacccccgcctccattcccgccatgcacgt

SEQ ID NO: 13263 - DNA, 901 bp, Zea Mays
ggaagagctaagcgtagccctggaaaatctacaagggtataataatgctctgcacgaggaagtgcacgtgttgtatgaccagctacatccgaacgtttcaccggaagttgcgacgatgggagctagtgcatcaggagcagctggcggaggaccttatggggagttggatctctttggagcccctccttccatgaacatcgtgcatgatcgttctcccgaagctagcagtggagcgggagcagccaaagatgtggatgactagattactatagaagtcctcgacatgaggggaccagtagtgggattaatgatcccataggggatctagaggctagagttgaacgtctaacgatggaattgtgccatggacgcagagagcgtgcgcatgatagtcgctgcatcattgagtttttagtagaggttgaacgtttgcagcgggagattgtggagcgggataggggtattggctgggctataaattcatgatctatagcctaggattgtgaggcggctgcccgagcccgggtggaagagctaagcgtagccctggaaaatctacaagggtataataatgctctgcacgaggaagtgcatgtgctgtatgaccagctacatccgaacgtttcaccggaagttgcgacgatgggagctggtgcatcaggagcagcttgcggaggaccttatggggagttggatctctttggagcccctccttccatgaacaccgtgcatgatcgttctcccgaagctagcagtggagcgggagcagccaaagacgtggatgactagattactatagaagtaggttgtttccttatatagtctaaataaggaaaaatgagtatgtataattagaacaagtttggaataatgtagcaaaggctatgtaattgtgatgtgt

SEQ ID NO: 13264 - DNA, 406 bp, Zea Mays
cgagaaaggcatgccattctacaaattgctcaagaaggtggacaagtttcagtggaccacagaagcacaggaagctctagaagcactgaaaaagttcctgactacgccaccagtactcaagccaccacgccgagccacgccgaatcagccggcagaagatctgttgttatacatctcctgcacgactcacgtggtgagcaccacgttagtagtcgagcgggtggaggaaggacatacatatccagtacagcatccagtctacttcatcagcgaggttctcggaccctctaaaatgaagtatccccaagttcaaaaactactatacgcggtacttctaaccgctcacaagctccgtcactactttgaagaccacaaagtcatagtagtcaccggatttccaataggg

SEQ ID NO: 13265 - DNA, 464 bp, Zea Mays
ctaacacgcccccacagtttgatcttcggtaccgtaaacgttcaggctggatctaaactccgtgaagactgaagatggaagccctttggtgaagatggctgcatactgggaggtagtaggcacatggagaacactgataccaccgagagccacccgatctcgaacaaagtgcaaatcaatctcaatgtgcttggttcgctgatgttggatggggtttgaagacatgtataccgcactgatgttgtcacagtaaaccaacgtggcacgacgcaacgggtgacgaagctcggccagaagctgacgaagtcaggtggattcaacaacagtgttggcgacaacacggtactcggcttcagcactggagcaggacacaatcatctggcgtttggaggaccaagaaataaggttatcaccaagaaaaactgcaaagcctgaagtggatcggcgtgtgtcaggacacccaa

SEQ ID NO: 13266 - DNA, 461 bp, Zea Mays
gctgcacctgggtgtcgagacgtagtgcgggtgccgtagtcagagggaggaagaagaagtcgcttgggccgttggatcgtattcaacagtcacgattagatctcagggtagtaaagtatgcgtcgttggattcgtaatcaacgtccccgattagatgtgggggaaatcatcgtgagccgtcggatcgggatcggttggtcctggatgcgcaccagttcaattaataacagagcaaatctgggccgttcgtttctaatcggacggttgtagactcgcgataccggttcgtcatgcgctggatctaatctggacggtagatattaaatcgtgcggcccaggtatcgtgataccccttcgccctggcctatttgctaaagagaccccataatttttacaaattaacccgccgtccgattcggatacaaactgagtcttaagacaatttatgagttagacctcgg

SEQ ID NO: 13267 - DNA, 558 bp, Zea Mays
gggggtcaaacccctggatgcccctccttggctccgcgactgggccctgttcaatagaggtctaaccactactcctatcttgtcatagttgcaaagtcgtatgtggagcatgccttggtcgtgctagtgttgagcatgtcgtgctgcagtggtcggtaggtgtgtccatgccattgagtacaacatagttggtagacagtataacaacttgtactttataatacctttgggtacacccaccaccataggcgtgattacaatgacacctgcacctgcacatctaatatagtggtattggttcgcttgcgccacgagcattgatgccttttgaccataacatcgaccataacattgctttaaatatgatgtacaagagccttctctcaacagctaggagtcacgtgattgatcgggtcagagtcgcacgaggcaccggtgtcgtcacacgacactgggctgtacaacatgtggccttcctgcctcgtgggtgtcttggagagttggaggatcctggcgtgagggcctccggtcctgcagggctccaggatctgccgcttc

SEQ ID NO: 13268 - DNA, 651 bp, Zea Mays
aagattctttggttttacaaaaaaatgcaccttatactcaataatatacaacccgactgtttatgttggtttttcatgtttttgggacagatgttttgcaactgataggctcattatattatacatggaaaaatacttagaaaatttaatgcattataatgctatattttctattatttgatttaagtgtgtgtttctttgcattgaaaacatgtctaggggcagaggaagcaacaagttcccaatgctaatccttcctttggcttcattttttcgtgcacttttaacagaaactttggcttcaggttccagtgttcattataacagattgctaatttctccaaacgtattttgttcttgagtttagtctggagatcatatggtgtttctgggcaacacatttcaaaggggaaccaaaatgaaagtttaagacaatgttatcttggttatgatgttggatgcttccaaaatgatggttagtggttacacacaaaaatatcttctatcgctgctaccttgttgcacatgtaagctgtagaattagtactgaatagctttcacaatttatcacaaaaaagagaaagaattccgaagtaccaatctaatgtgtgtatgcgtaaaataagctaaccttgctcctagcatcagctg

SEQ ID NO: 13269 - DNA, 340 bp, Zea Mays
aaaaaattagacatgtttgggctctaaatacaagataataccctacatcatgtgtgttggtgtctatttcttacaatctgatgatttgtcctcctagggcaccccgatcctccttttatagtccacaaagatatggcagttacatgtttgagtcggttacaaagagcgtatctaggtaagttaccaaacaaggataactacacaatataactgtccttttccaagttatcataagttctacgttaatcaatacaagatattttcccttatttacaacaaattaaccaagttgcccaatctagtgagatcttaccatcttgatcttttgaggacacccttt

SEQ ID NO: 13270 - DNA, 664 bp, Zea Mays
tttgcttcgagttcgagatgagtcggacagggggagggagaatatatataggagctgtgggggctggccggctgggtggcgttgcttgcgagctccggtttgtagcggtgcgggcgcgggaggaggaagcgaacgcgtttagcagccgcccgcgccgctcgcgttaagctggactggactgctggaggcagcaggcacatgattgggtggggcgggcgtgtcatgtggggcccgttcgccaggacgaaggtggctatggcacccagcgacctgccggttcacattttcgggatgctactatggagtccggaggcgttggcttcgtctgcttgatgggcaggagtggcggcacggggatgtggccagccggccatggctgtattacctgtgatgaacgtgggggcctcgccctgtcgtggccttggtcgatccggcgagcgaattcctgggttcccctgatgagttcgcagctgttgtcgttttctgtccccccaacacacacacacggtttttgcccaggaggcggcgagaggatattgtccatccatccttcgttttttcagattatccgataaaaccaggtaatctgagtatttcgccagccagttctgagctgtaatgcatagtcgatgaccggcgatttgcatgatcgaatgcttcccac

SEQ ID NO: 13271 - DNA, 347 bp, Zea Mays
cgacgacaacatatcgtcggtagtttattctattctaacttcaaggtaaaaacttttcttcgacttttcattgtttttgacgacgaaggtgtttgctgacgaagcttgcttctactcagagtatgctattaagcaaagctttgaggatgcaacaggaccttgaagacaaaaaacatgagatcataattgaaggtttagaaagcaaaataaaagatcaagcagctgttcttgaaaagaaagatttcgaacttcagacaatggaaggtttactggcagaagctgaagccaaaattgcaaagttagataaggagcttctctcaaaatcagaaagcttcgaacaagaaaaa

SEQ ID NO: 13272 - DNA, 734 bp, Zea Mays
gcgacatccgagacgaggaagcagaaggctaacgaggccactgaggaagtctgtttagaggagggtgcttcagatgctaaggaggatgttgccgagaaagaagataacaatcttcagccaacaaagcccaactacatcgatatggtcagtctatcattaagcctagggacctggagctcttgaagaaacttagttacattgaagatcataatattatccgttttgctggtgacgagaccacttctgagttgaaggaggatgagattgtagttttcaagagcttcttccagactggacttggaatgcccatgttcaagatgattgccactgtattgaagaaatacgagatttatatacaccaactcacgccaaatgcaatagttagactgagtgtcaatatatggatcttacgaagccaaggtgctcgagtagatgccttctacaggattcacgagccgcactatcaaatgaaggtcaggccttcggacaaaccgcataataatttcgggtgctattgcttcgcctactggaaggattcaaaatttcgagttttggcgtaccgaacgaagtgtctaagtgaatggaccaaggaatggttttatgtgaaagttgatacaaagaaaagggatgagtttaaaggtattgtgacgagtccacttaaagtgagcttcgggtacaagaggccactttgcaacgtgggtggaactatcaagatgacttacatcaccttcaat

SEQ ID NO: 13273 - DNA, 488 bp, Zea Mays
ccagaatccagcctgcgcgcggcggcgccattgccgtgcacaaccaaacctcgatactacgcgtccaaactccaatcgggtgggatctacacgacaaggaagtgattgcaagtgattgggtaaggttcttaccagcacgaaggcagcaggcagccctgtgctcggcgcacggtggaagccgaagtacggtgaggaattccggcgatgccagcgatggattccgagaggtattgccacggacacctccctaccggccagacaaagcccacggacaccccaccgaggaccggatcgacgtctttgcgaggattactcgcggcggcacaaggcactcgactcctcacggtttctctgcgcggtaatggcgagagttgcaagggcagcgcgtacggcgacttgagtgcgaaggggaggacaccgcgccgcttaagtactccgggctcggtcgcgaggtcatgcggactccgcctgaatcccgaagctcccgg

SEQ ID NO: 13274 - DNA, 416 bp, Zea Mays
ccgctgcggtgtgtgattggggcccctgccgtctcgattcaaggtattgaaacccccagacagttcgccatctcccttgcttcgcgtagaaccaaaccgctcgggtagatgggcgccagatgatcggctggtcgcgcgccggtgtgctttctggtggggcggcggggttccctggcaatggctcggccgtgggattggggctgcgccgccgcggcgtgctgttggggaagagagcccacagccatcggatccttgtggggcggttcagattaggagttgggtaccgtttcgcctaggttagatcgtaatcgttggtgcgagatcggacggtggggatggtgttgaactctaatataatctgggccgcccaaattggatcgagtgtctgtcattctgtaccggtttggcgcatggtg

SEQ ID NO: 13275 - DNA, 319 bp, Zea Mays
agcttccacgatatgggtcagttccaaacaccatatactggatggttcagatcctgctgcaacatgtgatgctccccgatccactacaatggagccaactgtgtctcttttatagttttattgttaccaacaaagaccatatactactgttctatcaatgttttgaccacagacatatactagcgctaaccaaacaaataaagaatttgcactcagacggtgcccatccttccatgaaccaatcggaaccagcatggtctagatggtggctttccagtacggggcgacatccatgtcttcgtcagcgtcgtcgtcagag

SEQ ID NO: 13276 - DNA, 1234 bp, Zea Mays
tcagctgaccagccatttcatcaaccaatgcctaacattaaaaacaaatgagggtaagaacaatatcacacccgaggtacaaccaggtcaggaaaaaccaagttacctggaggttggagaagaacgaaggaactcccaagtcgtgggaaatcagttgatggctcgatgaaggatcaacacccagagcaacccacaatgcatcaatggcgaccaagtcagtgtcaacagcagaaatcaaaactctatcatcaggagtgtcgacctctaaggcgacttcctgacccgaagcttgagctgctgccatgcaaccagaatgcggaggagaagatcctacatgaacatccatggaagtgtaagaaggagaaccaactcggacaccctcgggggctgggtcatagctcgcgctacccatccgagccggatcatccccggcgacacccttaggggctgggtaagcgctagcgccatccttgagggccgaactctctgtaacagccatctctagggctgaaggaccttcacccacttccatgggagcaaaacaatccagaccagcctccggacccttaagaccgtgctctaaggtcgatgaggcacgagacgctgctcgagataactccagcccggcatcaggcacatcagcacaaatatccatcattccaccatctgcaggctctgataacagatcttctgggaccatgtcttcaagagtttgatcaaagtttgccagagacaattcttgtagaccaatgagggcagacaaagctggagaaggaacaccactactttccccgctggctatgtagcgtcggctgttcttccgaactagagggatttcatcctcctcttcctcttcatcaacaatgtggacggtacacccattggggtcagctttggccggatcacacccattggggtcagcatcatctaagtcacacccattggggtcagcatcagtcgggtcacacccattggggtcagcttcagcaaaaactggcactggcacttcctcagcagcaggagcagaaggaccagcatcctgatccaagcatgacactcggtgaagacgtctctttttctttttcttcccctcagcaggagaagttggttgattggctcagcgaggatgttttgggcgaacactatcagacctctgagtatccaaagctttgccagcctctgggatgggcgctgcatctagtgtttcagcaggggctgcatcagaagaatcttg

SEQ ID NO: 13277 - DNA, 507 bp, Zea Mays
gcgcgaggctggcacagactactaacgaacttctagcctcgcttgaaggggcgacacggggccttgggtagggacatgggcactggtgtgatcgatcgaccattaggcctcgggcggacgattaggtttaggctcgggttaattggaatccaaccgttggatctggggtgaacggcaaggatcaaggcgaccggatccggcgttctcccatggccacccaaggtggtaccgctcgtgatcgcggcggggaactcgtcggtgacgaagacggctaggtttctgggtgtcttagggcgattggtgtggtctagggaggtcagggagggtccatggaatctagtggcaagggccaaatcacagtaggagcaccgaaggtcggagatccacggtgaggcgacaaggcggcgacggtagtagctctaacgagcaattgcgcatgacagagtgcaagggagggaaatggaggggcaggggaagttccttacctcaaggcgagactcggggtcc

SEQ ID NO: 13278 - DNA, 375 bp, Zea Mays
tttctgttttagaaggaagagagatgataggtggggtattgaggtgagtattagggacatgcattgcccttctcatggtgtgcatgatcctcctattcaaagatgtgttgctaggcctagaggtgctttgccttaagtgacttggtctcaagcagtgagaccacatggtggttgtgcccggtggggtgttggtcatgttccatatgaacaaagatctcatggcggagggttcggttcccacatctctagcggaccatggtttcctcctcatgatgatagctaccccctatgggaccaaggatgtttggtgtttttcctaacacttttaggggcaaatgatgtaacactagtattcgtcataattttctaccccca

SEQ ID NO: 13279 - DNA, 309 bp, Zea Mays
tagaaaccgatacaacaaaaataaaaccacctcaggtccaacatttgcccctgatcgacaaaggggaaagagggcagcgtttcatgctaactattgccaatcagagacaagtgccaccaaaatacgcctggcacgggagtgcatcacaatcaccggagccacaaccataaagaagtcattagtacatgtctgcaaaacaacacacagtcaaggactaggaggctcctccttcaggataagcacgcgctccctacaactaaacaacataatctctagctcttggcccttgtcaagaagcccaaggacaga

SEQ ID NO: 13280 - DNA, 645 bp, Zea Mays
aaaaaattaataactacagtggactacactaattccagtgacccgtctgttacctcacacacattgagaatggccagaggcggcaagcctgccagctgtcaacccgttagagcagaaaactcagccagcagccatgaggcctgccttgaggtagcgtgctcagccagtgggtgcaaggaccaggttgaggctccagctcttcatgactgccagcccaagtggcactacagtgagcctgagtcagctaacaagggtgtcggccaaacaagtctgcacaatggcaagttcgtttcgaggtaatgatcccagacattgatggccttcagttcacagccattcctcaacagatctaccagtgttgactgcaagctcccaaagcctctgatctccattgtttcccaccacttcatttagcttatctgtttttcttttgtttttccctgctttgcagcatcaggttgagaagtgcaagtattccatcacttacccaaacaactagtgtgaaaaatcagtgtaactacaagcctattttcagaatatttatgggaccattttaaggtcatattttttgcaatggcaagcaattctgaaacttatatgacagaattgataaggtggagggcaagtctaagggtgagggcgaga

SEQ ID NO: 13281 - DNA, 526 bp, Zea Mays
gagacagccagacgaccccatgtcccacaataacgtgtggctttacctcgagtagaatgcttagatttaccttggcctgatggttccttcctagggaagccaccgctagctgacccctctcccgacctataaaagggaggggttagccctgaggcaaaggggttggtcaggtgggcttggttgagttctttcggatacacacccagaaggacagaccctagacgaaccgacgaatagaggaggagcaccgacgaggaccaaaaaggctgagacccgccgctaagccaagactcagttaggactccactctgtagctcttagctccacttccaagccaataagagacttgggagcctttcctccctctctcgccggcttatgacccctactatgagttttgatcatcaatggtgttggtagcgcaagccgtccatgactggaagtggggacgtataaatcttgcgtccaccgcacacacccttcggagcccagaacgcgcacaataaatttacttgtcggagcgagg

SEQ ID NO: 13282 - DNA, 493 bp, Zea Mays
atcgaggtagtcttaccttggattatgcgcacgggtgccctgaccacggcgcacggcggaatgccccggactccacgacgtcggcgagcaaatccagggcccaagtttgacctcccaagctcaattcgtcgccctcgcgatccgcgcacgctgccgaacgcacccgagtcaaccccggtcgctaattggtggcgtaggctcgagtcactggcgacgacggcgaacctcccaacggacgaacgcgacggtggtttgtgatggggtttatccgatgtgggcgcgagtgggcgagagaaggggaggaccgggtcacgtgagccacattttatagtccctagcgtcgagcaacggccgggcgaattagcagggagtcgcccgatttccccggcggcgatccgccatgggcagcgaggtgggcgattctggccaacagggcccacaaggcagcgatggcgagctacggatgggtgactcgtgaccccgggtccacgcg

SEQ ID NO: 13283 - DNA, 315 bp, Zea Mays
ctgggcacaaatcgcgacgtcggcagcacgaatcacggcggagggagccgtcggcggtgaggacagccgcgctggcggtctgatctggttcaggcactgtaccatgggagagctccttcaaataacctgacagtcataattcaggctcgattttctcccaattctatatggtaacatactccatgctctgcagcaaaattgtagagctatataccagccacaagtttgtcacagcagccatgggcagattcttgctggatcatagttgaattcatgctcaaagtcccagtggttgcactgtctgtctgaaaattc

SEQ ID NO: 13284 - DNA, 322 bp, Zea Mays
agccctcatttgtcactttaagcagtataatatcatctgatccactcgaccgaattgtggacaagcggttatagatgtcgttgaaaagtgtgatctttcggttgcttgtggaccgccgatccttgagtagcttaatggtacgatggaaggggcttcatcggtggtaggagcatcggttattggaggctcaatagtatgagcaagatcatcgacactcggtcggtcggtatggatgtaatggaggaggatatggatatagaaagatatgttgaggagtaagggatcggggcgagcaggatcatcatctcatcgatgatggata

SEQ ID NO: 13285 - DNA, 741 bp, Zea Mays
tccccaaattccttgagaagatcatcaaggcttgctagggatatatccttggcgtcggaccaatcatctattctggggggaggtggggctggagtggtcttcttcttcttcttctctgtttggcatccttggctggtggttttcttctgcattttcttcttgggagcgagcttccttagcttcttgtcatagtccatctttaaggttcgataggcctcacgggtgttggcttcctcgccttctgctatgtcgagactctcctggagagatgccttctcttgcttaagctctttgacctgctgctctaggctttccacttgggagtttaggtgggtgcagtgggaggagagctcatcgtagtggttgtctaaggtgtggaggtatccggccatgtagacgatggtggggtcatcttctgtggggtctcctcctgacagagcctggaatcttttcctccaggtgggggtatttttgttgctgggtggaaaatatcgaaggggggtctcagagatctctcggctgtagttttggcacaactgtttaagggcttttcgggcaacaccctggcaagtgtctggaaagcggtgcccgatgaaggtgatttggaagagagggtggtttgggtagtttcggctttctcccaggtagactgccatagagcacttttctattccattttcgcggtattccttccagacatattcgggcttcttgcggatccccatgcgtagcgcgcaactt

SEQ ID NO: 13286 - DNA, 838 bp, Zea Mays
cgtgtggcagttgtcgcttgcctcacgccagcctttgccacgtgggcccagggcgtcagctccatctttccccaactgccagccgacatccacggcaaatcggactccgccatcaccgaccttcgcgcgtttgctgggtggttggactccgcgtaatccgtcggccaccacgaatccttgaggcgatataaaccatgcttgcgaccccctggtcctcgcaaacaagcacggcaccgagagcacagaggacttggagccgccgccacgctaggaaatcctcagataatgctcttcgggtccctgtgggtgatctggggcgttcgctggtgcttaccgatggcgtccaggtccttgtcgtgtatgggtagagtccagggaatggggaattgcttgtcggagttctatcctccgccgcgggtcgcgctgctcatggccaggtgctctccatgccgcgacaaccggtaagaaccttcgcccagcttcgccataacccccgtaacagttgtagctatattatttcgggtttctggcaccggtgtatggaatcgggtgtcgccggtgaggtctccaccgtggagaagacggcgctgtcgttcctgggatcgggttgatgaagaagggccgctggccgttggatcgggttgaacgacttagattagagcacatcatatccgttgtagggttttatccggacagttggattccgatcgaacgactcggcgatgaagtatggcgtggggtcgatcgaccgttgattcaggatccaaaagccagcagcgcgtaccggttcacttaatgggaaatctaatccgggcccctgatttccgatcgaacggac

SEQ ID NO: 13287 - DNA, 1230 bp, Zea Mays
gggaggtccacgacaacgaccgcgtggaggatgaactccggtgaggttgtgccggcggatttaagcaacggccagggctctcgagcggtgtacaccggattaaacccttcccgaacgattcccctaacttaatttcacgattggtaagctatcacgccctgtccacgtgaaccgcgaatgatgaggacaatggtacgcgttcccggtgatccctggcggtccggttcaattaaagggttcgaggggtttgcggggtacctaaggaggctagaacaagtggcagagggacttgagctcacctgaattgagctggccacggtgaggtcttcttcgcggtggcggaaatcgaattgggggaagtgagcgattctctggctatgggggctaatcggagacgggagtggtggctatggctttggtatgacctagcgcagctggccgggggctcaatttataggcggagcgagcggtggcgcttgaattgatgatggcgcggtggcggccggagaggaggaagaaccttggcgcgcgtggttacgtgtcctatggtgtggcagtaactccggtgattgatagacagttagagggggtcacggtgatgcggtggcgcggttaagacacgcggcgcacggtcggacggtggcggttcaccggcgagcctatcgctccagccgcaaagcagaggggaaggcaggggaggccgtcggagtggtgtccagctcaccggcggtgaggatctttaccgagctatgtttatccgatggccacgacgcacgaatcacggcgagcagtgatcaacggtgatggaccaccggcgacgagcagagggataggatcttcttcagttaccctttactgtaccatgggacattcagtttatgatgcctgacagtcatagtttaggctcgattttctcacaaatttttatggcaacatacccaatgatctgtagcaaagttgtagatctacaatccatctataactttactacaatgtgctcccacaaaaagtcactggatcttgcttaaaatcaagccctaagttcatgtcatcctactgttaatctgaatttcagacatcaagcagtctgacagtccaacttcaggctcaattatctcacaacttttcacaagaacatggcttgcactcttaagcaaacttgttgtcctataattgggctataattttgatgtggtgacctagggcacaaaccccataatttgaaagtta

SEQ ID NO: 13288 - DNA, 893 bp, Zea Mays
gtggtcaccccgagttaagtaagcgtgagcatgttgcaccggtttaagtcgttgccgacttaagccaattgctccgttagcagggcatagtggtcaccccgagttaagtaagcgcgagcatgttgcaccggtttaaatcgttgccgacttaagccgattgctccgttcagcagggcatagaggtcaccccgagttaagtaagcgtgagcatgttgcaccgccttaagtcgttgccgacttaagccgattgctctgttcagcaaggcatagtggtcaccccgagttaagtaagcgcgagcatgttgcaccggtttaaatcattgccgacttaagccgattgctccgttcagcagggcataatggtcaccccgagttaagtaagcgtgagcatgttgcaccgccttaagtcgttgccgacttaagccgattgctccattagcagggcatagtggtcaccccgagttaagtaagcgcgagcatgttgcaccagtttaagtcgttgccgacttaagccgattgctcccttagcagggcatagtgatcaccccgagctaagtaagaatgcaagttaatcatgaacaaactgagtatctttgaagcctttttttattgatgacatatttccattttacagagtacatcgtcgtcccgatagcttttgaaatacagctagggataaaacttcctgaggtgttctatattccaggagttcccgacttctgtgccgtccatctgagtgagacgatatgatcctggccgagtgacttctgctactatgaagggtccttcccataatggcgataacttgtgccgtccctcccctgttagaattcggcggaggacgagatctcctactgagaaggatcgctgccgcacgaccttgtcgtgatagc

SEQ ID NO: 13289 - DNA, 325 bp, Zea Mays
gtttcatgagggggctaaatgatagactccagcgtaagatggcaacatgtttggacctcacatacagcagggttgtcagtacgacactggcagtcgaaaccaaaattgcgggacacagaaagtcaaagggatatgcgggtgaaagatctactcaaggatctgaaaagagaacaaggttggtaatccgaccttttaatccaaaccgttcttcacctcgcccaccttcatatccattcaagcagcctgtatttattcgtcccactcctgcccccactcctaccaatcagccgagtgcccttggtactcgtttccctgcccttcccag

SEQ ID NO: 13290 - DNA, 591 bp, Zea Mays
acgacatgcggacgtggaacgctaggcgacgacatggagctctctctgcggtgtggtgcttgctcggatagcagcaggactcgccaagacgggcagatgaggggaggcacaggggctcgtatatatgctcaacaccgagagctctaaggctgtctccaacaacgctctgtatatgcgtctgtacgctaaatatagagtacggtagcgtgggcaacccctccaacaacacccgctaaaggagaccgtaaaatttaccgttcgctgagaatcctctaaatgtggcagacgaagaagcgtccgctatatggttgcagttgcatcctcgcgcccaaagccggaagcttctctctcctgctctgttcccctgacgtccttctccccctcgtcgccggttcgctcacggcatgcgttgtccgtgttcgatgtgaagcagggcagcaggaggtcgaaatcgggcggatccggcggcggaccactgggttcgattcgaattccttcgcaaagcagacaacagccgacaacaaaggtcgtcgcgtccacagtcggacaccgacatccaactccaccgtatctctgtcccaaggctgctcc

SEQ ID NO: 13291 - DNA, 615 bp, Zea Mays
atatgacttttttagaaaaatattgttcccaaaccaatccttaaaataaaaatttagaataatacgaccgcgaaataacatatagaaccggagcacaggcaccgaggcacgcatggtgagctggacggcaaagggaggcaaaagatgaaggcagcgtatcttatgcacatgcctacggctgtgcacatatgcacatctcccatcctgtccctccaaccacgatccgatggtcaccgttactttaacacttaaccccccgcagcctgtcatgtgatgtggattatttcttgcaaaaaccccccgctctccttcttccccaaacggcaaacagaccagactcattggcttctcgtagaaggaccacgaagccaccattggagtcgacgccgacatcgttccagtctgcagctgccctcgccgaacgccgttctcgtcgccgctagagcctacacctgtcgccgccacctgctcatcgccgggcccgaggacactgcaacatggcgccgccgccaccggcatgccctaaccgtggtggcttgatggagcttcttaacgtcatggacgcgcgacgggtagacgaccctactagcagcgtggacgccatggaccctgctc

SEQ ID NO: 13292 - DNA, 585 bp, Zea Mays
catcaatcgggtccgcgggcatccctgggagcttcgggttatcccgtagacgattcgtaggcggggtggtgtgcgggtgtcttctgtgggctggcaattcctcgccgtcgccatcggtccgccgcagacggcatccgctccatggcctaagctcgacgctgcgcaagcactggtacgagttcccttcccgtcctcgctaagtccgtttattagtgtgcgcgtctcatatggatggttggaccatgggagtgccgcatcggctgtgcgccggtggagcgacgggagagagaatgagcgcctgggaaggtcgtgctaccgtagtgcgagcgggggggttgaagacgaccgtggagcgtccatacggtgatctacggctagcattaggcttacgtaccgtttcggtggcctaatcggagcggttgatatgaaatcgtgcggtcgggattgatcggagcttgtgtttcggggtggggtgcgatggcgcgtccgattgcgatcggacgatcctgttgcgctcacatttaattaaatcggaaccgttcacgtgtgatccagcggcttggatccaaagataccccttcggcc

SEQ ID NO: 13293 - DNA, 333 bp, Zea Mays
catacatagtcaagacaaaggcatccccaaacgcttacaggctaacaacatcatctggcgaagacttagagcattcatggaacatagataacctccgtaaattctttatttaagatacaagacccgagtgcctttgtaattcttcaaacaaagttactcaggcccgcactcttttcctcccggggggtaaggtttttaacgaggcggagccatgtaatatactgccaaaaagcccccacaaaaaatccagccagcatcatgagtgtcgaaaaagactgcatcgatggccttcgacattcaacatacaaaacagtcaccgcaagaggcagccta

SEQ ID NO: 13294 - DNA, 679 bp, Zea Mays
ggatttatgttaaatttcgtattcttttacgatgttttagctcacgttttacgccggaatctgccctagccagaacccgcgcacgattgggtgcacgcgattttcacgccgtaattttgggcttcgtttgctgttacaaaacagatatatgatttacgctaaatttcgtactcatttacgatgttttagctcacgttttacgctggaatccgcccgagcagaacccgcgaactacggctgtaaattaaaatttattttcttctactaatgctcctcgaaccgtaactgtccctttatttacgcgattatgcagcacgtctttccttatatcaaaccggtcaagatttatataatgcatggtttatgctatcatgttacacatcgttatgcagtcgtaaacgatgtgcacatggtaatattcgtttccgtgagtcaggtacaaaagatcccttctatgcatgatttatgcacattactacatatatttatgcgtgcgtatttgtttcctcccgtaactgcgcctttatttacgcgcacaaaaccgatgggagattttaaatgtttgcatagtttacgctagtatgtatcacagcgttatgcagtcgtaaccggcaagcacatgcaaatattcgttcccgtgattcgtggcataaaagattccatttatgcatgagttatg

SEQ ID NO: 13295 - DNA, 333 bp, Zea Mays
tttcatgcccacaaagtgtgttggacccgccaaagtgccaaaggatcagaactcccgatcgagtgtgggaatcgccccatcatgcacacagcacacccccagtccccagataatagcgaagaatcagttgcagaatacgacagggaatccagagccttcttgtccccaaagcatgggcgtcacacaggccggctcccaggatgcgtgctttcagtcttcctgcacgtacggtagcaaagccgccagccagccagcctcgccctcgctctaataacaaagggaaaccagagtccgataaggactagggaagtttccttgccgcgcagcttgtcg

SEQ ID NO: 13296 - DNA, 431 bp, Zea Mays
ccgattgacatccagtggacacgaaacctcaccgcgaatcggtatacgacttaatgatcacaaccgtccatctacccatccatggtacagatgtactcctctaccactcacgccgaagcacggcgacgcaaaggccagggcggcgaactctccggcaaatcgcccaggcgcaaccccgcatcagtacccgccccgattgaaactacatgatcaccgagctaaagcgaaatgggtaataggtaactcaccagagatcaggcgacggaaacagctgccctcgctccacgcagatccgccgtccagaagagcgacgacgagatattacgggcgtgacagaggctcccgatctcccgggtcaacgctactgcgtttgcgcccacatgagggagcccctaactctcaccctggccctggaacactcccaatcagag

SEQ ID NO: 13297 - DNA, 780 bp, Zea Mays
gggcatacaacaaggatatgccaagtcactattcagaagccgaaggaaatagctgaagccgaaccacggtagaatcagcggaagcaggtgtaatacccaaatagtgggaggaatagaatgtacaagaattgggaaatacaaaaggtttatttgactacttgtgtggactaatgggcctgattgtaatagtttttctataagagaggacggtgggttgatttgtaataatctgagggtctcttttgcctaaacacgtggccgaagggatatggctaggtctcagccactcgatcaagcacgtgtggcaccgattagatcagtcccccatccaaatcgatatgtgttgccatccgctagatcgaagatcgacgactatgttttaatgaaacggggagctaatcctatccgtccatcgcttgatggacgaccctcataacctgaccgaaccggcacgggtactgtctattcatagtcgttcatccaaggatcaacggctagtattcctcccacgaagaggtgtgagcaggatctaatcttggcccttaattcatccaatggacagtgtagatgcctccgcccatgcccccagtggttacccacagcgacaccccaaacccacggtggaagtcgtcggcacgcaaccaatcccatgtcctggtgtgccattcttcaaccggccatgctatgcgatgggggaacggacacaagtcatttggtggggtttttacctggggttgaagctacgatagagctgaccacgaaagacgacgacttggcggc

SEQ ID NO: 13298 - DNA, 329 bp, Zea Mays
gacagatatggtggactttccgaagtccaggtggctaggcttgctcggcactgcgctactgtagtcatcttcggaatcagtttcttcaacagcagcccgttctgtttcggcagcagggatgtcttcggcagcaggcacgtcctccggtgttaccaacccagagcgcttcattgcttccgaaataggaacagtgtcagtagcttcggtctcgtctccctcacgatcgacccgagcagtagagcgaattctggccattttgattatgacttacttgaagtttttggtgttgacttttttgttttcctcgaagctcttactcttcttccgaa

SEQ ID NO: 13299 - DNA, 356 bp, Zea Mays
gcgcctgtggcgattttcatgccgtaattcgagacccatttgtcgttacgaaacagatcgatgatttacgataaaatttgtactcatttacgctgttttggttcacgttttacgctaaaatccacccgatccagaacccgcgcacgatcgggtgcacacgatttttacgccgtaattttaggctctgtttgctgttacaaaacagattttggaattacgctaaatttcgtactcatttacgctgttttagctcacgttttacgctggaattcgcccgagccagaacccgcgcacgatcggctgcatgcgatttttacgccgtaattttaggcctcgtttgctgttacaaaacagat

SEQ ID NO: 13300 - DNA, 605 bp, Zea Mays
atgcactcaagcctagctcgatatgtcatgagtgtgtcgtagactgaggggcacgcggaccataaacgcaccatagtacctgggactcataggtcatgagtgctatgtgggccgaggggttcataggtcatgagtgggaagagtaccggcacccacgttgtggctctgtagcagccgtggttaatgtggtcggattatttacggtgggtcagtctagggccaagcgtaggatccactcaagtcgtctccttccgacatacctggccccctgtcatgttccgcgacacccgaccctaggctcggtgctggttggttcgacagggggcgggtttattcagggttgacgcatctgcctcctccagctgaccaatgggccccaacgactagggtcactttccccagcgcactctctgactggcgggccccatagaccgggatcatatcccgaacaatagtccccgagcccccggggtgagtgtctccctgcgtgggctaatgaagggtcgggcggtgtcctatcctttcttcgcaaacttccatagttttctcgtaaatgccaccaaactgtcgcctccttccatacgtggcacttggttcatgcgtcg

SEQ ID NO: 13301 - DNA, 293 bp, Zea Mays
caacgacacctagccaccacaccgcatggggatgctatgagagtggtcgatataccccgaccatcatccccgagctcccggtgaacacacaacgacagcaaccacgaggattggccatggcgccgtttgtcacctctgttccgatctcagcgctccagatggtggggaagagggtcacgacctggtttttatagatgaggataaggactcgcatggccggcccgaccccgagatcggcgcggtttggtgaagaatctgttgcggccagcagaggcgatctcgacgatttcggc

SEQ ID NO: 13302 - DNA, 387 bp, Zea Mays
tgattgtaaggaggcgactctggaatgaaggaggtgttgggcgaccatgcgctcatcacatggttgcttgaggcatttgaagtcgaaggctaatgcagcctaggctcctgggttgaagttggacgtattttggaatgtaaggtgaacagtacgaagatgtactgaacacctcctttgactgagatgactgagtggtcgccgaagcaatcaatttttgcttgtggatagtgtggaggcaggtccttgttgtatgacctttattctcaccataaaacagatagaatggctctcttttgggtgcattgaacctgccactgaagcctcgacctcctcttcccccgtcttggagctggtgggcggaatgtgctctaaggaatgctggtgatg

SEQ ID NO: 13303 - DNA, 455 bp, Zea Mays
cttcagtaaccacatttggactgtctcccatttcagccgatcctctctttttgtcacggtacattcaatgcatatattttgtaggtatcaccacttcagaaaatcttgaagattccgggcggtacacccaatgggtgtgcccaaagggtgtctgctccatggaaggtgtttatcgtgttgtcctgaattagtaatttgatgcgatggaggggtgtaatcatttgcctgagcaattgacttgagtccaaccggtgtcatgttacgcgaaacggcgccagtcacttgacttattttcaggcggtttgaattgcttattgaattcttgcgactgttcggtgagcagggtaggaagtggacggtcaccccttggcctctttaaatagcccgcttgccttatctgctttcttcaatcgcccttgatcactttctctcttcttcctcctcacttctccccc

SEQ ID NO: 13304 - DNA, 525 bp, Zea Mays
aattcattacctagagaacgtttcccctaagttaatttgaagaatggcactctactttgccctgcccacggtgaccgagaacgttacagagggatgaaggtgttcacggcgagtggtggtgatctagttcaattggacggttcaaggagttcgcgggatgcctacggatgctagaacaagcaaccgaaggacgcgagctaaccggaatcgagttggccgctgcgagctgttctttacggcgacggagaccgaatttggggagaattggaaattcgcgcgtgctggtggatgatcgagggtgggagcgggtgctatagcttcgggatgacttagcgcagtagcccgagccatcaatttataggaagcttcgtcggtggcgcttaatttggtcgggccgtgcgggtggccggagataaggaagaacgcgggtgcggtgaatccgtgttcaccgtcgtggcgagctcatcggcgatgattgcacagccgtagcgagtcacggtgtcgcggtggaaagcaaagccacgc

SEQ ID NO: 13305 - DNA, 360 bp, Zea Mays
gccggatgcgacgaagccgaaagggtgcacaaccgtggtgcggttgcatgcttcctgcgtggcggtccgccctttcgaccggtggtttcggcgaggatgggggaatgcttataaccgcggggcggttacatgcttcgcgtgcggcggtttgccttctttgcgtttcgggtcagctcgcatgacgtgtgggacccaacccccgtgtcgtagggtgggaaccctggagcacgtcggtggagactttgcctgtgacgcttgggggcgcgagtgaggagatctgcctttaaaaaggggtcgacccccgggtggtagccatgccttcacacttctcgcattcatcgcgcctttccaccttccgag

SEQ ID NO: 13306 - DNA, 841 bp, Zea Mays
cacgcaaccgccactgaaagtgctaattttgtggcggcttcgaccgcgattgcggaaaatgattcggatgattctgtgtctaagttttttgagtctgatggttctgggagttcgctggtgtggacggaggagtcttcggatgaggatttggattatttcgtggcattggatgtggctgcggcggagacttctccgcgtgtgatggatgttgttcccggtccgagtgctgggcgtctgtggcgaagggcgatggtgaagcgtagggtgagtgaggttgagggtggtcgtcttcgtgtggacagggctggcaaatgagaattgttggcctcgccggctggggtaagcgtaggtgagggggagttgcgaaatttgtttgagggtgaagagctgaggataatgttgtttaactatagggagatgggtatcatcccgaatgttgaaccaatgtaatgtgtggtgccctcgctgcacgtatgtaactgtaatttgtatgatgagtctgtgtgccttcgctgatccagacgtgcccgtgggggacttgtgcatttgatctagcgcgtttattatgccggtccggctgcgcctgtattcggtctttgcgcgaatagtttttcgacgaagattttcgcacggatgtgcctgcgattttgtgcgcttgttgtgctagtccggctgcacccttgggcgacttttgcacggatagtcttttgaggaagacttcgattttaagcacttgtcgtgctagtccggctgcacccttaggcgacttttgcacggatagtcttttgaggaagacttcgattttgcgcacttgttggtgctagtccggctgcacccttag

SEQ ID NO: 13307 - DNA, 602 bp, Zea Mays
ttggtcactacgtactagtggggtggggtcatttggtggaaaacttaacaagcatgcatgctacatgagataccttcgactcactctcatttcatattcttcttttctttatgggaaaccacagtagtagaaagttttgtttgagtagttatatacatgcttgtattattttgaacattaattttccgtgtctcagaactgtccgtagtgatggctagatgcccgtgtcgcattaatttcaggactaggcagcatctaggatagcaactaagggaaaaagagcatcaagctaatagagacaaagaagaaagtacaatccataagcatatactagaaagtggaggagccgtccggtgatgatttccagtacactactactcgattaaagcatgaatagatggaatcttttgatcagctaaggcctgtcacacttaagccctctcaccaatatcctaatacgaacggcaaggtcacattccatattctttgtgcattattattgttaattaaataatccacatgcatcacatccccctagctagctagtcatgctgccgtcctttcaccgctcacgattgacacatgctcaacctagcaaaacc

SEQ ID NO: 13308 - DNA, 727 bp, Zea Mays
cttgttcttgcttgtgtctttgattctcaggcaggaattagccctcatggcgaggtcaatcgtgcagcgcacggttgataaccagaggagaagtggtgttgtgattgcggggttctagtcgtgttgattggaagctggatcgtttgtgtgacatctccaccaaatcgatagttaccttcacctgacggaagatcgggcacccctgttcctatcaagtggtattcaaagactcaggtattaccgttaggcttaccctagtttagtttaggtttatcatcctataactctagataattaccataccaaaaaaaatttcgttgtcctatagccctgtttagccttgcaatttcgtttcagattgctttgttgaatttgtgtccgtgttcgagtcttgttgctggtttaggtcttgtcgtaatcgtagttcaaccgcttcgtcgctgttatttgtttccgccgctatcccatccacctttcccagattacaagtcgagacaccacattactcaatttgccctcgctagccgccttgtgtcaactctcgccacgctagccctagattaggttgcaagccgctttgaattgtagcccctccttgtttcatcatctggcgcttatctattgcttataccagggaggtttgtgcccctgtgctctatagtcgccgctacggttcctaccaatttgtgcccttgaaaaccataacttgaggtaccttccataaaac

SEQ ID NO: 13309 - DNA, 353 bp, Zea Mays
gcaccactgaactcagggcatcccaaagagtgaggaactctgcaataactccaacagataaactatcccgggtatctgaaatccatctcttgtccatgagggcctcttgcacatttttgctaatggcaatgtgtttaggaaccacctcaaacaacctaggagccaggtccttcacacataacccatgcagccaacagttcatccaaaataaggttgaagcaccatttccaatttctgtcatcatagccacaaagaagaatgccctaactttatcacaaaactacagaggaagagaggactaaggtctcatagggtcactcttggccaaccataaccatctcattcgaagggct

SEQ ID NO: 13310 - DNA, 574 bp, Zea Mays
cgcgaatagacttcaactgggcgacgcttggattacgacaccacgatctctcttctttagttgctccattctcagaggaggagatcaaaagagccattgatctgttgcccattgacaaggcgctgggacctgatggtttcaccgggttattttttaagacgtgctagagcataataaaaggggatgtcataagggtggccaacgctttccatgctctacgttgtggcagcttatcactcatcaacatcgctaacgtaatcctaatcccaaaaaacaaaggagccgaggaagtgggtgattttagaccgataagcttaatccattccttcataaagcttatttccaaaatactggcattacgacttcatccccatatgaacgggatcgtcttcacttgtcaaagcgccttcatcaagaacaggagcatacatgataaattcttggtagtgcgtactgcggcacgccgttttcatacaaacaagaccccaacacttttgttcaaattggacatagcaaaagcctttgattcgatacgttgggagtatatcctcccccttcttgagcacctaggctt

SEQ ID NO: 13311 - DNA, 621 bp, Zea Mays
gacaggttctgtgctgcaacgagcaatcgctcgcataccaatggagcgaggagctggacagagacgaggcacagggccaggagccatgcactccaacagtgcctcatcttttctgcttcctacactactgcgaccatgccaatgcacctgcccgggaaatgcaacagcaattcttctcccccttcagaaattcatggggatggccaatggacaacaatctcttagcaccgtggaaccgattgctcgacggaatccattggttttgaccagagaactttgcaacagccccagaatggcaccaccttcggggaatacatgcatgcagaacgcgtgaaattggagcaacaagcgagagcttgtgcaacagacacctggagatgttcggagaaatgcacgagcccgggtgaggaagctcagacagaatcgcgaacgtgggcgaccaaggcaaagatcgttatgcaatgcaaagctgcaatgcgcccacgaaatcgagcaaatccggcaatgcagagccccctagccgcgattcccaaatccgttaagaaattgagtcgaaaaaatcgggggaaacgaaaatgcagataatataagcccaggactaagataccgtgccaataatgc

SEQ ID NO: 13312 - DNA, 406 bp, Zea Mays
gtgagggatcctctcaaggatccgagaagcggtcaaggctagtgattcgtccctttaacccaaatcgttcttttcctcgcccatcctcctatcctttcaagcaaccaatctttatccatccaactactacccctactcaaaatatccagtcgagtgcccctagtactcgtttcccagtcgtacctagttcatctaacagttgcttcaactgtgggaagtttgggcatttcatcaaggattgtccctatccgaagaaaaataaatcaaacttctaaaaggcttctggaagcacatcccaaggcaagggtaatgtggcaagcactcaggaaggcaaaggcgaaaggaaaactagacgggtctactatactcaagtggctaccacaccggaaggagagactatgacaat

SEQ ID NO: 13313 - DNA, 534 bp, Zea Mays
aaagtatagggtctttgccctatgtcaccacatcaaagttgtagaccaatcataggagaacaactttgcttaagaatgtgagctcagttgttaagaataaattgaagataattaagctcaaagtcaggctgtcaggcaatccctcgactgaattttcagtagcagtgtgatggggtgaactttgagctcgattttgaatgtgattcggtgactatttgatggtaagcattgtggcaaagttgaagatggattataggtgtataactttgatgcagaaagttgacttagccaccacataaaagttggagaaaattaaccctaaaaatggacagacagactgtctgatgaagccaaccatggtacagtgccccgatggatcagaccgccagctaagctcgccgtcgttgatcgccgtccggattcgtgcacggtatgggagggataacaccggggaaaagggtgattcatacatggcgacatctcctgagctcggccggagttttctcaccggcagtcgctgtgactcagcacggc

SEQ ID NO: 13314 - DNA, 557 bp, Zea Mays
cgcttagccgccgtgctccgacgagaaattcccgcacctcgggacgctccagcttcaccctgagggcacaaacaacacccacgcgtccaggtgattcttcctagcggtgcgccgatgacagaacagtggtacaactatagtttttccggtggcggcggtcttcccccaatcgagaccgatgacagctatggtggtgcgagggtttggcgacgagagcgctttggaaatgggcattgcgaagacggtcgtggcgtgggttttatctccccgctggatcgcatgcaacgcacgcgcgagatccgcgtcagcggcgtgcccgccatgcacgacgatccgttgaggacggagctgataccctgggcccaccaaatagcgacgtgaggcagtagctgagaagtaggcccgtcctgtcagcaagctaggcgcgcaaacaaatggaataaggctgaccagcggacccgcttgttgggtgcgtgcgcgcgggagcggggacatgggacgcgtaggggcattcagtttgggccgaattgttggtctgcagcccaggtgagtttttc

SEQ ID NO: 13315 - DNA, 1789 bp, Zea Mays
gctattaaagcatttacgtgtataacacaaatttgattgcagacagctcctaagtttgaatctatctggaattttggctcctgagcttggtcagctttctcaaatgaaaattatgtgagtggatttaatttcagctggcaattgattgattgctgagctaagtttagcttgtcatttgaactgcccacttatttaatcgtacatgcacaaagatgctgagtatttatttcttttgaagggattttatgtggaattcgattggcgggaccatacctaaggaggtcggaaatatcacttctctggagttaatgtaagtcgaaatctgcagcacgtcttagaaatttggtcaacaacattgtctgaccggctcctctaaaaaacctagtttcttctcccttcttactgtcctagcttaactttgttggtcttgtttctgcttgtacagcttgtgcagttctcttagttgtagacttgtagctccctggctcctattttcccctctccctctttgtgcagtggtgttcttttcatttgttaataaaatccttaccgtggggatctcccctgctgtatttaaagttcaaaaaaaacattgtttgatgttttggttgcacatggggcatgtcatggctgtaagtttttttaacttgatcactgggagaggagatacttcccatgccatttttttaattgaaggttgaggtgtactaaaccctgtctggccaggaaacatgctgaaaccaatttctcagggaggtattgacaaattggtgagccccgagtttgactccgggtgtctatcctaccaaatttaggcaataaccaaccaaattactgtttggttcttcagagctattaatttaatttagtattcattagactgaatctaagattcacccaaaaacatggtatttctattttccttcataataatttaaaggtgtttctctggtacaagtttttggcatgtgtgccattgttgtacatcctatgtagcatgggatgacctttgcaatttttttttttatttctttcacgcaattgtttctgctctataacaaggtgcccccattgtgcatttgcaggctcctgaatggaaaccaattgaatggctctttaccagaggagattggcttccttcctaatctgaatcggattcagattgatcagaaccatatatctggacttatacctaaatcatttgctaacctgaataaaaccaagcacttgtgagtataatatggtttgtatctctgttatcaaggaatacgtaccctaatgaattttctatcttcatccagtcacatgaacaacaactcattgagcggtcaaatcccacctgagttatccagattaccttcacttgttcacctgtaagtttctgacattgcatatttgcatcattagtctttatactttattgagaacacaattaatttgcagattattggataacaataacttgtcaggctacattcctccagaactatcaaagttgccaaatgtgctcatcatgtatgtaagcttctattgcgataccttgagacatactgttttgttaatttggttgtcttggctgcctatcattctttggtcagaaattgtataaattttgcttggcatgaagcacacatctcccatgcagtagtaactctatatgggttatctcatagcttcattgaactttaactggcgaacgggtctgtagcctagtggttacatgtgccttggtagcacctcaggtcctagatttgactccttgtgggagcaaaaacaaccctcgtcggct

SEQ ID NO: 13316 - DNA, 451 bp, Zea Mays
gctctttagaaaaattattgggtgaagggggtacggtggattctgagccattggatccaggatctatggttacagttaaatcacgaacaggtatgatctttgggtcgcagggtctatgatcaacaaacccatatcagccttgatcccttaagttggattcgcatcccatccgcacaatcccgatcggacagtcccggtcatcccacgaatcgccaagggcatgatctaatctcggtcgtctattgcaagattcatggcaagcacgctctcccttttctatttctctcatctacactgagccggtggcaccatagccagcgaggtgccctctaacgccatgcgccccaaatctctgaacaaacgggtgctaaacgttgaggagcgaggaatgaacacatccgaggactactcactggtaattgttgaaagggaaatagggtttaaccttttc

SEQ ID NO: 13317 - DNA, 493 bp, Zea Mays
gttcagtccatgaatcagagcttcatattcggccgcgttgttagatgccggaaataatagttgaagagcatacttgagttgttcacctccaggtgcgataaagagaatccttgcgcctgctccctgcagctttaacgagccatcaaaatacatttgccatacttctgcaatttctgggttatctggtacttgctgttcggtccactctgatatgaagtcaaccagtgcttgagttttaatggcagtgcgaggtcgaaattcaatgtcatgagatcccagctcgcaggcccacttggctattctcccgatggcttctttgttgtgaagaatatctcctatcggaaatctcgtgactactatgactttgtggtcgtcaaactagtgacggagctttgcgtgcagttagaagtactgcatataatagcttctgaacttgagggtatttcttttcgagggacctagaacttcactgatgaaataaacaggatgctgc

SEQ ID NO: 13318 - DNA, 576 bp, Zea Mays
cgccgatgctgtaggcgtcgcttttctccgtcagctgctggctgctgcaacatcccaaagtgtcgcattcatccagcattaattcacttgccgtcgatgtcgttgcctgccgacgtcgtctccggcgccgacgtcccagttttccaatgctcgttgccgccaccgccggctcttgcccctcaagtcctcacacttacgatggaccggttggcccacagttgcatctcgcagatgatggtcaacccgcctcattcctacctgctacccgttggtttgtcgataggtgcagtttttaattacgtttgttattttacactacaattggcactcaccctctcatatgccaccactttataaaaaggcaacgaacccctccaaagcaacgctgaactcctgtatcgaagtttttgatgacctgagcccgttgacttggtggattggagaaggcagcagcacatcactatctggttcttgtgttcttgctgcaatcagtcgagattcaggctgctttggatatacttgcaatccttgacaggtgattgatttgctttctttatacctgagcttcactttcat

SEQ ID NO: 13319 - DNA, 525 bp, Zea Mays
gtcatgtccttgcggtccatacacgcaggtaagccaccaagcctcatcatcaacagggttgaattttactgaaacactgaaggagtccactcgagaggcaacgattctccccaattttgctctccaagtgatcagcaccccaccactggccccaaccgaggggaggcaaacgaaattattgtcaaaatcagcgcctaacattgacaaaactgtgcgacaatcacaattaaccaactttgtttcttgtaaacagacaacatctactcttaatgagtcaaccaaactccttacaacatcttgtcttgcggcggagttgagaccgcggacattccaaaacaagattagggaaggatccataggaaaacaattgtaataataggcgaccgcgggctgcaatcagcagaccagagttgctgtcccagggggaacaacctcaccttcgtcattcggcatcacccatccaaagagagcagcgagagcctccacctgggcacgagacaagggtgcttggaagagcttcgcata

SEQ ID NO: 13320 - DNA, 524 bp, Zea Mays
atctctgctctcctcaatgaagtctagcagttgcaccactaacttgaccttatcaatcaattttgttaagttggggagagacttacaccagccatggatatgcttgcatgcccttttaaactttgccatgagccttttagcagggtctggttgaaagataggctgattccaagagtcttgaaagatagagtggaaatcatcaagctgaagccaatagttttcaaatctaaagatgggtggcttggacacattgatttggacattgaccatccaagggatatgatccgaggttcctctaggaagcgagagtgcagaggtagctggaaaggtgaccgaccaagcttgtgagacaaagcaccaatcaagtttttcgagaagcgggtgacgttgcatatttgaccaagtgtatacttgtcctttgagtggaatttcctgtagccccagttgactgattgctagattaaaactcatcattttgaggtgatccccacccggtttgttgcggttatcaggggatctgatca

SEQ ID NO: 13321 - DNA, 651 bp, Zea Mays
cttgttgccatcgccgccccaagcattcatcacctcttcatcctccacgttgtggcattgtcggcttggtcacatcggtgatgaggccctctccaaactatctagcactaattccatttcatgtattaaagccactgagtcattatgtcatacatgtcaactcggtcgccattgtcgtttaccttttagtcactctagctctcgtgccaaagccaattttgatttaatccattgtgatttatggacttctccggttgtcagcatttcagggtacaaatattacctcattcttcttgatgattgttcacattattcttggactttccctctacgccttaaatccgacaccttctccactatttctcacttttttgcctatgtccgcactcaatttggcactgtgattaaaagtattcaatgtgacaacggccgtgagtttgataactctgccgctcgtcatttctttctcaaccatggtgttgtgcttcgcatgtcatgtccacacacctcccaacaaaatggcaaggccgaacgtattattcggtccaccaacaacatcatgcgctcccttatgtttcaagctagcctcccaccgtcctattgggctgaagcccttcataccgccacatatcttttcaaccttcatcctac

SEQ ID NO: 13322 - DNA, 1353 bp, Zea Mays
gtgctgtcgccgtccacgtattgcgggatggtggtgttgctgtgcgcccacggggaggtggattgcgcgctcagggtgttcgacataatgaccaatagggggtgtcaggtagacgatcgcatttgcagctcgatcgtttctgggttctccagaaccggaaaggccggagcagggctgcatttctacgacaaggtgaagcgtcagttcagtggatttgatccaggccttgtgacattgacatcagtcgtccatgctcttgggttggaggggagaactggtgagatggcagagcttatgcgggagatggagtgtaaaggcatgaatgctgatgctgtgttttacggcagcatggttcatggatacatgagtcgtgggttcttgatggaaggtcttcgggagcatcgatccatgctagggaaggggatcacagctgatgtaattaactatactactgttattgatggactctgcagagaaggtagtgtggagaaagtaacaggtttcttggatgagatggtgcgagtggatgctaagccgaatttgattacttatacatcactggttggtggcttttgtaagagagacaggtgggaagatgctttctctatcgtgaggaaactggaacaaacaggcatggtggtggacgagtatgtatattcgattttgattgacagtttgtgcaaaatggacgatttagacagggctttctctttactcacagagatggagaataagggaataaaagctagcatcataacatacaacgcgataataaacggtttgtgtaaagctggtcactgtgaaaaggctgttgaaatttctgaaggtgttgctgctgataatttcacatatagcacactgttacatggttacattaacagaggtgacataactggtgttatggcaatgaaggataggctcgaaggtagtggtatttctatggatgttgtcacatgcaatgttcttatcaaagcattgtttatgattaacaaagtgaatgatgcctggagcttgtttcataaaatgcctgagattggcttaaggcctaatactatcacctaccatacaatcatagacaaattgtgtaaagctgagcaagttgacaaggcactggaattgtttgatgaatacaaaaaagatgcaggattctccagtgcagttgttcatgagtgcctgattagagcactgtgtaatggaggaaaagttaacatggccgaccaaatattttatgatcttgttcagaaaaaaataaggcctaatttctttaactgcaggaagttgattcatgcacacttcaaaggacacggtgaacatagtgtgctggatttcatttgtaaggttggtgaactagat

SEQ ID NO: 13323 - DNA, 432 bp, Zea Mays
ctagaatgagccttgtaagcctgagcgtaatagcaggtagcaggtgagatataaggctggtgtgagaattctggagggataggaagaatttggctatcagatatcaaatcagatcgtcttcctcgttgttatctccttcttcaacccttcttctacctgaacatatctcttctctccgatattcctttctaggtgctaacatggagaagtcgatgaagcggatgatgaagacccccctatcagcacaaggtcctggagcagaccagatttgtgattgatcttggttctgttgatgtttgtcgtcttcatgggtaagctgaaaggttccttctctgttttgttgtgttcagtttggtgtctaaagaggcatgtagttgtttgttatttacaagccgagtcacttttgtgtagagttctagagatatatggtca

SEQ ID NO: 13324 - DNA, 529 bp, Zea Mays
aaggattccctctatagacttagtgaaccgacttgagatgattcttagaggcaaggtatcaaatgttggtgccccagtggcatactcagcctagaacctacctcctcccaaggccttcactctttttgtgtcgaatccacctgtcgctgatggcagtttgggccttagagtgcgactctctgctgaagaagttagcgtcttcgttgcttcgattggagaaattcccgatgatgaacgacaagtccactttgaggtgcctttggatcctaatgatgcagaaataagtgctatgcttgatatgctggccgaagattcttctgatgctactcctgctgggacattggcggtggcgcctctcccagaagatggtacaaccttggatgttcagagacctatcaatgttcgcccgagacgtccttgccgagtcaatcaacttgatccttctgctgatgagcagaaaaagaaaaagagacgtcttcagcaagtatctagtttggatcagggcactggtccttcggttcctgctgct

SEQ ID NO: 13325 - DNA, 293 bp, Zea Mays
gtctctatctccggccgccgcacatcaccgttaaattcactagccgccgctgaagcatgctataaattgagagcatcgtcgagtccgtaggataatcacacaccaagccaccaagtattacctccaatcgtgtacaagagaactccaatttcgcatttcccccaatctgctcaagaacaccgcacggtttaccctcgccgtggccagcttgctccaggttagttcaagcgctttgatcgtttattctagtgtccttaggtcctcctcaagcttcacgactcctttgattaaac

SEQ ID NO: 13326 - DNA, 598 bp, Zea Mays
ctagacgtcttccacaattgtagtgcattagaaaccatagacccactcttcacttcatcattaccttcaaaatgactttactaccgggcgaggggtgacacacattgacaccaattccttgttgttctagttgtgtttgtgcctttgcgagttttcttgagtgataacgatagaagggcggcaaagtggtaagctgctgcaactattcccattgctcgcatcgttcgttgcaagcttaccttgcccgtgatgtcaaattcaagttcagcattcactatcctccaacgctagcttgttgtgttcaaaaaacagaaggcacaaccgcacaataggcgacatgagtggtccacaatatctacagtgaggtaaggtacctgataatcagacaggtagatgcactagcactacgacgatgagggtggtgctcctagcgacgagctctatgagtacgcccctaccaaccatcgtcgtggtggcgctatagcgatcgtcggtggcaaggggtcgtggttcctctatgtcacaaatgggatgcgtttgagggctcagtcgttgtcgctgcagtcgccccagggaacagctctaggtggggcaaatc

SEQ ID NO: 13327 - DNA, 658 bp, Zea Mays
attttatacttgaaatttaaaaatgcgattttaaatacagaaaataaaaggaataagtccatcctccgtatctttctggatccgctgctcgcgtggtgtttttagtttgtgtgtgtgtaagggtggtcaccagcacgtctcgtaactggcggcgtgcttctttgatccgtttgcttatgtcgcctgacgtcaatacatcagctaaggtgccctttcccggttgtggatcggggttcaggaatcaggatatattcattctttctccaaaaactatagaattcattcagtgtcggacggaccttgacaaaatggaagaagcagggcgcagaggcatcagcttatttccacacgaccgcgtattttctatttaaccagcgcagcgcagcgcaggcatggaagcacagcggccgttcatgcagatgaaagatgagagagacctgaatgaaagaacaacaggaggacaaggaaggaggacgccgtcagccctctgtttaggaagctcaaccgggccatggagtcctcttcagcccgcaccatctacgtgagcactgagccgtcagataagaacatcagaggtggcactggatctggatggtccgcgagctagcagagataatagataacgcacgtcatttcaggtgttttacccgtatgctct

SEQ ID NO: 13328 - DNA, 455 bp, Zea Mays
cttacaactatttcttcaattcgactaattcctctggtggcatccggtatggcctttttgatatgggtgctgttcctagctgcaattctatgccaaattctatatcttggtcgggaggcatttcagtaattcatcaggaaatacgtcgagatactcactagccacgagaatcctttccaagggtgattcaatcatggaaatggcacaagaacgtgtgtcaccttggctgggaaggtataagacaagctctccgcaggtgggggagtgtatttcaagggctcgggctgcgacatctagcaaaacctggtgctgtgtcatccaagtagttcccaagatgatgtacacattttctagcccaagaataaatagatcagttttgaatattttggttcccatctttataggtgcgtgttgaacaatttggttagatgcaattttgccccctggcgttgcga

SEQ ID NO: 13329 - DNA, 392 bp, Zea Mays
ccaagctatagcaacaggtgacctgtgatcagtggcgtccattagcgtctcttgtccccgattagctagctagctatacgcctatacctagcccacacacacgcctctagcctctctctagctcggcttgtgatctcgcgggcccggctgtgctcgcgggcaggacagcaagagcccttgacggcgatggaagccttgtgtgttgggttgcaatcatgcttgcactacactgtaatctcggctggcggcgacgtcgttcgatcgagatctgcccgattggctttagctgccacgcgcacgatgacactacacaaccaaccaccattatgctcttttcccgcctggggatcgtccgtcgctgaggaagtcaggatcaagtcgtggcatcagct

SEQ ID NO: 13330 - DNA, 542 bp, Zea Mays
gatccaagcacggggttcgttggggaccatcctcatactcccgagcaccatctcatatagttatcgactccgttcgactggaaccaatggctcgctgcctctctcctcgaacatgagctgattatgcccttaatgcttcacacgtcagggtcctggtcgctagtgtgcccatcactagctacccctcactctgtttttcactggagcagtcatgagcgtttcgtgaactgaccttcaaactctaggattcacgacagactagtcgtgaattttttggtccctgccaaaggaattgaatgagttcgagatcttaccggaaaggaaaatctcggcactcgctcggtctcttgggcaggggcgttccgaagggtggcctagtcatatttcatttcctttgccttttttgaggcactatgttagtcaagtagtcaaaaggggagagacattagtgcaaccatgctttttagaaggacataaaggatgcaaaaattttgagaggccagtcatctggtgccttccctctataggatctaggacaccgg

SEQ ID NO: 13331 - DNA, 698 bp, Zea Mays
ccaagggtgcaaggcgcgcgtgcgcgaagcggtacccacggttcgggtcgtgcgatcaggatcagatggaggggatcagaccggggaggggtgaacggctgcgggcggcgctgctcctctccgcagcagtgaggtcgccggagtttatgcaggcgtgagctaggagggttcggggtcgccaggattgggcagagaggaagagggtgccatgacgaactcaatggcggggaagggaccatgaatccacgggcagagaggggagaacggcggtgagaaagcctcgggcgggccggaggaactccggtgagccattccggccacggggaggggacttaaggcgcgctaaggcctgagctagctttagcagaggcaggggcaccttagggacctactccggtgaactagaccaggctaaatcggccggccatcgcgcgagcacgacgaaccgcagcggtcgagcaccggcgaaggcgaaattggccaaacacagggcacaataggggaaattgggcatggggacgagtgtctcacctcggggcggagctcggtgaggcttggggcagtctccggtgagctggatggccaggaatgcgagcgcgggtctccggcggcggctggcggcatgagcagagcgcgagagagggtgaagctgagcgaaatgaggcgaggggtgtgcgcggggcactggcggggctcta

SEQ ID NO: 13332 - DNA, 659 bp, Zea Mays
gtgggggcgaatatcccctgggtccactcgggggtgaaaacttcgtccggggccacatgacagtcgcccctctgtgacgacatcccgtcgtgggccgggcaaagggaaacgatggaagcgagccgacccaggagcgtgttgggcccacgcccggactagtcgcgggttgggcatgatcgtgttgaggtcgttcgtttttctcgcgcccgacatcctcaaacaccggagatagctcggagcggaggcgccgggttttccttgggacagtgaaggttgtttgctattaactaggagacaagcaggaaaagtatgatcaacatgtacgcgggaagcaccctacggacgtgtatataaggccaagggggatgccctccattttcatatcattagcatctcacagctcggtagacaccacctgtaataccactcacatacaaagccaacccaggaagtagggtattacgctcctcaaagcgacccgaacttactgaaatctgcttgtctctctctcgtgcccaagcgcgaaccatcgagttacgatctacaacaccgtcctacccaaaagcaccacgagggtacccaggtgtgcggtcggacacaaacatcgacacctaccatgtgtttaattttgttaaaccatttggaatcaatcaaattac

SEQ ID NO: 13333 - DNA, 489 bp, Zea Mays
attggatagcaccaacatccctgcacgggccccccattcgtgcctcataggggagatgaagaatcaaatgctgcattggattgaagaagccgggtggaaatatcttctcaagcatacatagtaacacaagtgtcaatctttccatgtctacaaccacggtccgatataactcttttgcacaaagctgatggaagaaatagctcaactctgaaagcgctagccagacatgctcagggacataacctcgaaccatcacaagaagaatccattcaatccatatgtggaagtcatgactcttcatctctaagactcgcatagtagataagttcaccccctactcaggttagctgcatacccatcagggaacatcaacatcttgatccactgaagtacttcctctgggccctgcttaggatgaaatcggccttaggccttctccatgtctttccaccacttggcggcttcatctcttggtttggtctatcacat

SEQ ID NO: 13334 - DNA, 323 bp, Zea Mays
gttggtggacaaggatctacagattgaatgatgagcaactgcatccaagagttggagcagcaggtggaaatccgggacaacgccattgaggtcctggaaaattagctccatgatgtgtaagaggagctagatgaggccaacgctcatatagaaatgcaccaccaagacatgaacacaatggaggcagacgggaacaacgaggaggaggatcccgaggagattgagctagcttccagtctggacacggtctactccggagtgccccctacacctgtggccagtgctgcctctgctactcacggttagatgggttagaattaaac

SEQ ID NO: 13335 - DNA, 426 bp, Zea Mays
cttatttgtagtgtacatagagtagcaacctgcaacccaaaataaagcatatgtaagatttttttgttcgagcctacttacatatttcacaatgcatctagcacttcctccaatcccagcatcactcttcatgtcgccaacacaccgccaccttgccaccctagtcaccaatactaccacctcgccccctccctcgccccggttgtgccacctcttccccagccccagttgagctgccctacctccttgccaccaaaatcgtgtcatcacaacgcaactccccctcctatcagccatcccatgtgccctcttattgttgtttgcttgccaactgccacacggtgcacacccatagagctgatcgttgccgctcgtcgcactgtgctcgcccctacaccatgccatgctccagcgctcgccctcaac

SEQ ID NO: 13336 - DNA, 405 bp, Zea Mays
aacaagtgaactgtgactcatgaaaatgtttgaagtatactagttggttctcttaaagaataacgacaatttggcaagtaatgaatatcagcaatgcattgaccatgtttggcagccctccttggagtagctccacgagaatcactcggtcactcctcagccaaatagcaaaatgacacactgattctggtatagagaggacaataatcacttcttgtttaggggctcaaaaaatctgctactcactgttctctgttcaatccccaccggaatcaattcgcactgcattccccatcagaatggattagaaccactccattatagaactaaggatctggagttaaaaacaagggagtggagctctaccaaacaagttatttttgtaatcctgaacaatataatcat

SEQ ID NO: 13337 - DNA, 514 bp, Zea Mays
aataaagattatataactggggctgcgccgctgcgctgaagaagggtgatacaatcgattgggacttggactcttgccgcctatgtttgccacctgggccgatcagatttctgtcgtgggagtgaaagacggatagacgatatacatcgagggaggaaagaagtacagtgggatctagtttgccatctactatgaaaatagtaatgacacagtatggcacaaagtcccaaattcccaatcatcacaattctaacatacccaaaggatttattagtcatgtttggaacacgtacggtgtttattctgagtcacacgagacaactatttaccgcggaacttctacggagttactatgtcacgaatcgccaaacactcttgatgcggtaaactaacgatgttccgtagagacgtgtcgtgtctctccctagcctacggtgtctacgtcgattgactttgagacgaagatcacatcacaataattgcttgacacaagacacacctccacttgtacaag

SEQ ID NO: 13338 - DNA, 484 bp, Zea Mays
gaaggaggagcacttggaccagagagaggaggtcgtcacggagctccaggccaagctgagtgccttcaacaaaatcctggaggagcagcgggtccagcagaccacggctgtggagagcctgcataggctgcagcgggagctagaggacaaggccagcagcattgccctggccgaggagaacctcaaggagaaggatgcctccctggataagcgggcgacagatctcgcctagcgggagaaggacctcgccttcagggaggaaatgtttgaaaggcgggagaagatgttggccgatcatgagctcgaggcgaaggagaaggagcagacactggaggagcgggtccaccagttctaggcggcgcaggcggcacaggcagcaccgggcccccaggcggtggaggcgatgaagaagacacttgaagatctttaggcggagcagcgtgccggggtccagcgcatcgccgcatgggttggtgaggcgagc

SEQ ID NO: 13339 - DNA, 505 bp, Zea Mays
ggggaagatagtagaagtagaagaaaatagcagaagtagcatagaagtaatatagatagtagaagtagcatagaagagtaacaaaattgcagttttaacatagtaaagtaatgacataggaaagttcatcattgctagtcgacaatggtatcaggatgtaagtgatgtcatcattgcaactgagcacatcacataaaggaacttagcacaaagaaagtgagttcaaaattgcaaatagttcatcattgctaatagacaatgttctcagccagcaacttagcacaaagaaagtgagttcaaaattgtagatagttcatcattgctaataaacaatgttctcagccaacttagcacaatacataatgagcactatcccctatgtgaggccctattctgccacatttgttgagcctaattgtccctggtagcaggccaggcaacattgtccatgacaaggtcatggggagattcctcatgaacttgatttgcagcccatgtttcttcc

SEQ ID NO: 13340 - DNA, 551 bp, Zea Mays
tgctcgcttttgaaaggaagaaaggagttattctcctccatcaccctccgtccttgacaactacatcccattatccccaattaactcttatatatctcatgatacttatggtacatgcggcattgattggtgctcgggggtctctctaacttaggtatcgtttggttcacgaaatgtattaaatagttgcattggcttctacatctataagcttgtgaaaaatccaagattgcctctcttgtttccttgattcttgagctacaagaagaaaagtgaggaagataaggaagggggcaacgaagacgtcgacaaaggacactaacaaataatctaggtaaacgttcagcattttcagttgagaatgggatgcgtttggaactctcgtgttgcacgttcagggtgacgagttgttcataccggtcatctgaactcacatgcatcatcaaatcttgttatcgatcaacctaacacccttgcattggtacccaagaacacgatgagcatattgaacacaacgaggtaccggtaccacgtccatgtttgtttttaag

SEQ ID NO: 13341 - DNA, 871 bp, Zea Mays
attagtaggggtacccggatatgcccctatatgtgcttaacatctaactaccaaaaaatcataagacacattccccgaggtcaagaaaggatgaatcatgttttgcccaagaccctgctccacggtcgctcaaaactccgcctcgcccgagcctgtcctcgggcgaaggcagcactcgggaaaatcctcgtctcgcccaaggtcccctcttcatggaatggcggtttccgcctcgtccgagctcgactcggataggaggacaacccctagcccagcctcagtcaaaggtcacgtgaaccatggagacatgtgcatttaatgcgacgattcgaatacctaccccacatgatgccgcagtcaaactaggaagaatgggaccgcggcccatacactttcaccaactatgatgacgcacgcccgagaataatggccactgctcccccatgccgtctagtgtgctcgaacaactttggatgagacgtgcacgcgtctgagcatggtctcaccctccggagggaactctgtctcacccaaagtcggccccagcctcaggaaaaaactctgcctcgcctgagctcggcttcggtcaactgcctcagcaacaactccccacaaatcccacaggaggccactccgacagctgtactaacccctccctatacgactgcatgcctcgaggtaggctcgaccaatgcctcgagaggaacctccatcttgcccgagcctggtctcagcctagataacatcgaccaaaggacgtcaccaactcctccatgaaggctgttgacaacgggatggctacaggactgatgtcaagtctgcttgacaccataaggggagaattaccgcacgcttttcaccatacttgtca

SEQ ID NO: 13342 - DNA, 476 bp, Zea Mays
ggtgcagctatacgaggagcatcaggtgccacgttgcagggtttggttgactctggaggctcaccctctgcagccgggttggcattcccttgactctgagactattgggttcaaggcggacgacaccaccgaggccgcagctatgaagaccctgacgaccttctgcggataccatcccttggagatggtaatgcacccactaggactcttcctcgctgagaagggggatgaccccatgtggtgcaacagagtgagccatgcaaaagacgtgtgggccttgcatcccgaccaagttgggaggatcgccgttcagtgtatgtgcgcactgtattgcctacaggccctgcagagcgacgccatcacacacctcactaaccctgctcagaccactaagctcaccctcgatagtcgagaggacttcgtggtcgacttgtcttcagaattggtggagaaggacctacaggtggaacagttaa

SEQ ID NO: 13343 - DNA, 780 bp, Zea Mays
gtttatctgggagctaccttacacgaaggcattgttgttaccacataatatagatttgatgcaccaagaacgtaatgttgcggaaagcattataagcatgtgcttcgacttcaccagtgaaaccaaagataacatgaatgcaagaagagacttagctgaactttgtgatcgtccgcaccttgagcttagaaaaaatccaaatggatctgagagtcagccatgagctccttattgtctgaaacgtcaagagcgagaagagatatttcaatggttgaaaaagttgaggttcccagatcgctaagaggctaatataaaacgggcagttaacctggacactggtaaactcgttgggttgaagagtcatgactatcacattttgattgaaagactagtgtcggtaatgttccgtggatacttcagtcccgatgtgtggaagatatttgcagaactcatctattttataagcagatatgtgctaaggaaatctcaaagaaattgatgctgaggtttgagaaggaaatcgttgtccttgtatgtaagatggaaaaagtattcccacctagattttttaattgtatgcaacatttgcttgtgcatctaccttgggaagcgctgttaggaggacctgcacagttcaggtggatgtatagtcaagaaagagaattgaaaaaactcagaggaatggtgcggaataaggcaagggttgaggggtgtattgcagaggcattcacagccagagagatcacattattctcaagcaagtatttttcagacacaaac

SEQ ID NO: 13344 - DNA, 728 bp, Zea Mays
aaacaacgaagaaaagtttctaagcactgattgacacgctctgactgcccatcggactgaggatgatacgcagtgctcatctgaagctgcacatcagccaagcgaaacaactctttccacaagtggctgagaaacacacggtctctgtcagatacaatcgattggggtagtccatggtgcttgtacacttgatcatgaaagagcctggcgactgacaatgtcatatatggatgtttaagaggtaagaaatttgcatacttagtgaagagatcaactatcaccaggatgcatgtatacgattgtgaacgtggaagagcctcgataaaatccatactgatcacttgccataatgatgagggtacaggcagaggttgtaacaggccgagcagacgagctcggtcagctttggattattgacagatgaggcaatgagaaacgaactgatttactacttttttcatacctttccaagcaaacagttgtttcaagcgagcatatgtgacaggaaacccggaatgaccaccaactgctgacgcatgcaatgctgcaattagacgatcctgaagaggagctgactatcccacccatattcttcctttataacgaaggagaccatcttgttaggaataatgaggcacagccgacgcatcaactgctagtttgacaaggagatctttagcaaatgggtcatgtatatatgaatctgtaacttctgaaacccactgagg

SEQ ID NO: 13345 - DNA, 354 bp, Zea Mays
agcgtggtaaaagaggagccatcatgacgccgcttagcgtgggcggtttgatgggaacaaaatggcttgttcgccgttttgtcctcaagtggcgtgactaggtggttagccatcctaccagttaccatcgcctctcctgttgtgtgctcctctggcgctccacccgatgcggtttgtgccctgcaaaatgtccagtcctctgctttggcttctgaggtagtgatgtcctgaaggagtggatcctcccaagtagcccacaggggcctacctctcaggcgtcgcttggctttcccattcctgcataaaacagagtgggagggcacttgggttcagttacgcttaccacattctcat

SEQ ID NO: 13346 - DNA, 400 bp, Zea Mays
taaaaatcaatttccaaaattaattctctaattttactactctctggactgcgcgcatattaaacagagatgcagggggctcaggataaaattgcctagacacagatcggctggcgccaggactgcgggttgaatccgcagaaacggaggggctcttaaggaaaaaggctatggcgaaggggtatagagagatttgggccgttcgatcaaaaccgagggcccagattagatccggcttacgctgaatcggtatgcgatatataccgctagatctaacagttcacatcacccctgatcctgatcaaatccccactaacccagccagatcccacggtccacatgctttcttcttcaacccgccacaagtcacggcggcgcccaaagtttggtcacgatgcta

SEQ ID NO: 13347 - DNA, 826 bp, Zea Mays
aaaattagtttcacgattttaccatttttctacatttttccacatatttctaaagttcttctgaaaaagaaaaaggaaaatactcaacagtattgggctcaaactggcctaggcggcccaacctcgcgcagaagcgcgctcgcgcacgcgcccacgctggccgttttgcacagcggtcctcggggttctggataacaggaaacaagttcttttactgttttgatgtgtcactgacaaattacagaaagaccctccatcttctatttctttacacgacacgacctcgacggcgttcacgcacggctgagctccgacgagctcgtagaccggccgattggggcaacggctagggttcccgagcagcagatatgaaatcgaggctatcttgatcatttgccctaacttaattgcgcttatgatcaactacggagctctggccacggtggccgtgagtatcgcggctagagcattgtgttcccggcgatccacgaggttctaacttaattaaacgggtcagtgatcatccatagcaagtaagaacgttgaaacaagcacacagaggacaagtgtggacctgatttgggctggccacgaagagctggagttcacggtgttcttcagctgatttggggggaatcccaaattcgagttctctggtgggggtttcggggtgcaggtgggtgcagtggctgcttgagtacatggcgaagctgagggcgtggtcaatttatagagtccatgcgcggtgatcgcaaatttgggcgctgacgcgcggcggtcggaggtgaagaagaaccagacgcgcgtgagtgcgtgtccacggtcg

SEQ ID NO: 13348 - DNA, 349 bp, Zea Mays
gtgcctgcgagggcgctgtgtactttgtctggtgtgattgattgtgctgtgccagtatgattataattggtcttgctgtcatttctgcttttgttatactgggttggctgcgcccttaggcggctcctgcgatagacttcggatttttgcgcgtttgtgcttagtccggctgcaccttttaggcgacttctgcgcggatagtcttcgcgatagacttcggattttgcgcacttgttgtgctaagtccggctgcacccttgggcgacttctgcgcggatggtcttcgcgatagactacggatttttgcgcacttgttgtgctaagtccggctgcacccttaggcgacttc

SEQ ID NO: 13349 - DNA, 773 bp, Zea Mays
ttgggcggcgcggagacctagcgccattattactacctagcaccatgatgggtgtggctcgttgcgttgcggcccctatggacggtccgcgcactcaaggctaggattgataggtcatgagtgcttcacaagctgaggggctcgtaggttatgagtgtgtcgctgaccaaagggctacgcaggtcatgagtgcgttgcaggccagggctgcgcaggtcatgactgggaggcagaccggctctttactatgactcgatgttaggcgtagttaatgcggtcagctacttatggcgggtcagtctcgggctaagcggagaatccactcaagtggcttccttctggctcgtccggccccctctgcagctccgccaggcctgatcccgggcttggtgcctcgaggtttatccaggggcgggtgcttccaaggtagacgattcctctactccctcgttgacggggggcgctctgtagttcgaaggttcttatctcgtgcgctctctctgatcggtgggccacaagggttcaggatctttttcccgacacatcgataaatatttgcccactaaaacatctgtgatttttagtagtagtatattgggagagaatgtgtcaccaaattttgaggccaatcccgtgaaaaccatcattgggtggttttaaggctcaacatctaaatctccataggtagcatactccatacgcatgaacaccggacgctgagggtggcgattggacaccagacgctgaggatggagggcggagagcaagcagag

SEQ ID NO: 13350 - DNA, 590 bp, Zea Mays
gggagtagtggaacctggagtggtggaggtggtgggtacaatggaagtagtggatggctctggagcgacaggagctagtgaagtgggaggtggagtagagagtggcggaagttgtggagggagcagtggagcgaggacgagatgcgggcgacgaactcgataggctatctgatctgaggaaatctggagctggcctcctcgctcagcctgctctgctgctgctactgccgctgcaagtgctgcacgagcggctctgtccatacatcgcttctttctgtcctccagctgttcaaggtaaactgtcttccctttgacctgcctgaaggggcgaggagggtcatcgttgtctcctcccctaatgatgagacattctttgtccgcaccatcctgaccggactgctgcacgatagagtgaaaagataagcaggagtagagagcagccgataggatctcaaatgaagcgatagctacctggaaacctcacgagagagagaaaatccaggcaggacaggagacgggcacgagggcaggcgagatcactgaaatgacagaagaggtgagcacatattagtcacatagtcataagtata

SEQ ID NO: 13351 - DNA, 704 bp, Zea Mays
tacacatttaattaacgcattcaccacatgaacacagtttcacgccgcacactagtttctaacatgcttttcacataactcgtaattcaactactcactaacaataaatcacgcacgacaactaccacatcaaccgatttatttatttggaacaccgcctgcctagcgtaccactagttcccacattttgattcaagctcaacaatacatccttcattcgattatacaacagcgacctaagcgtcgcgttacccaaggcatacatccttcctcatcgcgagtataaccatatcactacatatacccgcacatctcaatcaaatatcttacgccaccaccactataatacaccatggcacacacgcacatacgtgccccaggttacgcacaaggcatcaacagcatagtgactctaaccggattaatcatactcctcattcgcctcgactatcccaatcatcgatcacatgcataaaacaagtacacttatctcttatttttgcgcaggcttaacacctttcgggataaagtgttactataaacaccttacacatatttgccttaggaacctatcagttcactcgaagacatctattcaagttataaacacaatcatacacttatttacgaagcacaacttaaggaacgcctaacgcgtatagactcgacttataattatagaggaagtgatgactacttacggc

SEQ ID NO: 13352 - DNA, 733 bp, Zea Mays
cgatgtgtccgctcgtgtgactcctctcctgtttggtttttacctcgagaaacgtgccccagctagcaagtccttcttgtccatatacttatctactgctttgctgctcttgcttatctcctctagttctcatgcagcctatcagcgggtagtgtcagtggtcagggtctatgatctgtgacagttcaagagcaggactcagctcaattagtatggttcgggcaaagaatgacactttgggaggtggaggtgatggtcaggaccctcctcgacaggacaagagcaaggcggtctacttggagaagtagggaggcaagaagaagcacaaacaggatagagctactcgagaaatgataggtgcaacaacaataactgagagggcagaccagagaggcaacattcaaattggctcggatgagattgcctaccatgtcagacgatagtcgtctcggttatgctatacctagccagacttgatcccttgctaaagccttctactccaactcccactatagccccatcgcttgcagcctcgactactctagagtcaaccactacctccactacacccatagcttccaccttgcctacctccaccactcctgctcccttcgctactccacctgttcctccacctcgctttcgggagcgtgacgagacaaaggttcatagagctactgccaccatagctcgtcgattcaaacacatgccagtggacacttggcttccaacg

SEQ ID NO: 13353 - DNA, 342 bp, Zea Mays
gtcggggaaggggacagaccgagcatcactcagcagcaagcaggtgcattattgctggcatggcctggctacatcgatcagatgccgccaaagcccaaactatgcctggatcgatcggggcctagcagcagtgtgtatacagtcgtccgcgatccccaacggatgcacgatgagtcgtctctggcatgcacgtcgatatatatacgaaaggaccaccacattggcacccaaatccaatcatgcacgcacccatatgatgaagctaagatttccatgcatcgagctatacaccgatacgtgtgtgcatgcgtgggtatttacgtacgtacgttcgtagacaac

SEQ ID NO: 13354 - DNA, 385 bp, Zea Mays
tgtcgattggtgggtcggtgttatgatgttatctcggggcacgactgtggataggggggttcatgcgaatatgtgtgcgtcagtacgtgtggagcagatgcggtggcaagggtcgaagctccggcttgggctcgggccttgcatttgtattgcatggctaaagcatgaggcggcgacggagccttcccatggcagtcgagtatggcggcgtggaaccacggctgaaaagggcacaatagtgttaagccccaagatgggtaggcggacggtctgctcatgcgtaaaatcagttagggttccggatttctagcgggattaactcgagaaccgacttataacaggtctagacctcctccctttatacatagatgaagggttacagtcg

SEQ ID NO: 13355 - DNA, 479 bp, Zea Mays
aactttgcgaattcgagtattctggtcccctatgggtatgggaggtggtcaaattggctatcataaggtttctgaattgacttccccccagggactatgctaactccaagcttatctcggaatgccctagctatttcctctcttactatattgatggcagccggtgggagaccaccggctctttggtccaatatgggtgaggttgtttggatgttggtatgtcgtctcccctccaattggcttgagttttgtggtgtactaatatttgccctatgtggttcataggactagtcatctcttcctggccttctatgggccgaaaagtactctcccccatgtgtttgtaatttttgtaagttatggtgctggtgcattgtacagtgcgatgggaagtgttgttgggacagatgaggatttaggtaacgatcctcctcaaacaaccatgtgtcggaccgtccagtcggatacgcagaccgtcc

SEQ ID NO: 13356 - DNA, 450 bp, Zea Mays
atcagctagacggacctagctagacgatgcccatcgtcacatgcatgctttggaagctatacctttgcttgtttctgcgtggggtagtagtgtacggcgtacatgccaggccatctcgatcgctgtcacgtgaaatatgaatgcgccaagatagagtttgtgcatatgggagagaatcgtgtatcaatgtcagtcaggtgctagctagcggctaagatagcatgcatatacattatatacattctagttacagattgtaaatgcggtgcatttatttgaggtcagtcagcttcttaagtactaattagtagccgacgatggcgatgaacccgcgcgcgcaatgggagagactgtgtgtgggagctgagacgagaggcgtacgtacgtagagaaagaaggtgggcaacgtgtccatgtccaaaaacttgtgtgcagctagctagctgctgc

SEQ ID NO: 13357 - DNA, 450 bp, Zea Mays
ggaaaggctggttggccaggccgctggctggccacacgctaacgggctgggccgctggctggataggatgggggtgtccaccatggaagaagaagaggagaaagtgggtttgattaccttagaacgagacttgacagaaatggagagcgcttccgtgcatagatggcaaggtgatgctccggtgaggtgaggacgacttcgtgcatggcgggaagagatcgacgcaggtgggggctacctaggcgagggcaactctgagcattgcgtgtgtgggcattagcggtctgggcgatgggcggtggaggtggtttctgcgcatggaagggggcaattggggggttgaactggccgagatgtgaggcgggcactgctcttcctggcggcatgggcacaggaagttggagaagatgctcctggccggtggggctagggcatggtggtggatggggg

SEQ ID NO: 13358 - DNA, 779 bp, Zea Mays
acaagccaataaaaagtgtacttctaaccatattaaaaaaattctaagggagcgaatggcataatcaaaccaccttttcatgaaggccagctcccaaactcttcaagcgaaagaaagcatcctctgacattaacttgcttacatcagctcccttattcgtttcatcaacagatatcttatctgatacttgcataccattcattgacgagcagttactgttacattcttccttctcagaactggaaccgtcaatgttgcattctttctttttaattttctttaattgttcaaaatgctttccaagacctttgacagctgattctttatcagcctttgttgcattccgcttaacattctcagatgccggagaatcctttttctgtaactgttgtagccaggaggacccaagttcccatctgataattctagaatttatgctaggcatgctatcaagctttaccaagctgtcctcaagtattttgcatgccagtttccttgcggggttataagcatgagactttgggctagggttctgcttaccaacaacagtttctggatgcgtaacactttggagtggtatccttagactggaaaaagaaaagaaggaaaaaggtggtgttaatagaatgacgttgcatattttggtaaaaaaaataatatgtattaaagcaacattttctctactagggaatagggatgagcaaccgagtcaagcctttccccgcaaatacggagaggctacttcgaaccatgacctggcgactgagtgagacaactct

SEQ ID NO: 13359 - DNA, 425 bp, Zea Mays
gccctgatgagtcaaacaaaaaatttgcggagattatcgatgttccaggagtgctccaggtctttgccgtttggcgttgcgagcctgtatgcgctgggggaggccttcgtcttgacaatgaaagggccctcccacttgggctccagcttgcccctggactctgtccgagctgttcggacgagtacgaggtccccttcgctgaattccctcgggatgactgcgtggtcgcgccatgcttttgtctgggcttggtatttatttagagcctgtagagcgaagactcggtctccatcgatgagatccttcgaagtgggttcgtccacgtcggggacagctgacaagactgttcgcggggacccatgctttatttcttgtggggtcatggcctccgatccatatagaaggcggaaaggggtgaacccagt

SEQ ID NO: 13360 - DNA, 598 bp, Zea Mays
attatctaaagtttgtccttagtcaaacaatataaagtatagccgagtttatagaaaatagtatcaatagttatgacaccaaatagatataccatgaaaatgtattccatgatgaatctaatgacacttatttggtataataaatattgacaattgtacttggtcaagccagaatggtttgacttggtattatgctagaattgcattcttttcaagacagagggagtccaattcatgagaatactagttagttacccttctatatatgatatacagtttatttgtacaacacagaccaatatgagctgcagtggttagaagcgagtgctctcttcccagagaccacggttcgaatcctgatagttgaactttttttgatatttcgctggcgtgcgggaaacgctggcgacacttggtacgcgcgtggggagggggaaagacgcacgacgaaactcgtgatttatattagtaaggataatcaacaaaactaacttcacatagagtgtagttatagaattataccatcaaaatgtctacaaacaagaaaagtggaaaagtgaaaataggaagctcatcgaatcccaaagttgattgtaat

SEQ ID NO: 13361 - DNA, 1040 bp, Zea Mays
aaggacatgagtctcgtcacgatgaacgggagcaactccagctcctcctgcagccacccaaggaagcggaggcccacctcctcgtcggacgggtcgaagggggcggtacacgcaccaagctgccggtacgcgtccacaagcaacgcgtgtgctcggatatgcacaacaaatgcgtcatacgaagtctttactataagtcatccgagcaaaggccgcctaagggtgcagcggacttgcaaatacgcgacatcaccctaacaacgcaaagtgtattacgatcaccttaaaggtgcgatgtctctgctatctgacacggtcgaacaaaaaccaactactgacgcaaccagtacgcgtcataagcatccacacatcgtcgtggcaagcaaagtccccatctcatttcacaacaagcaatgtcgtcatagtttacatacacacagcgaagggccaccggccacattgcacaaataatacaaatcacattttgttgccctccctctctattgcgagccgggggaaggcaacattttcgctcaccaccgcaacacataagcgagggcagcaaacatgctacatcagctaagcctttgggataaggtctgcctcacgaaaattaaacaacatcatcctcaactcctcaccctcaaaaagattccgcagatccccctccccaatacacgtcccggaagtcgaggtcaacaaatctcgttgtccacccctctctacccgaagacgggttcgttccatccccatccgtcgacgcctaccacttcgcgacatctcgccaacattatgcttcgacaccactcttcgctggaggtgctcttcgatcatcgccctagccgggggagcaaacgcttcgcgcacttcaggctgcggcaaggactccgccgcagccacatccaacgcagcaaaataatgcagtcctcatccaaagactcctcagtccatgaaaacggactcccaaactcacccccgtcagatgaccaagacacagtttcagaactagacaaattttcattaacaggcactgcattcgc

SEQ ID NO: 13362 - DNA, 689 bp, Zea Mays
cttgattgtgacctcattcagagctcgataatcaatacacattcttctggtgccatctttcttctccacgaatagaacaggggcggcccaaggcgaggtgcttggccggatgtaacctttctctgacagcttgtcgatctgcttctcaagctcaaccaactctggtccagatattctgtaagctctcttaaagatggggtcagtgccaggaataagctctatagcaaactcaacttttcgctctggtggcatacctggtaagtcctttaggaacacatctgagaactcagacacaaccttgataatctcaagtggatctgcttcactgctattaacagccatctgataacaacttcctttctttggctcaggcgagactaactcggtcaccacttcctttcctaatggggacaccaacttgattgtcctcttatcacaactgataactgcctaatacttgtctagccagttcatccctaggatgacatctattccctgagtacccattactatgaggttagcgggaaacgttatcccctttatttccacacttacattcaagcaaatgctatcagctcaaattctaccaccggctgagtcaatttgaatgggggttgacatggtagtaattggaagattatgtgcttctacccatgatgcagtaatgaatgaatgtgttgctccagtat

SEQ ID NO: 13363 - DNA, 663 bp, Zea Mays
gttggtttcattctgaaattcagatattcagtgtaacagagtcagctttgagtgtgaatttaaccatgatctagtgatcaaatgagcttagtcactatagtcgatttgtagctggtatgtagcactacaactttgatgtagagactcgaggatgttgccatagaaatttgggaggaaaactgtcctagaacttggctgtcaggtgcactgaatgggctatcccatggtacagtgcctgaaccggatcagatcgccagcgcagggaatcttcaccgccgacgacccttccgccgtgattcgtgtcgccggcgtcaagattcacgctcggggtaagtcgataacgtcgcggggtcaaaatatcctcgccgtcggtgagctggacgccattccggctcatcgccgtgcctcccccttgctcactgaacccgtggataaggttctcaccgccgttagccatcaccggcgtccgccgcgtgtccgagtctttccaccgcgtcgccgtgactccctattgctgtcccatcgtcgctggggaggttgccacggcggtggacacgaattcaccgcacccgcgttcttccttatctccggccgcccacattgtccgctcaaattaagcgccaccgcccctaggatctataaattgaccccgcagagagcttc

SEQ ID NO: 13364 - DNA, 452 bp, Zea Mays
cttcatacctttatgtgctaccatatatctctcatgttataggagaggtgggaagatgggggagtgtcatggtttcggaaaccagagggacaataaaatttttgttcgggatgggaggctagcgcagactcacactgaatggtgaatcgcatgtgactcgaataaatggttaagatagagtgattatactggtccaggctttcgcctagtccagtgtagtactgatccttgtcttgctctcgagatcgtgttacaacaggtgtgtgctcaaaatgagagagggtcctgcccttttatagttcaagggaatgaccttacagatgggacttgtttcatattggcaagggcgtgatcttttgtcttcggtagtcctgctgagtagttttcctggcgtcgcctttaggctcatgcgtagtcgtacacctggcatggcgaaccaccttatccgcctg

SEQ ID NO: 13365 - DNA, 525 bp, Zea Mays
agagaagacttcgacgttcatctggcttggagctgggggctgactctactgccccagtcctcggtggtggcccgacaagtgccaaccttgaggatgatattgagagttgtggtggcactagagttagtggacgtgtgtctaacaaggatgaagaggatgaagaggaagtttcccctttgatccgcaagaattgtcgtagcaaaaacagcgacgatgtcccaattcaggctctgtcagggctagttaatctccagaggttgacgatgtcttccattaatcatgcactggaggagattatcccggaagatcttttattagagcttcctgaaactgagagtgctgccatccgtgtagaggtcctggatgacaccccctcagctagtaatctagtcgacctttgagggtggcctaattcatggggacaccttggttcctgatgttacatgcaagggataccccgctcctatgggtacgattgagggtgttgcagccctcaagggtgctgctgaggatgacctagccccc

SEQ ID NO: 13366 - DNA, 924 bp, Zea Mays
ctggactccgttggagagaaagaaagacgtgaggcatggttgtcgaactcacggccattgtcacactgcggggtagggaccgggcgacagaactgggtggatacctaggcgaagaagtgtgtaagggtggtgaatgtgtcagacttcaaccgaagaggaaaagtccaaagaaaatgggaaaatcatccaaaatcaccaaatagtatttataaccagagagactgagtacaggggaggtccagtgatcacaatgaaccaagtcaaaagtctacacaacccgagaagaagaggtaatgaatgggagacgagtatgtcagcctaaatgacaagcacaatagaggccctcaaaatgtcccctactacatgaagaatctaaactgttggtaagcttggtcatgacgttaggtcctgggtggccaagacgacaatgccaagtagtgaaggtggtggtggagactaggatgggaggaggggacgtgtcggtggaggaaggccggagcgtgtagaggggcccagcgctgtcacatcaggcgagaagggtcttggtgtctagatccttcatagaaaaaccagaaggatcaacctcaatgaaacaagaattgtcggtggtgaaccgacagactgaaaggagattatggttgatatgagaggctacgagaacttagttgagatagaacggtctagggagaggcacctactgaggtgaccgacagattgaactgtttccaacgacgatcgaggtggggtgagaggaatgaggtaggtgggagaaagagagcatgcctgcagtgggggtggtgtggtaggaggcaccggagtcgatgacctagtcaggtgagggtggagacaacaccatggtgctataggcggcggcaagggaggctgggtccaagattctagcgagtggggactaaggagtcgtgg

SEQ ID NO: 13367 - DNA, 764 bp, Zea Mays
tgcaggaatgtcccttcaagtgctgttttacctgttattcgacctgcccttggccgtcagcaatcaatttctgatcgtgcaaaggctgccatgcaagaatacttgaaccatttcttgggaaacttggatattgtcaactcaagagaggtagcaaaaacacttttccgtaaaacaagtcatgttagttttgatgactgtgtaaatatatacaaagtgtattgttcatgtgtccgttagagtggatcatcatgtttctcattttcttttatacagtaacatctgttaaaatgcaggtctgcaagtttttggaagtttcactgttatcatttctgccagaatatgggcctaagctaaaggaagattatgttacagcaaggcacttgccgaaaattgagatggacagtaaagagagatactgttcatcctgttgttttagtttttgcagtagtagctggcaaaaggtactgaaaatatttgatgattttattttgttttactaaaatgatggtgacttttacatgagctgttaaatcaaacgcttcttgataggtttgggctgtactgaagccaggattcttggctttacttcaagatccatttgatcctaagctcttggacataattattttcgatgtgtcaccttgcactgatagagatggagatgaccaaaccactctagcaaaggagataaaggaacgtaatccattgcattttggatttgaggtatttcgtttccatttatgacttgcttggtctagcatctt

SEQ ID NO: 13368 - DNA, 571 bp, Zea Mays
gttcattgcccgttctaatgcaagccacccagtgcgaacattctggaaaagatggctcgaggcctgaatggaagagttgttttatgttaaaaatgatttaaagacaagggaagatatcaaagaaatcattcagcttcccatttggtctcgcttcggcctccgaaggccgaaggtggaaattgacggcaatgttgaagcatgtcagaaggcctttagcactgtgtgtgctttcattggcacgagggatttaattcaagagcatatagccttcagggtatggccacttgtggagagctaggatatgccgaaggagaccaccgccgattccagtgagggtggtctggtccgattgaagtataccttcagatttagggagaagtttgatgagccagacgattactgactgaagtgtattgaagctaccaatgatgagctactcgcggcatactccaaggtcgaatataaggctttgtccgcaactttcgggggtcggggcaagaaaagattgaacagggtatttgatgcgattggcttcgtataccctgattaccactacccgctacgagggcaa

SEQ ID NO: 13369 - DNA, 427 bp, Zea Mays
tactattcgttggtagaccctccttgagtgatgtgtttacaaaggctaaacaaaagctaggttaccatgaagatgatgacattgcggttgatggagtgattaacattggtcatccaccaattgtcataagacgagtcatcccaattgattctcaactggattgggatagttatgttacttcagctatgaagacccagttgcaactcatggaggttgtgttgcgaccggttgtagtagaccgaccccctgaagactatgatcgtgttgtggatgacgtgccaactatgcctgatgctcaatctggacccaatttgatcccattaagtcagccaggagatggcctgcagacagattctcctgcgtgtatctctttggcacaaaccaactgcagtaaatttcattggcattacatcttcattttggacca

SEQ ID NO: 13370 - DNA, 448 bp, Zea Mays
tataaattaaaaaaataaacaaagcactctgccattttcccctttcactccaaagataccttttctaatcctacatgaccatgtccctatccatccatcaaagcaagtatgtggctgttgttctgttctccatggagcacatgagaatgggatttagaagatattccgagaagcactcaccacaagttgccttgattgccggtgggggtggaggttgaatctcctagacaacagcagggaccaagtcctaggcactgcacaacagcggggaacaggttactcgacaacgacggggaggcggaggttgaagcctggcactggacgacggtggggaagaggctccaactaggcactagacgatagtgaaggaagagattgccagagcgtgggggcggcgaggttgaagtggagatcggcggcagggagttgtaccttgattaccgacggc

SEQ ID NO: 13371 - DNA, 331 bp, Zea Mays
cgcaccttatgagttgagcagatcttcggcaaatggaatgacagggaagatgcgttgagagtgggggtgggttgagaaaaactggtccatccttttaataggagtcacaacgatacccatggggaagatgttgggtggaaggttgggccgaattaggaatgcgcgcatggatgggggtgcggataggggcatggtgcatgcgcaagttacctactatggaagggggccgcctactatggaagctccacctgtggcacactaacgatgtgtaaggattgaaggtcgcctccatctatggaaggagacgctgaggttggaaggaggcgtgctt

SEQ ID NO: 13372 - DNA, 602 bp, Zea Mays
cggccatgtgcctcatccacaccacaactcttacccacggcggcgcagaacagggccccacgatagcgtattctcccctacggcggcgccatggtcgccgagcacccaaactctccccacagctccatcatcgacacgattgggaagaaaacaacgagaaggctactacggtttggatagtaggggacttaccagagttggtgaggtgatggcctgtagccacggcgatgggaggcgttgtggctgtgaaggccgacaagggattatcggccggtcaagctttaggagtcttcaatttagcgcgatgaagaacttgggcacaattttgagcgcagtatagaggcatggaaggggatcactaacggtggccgcaacctttctcttcgccccgctgatggctcactctgatccccaattgctcacgacggcggtggctattaacttctatgatagccctcggcggtatagtactagatggccaaggcagcgccgagctcgggttttatattggagcagagctaggatcgtaggggggagaatggttgaatagcccgaactttatgcgcgttttgttgaggggatagggatggtcctgatggggc

SEQ ID NO: 13373 - DNA, 460 bp, Zea Mays
tgcgactcgtccagaattgcacgaatcgagcgagacggcaggatttcctctggccaggtcgctgaacttctgcaagtggactcagaggagaactcctgattcaaattgaaaataccaggagcaaaccttgacacaaaactgttgatagcagaatcttcgctctgactcgaactgcacttgacagccttactcatgcaccacaagttatctccttgtggtgacaagatttgggaggccagagagaccgggtttctgggtttcgggccattccatggtattgcgatggctgcattgttggagtagaagcgctctgaggaccatatggttttcgcatgtttcagtgaagcctcgtcttggttttcatggttccatacataaatattggagtcttcgcttgcacaaactatatgctgcccatcaggagtgaatgttgccaaggactggcaagacccagtacgga

SEQ ID NO: 13374 - DNA, 305 bp, Zea Mays
ctatatctcatttaagctttcacatttgtttgctttcctaagttgccactactacatactaagatatcaccaccaccatcattattgctagttattacataattgatgatgaaattgtttcaccgatggttaaaggggtgacagggcctagcgagcaattcgaccacatgtagaaaatttgtatcaccacgaggtgactattcattccggcgatgatcttgggttttttctctgttatactatatgtcatgtcgtctgagagactcgttgtgaccactactcctaaacgactattggtggtccat

SEQ ID NO: 13375 - DNA, 805 bp, Zea Mays
gcctgcgcatctcctgtcctgcctggttcttctctctcgagacgttactaggtagctactttactctaaatcagtccttacctactgctctactgctctcgcttaccttttctccttatcttgcagcgtttcagtagccagttcaggatggtgcgaatgaagaatgtcacaccatcagggggaggagatgaccaggaccctccttgccccttcagataggataagggcaagactttctacattgagtagcaagggggcaagaagaagagactgttggatagagccacccgtgcagcagttgccgcagtggcagatcaggcagagtagggaggacagctgaggattgcctccgatcagatagccttccaagtctgtcgcctctcgtctcgagctcgctcttccactgctcggtccactccatcagacccaatcaccactccacctcccactttactaggtcctgccgctctcgagccttccaccacatctactgcgaccaccaccgccaccacaccagcttccactgctccagctcctgcttccgctccacccatcccccacctcgctcctgggagcatgatgagagtgaggggcgaccttttgctacgaacccacgcctgctcgacctttggagggccataactgctagggtacgtcggttcaaacatgtgcctgtggactcgtggctacctgcttagagggatccgacagctgcgccactattcagcactaggacccaagggtccttcatggcacaactgtctgctcagattgctctgtgggctcaccggcgattggatatcac

SEQ ID NO: 13376 - DNA, 338 bp, Zea Mays
tttgcccaacacaggtgacactcgacaaagtctttaccgagtgtccgataaaaagtactcggcaaggaatccgttgcgaatgtacaattcatcgggacctctttatcgagagtcacactcggcaaagactttgtcgaaagttttctggactttgccgagtgtatgaagcacttggcaaaacaactgtttccggtagtgcattaagaaaataatcgtgcacatctctttagtttctgatgcacttgtttcactaacttttctgtcctgatgacgtagctcatcaaattagatgattttatgctagctagcgaagataaaaatccaacgggaagaacaac

SEQ ID NO: 13377 - DNA, 875 bp, Zea Mays
aaatagaaactgaaaacagaaacccaggttcacaggtggacatacacaacttcagaaagaagctttatgttcatgtgactgaaaacagaaaccgaaaacagaaacccaggtcgacaggtggacatacacaacttcagaaagaagctaactcttatgatgcatggaacaagttcactaccaggttcataaacttcagtcatacatacccaagttcacagtagttcactaccaagttcagttacataataaggttattgaaatactcagataaccttacacaagctaactcttacacagataacacatccagtgcccattccacaccacccatactactctacttcctctgacgaccccgaatctcttcataattgacatcatccagtgcccattccccaccacccatatcttgatcttcagcaaattggttattgaaatactcagataatggtggcgacggaccagcttcgagatcttctaaacgttgtgcttcctcctcaagtgactgagcaagctcatacacgcgccacattgcgaagttcactgacacctctttggccgtatctggcgaatccataatctcgtctccagccaaatctttcaactcctcccaactacatgcatctttgcaatggcttgggcgaggtcactacgaaccgtttcaaatcaggttatttgcgaaaccacaaacaatgttgttggaattgaacatagtactgcaaaagtttacaaaccacaaccctaaattaggtggaagggaaaccttaccgacactgaacgaggtgccgagcactgcttgaagacagaatgggtctgccgttgggaagtaaattgcatctagctgttgtaggattagggatgttgctggtgagttt

SEQ ID NO: 13378 - DNA, 479 bp, Zea Mays
cgactctctctcacacgcactgtctaagagagagcgatgtaaagcctgccccttgagatataaaagggaaggtccctcttcctttcacacccaagaacaccagttggtacacgttcagagcaataccacgatcagcactacaccggagttgggtgcaaacccgaactagtataaacctcgtgtcctagatttctcgtggaatcccagtgattcaccatttagagtgagttctttgttagccccctgccaaacacaaatcttactgccccctagttttcgaaactaagacaaaaagcaagctaacagatatcaaataccaaagacatgaagtatttagaatattaattcatttggtatctaatatacaagtggtattttatggaagtcatatttggagaagggggagattgaaaacaaataaagagggagaatgcatcctatttgttaagggtccaagcatggaagggaggtttaagtcc

SEQ ID NO: 13379 - DNA, 695 bp, Zea Mays
ctggcggggactggacatttaggcgaagcgggcgtatcaacatgtcggtgtggagagtcaacgagtccaccgcaaaattacgatggtgagacgacaataggcgtgggatagcaagggaaggcgacgatgtgacgatagatggcgacgacgaggcgaaaaggctatggcggcaagcgacagtcattgtcgtgttgcgacagctcgacgggacctttgtgagatagcgagggcaggtggcgctgtggtgccaagacagaatcccactaatagcctacccatccgccggtgcggattaggaggcaaagtagctgagctgcatacaggaccccgatgtggcaacgagcaccacaactcaggtggggagtggactgagtagtgaagcatcgagaaaaggttagatcaaagtctagttttcattaaatttagtccaatatagtatataaaagtttatttattttattgtatatctaagtctatttataagagtttacaaaaatcgaggtgggacagtggcctccattgcctatcccttgcgtctgccactgtgcatatgcaagtaaatgatctcataatgatttattttgcatctactcatgcaaccaccatttctcacgtacaagcaactaaatagacgcttaactaaagtcaatgcacataatgattcaggatggaatagtgcggataaccaatcagat

SEQ ID NO: 13380 - DNA, 354 bp, Zea Mays
gtggatccaatcatcatatagaccatttccagcccagccgaacaaggccttaggtgggttcgtcttcctagctggcgcgctccatgtagtgctccaacggatcagctgtgccgtcgccgggtatctcgaaccgatccgaccagcaacgcgcggactactcctaattggacaccgcatctcacgcctatatatgtgaccgcccacgctcaactccttcaatcggcaaaccctacaaatcgccattagcggtcagtgttgggagagacagagagagacgcccttcgtcgatgtcgggtccttgcgctgtctgatactccggtaagaccttccctagagttctcctttgtcctctca

SEQ ID NO: 13381 - DNA, 455 bp, Zea Mays
aacgaagcgccaaaacgcaagcgcattacatccatgcacaagtctacaccaagaaactatctgcgcacagaccaactacaggcacagccagaccaacataataaatgcgccagaccaagcgtgcaacgcccctataaacatagccggatacgcgaaggcacagagcctcatcatacaaactatagtacacacttacaacgagggcatcacaccttacatcggttcaaccttcggaatgattctcatctccctatagttaaataacattatcctaagctcctcaccctcaaaaagacttcgcaactccccctcacccacactcgccccagccggcgaggacaacaattcctgcttgccagccctgcccacacgaagccgaccgccatccacctcactcactctacgcttcgccaccgcccttcgccgcctacgcccagcactcggaccaggcacaa

SEQ ID NO: 13382 - DNA, 534 bp, Zea Mays
cggggagtaaaagatcttggcgccaggataagctcagacctggtcactagattggccaccgtacccacttgctctgcggccgaccgagatgatccttgccggcgttggccgcttgccgcccgtgcgccatgtagtcactggcgttaccacgtcgcagtaaaccgccttaggtagtttgtccatcacctgagacgttgcctcggtgaaagccacgatagtccgcgctggtgactcacccctctctccggtcgccagccttcttcgtcccaaattcggagccaccgctcctggaggctataaattgagtgcaccgttagctccgctaggttgttacgaagccagagcaccagccctcgcctccgattagccaccgtagcgccccaattcctttcttcccccaatttggttctccgcgtcgccgtgagccatcgcgccgtggaccgtcgtctctaggtccattctcgccctcctcacccttgttttagcactcaggcatgcttggcatgcttgtcgacccgatcaattgagctagac

SEQ ID NO: 13383 - DNA, 405 bp, Zea Mays
gatctagggacgtcgctcataggcttgagccattgcgagagctgtgttcaggtcttgtgggttgaacatctcgacatcaatgcggatgtgcttcggaagccttggtgtgaagagttgcgcttgttgtgttggagcgagtggtgcaacatggcccagaagtgcccagaatcgctgctggtattcatccaccgatgacttgaagggtaggcacgccagtttgcctaggggatttgttcggatgggggtccaaacctttgatggcacaggaacatgaaacgctcccaagaaagcgtaggtttgtcgcggttgatcataatgaaccactgtcgagccgctcccgtcatatgataagaggcgagccaaactctatcgtattccagggtgtactgtccctggaagtactgc

SEQ ID NO: 13384 - DNA, 976 bp, Zea Mays
tcctccatgtgatatgaaggggagtggttttttatcaagaatgtggttggaagtgccctattgttcaccgtcaggagctggtatcgatggaggcgtggcaccacagggcggaggcgagcctcaagagtgagttggagcatcttctgacgacgatctggatgttgaagcagcgaggtcttactggcgcatggctggtgcgcacctttatgcatcgccagatttagcccttgatggcctatcagaggctgatgcaccagtactccggtgtcaatgaccctgaccgccattcctctgtgccactcacactaaccgagatcaagcctcgggtcaaggttgtcatggcattatcatcgagatcctttatgaatgaggattcgccccttcctctctctaaggatgtcatgagcaccctggtaagttccatcttcccggtgttttttgcccctttgtctctctccgtttgttgccactcatgcggactttgcaggggatcggacccttagcgtcgtgtcttgttctgacatcttcatggtagtgcatgaggggacccataggtcagtcatatggagcactgatgcggcgtgcggtctttgcccgttgtgacgagcctgcatcacttgttgatgtgcgtaggcagacaaccgctatggtgtatctgttgcgcaccacccggtatttgggtcactgtagaagcttcgatgctgaggttctccatgaacagggtcttcccccttgaggcaatgggagtcggtttggggctgtacttgaggagttgcggtcatgtcgatagcggccactcagcatgccctcggtctatcgttcacatgtctagccgtggtctagggtcacatgtcttgtcctagtcggtgtggactttgtgacattggacttgggtttccacctcatgaacttgcttagtggggacctggtcggccactccgcctcgcagactttcttggtggaagcctgttcggtc

SEQ ID NO: 13385 - DNA, 503 bp, Zea Mays
cacgcgtcatcgagaggagatccctacattattattggtacgcgatcgagctcgcaggcaggcaggcatgattgcattgggggcgccggcgccgctagcttctcctgtccatagatcacggccgcgcgactaaactaaccccggcctggcagtccccgctccccacagcgagagatgacgatctgaggcgcaagaatataatcttagcgtgcgcatctcccgctcgaactgggaagaaaacaatataatgcggctgctatgggcagccatcgtgcttcccatgccggtatgatttggtccctcgcagtctgctaggcacggcagatcttaggggatcctcctcctcctcctcctcgtctcccaccccggcctgtgttaattaagtactgctaactccgtactacgcttcacgatcgaactaacttgagttgtataatcccagcgtagcagtgcgcgttgtgggcaagtggctacaaaagcagcagaaccttctgcaccaaaat

SEQ ID NO: 13386 - DNA, 456 bp, Zea Mays
gctggactactgtacccattaaagatatcgaatggaagtaggaagagattggtatggatttcattactggattgcctcgcacctcgaaaggatacgcttctatatgggttattgtggatagactgaccaaagtggctcatttcattccggtcaaggctacttataagggatattaattggcagagcatatatggctcggattgtgtctcaacacggtataccgaagaagatcattttggatagagaatcacagtttacctctcggtattggaagaagttacacgagtcaatggatacgagattgagttttagttcagcttaccatccccagaccgacgggcagactgagaggactaaccaagtgcttgaagatatgttaagagcttgtgctcttaaacatggtggaagttgggataagagtttgtcgtatgctgagttctcctataataatagtta

SEQ ID NO: 13387 - DNA, 556 bp, Zea Mays
tagattagggttgcaatcagttgtgggtgcgagggatgattggagggcgtatggtgattaggtcatggtggaccaagtgagcgtgggataggtcagccacgtcacaatttgtagttcttttttgcgtaaaacatattactattctagtgatacgtctggtgggtggtcggggctctatcttgttagagaaagccctgaccctcacccgaccagctcacaagatgtttcagatgcactgtctgatccattcaatatgacgtcaatagacttttatgctttgttgtacacaagtttacgcttattttgtcatactgtctgaaatcgcctcctgtactatcatataaaactgaccgcgacgactgctttgcacgagaggactagggtttcagcagcggcggttgcacgagacatgagcgagtgcggggaagcgggcacgacggcggcatacgggcgtgctgtgaatctctgaccactggcttggtcgcggacgcctccccgcgaggacgcgggcatggcggtatgggaccttcccaccggccatctccttaggcttcat

SEQ ID NO: 13388 - DNA, 342 bp, Zea Mays
cctacacttggctgtattttacaaggttaagcaaaatcttgtcgtgaaatgtgcgggtatgaggcagatctaaaatggagacaaactaatacacgcatggaaaggaaaattggaagaaacgtgaacagtccatggaccactattttcagcacagcaattgatccaccagtctgtacacttgattaacaaaattggaaactaatagtacaaggatctgttatttgctcgcgtgcaccaaagtaataaaaaatcagcagcacttgatccaccagtctgcacacttgctctagctaagtcgattatatatacactatttgcatggaattgtggcaccatgtttca

SEQ ID NO: 13389 - DNA, 518 bp, Zea Mays
ttccgccacagttcagtcccccgcgccgccagagatccgcgctcccggattcgcaccggtcgccgtgattcgtgcctcgcacgtagtggatatccacggggaggtaaaagatctcgcgggggagcagatgtggtcgcaggggaggcttatcaccgcgcctatagctgttgcaacatgaccggaccgccgggttgccgtggaaactccgttgacctcggttgtgccatgccatggcttgttactatgcggtagtaaccgtggcacacttaagagtacaacctttgagccattacgccggtgaacgccacgaatcctttgcgccagtattcttccccctctccggtcgccgcacgtcttctccaaattagccaccaccgctcatgaatcctataaattgagcgtgccattagctccctaggtagttgtgcatccagtgaaccagctctcacctccaatcatcccctacagctccccaatttgagacttcccccaaatcggtccagaacatcgtactgtgt

SEQ ID NO: 13390 - DNA, 456 bp, Zea Mays
cccacttgctcgtcgatcagccgggatagacctcgccgccgttggccgcttaccgctgtgcgccacgttctcaagtgttgtaccacgtcactgtgaatcgcgtcttgcatgtccggtggtcgttggggagcttgccacggtgaaagccactaataccgagcgccagtaaccttcttcctctccagccgccagcgcatcttcgcgaaattggacgccaccgcaatgggagcgtataaattgccgaccccgcctgctccgctaagtaattgtgcacccagtagagaaacccgtgcctcgaatcatccactagagctccccaatttgggatttcccccaaaccacccaagaacaccgagcagtgtgacctcgtcgtggccagctcgtctcaagtccgctcataccttctgcccctttgttttagtgttcttgcgtgcccctgatgctccccaaccccgc

SEQ ID NO: 13391 - DNA, 1229 bp, Zea Mays
aggaaatctgctgactccaacttacaatcccccacgtatgtcatttatccatagattctctgattgcctcttgcactgtcctcttgttaaccattcttctaggaataatctccataaggcgaggggcaacatcagctacacgctgccctccaatccatcgatcactccaaaagagggtagaggccccattgccgacctcagaatgcatggccatttttaaaaattctcgaatttttctcggaacatgaaaaggtagagaggcccatggacggtttggctcagttttttgcagccaagcccatctcattttaatagcccatcccagatgctgaaaatacccaatcctccgagatcaaggggtctacaaacttttcccaagcgacaagacaatgtcctcctctaacctcttttcgaccatgccaaagaaacccttttctgattctatcaatgtccttgacagttgaagatggcaaatccacaaccatggcaatttaaattaacatccctgtcataacagactacaccaaaacacgtcttcctgcttttgtcaacagatcagctttccatccaggaagttgatttgcaattttgtccacaatagtctgagcttgctccctcttcaacttatgaagagagaggggcaaaccatgatatttgcaaggaaaaccagctatctggcaaggccaaaaatgattacaacctcgagatcatcgtcttgatacctgatgggatagacattagatttctggttgttattgtagagcccagaagcctcgccaaaaagttgaaggatgtctaaagtaacattaatatcctcagccactggatgtatgaaaagaaccacatcatcagcaaaaagggagatacgatgttgcaaaagcctagatgaaagaggctgcaacaaaccttcatctgctttagaaaaagccgatcaagcacatcaatcactaggacaaaaagaatcgaagaaagtgggtcaccttgccgaagccctctctgatgtgtgatggtgctcccagggtggccattaagcagcacacgagtggaggaggtaaggagctgcccagacaagatgtctctccacacttgaccaaaacccagtctctgcatgacctcaaggaggaagggctaggataccgaatcaaaggctttagttatatctagcttgagcatcaatgttgttgtcattccattccattctgtgctaacaatatactcttatcggttcc

SEQ ID NO: 13392 - DNA, 1081 bp, Zea Mays
ccacacctatccgacatgagcctctcggctccatcatgcatgtgcacacgccggttatcaccactgccgatggggccctgtatcttgccgatgccataacaaactggcgtgcatgacatcaccagatcacaaccacccccgccgaaacaaactccaatcacgtaatcgtcgggccttctaccagctccaccaggaagcggttcccctctgcatgtataagtatgcaggcatgaacgcccctttctgccatcgtcaaaacaccgagaacacgtagagggagcgatgggagagcgcgtcgccgccgtgagaaaggacagccatggccaccgtcgagtgcgggcgtaagggaacagagagagatcgatcatcgccctcgccgagccctcaaagtttagtcgaggagggttgctagcgtgtgctgatcacggggtcatggagactggagttgtgtgatcgtggttgtgaggtgacggctcgcgggggacacaggcactgccatggactgcactacgccaggcttcgctcctaaccgcaggtgagtccttccctagtgaactcgcagtcacctccgcgtagtatatcaacactagtcattgcgctaggcggggtaactccggcgtgctactccaccgtgcggggccgtcgttcactgcctgctagccgcagggaggaagatgattctgggggcgttgatcatgggatctatggccaggatttgatatggggaatgtattgtgtgccgtagatcctagcgcggacggctaagattgggtcaacgaagcagctcggcgttttaagtctagggcgtggatctgggatcgcgcggcttacattagatcaggggatgcgttgggtcttagccgtaggatcgtgatcgggcggccactatttggtaccggttcgggagagattagatctaatctggaccgccagtttcaaatcgaacgaccgagaaccaagaatacccccttcaccatgcttatttgtaaaagagcccctggcctaccatttattcaacccgtggtccactgcgggagtagattgagtctctggaaacttacgcttgagcccctgcgctttc

SEQ ID NO: 13393 - DNA, 453 bp, Zea Mays
tccctctagacaatccatttaaggcggtctaagaccgcgacaactaccccatcatccactcctacgaacccaacgagacaggttgtggcgatggccaagaacatggcaaatagaaatgaatttctagcgaatgttatgtctgctaccgcttagagcaggcgcaggccgtccaaaagcaccactatgacaagctccattgtgcagtatcctacgttgtgggtgattgggtgtggttgtgactccgtctccgagcaccagcctcctgccagccacgaccaaaggaaagctcaagccacgcttctacagggcaaaccacatcagcaaactcatcaacgatgtcgccattcgactagctcttccgcaccaggcacggctccatgatgtcttccacgttggccttctcaatagtctgtctgcaggccaccaaacaccccctccattgtcgatcattca

SEQ ID NO: 13394 - DNA, 799 bp, Zea Mays
tttgtgggttagcacgcggtgtcgagctcgcgttccaaccaagctatgccagtaatgaccaaacggccacttcggtgagcttcaccaacacccagggacactcaaacactaaatcaaaggcgcagaaccataccgggtccacctggccatggggacgcggaggtgagcacgcactgcggggtctgacgggagcgatggacgttgcggtgaacttcggcgtaaataggcagtcacgctggagctatacaaccgtaagggacaacaagttcaccgtgcactaccaatttggggcgaggaagtgaagaaaaccgcaaattttggcttctactgaccacaccggaagacagtgaatgcctcacggtggttcacgactcaatttaaagggatggcgacatggctggctacccgcggtcactaaggtacaatgctagtgcatggagaccacgtaacaaggaagcatagtgcgatagaatttgggcgcgggcgacaccgtgacaggagcacacaagccacggtgcacgccggtgagatattctcgccccttccccggcctaatccgcaagatggtgaatcggctcaaagttatcccgccctggccatctctatctcctcttcatttggatgcatccggattccacagcgatgcggatcttttcttcagatatttcccagcgcctctaatcttcctcatttaactgaaccggctctatttagccctccttttctcccgattcttgttaaggacaggttaatctccgttaacaagacttgttcaccaaacaaaggtcttcaaacttac

SEQ ID NO: 13395 - DNA, 519 bp, Zea Mays
atcttgtcctaaccactatacttatctcatcctagtgtaacaaccatgatctaattcaaattaattaagatcttatctgaaccagtcataccattctaatctagatctcatctaatctaacacgatataatctaatgtgagtactcaacaagttagtaacactggtacaattcgattagaccatatttctataaacatgtgttaacctaaatgggtgccccaaactaacttgaccatatacaactacccgactatatgcaactaccttacccatcatatggttgcataacccctctgtatcaacctaacaacaaaacagacattctaaccaacctacctcgtgaaatctatcctacccacaattagcttaaccacatgtctctaactcggatgatcacaacaagaccaaaggaaagaaggtcaaccttgacaaggaagaatgtgaatagaatcagaacttcagatgaatcaagatccaccatccaagatgaagtctttccatgccttaatccttcttac

SEQ ID NO: 13396 - DNA, 755 bp, Zea Mays
ctttttttggaagaacatatctgttgtatcattttgttgattgttgctcaacccttccagcaaagtaaaatgaagcatatataactttgaatacatttagatgtcgattattggctttcgttgttcttgtagaaatacttggaattctctcgtgtgttggctagtagatgactgtaagatggacaagatccccccgtatgcagtgtaactgacaccgtcacttttttatcgtaaaacatatgtggtatggcttatatgaacattctagatagaacagaaatggttaatattcatcatttcgtgcttcaccataatgagatcttgccacctcatctatcctcagcctctgccaaatcattttcctctttttttcctttgtcttgtctaagtttatgtctcgagaatagaaggacaattcttcatatttgtccctttatgtggcatatgctccttcaaatgtgtagcaccacctccactcttagcttcacaataatacttgcacatgaaaccagacacaatcttctctccgtgcttccacactaggtccagcatgttacctacaacagtacaatggtactaaccctagcatgtgacaaaccaaaaaaacctaaactataacatctaataataacatctaacatctcatactaacacaacccataacatctaaaactaacatctaaaagtattaaaaatattttctgctatgacatattttatgcagttacaaacttggaaacatgcacatattcaaa

SEQ ID NO: 13397 - DNA, 1127 bp, Zea Mays
cttgtatttgtattcaaatttgtgaaacaagtttgagtttaaaaattagaatttacaaataaaaagggagaaataaagcaggaaatataaaagaaaaagaacaaacattgatcgtgggccgcaccctcacatctcagcccacttaccaattatcccctgcgcaacccatcttctccttcgctgtcgcgcatgctctcgccgacagggcgggcccgcacgccagtcaccactctcgcacactaatgcggctcagctcgcctggtggccgcgcgtatcactgcctctgccatatgggaccgcctagtcatttgcttctcccagccaccaccacgaccgaatcgcaacagaagaatccgagtcctcgccgcggtcttcgccggccgcgcgctggcataaccacctccccgaaagtcgtgggcatcatctgggtgtcgattggtccatccctcgatacatataagccctagctgctgccctgggtctcttcaattcaccggaacagagagaaattgggggaaatactagcacggtgcttgggtcgtcgtcgatgtccgtcctgcgccttattccagtttgtggggctggctaggaaactccatggtggcactggggatcgatctacgtcaagcgcctgcggggagacgatcctgtgccagcgtaatttgttgttgccatcccttgacgccgtggattcactgtgcactgcggttcgccacttcgtcacctccatctgtggtgaggccctatccatcctcttcgggttattgccctctgcgtttaacttaagaaccgtaggttatcgcgggtcggggcgctgcaattcgtcgctgtggttggtgctcgactgcatacccgctgtgccccgtggccagctatgtcgcaactccttctcggtgagtcgtcacctcctggttgttccttatcctctgccctacgtgtagctcgcttccagtgggtggattagatgcctgggcgtcgaatcggctgctcgccggtgggattccgccgtcggaatatcctagcgccgccgtgctcagccagctgggtaggagaagcctcctagccgtggattaactgatgaacgacgcagattagagaagccacgtaccgcttcgtgtttgtccctg

SEQ ID NO: 13398 - DNA, 632 bp, Zea Mays
gcgaaaggggtatccggtgatatgggtcgtcagatcgaccacggagcgccccgattagatcccgatttccccaaaccggtgtcacacagcagccatcggatcatagatccaaggtcacgatcgtaacacacgccagtcgttggattactgatcatcgaatgagattgatcggcccgaagcggtaccccaaaggaaatccgagccgtccatcagttgaccaacggctccagttttcttccccaatccacagtagaacacggcggcaccggtcaccaggggcggcggcgccatggccggcgatgagccatacggccaatcaagcccccaaactacacaccagacgcccctacgcgaagaggagaactaggcgaatcctatggttagcggcttacctccaatcgatggtcaaggcgagctggccacggtatgcggcggcaccacggcagggacggtgctccggcaagaaattgccagcacaccggcggtccaaccttagcgcaggagccacggccaccttcaacacatccgaaagggcccctgggttccttaatccgagcacggtcgtcggtacgctcggattcgcccgcggcggatcgctctcacaaatggcggcgtcggccctcttctgcttg

SEQ ID NO: 13399 - DNA, 609 bp, Zea Mays
aaagaaggtatagaaaatttaatcttagcataagggtcgtcaggagcacgattgttattaccttactggcggtgtggcataccttctgtgttttgatgaagaagacggaggcgcaaatctctggtggccgcttcatcataattaccttcttcatcaaacactgcatcatcgggaagacgtggacgaggaggtggtggcggtgcttgttgttgcgtctccaaaacagcaagtctgtcgacgatctgggacaatcgtcgatccagcctctcgtaagtcttgccaaggttcatgtcaatgaaggcatcatgcactgacttgtggaccgtctcctgcatttgctccttcaggagcttgttgtttgcctcaagatcttagcggttaacacattcatcgaagtctgtagggaaccttgcttcttcttcgtcgcctaccatcgaaacacaaaaacaggaaacaaacggtgacggttatccctaataatttcactacatgctcctctcaggtggaacacaggaacacgatctaatgtatcttaccaagctcttacaagtgtctgacgaaatacaagcaaaggatggtacaatcgaaagctggttcgtgatacttacc

SEQ ID NO: 13400 - DNA, 394 bp, Zea Mays
ctcaagtcgatccagctcggtaaccaaccacgcacacgtgggtccactagctgttgccgtcgcccttcctccttccgtcgcaagcatcggggtggcgttctcatcacccttcacctaaggccaacttgactatacgcagtagtagataaatactactactgaatttgtcccccatttgttatagtctcaccacctctccacccttcgaaattgaaatcaaatcaaagcagcccaccaccctcgattcattcaccaccacctctccacactttgaaatcaactcaatcaaagcagcccctcctccagtcctccccaacaatcgaattccggtgcgaattggagccctcagccctcccgcgcatctagggttttgcccatggaccccgacgccggc

SEQ ID NO: 13401 - DNA, 461 bp, Zea Mays
ccgaaatcagcttgatttcaaaagctgcatcgcgctccggaggaatgcctggaagctctgctggaaatatgtcggcatagtcacacaccacccggatgtcttgcacccgcaaggtagcctcacccaccaccaccatggagaaaaagattcccgacttccttgaccagtgatccggaagcaattgcgccaacaaggataacgtgaactttggggaacttcccaagaataccacctccctacccgatggcgcttgcaataacactgtcttccaaaaataggatataaccgcgcgatactgagataaccaatccatacccaagataacatcgaatgcccccaaggaaattacaacaagattggccaaaaagacctcatcagcaagaataacggaacacccctgacaaactgaacagctactaatggagccattagcagaactaaccacaattgggtgacccaac

SEQ ID NO: 13402 - DNA, 1118 bp, Zea Mays
ccaggacagagttatccacttctagaatcgctttttccacgctgagcatctgggccagcaccacgccgtcacgagcagccaaagcttcactggttagcgcatcagggatgtgttcatatagttgtgctgctgccgccaaaacctctccctgcgagttcctcatcaccacacccccagcccctttgcccgtctcagcaacaaaagcagcatccgagttaattttcacccaaccctccaatggcgctttccatttaacccggcaacgcagagaggcttgcggccccggcacttttaaacaaacaagatcctccagcattttcgccacatgactcactgcagcgtatggattccagcggtcacgcccaaaccttctagcattccttccagaccataaagaccaggcaccacaaataaccatcgttttaactgaatcagtgaagtggtcatcagccaataagtcctttgcccaagtgacctccaaaaaaactggtagttttatccctgtaatgtttttaaccactcgccagaactgctttgcaactggacaatcaatagcaatatggaaaaaagattctccttcctccccacacacttcacagaaattttcacgaagaatatgtctcctcttcaattcctgtttggatggcaaataattatgaaggactctccaccagaaaattcttatttttggaggtatattcagcttccatagttttctccaccagtcttcttcattcgatgagcttgctgcattaacagcatgatccttcccgacactttgagactgcttcaacattcgataacatgaccgaactgagaacacaccattttcctcatgcgcccaccccatcacatcagcatccatccgagtgccaggcctcagcttcagaatttcctcagcatccatagcaatgaaagacttcctcaccaaatcaacattccagcatctagtacctggcagaaaaagttcgtccacagattgcacttggactccttcaagatggacagtgggcttcaactgcctaagacttggaatccagttgtcctcccaaatacttattgaggatccagggcctactcttttaatcaaaccctgccataaggcttcacgtcccaac

SEQ ID NO: 13403 - DNA, 447 bp, Zea Mays
cagttttcccacctcgcaccaccaaaggtggggatgtagactatggccggatctggcctcgtctgaaagtagtaggcaccgatgtggtccctagccttcccgaacctggccagcacgaaaaaatagcggaagagggaagtgcagggggccacacctagaaacatctcgcagaggtggacaaagatcgctgcctggaggatggagttgggcgtgaggtgttgaagctgaagcccgaactcctccagcagtagcaggcagaagggtgaaatcggcagcgccaacccgcaagaaatgtatgaggtgaacaacacaaactccccggcggcgagatcgccaagggggacagcgccggcacggatccttccggcgagccctggcgcgctccacccaagcaggccacgcaccagattgagctcttcctcagcctgaaagcgatcaggatgaccg

SEQ ID NO: 13404 - DNA, 471 bp, Zea Mays
gagaaatcaaacagacgccagtcgccaggcggaatgggccgagagcccgagagctactgtataggaatggaggggcggaaaggtctgcgagggaggagcggaagacgtgcaaattcttcagatactttgaacgatgagattctgctgtgtggctggctggatgctgaaactgtctgcgtttttgggtggttttcactgctgcagtgatacccattcaccacaattagcgcatggtctcttgttattgccgggaattttgcatccgggctgcagtgaattgaaatcgtatgaacagtgtaggaccaaagaaccaaatgcttgaaccagtcttgtgctctgaaaaagttagtcagcttcatcgcaaactcacaaggctgtcctgcatgcaaatggcgaggtttcttatgaagatttagcatatatggatttgttttcgctcctccaattgtagcacaaaaggttgccagtttg

SEQ ID NO: 13405 - DNA, 477 bp, Zea Mays
taattcttgtagaccaatgagggcagacaaggcgggagaaggaacaccactactttccccactagctacgtaacgccggctgttcttccgattcagagagatttcgtcctcttcttcatcatcctcatcaacaacacggacagcacactcattgggatcagcgtcagacgggtcacacccattggggtcagcgtcagacgggtcacacccattgggatcagcttcagtaaattcatgcacgggcacttcctcagcagtaggagcagaaggaccagcatcccgatccaagctagacactcggcaaagacgtctcttcttctttttctacccatcagcaggaggagcaggctgattggctcggcaagggtgcttcgggcgaacactgtcaggcctctaaatatccaaggttttactagcttctgggagaggcatcaccaccaatgttccggcaggagcggcatcaaaagaatcctcggc

SEQ ID NO: 13406 - DNA, 952 bp, Zea Mays
gccacctcgaaccataagagctcattttgatagttctctgaggtatcgaaggtgatggacatgtagatgtgtctcagcgggtactctccctcggtcagcacgatgtcaaagaagggggtatccgactggctgagatcggcgatggagactcctagagcttgaagtatttgggggaaaggtgacattgatgctactgccaccatccactaacaccttcttaacctggctctcccgaatcatagggtcgacaagtagggggtacttgctagggtgatcgaagttaatccactgatcggcccgactgaaggatattatgtgtttcgaccatcggtatggggccagagcgctgtttgtggccaccagaacctgtcaatcaattagcttatgttgccttttgttcccttgcgccttgtgtcctccgaatatgacgttaacttcctgatcgatgcgcgggaaagctccgcctctacctctgccggtgtttagtaccgacaatgcaccatggggtgtaccatgagatgcttttgtgagtcgacaacatcaactgtagctcgatggttcgcttcaatatgcgacgaaacacacgatttatacaggttcgggccgtgagatgcgtaataccctacatcatgtttgcggtgggttgtattgctttgatatatggaggtttacaatgagggctagggtttggatgtttgatgagagagcggggggcatgtataaaatcagatgccttagagggatccctcacctgccttatatagttcggcgtggcttgggttacaagttggtttccttctaaatctcctagatagtttagattacaatagagtccttgtcttgtgcgccaagtttgtttagtcagtcggcctcggacccaagtcagtcggttggcctcgggcccatgtagataatacgcctcatttggacccatgggatacccatcccccac

SEQ ID NO: 13407 - DNA, 537 bp, Zea Mays
ccctccgccgtgattcgtgtcaccggcgtcgggattcgtgcctggctggttggatagcgccgtggggttaaaagatcgtcgtcaccgctaaactggaagccaccccgatcggccacggcacccctccccttggctcaccgcccgcggtaaagtgctcaccgtcgaccgctgcctcccggccgtgcgccgcgtggctcaactcttccaccatgtcgccgtgacctcctctgaactctccgtagctcaccggagttactgccacggcgataaacacgtgttcactgcacgccgttcttcctcatttccggccgccgcgcgtcttgctcgaaattcgcggccaccgcccgctagcactataaattgacccctccccgacctccgtagggtagtaagctgtccagccaccacgaatcaaccgcaatcgttcgctgaggtccgcgaattcggagtttcccccaaatctgatttccgccaccgtgaaacgagccccaccgtcgccagccatactccggtcagttcccgtcctctgctcccttg

SEQ ID NO: 13408 - DNA, 300 bp, Zea Mays
aagaccatactctaggggctaaggcaacacctgcagcagcctgcaactgcaatccttcactgtaggaggcttcaggttttgggtatggaatttgaaatgctcttccctctgttttgttggtattattctattttctttattctaagttattgtgctgttaatatatcaaagtttataacgggacttaccaactaaccgtatgaaaatatgatgataaatccctgcggttgatcactgacgcttcagtaagttctccaatttcaagggagaagtctcaaggtttggaccccaatatgcgag

SEQ ID NO: 13409 - DNA, 561 bp, Zea Mays
cagtaagtgaatacagagacaaattcatccagctatcctggtatgctcttggggaagttgcagatgacgagaaaagccaggaactatttctgaagggattcatcggaccactccaatacaactgatatcccactcattcccatccttctagaaacttctagacaaggctatagctctggaaaacaagtgtgtcgagctaggtgagatgaagaggaaagctactaaccagggataggctggaagtagtactcgtccccattatgcttcatcacaaggtaccccaactcgtggcagtcccagacaacagtctcaatcggtccaatctactctcaaggaagcaccccagtgggaccagttgctcctaatgcatccacaaacatgtcatgctttaaatgtgggcatgctggccattatgccaactactgccccaaaaggttgcttacactactccagctccgatgaagcaaggtcaaatctcaggaggtaaaagctaggacttatccgtcaaacgcaagcaagttaactaggtgcaagcagaagctaaaccagaagaacgcaaag

SEQ ID NO: 13410 - DNA, 527 bp, Zea Mays
tcaaaatggaaactcatgatattcttttattcttctgttcacaagcccttagagctaacgacatctctctatccccaatgccttcacagccactccagttgataaaatgttgatgcaaaatgggatgatgcttcttgggaagaataatcgtattatagaaatctacatgtagtagaatccaaaaacgattaccttcaatccggatgtctctcacacgaagggcaggattctgaaaacgcatatcgtgaagaagagctgaccctccgctggcactaaagtcagtgatttcttcgttgggggatcgccgagcctgagctttgtgaagaaccaatccacgaacaatgggggcattctcggaagaaagatcaataatatcatcttttccgccttcatcatcactggaaggctcccatgcttgaggattagtcgtgggatgagagcgactagaaggggttctagccgtacgcccgtgacttccctgagacctagaggcctcaccacccatcatgacatttctagatcctcgc

SEQ ID NO: 13411 - DNA, 725 bp, Zea Mays
cggtgggtaaggaccttcatctttttgcttgtagccttcggcacaagttcggccgaggcggccacagcagtacctttccttttcttcccttgcccccgcagcgggtaacggtagttgggatagacaaagccaatagcgtcaaaaactctgttcaatctcttttttcctcgacctccgaaggctgtggacaatgcattatcttctgccttggaatatgatccaagcagttcatcacttgtcacttcgatgcattttaaccagtcattgtttggttcgtcgaacttatccccttatctgaaggtgtacttcagccggaccagctcaccttcgctagattcggtgacagtttccttcggcatgtcccagttacctacaagcggccatactctgaaggctatatgctcttggattaaatctcttgtaccaatgaaaaagtagacagtaccaaatgccttctggcatgcttcggcggctttgtcaatctcaaccttcggccttcggaggccgaagcgggaccaaatggggcgcataataacttccttaatatcttctcttgccttcaagtcattctttatgtaaaaccattcctccatctaggctctgggccacctttttcggaatgtagacaccggatagcttgagttgggccgggcgataaatccgtagcagccaaagttgttatgatattgttctttgcccatggccttcatctcatatacaagttc

SEQ ID NO: 13412 - DNA, 796 bp, Zea Mays
ctggatcgcatgcactattaccaggaagttccgggttcaattcgaaaatcttaggacctaggataaagtatttcctaactgatgtggacggcagatcgatttctgaaaactttaagggcatcattgtaaaaccgctcgaccgaaggggtatggaaagattccggccgcccgatcataggcgcgtggttcagattagatcgcgatccccccgaactggtgtgcgaggatgaccgtaggatcgaggatctacggtttagttttaattatgattagatcgcatcggtccgtccgctcgcggatccacgatcaccattccgcaacgcgaagcggtatcccacttctagtcctattcggtcagtcgtcatccaacgcatgacaggccatctgcctctaacgccgatcagcagcggtggcgccgcggcttcccccacggtggcgccatgccctgacctcgtgttacaaccactctaccaccggcggtcaatccacagaagccgccccttcgtcacgagcatggaagaagactgcgtcgtgtgaacgtctgactggcaggcccgaagtggaagtgacctgtgcatgtctgtcgcgtggggctgcgtccccgtggtgtgtgcctctagttgtctgtaataagtagtgaactctgccttggacgaggtatgaaaaatctgaagaatagaaaactctgaagagagctccctgttctctcctatctctgtctcctacctccatatcccatactctaacaaattggtatcaaattcctccgttcctcggccgtcgcgtccatggcgtc

SEQ ID NO: 13413 - DNA, 530 bp, Zea Mays
gctcgccagcgcgatccagggatctgcggtcctcatccggttacgacctgtagcctataaattgagtgcgagcgctgcttcttcaccatattccgcacctcagcgactaaacgcttgactcaagctcaccggaaaacccacgtagtccccaaatccctctcccttctgttcttagctccgccgagaagaaacccctgtggccagcgctcctcgggtcagtatttatcaaattgttccctgttctagttagtctttgatctcttcttgctctcaaatgcggccaattgaagttcggccgaagcccatcaccggaacacacccgtgctctgtaaaatgccgccatgacaccctctccgtcgccccacctttctattcgtgcctagtccaaaacttagcgtgtgtgtcatctctgatgaacccaggaacttttccccagcttcaatttggccagccaagccttcggttatccggaataccttattccacttgatcacctgcactgtcaccgtggtcagagcatgatagaccgc

SEQ ID NO: 13414 - DNA, 572 bp, Zea Mays
ggttgttacaacaaccgcgactggcgctaccacccaactggctggggaccttccctcaaatagaggaggccgggtcctatgcccctccttcgtctccaccacgcagtacccacggcgctggccgcaagtccatgagccatcaccagttgcgccgctaagctttgccgccgctcagggaggagtgcttgagaagagagagagagtaggaagccaccccgcgtcctcgccatcggtcggccttggtgtcgggtctggggagcgcccaatggagcggcgctattcatcggtcaaccagatacggcctcggactgcacagtgattgccctatcattgtcgtcggtgagccacccttcttcctcgtacctctttcttctctgctcgggatgcattcgatgttgggcgttgcagtgaggatggggcgtacatgcgagtccatggtcttgtccacggctgcgctggcgtcgtctgacccttctgtccacgcccgctccgctgtactagcgcttgcgccgccgtcgtggtatgtgtcgcgggcaagaagacaagctcgcggtcgttgccttcgcgatgga

SEQ ID NO: 13415 - DNA, 667 bp, Zea Mays
gtttccctaaaacagagggttctatttttaaaatcagctggctgaaggggtatcagccaagatgggtcgtctgattagatgtgagtgacccgtattaaatcggtgtgaattatgaatggttacgcgctcacaaccgtgagatcgacgataaagcgcttggatttaaaactacccagattgtttgccacacgcatgattcgcatcgaacgacggggatgagcttaggccgaaccggtacccggtgttctaatcatagccgttcatcaaccgatccacgttcgaacttcgccctccccaaaccagctacccgacggcggcgccgccaccatccttgtcggggatcgccggagttaggcgatttggccaaatcgtgctcctattatatcatggctcggggttatacggagtacggaatatgacgaacacgctggtatacatcatatcgcggatggacgcctgattgctgttggtcgcggcgatgggcagatctgtcgtggtccttcgagtccgatgaacaattggtgctaccccagtgaacctttctgcccagacaggtccctcacacacgcggccagagcccgccgatgtccccggccaagcacttgcgaatatggtggtgttttccgtggattcgcggtggcgccacctgttcccccttcaagctctc

SEQ ID NO: 13416 - DNA, 516 bp, Zea Mays
ttcacaatgggaaatccagaggcgagggttatccccatcgaacaatggaaatgacaacttgggtaatttgtctagtgagcgcgcgccctggttagaataccgatgtctagccaaacaatcctcatacaactaaccatggcaaattgtatgcacgggaggagatggggggtggagcatacccttgcccgggccagggaggaaggtcgtgaccgacccatgcccctgatcccggaagtagtggtcgtcgcgatgcctgtatgggccgtcaaagtgtttgccaccaccaggatgcggcatggagaactctggcttcgagggaagtccgggttccgttgaggagtgttcgagcgccgcacgctcccactgcttgctgagtttcctggtcttccatggcggcatccactttaggccgacactgctcgaaatcggccgtagccgactccaaggcctccacacgctcctccttgtgacgggcgtattcggagaattgttgctcccatttgagatccatggctg

SEQ ID NO: 13417 - DNA, 539 bp, Zea Mays
gtttgctagcaaagtatgaagatgaagaaaaggacacagttgttggcgagaaccaatccgcgtgaacgcgagaagcgggaggctggctggggcgtgtcgtgtagagggtgcgggaggcgacacgggtgttggcgagcatgcgtgggcctggggagggtggagtcatggtctgcttgtgtacggtaggggtgagttttggtgtgagtgtgtgcgtacatgaacagatactacaactgtacttgtaagtgagaggcaattaaaagccattgcgctgcatgggagacttaccgccaactacacactgccggggctggggttgtttctgcgcttaaactcaactgccacttctacatgcatgccgctattgctaattgttgctgagctatagtgctaccaggtgtaccgaactgaagctagttgtgttgggctttggcctccgatgcaagaacgccatgcttgggcctcgaggccggaatgaccaatagaggccgcgacaggccacatatatgccggtggggtctgaggagggtgaagttatg

SEQ ID NO: 13418 - DNA, 382 bp, Zea Mays
tggacacccgagcgaaaagttatgcccggtttaaggaaggtacctcaagttatgtttttgggaggcacgactagaaagcgacggttagggcaaaatttccctatctgtaatcagagcagaaaacaaatctttcatggaaaaaataggttgtgctagatgaataaggaagggctgcaatgcaggtagaagactcaaggcggctcgcaacctatctagggctggcgcggcgagaagtcacacaaggcggttagcgagggcaagtcgattagttgggtggatcgacttgtgatctgggtaatggtggatgggatagcggcaaaggtgcagttgaactacgacgaagatacaacctaaaccagcaacacgactcgaccacggacac

SEQ ID NO: 13419 - DNA, 648 bp, Zea Mays
cacgcttccctcggtgggctagcaatgacgctcattgagctacaaatgggtgatttgagttaggccctagttccctttgtgggatccaagcatggggtcgcttgtgaccgtcctcatattcatgggcaccaactcatatagttaccgactctctttgaccggaactgatggctcgctgcctctctcttcgataaaccattagtcagacattccctggactcgaacgcaagctggtgacgcccttaacactcgtgtgtcatcgtcctggtcgctagtgtgcccatcattggccgcccctcactatgctttcgctggagtggccgtgagcccttcgcaaaccagccttagaactctagaatccacaactaatttgtgcatcgtggagtttttggtcccttccaaaaggaaaaagcataggtttggggtcttaccgtagttggtcatatggtgtgcgttccattttccgtgcagagacaattcgaagggtagcttggtctgttgcattggtcacgggcaacgtttgttccctttggtatttcgagcgtgggaaggtggccctacattaatcagacaaaaaagtagaggtgttaatacgaccatgcctacggaggggacataatttgttttgacatgaagggtgctactcgg

SEQ ID NO: 13420 - DNA, 291 bp, Zea Mays
gttgaaggctagaaccagggggttgggccatttgtctatacaaaaaggtgactactatcatgctgagatccgtgataacaacaacattcaatgcagacacgttgtgaaggcagaacagagatattgttcgtgtctcgaatggcaacacacagggaaaccctgccagcacggcctagtggtcattatagcgcaacaaatgcgagacgttggaatggagcactttgtagacgactacttttcggttgaaaattttaaaaaggcttacgcacgaaggattgaaagtgttggcga

SEQ ID NO: 13421 - DNA, 387 bp, Zea Mays
tattgtctgctagtggggctgaggtcaccccggatagtgctcttcagatcgttcctgctgaccttccctcgtcgagctatgactcaactcctcctgccctgggtctaccactgttcctttctaatctttaggtgagtcggcctcttgctctacgttgttcatattagcgaattatctttcttctgctcatctatctacgatcacaggcttttgttgatggaatagctgcccagctgagatcctatggtgccactgttcccaaacaagctctgtctttaatgcagtggaactcattgctgctccagaaacagaccgatgacttgaaggcgtcgaacgctggttagtgatcttacagcttccctagttgtttttattgatcaacttgtt

SEQ ID NO: 13422 - DNA, 467 bp, Zea Mays
cgcggatggtccgagacaccgccggatagcccgagtaggtcaaacggacggtccgacagcgcctaggagcagagacaaccatgtaccttcaaacctcgacgactataaataggtacgtggaagacaaacacatataaggcatctggtcgactggtcaaagccggcccgacctttgatcaattactatctaaatatgtgaaaaataaggttggccctagcgaccgaccagcaaagcgacttcgctcacctacccaggagcgatgacaggtaagaccgattgggtcatctcaccaatcagaggagacaacacatcacaataatcatctaagacctaatgtacctacatggacacctccacccctatacccacctgtgccatatcaatatgcatacctaccaccaccatatatcccaaatcaaatgtagattatgccaccatatccatatgggatgccatggtaccccgc

SEQ ID NO: 13423 - DNA, 463 bp, Zea Mays
ccctgttcgctgtccaacaattgagaggtcccaccagtacctggtgggcaaattttgcagctattcaacctgaaggacatcttgtcacatgggcagagttcaaacagccgttctgggaacactatattcctaagggggtttaacagatgaaacttgaggagtttatacgtttaaagcaaggaggagactcggtgatgcaatatctcgccaaattcaatcatctctcctagtatgctatagagcaagtgggcacggatctgaagaaaaagaattgcttcatgagaggtctaaatgatcgagtacaacaaaagattgccacttgcctggacctcacttatagtagggtcgtgagcacagtgctttcggtggaagccaagaatgcaggacaaggaaaaacaaagagatatggaggtgaaggatcttttcaaggatccgagaagcgatcgaggttagtgattcgtcc

SEQ ID NO: 13424 - DNA, 1300 bp, Zea Mays
gtttgagtctcaggaaatcccccattctgtcttgtggtcttccaccattcggccgttgattctccagatttcgagtgaggacctcgatgagtcgggtttgattggctagaacttgggctaggtctaaggatagtggtggaggtgcgaggaggtgggtttcactttcttctctaacgacttccccttcagctctcaggggaaaccctgctccaatcccagaggcggtaggcgtggttttatccgaagccatctgccagggaagagagtcactattatgcacatgcaaattgtttttaaccgagttattttattcattacaccatctcattacaagcataagactactacaggtggaactacacgagagcgttccccgaggtactagcgaattccttatctaaggtgtccccaaatgccttgagaagatcatcgaggcttgctagggatacatcctcttcgtcggaccagtcatctattctggggggaggtagggctagaggggccttcttcttcttcttctccgtctggcatccttggttggtggtcttcttctggattttcttcttgggggcgagtttctttagcttcttgtcatagtccatcttcaaagttcgataggcctcacgggtgttggcttcctcgccttctgctatgtcgagactctcctggagggatgccttctcttgcttaagctctttgacttgctgctctaggctttccactcgggagtttaggtgggtgcagtgggaggagagctcgtcgtagtggttgtcgagggtgtggaggtatccggccatgtagacgatagtggggtcatcttctgtggggtttcctcctaacagagcctggagtcttttcctccaggtgggggtgtttttgttgctgggtgggaaatatcggaggggggtctcggagatctctccgttatagttttggcacagttgtttgagggcttttcgagcaacgctctagcaagtgtctgggaagcggtgcccgatgaaggtaatttggaagggagggtggtttgggtagttccggctttctcccaagtagaccgccatagagcatttttctattccattttcacgatactccttccagacatattcgggcttcttgcggatccccaagcgtagcgtgcagctccgaagaaggtgaggaaagccttcctcctctgagcaataggatgtcctaatcacctaggggttttccatctggtagacgaaaagaaaggtctattaatatcggggaaaaggggaagagtgtttcttgggggtaagaggtgttttcttgttaaggc

SEQ ID NO: 13425 - DNA, 808 bp, Zea Mays
ctgattgccttgcatgaatttcttccagcaaacgcttcccgacacctgagtcgatgcatttcatgaggactctaacgacccctttcttgtacagtacttctcctatgacaacataatgggctaactgcctcgcaatgcgctcggcagcggccatgtcatccggctcctcctcgtttttgatgtatctaaatgggtactctccagtcatttgggtcacgttctgcctactccactgccttgcattcctccgctggtcttgatgcgatactcggttattgtatttcctggacaaagatgtctggtggagcttgggcccggcttgatcctagtttttatagagcatctggtgctgcattgctatctctttctatgtgatgaaactccaagctttcgaatttttctttgatcttcatgaccgcagtgcagtaattgcccattgaatcagtggggtagtcccaatccttgttgacctggctgatgacaactagtgagtctatatacaccatcagtcttttgataacgagtgacacaacaatgtcgatcccatgtatcaaggcttcatactctactacattgttggaggctgggaataaaagttccaatgcgtacttgagctgatctcctccatgggaaatgaagaggattctagcccatgctccttgtagcttcagtggcccgtgaaagtacatcttgcagaccttgattgatttagggttttcaggaatctgctgctcagtccattctgatatgaagtctaccagagccttagttttgatcgccgtccggggtcaagactctatgtcatgag

SEQ ID NO: 13426 - DNA, 299 bp, Zea Mays
gcatccgagatacggggaattgtcctacgtaccttggtgaagcgagaaatgaacgcttggagggtctccccgggctcctgtcttattgcgtggaggtgtgcctccactccgtgccgctggtaagcgctagcgaagtttgccacgaaccgtgcacagagctcttcccaggagtagatggatcatggggcttggttcatgagccaggttcgggctggcccagacagggctacgtggaagtaggttgccattacggcggtgcctccacctgctgccgtaatggcagtgacataaacctgcag

SEQ ID NO: 13427 - DNA, 638 bp, Zea Mays
gttcctgcagggatattaccacccaagcgatatcagcgaggccaagcgcctcaaacaccgaagccgagacttcgctctcatcgagggacaactttacaagaagggggtcagtcaacccatgcttaaatgcgtcaccgagaccgaaggcgttcagatcctgcacgaagtccacagcggaacttgcggctctcacgcggggcctagggccctagctgccaaggtgatccatcaaggcttctactggcctgctatgatctgcgccgcgaatcgggtcacaaggtcgtgcgaagcctgccaaaagttttctccacgcttgggaagcccttcgcagttcacaaagctaatcgcccacacgtggccccttcagcgctggggcatggacattgtcgggccactacccacggcccaagggaacctcaagttcaccttcgtcgccgtcgagtatttcaccaagtggatcgaggcaagagcagtatcaatgataacatcgaagactgcccagaaattcttctggcaaaacattgtttgccgattcggagtcccgtccgagctcacagttgacaatggcaagcaatttgacagccaagacttcagggacttctgcttctccattggcaccaaacttgccttcgcctcag

SEQ ID NO: 13428 - DNA, 385 bp, Zea Mays
ggagaggggaggttgaactgaccggaaaggggctgggcgcggtgaggtggatttcggggtggcggaggactgatttggggcgaattcaaaattcgcgagctctggcgaacgattgctagcgattcttggtggctgggtagatgatgaccttgtggagctggtggagggctcaatttatagggagagcgagcggtggtgatcaattcggccgagccgtgctggcggccggagatgaagaagaaccttggcgcagtgaattcgtgtccaccgtcgtggcaacttccccggcgacgaagggacatctatagggagtcatggcgacgcggtggaaaggcagagccacgcggcacaaggccgagaggcggcggtcaccggtgaagttatc

SEQ ID NO: 13429 - DNA, 549 bp, Zea Mays
gtacaacgatagcgcagtggtttgtgtggaacacatttggctgaagttactcactgatcaaaacctgaaaggttcgcctatggacttttatgcttgttcagttctttttggcaatgaatgaacccatcttgcagtgccataatgtgtagtaggtctaattgcagcaccgctctgtcagctctgtgtgagtaccgctaattgctgcaaagcaagtctttcttgttgagctctcagtagctcatgggcacactttttagacaaggttatctggtgaatatgacaggcagacagctgtaaacactccttatggaaatggtgtgctcctcacgaagtcaaaacttatcgacggtgtatccgaaggatgatggatgtattttattttgttggagttgtgaccatttgcatgttcgtactattctaatagttttaaagtggtccatgacattcttttcactgaattgtggttaacaagcaatctgcgccaccttccctagcacttcactctatctccacacattcagtatgtaacttgtccagattcaaaacatc

SEQ ID NO: 13430 - DNA, 1176 bp, Zea Mays
agtttgcttagatgaagtcggcctgtccttgttttgaattgtgagaaaaatggggatgaactggaggggtgcatgcgtgtgaacagggtcctggttctgtggattccaagttggttcagaattctgaaaatggatatccacgcactacctctgtactcagtgctccagctcggattttggggatacggtcgagtgcaaaggtgtaccaggggaggggataactcaagaaggtttcaccgccgtagtgtttggatcgagtgagctggacacctctccaaactagtgactaggttgctgatgttttgctgtcagcacaccatgaagttcccagtgcttctctgtaacttgggcctgcgtggtgccatggtttcacggccacgtgcccaagctcatgcacgctcttgcctccccacgtaggccttatttggtggacaaacactgcatgttcaccgtgtttttcttttctgttgccgtgatcgtgttagcgcgtggtggagaagggagcagcagagggaagaatcagaggtagaagaagaagactggggaggaggcggcggccagaacagccagccacgaggtagtatattatcttcttctgtttcatcatgctctcgatcgttcctagggtctgattatttataccacttcattacaatacggcccatccggccttacacggcccattccggcccagaaactctcacgttccggcgtttcacccgcggcgtccgtgtagcagctccttcctctagctcgccaccagctttgttgcctgctcccacgttgtcttgggtgtcggtgctgacattcccccgttcttgaaacgccgcttgtccccaagccggcgcgtgtggaaacctgtctttgagtgccttcaagtcttcccaggttgccaaggactcatccatgccggaccacagtactttgacttacgccaccgtcgcgccgtcattttgtatcagcctgctttgtaacacctgaataggtatctggagggcatcaggatgaacagggagcgaagcagcaaccacttgatgtctgctgattaccgctttcagctgcgagacatgaaaaactggatgaatttgagctaaatcaggtaattgtagtttgtacgcagcagcacccacacgttgtgaaatggtatatgggccaaaatatcggaaagccagtttt

SEQ ID NO: 13431 - DNA, 607 bp, Zea Mays
tcccgaaaacctcctccacatcagcgccccccgccatgcccctgtatctcgcctagcacacgccgcgcccacgcaggcagccgtggatctcgcccccaccgtcgagcttccatggtaggcatcctcttccatactaggcggccatggcatgaacccatcccctatccgcgcccccatcgcacgggccctaatcctagaatggtgccttcctccttctctgtcgcctctgccctactcagaccttcgagacttccactggcgatacacacccactaggtacgtgcaccccttctcctctattcctactatgcaaaaccaagcactcaaactctagttacgtattcaaatatgaagttgttgttccaatcgatgatcaaggagcagacacaactgatcgagctcttattggaattccaaacaccgctccactaaatatttccccataggtgtacgtgcaccccttctcctctgctcctactatgcgaaaccaaccactcaaactctagctacgttttcagatctgaagttgttgttcatagaaaggatcaacaagtactgattttctttctttttttgttgtttaagatttttgggttaattctctttt

SEQ ID NO: 13432 - DNA, 455 bp, Zea Mays
tcgctctcttgtcctctatatttatatggctttctaactaaacaaagaacgaaatgacttcgttctattgtatctttaaactaaacaaaaaattagaatgacttcgttttacctaacaaatacggaggagaatggttttattctcgtaatctcccgaccaaactacaaaaacccaaacaggacacgcaccttccgtgaacttctcgtgtcgcagattcgtgaagcagtagtaaaccacatccacatgactgacgcgggggttgcatgattctatcaggcagataaaaaaggcagcatcacacttcacacgccttgttttctcgaagggaatggctagaatatgacggacacattcatctcttttccctgccagccgttcgtttttttattggccaggtcgagtttttagatgcaattttgccgatgtcgacaggttttagctccacgaagcgaga

SEQ ID NO: 13433 - DNA, 1007 bp, Zea Mays
cggtgcctgaaatgacactgtcttccaaaaacaggatataactgtgcggtactgagctaactaatccatacccaagataacatcaaacgaccccaaggaaatcaccaagagattagctgaaaagacctcatccgcaagaatgatggaacaaccctggtagactaaacagctacaaatggagccattagcagaactaaccacgattggatgacccatcctctgcactgaaagaccagcacgcgacataaaatcctccaaagcaaacaaatagctagtgactgagtaaaaaagagcatgggcaacaaacgaatcaactgagaccgtacctgtcaccatgtctccctgctctctgccatccgcagagggtagcacataagctccagaaacacctgcggaagaggaagctcccggagtgaaattaacagaagaaccccacagagtcgaaggatgaggcagtcgtggagctccaaactgggatggtacaggagtggttggtgcaggagtaggcgcggccaagtactgagggaaacctggcataggcaggaactgaggagtcccgggcatatagaactgctgctgaggggtggtatagaattgatgcttagcgattgacatcacgttgacagtgccctgcgaagaggaaggagtcactggctcccatttgagcttcccattgggattcctcctacacaccacatccttgtgatcctggctgcagataaagcacctgccactccactaacactcggcacggcgatgcgcttcaccacaacggaaacacaccaaacccagcccgggcttaggaacagccccatacctctgagtactcccttctgaagtactcgaatcagaggattttctatgataggggtgatggcgctggtgttgcgactttcccctcttatgggctggacccctagtgttggccctcctcgcgtcctggccatgagactgatcaaaacccgaagacttctgagattccatggtatactgatgctgcatctcca

SEQ ID NO: 13434 - DNA, 557 bp, Zea Mays
gccttacttccttaataactatgaatgtgatcgaggttaaggttcggccttcgccccaacaggatggattagtcccctcctttagaggtgtttggattggagacactacgtgctatacctccatgatgcgggcttgctttatccctccaaattcggcggataacacaacccgttcctcgttccagatccatgtgatgcatacgagacattcagtgcagtaacatgacacatgtgctgtccctttcacccctccccttgtaggttgtagcgctggtgagtaatgctggggacgagtagtggcattggtgagcatgacacgagtgtagcagcagcgcgaggcgagcaacatcatggatgagcggcagcgttggtgagtgggagtggaagcagagtagttggtcatgacatgaagcaggtggtggcgcttgggtggacgtgaaggaaagagagaaaatttgggaattggaatgaatggaagctgctgaaatccaggaccacatcgtagtcatagtaatgaggaaaaggagagaaaataaaaagaagaaaacaattaaaat

SEQ ID NO: 13435 - DNA, 587 bp, Zea Mays
tgctgcttcaactctttgaaggcctgttccgcctcttcggaccaggcaaatgggcctgacttccgcaggagcttgaagaaaggcagcgccctctcagccaacctcgaaatgaagcggctaagggctgctagcgacccggtaagcttctggatgtccttaacacgggcgggaggcctcattacctcaatagccttgattttctccgggttagcttcaatgccccggtatgaaaccaggaaccctagcaacttccctgcggagacaccaaaaatgcatttctccgggttcagcttggtgcgggttgcccgcagcttgccaaaaaccagggctaggtcttccactatagccgacccttccctagtcttgactacgatgtcatcgacgtaaatttccaccttatcccagatcaggtccccgaaggtcttgctcattgcccgaacaaaggttggcaaggcattcctcagaccgtagggcattacaacataacagtatagtccatctactgtcacaaaagcgatatgctttctatcctccttagccatccgaatttggtggaaaccagagtaagcgtccaagaaggataagag

SEQ ID NO: 13436 - DNA, 621 bp, Zea Mays
gtccgattagtgcactggggcgcggattcagttcgccggcgatgtcaccaccgtgcgtgcgcttgcgccgccgggctcggacggcatgagatagaagatcagcgtcggccgttggatcgaaaccaacggtcacgattaagacagtatgcgtaccgcttcgagtaagtgaatctggaccataggttggatcgggcggccaggattgaccccgtggcgtaattgaatcctgtccgtccgtgcggatcgaacgcttggatggagtctctggcgggggtacatcacgggccattgatcttcaatcgtgcggtctgcacaggttatgggctcgggaatcgatctaggccatccaaatctaatcttgtggctcacaaacagccataccccttcacgaccgatcaattgcataagggcccctatacttttgattattcaacccgccatccattttacagtataaagaaaataagattaaatgaagactttgcgttttaacccctggagtttgtttttaggcacaaaattaatacaaaaatgcacaaaagctaggaaaattcatatcttactcatgttaactcctttttaatccatttcaattgcattagttccataataacattgttt

SEQ ID NO: 13437 - DNA, 543 bp, Zea Mays
acagggagaaagtgttatatgcatcgggttgccttactagccccgctgtggattggtgggatgcatactgtgctgctcacgttgctgctaacaccatctccttggcagaattctccactcacttcaggaattaccatattcatgctggccttatgaatattaaaaagaaggagttcctatcccttaaacagggaagcatgtaagtaagcaaatacagagacaaattcatccagctatcccgatatgctccaggggaggttgatgatgatgagaaaaataggagcttatttctggagggattgatcgggccactccaataccaattaatgtcccacacattctcatccttcgagagacttctagacaaggctatcgctctggaacacaagagagttgagctaggagagaagagaagggctactaacccaaggatgggctggaagtagttcatgtccccattatactgcacctcaaggcacaccagctcgtggcagttccgggcagtagactcaacagacccaatctactcgtcctcaagcaaac

SEQ ID NO: 13438 - DNA, 761 bp, Zea Mays
cttcacagcccttggtccacgacgtagcacggcgacagaccgagctccggcgagcctgtactggccaagacacgcaatggccggtgctctaacttggctgatacctaattcaacatctaacaaatgtttcccctcgatcaattgcacggttcgagctcccaacctctctgctcacggtgactgcgcaatccagggacaattcaaagtgttttcggcgatctaatgggttctaggttaattggccgggtcagggagtatcaagagcacatcagagtactgaaacgagtgaacagagggcatgaacgaacctgaagcacactggccacggtgagagcctttcacggcggcggaaaaccgatttgggggaagtgagcaattcagaggctctggtgaacgattgaaggcaagtgctggtgctttggatgggtaattaccctacggagctcatggcatactcaatttatagagtcagtgagcagtggtgtccaattcgaagggattgctggcggccgagaagggggtgagtcactgcagtgatctaccgtggcgatcgcagggtaattgagctacgacgattactggatagtcactacggctcatgatgacgcgataaacgtcctaaggcgtggcgcccccacggtgaatggtgaacacgccggtgatggtcgctcggccacgtcgtcggtgcgaacagatgaataaccaagcgcacagtacttccaagctcatccgcgacaagatcttttttacctggggatcat

SEQ ID NO: 13439 - DNA, 477 bp, Zea Mays
ctagatctcagattgcatcccaattgtacaattgctatataactttagtgatcagtcatttcttttggttaaaaatatagtttgtctactttattctcatttcttttggttaatgaaggaacttgtaggaggtccatgcaacataaaggtagtacttttcacagatctagaactaatcaatgaagaaatagttggaataagatctaggactaatcaatgaagaaatgaaacacacacctatctttatgcctttgactctatcaatgaagaaaactcaaagaaatatgtttgacattgagtttgtctcatcaattattcatgccgatagaatagccaacgattgctccaatcgacccaaatcgagaaatcaatcacctattcaccttccatcaaggaactggggagaggcttccatggagagcatctgcggacagcgagagcagcacaaaaccacaagaccggcaggcaagccgcaag

SEQ ID NO: 13440 - DNA, 660 bp, Zea Mays
ggtggttccgcagccaagggaggatgaagtcgttgtttttaagagcttcttcagggcggggctttggttccctctacatgagatgataggagaggttttaaagaattttgagatatacgtccattagttgacacccaatgcaatcgttagacttagtgtctacatatggcctctccgaagcctgggtatgagtcctaatgctgaagctttctaccaggtgcacgagctgcactaccaaacgaaggccagagcggatggtcttcataagaactttggctgctacaacttcgcatatcggaaagatacgaaggtcccggtaattggctatcataccaagtggccgaccggttggacaagcaaatggttttacataaaagcggacgagaagaaaagggagaagctaatgactatggtcatgagtccattgaaattaagcttcaggatgacaaggcccttgtgccacatgcagcttggctccccatgctagctagccgaagtggaattcagagtggtagctgcagaaattagcactagagatctagtacaagagtacttggcaaatagaatatttccgacctctagtggctgggaaatgcctaagaaaaaggaggggggcaaaaagtacgaacttgttcggctcccttatcgatttaaatttga

SEQ ID NO: 13441 - DNA, 308 bp, Zea Mays
attgacaaaatcagaaaaggctttctttggagaggtcgcaaagaggccaagggtggtcattgtcttgtgtcctgggggagagtttgtcgccctctcaggcttggtggcctgggcatctccagtctgcccgagatgtgttgggctcttcgtatgagatggctgtggttgcacaaaactaatccatctcgtccctgggcgcagctcccttttcatgtgccgaataaggttcgggctttcttctccactgttctagtttcagaagttggcaatggtgccaacacccttttctagactgataaatggatctc

SEQ ID NO: 13442 - DNA, 645 bp, Zea Mays
gtcagggcacagattgaagacaagggtgttcaggttatcaaggaaatgatcaagtagaaagcagaaaaatacaaatgcttccggcgggacagcaaaggaatcttatggtttggagatcgataggttgttcccaaggaccctgagctcagaaagaagatattggatgaggctcacctttcaaaattctccatgcacccaagcagtaataagatgtatcatgatctcagatccttgtactggtggaccagaatgaagagagaatttgccaagtacatatcctaatgtgacaccagccagaggatcaaagccagtcatttgaagacagcagaccctttgcaaccccttcccataccatcttggaaatgggaggacatttgcatggactttatcgttggtttgcccaatacctcccggcaccatgattccatttgggtcattatagacagattaaccaagtcagctcatttcttgccggtacacaccactcataggacggagaagtatgcggaaatctacattgaccagatagttcgtttgcatggaataccaaggactatagtatcggacagaggagcaccatttgtggcacgattttgggagcaattgcaggaatcacttgggacccatgtaatacgaagctcagca

SEQ ID NO: 13443 - DNA, 405 bp, Zea Mays
ttgtagtagctgtatgcttgtaatgaactggtgtaatgaataaaataacttggttgaaaaaaaattggcatatgcataatagtaactctctccccctggcagatggcttcggataaaaccacgcctatcgcctccgggattggagcagggttcccctaagagctgaaggagaagccggtggagaagggagtgaaacccacctccccgcacctccagagctacccttagatttagcccaagttctagccaaccaaacctgactcattgaggtcctcactagaagtctggagaatcaacgcccgaatggtggaagaccacaagacaggatgggagattttctgaggctcaagcctcccacattcgctggatctagcaatcccctcgatgctgatgactggctgcgca

SEQ ID NO: 13444 - DNA, 376 bp, Zea Mays
gagcacctggtgatatcatggcttcaccctctgctgtaccacactgtgcaaaaatagtgcaaagcgaacactcgaacccacacccccttgctccaaacatttgggggtaaccactagaccacacataccttagtgtttataaatatctcaatacctatttatatatactactctattaagaacctaatgtgggcacctggtgctaccacaactttaccctccacgctaacattctaggcccgccccacgcgctgccagctattgtgtctgctcagcacccgactccacccacacagctaccacaccgcgtaaaaaagtgcagagtgagcacttgaacccacacccctagctccggaaatttggggctaaccaccag

SEQ ID NO: 13445 - DNA, 320 bp, Zea Mays
attaaacatgagttgatgagctgatggggtgcagatgatactaaaatacatgggacgagtaccaaagagatggacgcggtggccataaaaagaaaatttttctctgattgaattcacaatcattaagttctttgttcattcttgttcctgctagtttgctcatctatatcgtctcccagctctcacctgcttattcaccatgcaccaccgtcgctcccttccccgctctcgcaccccatgctgcgtccccggacccaaacactgctattacccatcgccctagtctccggagtctacaaccttgttcctgtcaatcctcc

SEQ ID NO: 13446 - DNA, 699 bp, Zea Mays
ttcgccttctgccatctcgagactgtcttgaagagccgtcttttcttccttcaattccttgatttgctgctctaggctttccacccggagtttaagtgggtacagtgggagaaaaggtcgtcatagtggttgtcaagggtgtggagatatcctgccatgtagactactgtagggtcatcttcattaggatctctccctgacaaggcctggagtcttttcctccaagcaggagtatttttgttgctagatggaaagtagcgaaggggtgtctcagagacctctctgctgtagttttggcatagctggcggagggctttttgggcagcattctggcaggtgtctagggagcagtgtccagtggcggtgatctgaaagggagggtgatttgggtagttttggctttctcccaagtagactgccatagagcatttctcaatcccgttctcgtggtattctttccagacatactccagcttcttgcggatccccatgcgaagcgcacaactctgacgaaggtgagggaatccttccacctccgagcaataggatgtcttaaggacaaaggtgccttccatctggtagcaagagaagaagggttgttaatatcggggaaaggagagaaggttctttaagaggtgaagaggtcttttcttttgaggaaagctttttaggtcaaggctgtggtctacggccagtcct

SEQ ID NO: 13447 - DNA, 512 bp, Zea Mays
attgacaaatagaataactctaagaattccaacacatgtttagccgtcgctgagtggtcgttgccaaggcggccgagtggctggactgctggttgagagtgtgagggaaggggatcggggtcaggtactcaggccgtcggcgcatcgagtgagtggcggcaggcgacgatcaagaggattgggatcatcgggatcgagcggcgacatggttagaaggtgaacgaaaggcagagagagaggcaactatggttagggttttcaacaaactcttcttgagtctgagcgtctgacatgacgacgatggcactttgtataacatgggatgcggggacagggggcatggagtcgtcaggccgagccagatgtccatatgggccacacaaagggtgattctcataatgcttggagttggaccatcgggatgcaaacaggctgggtcgggttgggcaaggcttttcgggttgatcgggcctatcgaccagctaaatggaccaagcagtattcatgctgtg

SEQ ID NO: 13448 - DNA, 1040 bp, Zea Mays
atcaacaccgtattttcagacagcattgttgagatgagctttcaacttctaattcagtcaagagatattcatttgaaactggaagtcaggacaaaacatctagagtctgcagttaccaattcaaaatgcacggtgttaccttgataccaggggtacctgaaaaagactatgctagagctagataccgttaccaggtttgtactctagactgggcaccaccacgttgtctctgcgcaccatgaaagcacagatcagcaacaggcgtggtggttgcctggctctcaagcttgctgaacacgaagggcgaggaggggtgggcaccttttcactctccgacaactctctctctaatcattgacatcctgcttgaacgaggtatgacaattgcagttcctaatgcttttattaagtttcgacatgccattgcatttagacaaacaattatgcattaattagagctccttgaaatttaaaattctgtaaagtcatttctatttgttaatggacaatttcagaatttatccaagcttttacctctgttcttaactgtaagttgatttggcttgttcagggatatagcttttgctatgcatctatattacactatctctagatacatagtaaacctatggatctagaaaagctaattccacttataatttggatcggagaggggattaattagcaccgaaattttgcctcaagttaataaacactccatccttgctacctggaagtatcactttgacttgggacatttgaagcaaactacacgcctccaaacactgcgcttgttatgtactaaaatggtttttagcattgtttagtgccatgctcagctaactagataatacaaaggaaatacaagatcatgacagggtcaagtgcccatcattcatcctatcacaatttgcaagctacatgttagaaaaggagaacagctgggcctggttgcatatcatagctggattcatataaattgtttgtattctgttacattatcaagtcatgctggtcaaaatagaatatctcattaaata

SEQ ID NO: 13449 - DNA, 524 bp, Zea Mays
gtggaaatcgcgcccaccatgtcgacttcggtttgatttggctagaattccgccctcaacagagtataaaagcgatcccccttgcccacctttctacctcgcgcagtcacgccgcaccagtgtccgccagtgactagatctgccgcagccgccattgccagccagcgaagtacagggacaggagagggattcatacgaagaagttgagtgatgtgaggtagccgaacaacgtcgggtcattgcgaaccttctgctaccaccagaacgacggatgcgttggcatagctcggtgaatttctcgccgggattccgccacgtcgagattccgcttgtcgccgtggatcgtcgtcccctctgcgcgcattgtggtatgagaccctggatccgtttcgctttgtttctacctgcgcatagcacgtttgggggaagaaagttagtaatcatggggccgggacagaggtctccggtgaccttccaccgtgacatagggcggcgccgccgtgctttgttggccaggatggatg

SEQ ID NO: 13450 - DNA, 864 bp, Zea Mays
cacgcatgtaccagtcattcaaccttttagtactagcagggaccttcctcagtttctcaagagttagtagaggtctgcccgacacatattgtttaggcacatttttataatctgccttagttgggatctttatctttgcggccattgccttagccttttctgcagactccttgtgctcggccaaatcaatagtatgtgacgtgaggtcccgtgcaatccatttcaaaaatcgaactatgccagtagtagtagctttactcttctttttctcgaatgtggacaccaattttggtacatggattttagatttcattgattgtcgtgaatcccttgatggctgtggagaaggtggtggtgtcctaaatattgatgcttgtggcggagacggtggattagaaagaggatgaggagcagcatgtgaagattgtggaggtgatgatggatgtacaagtactaaagtttgaggaggcagagatggttggggatgagacgacgacggcgttggtggatcaaccaattcgacatcccttcgaggccaaaggatgaaatttttatggcttgtccaagtgtctcgattttaatgtcttaaatcactcttctttttcggcatagttcctacataaggttgcccaatctggcaccttcattcatttattcttgttccccggacaaacctactcagtacaacctgtgatgcaagacaactgcacctactcagtacaacctacgccagaagcgtgccaaaacaactgccacgtcaagttcttatgtgcataacttatcttgtttcttttactacatgtcctttgtttcagaaattgttaaatgcgcctttgtattcattgacctacaacaagttcttat

SEQ ID NO: 13451 - DNA, 2113 bp, Zea Mays
tgcaactgacaagccaatctattagccataagcttagacaccagctttgcaaaactatgaataaggctgataggtctaaaatctttgacccttgtcagccccttccaattttggaatgagagtgatgtaagcggagttcagacaattcatgttggcaaactttctagcccaaacacatgatattgcagccatgacatcaatcttgatgatggaccaacagaccttgtaaaaacgacctgtgaacccgtctggccctggcgccttgtcaagaggaagactaatgattgtattccatacctcatccgccgagaaagggctgtcaagagcttctagatcaaaagtgggaactccaagctgttccaaatcaaccacagcccccctattaattgcagaaccaagcagattcatatagaaatcagtgaacaagtccgccttctcttcctgggcagtgaaaacctttccatcctctgagacaattctagggatgaaactcttagctttgtgatacctcgcatgagagtgaaataaagcagtattcgcatccccatccttcaaccaacaaatccgagatctcatccggaccaaggaatgccataaagacgcaagagcaagactttgctgctttagactattacgcaaccaaaattcttcaggagaaagacttctactgtcctgagctatgtcgaactggtggagcagctccctggcaagaccaagctgtgatctaatatgaccaacctttttctcgccccaaccttgaagagctttagtcgtggccttgagcttcatggaaagagtgagcaacggacagtgactagcagggacagcagcccaggcttcctcaacagctaccagaaacccttccaatcttgtccaaaaagcttcaaaattccttgcacaatatccttaagccccagaagaagcaggcaatgatctgaatcgaatgaggccgaactttgcagcagggcccaagggaactgatcatcccaatccaaggagcagaaaacacggtccaatttgacaagagttcgattatgctgcccattcgaccaggtgtacttacgcccaaccaaaggcaactccttaagagccaagtcatcaatccatctccggaaactatgcatcattggcctatccagattggagttatttttaccctcatctttataaattaaattaaaatccccaaggaccaaccaagggccagaacaggaagcacgaatatctctcaattcttgaaggaaggcaattttgtcctggttgaactggggaccatacacacaagtcagccaccactcaacatcatcaacaggatgaaaaagaattgacactgaatgatcatccactctagaaacaccagaccaatttatatgatctttccaagcaaccaaaatgccaccactagcaccaatagatgggcaaaagacaaagttggcaaaatctggtccaagcatccgaataaccaaaaaacgagaaatatcctacattttagtttcttgtaaacaaaccacatccactccagaggagacgacctcagcccttacaacatcctgacgagtcgaggcattaagcccccttacattccaaatgagaatttttgaaggatccataaaacactagcttaagacgaccaacaaacccgcaacccaaggaagaaaaccttcctcaaaaagtagacacctccactaccaacatctcttctagtagagaccaaccgaaaagagaggcaagagcttggatctgcacctgggaaagagatgtgctgaaaatgcgactatattcatccagcgcctcttgactcagagaatctccatcacggatcactcctagtgtcttcataatggtcttcttgcttttcttgatagaagataggcgttggtgacactcgaccccgatgccaacaacacgcctgttgcgcctaggagtagccacccgccccccaggcagtttcttctttctaggggggttgggggcagggttctccaacacagcatcgacctctttggtaatactggacaagaactcggacacccttgaagttgaaacatcaacagcagaagtcggttgttgagacggagagctccccaaggctgtttcctcaaccctcctcgct

SEQ ID NO: 13452 - DNA, 962 bp, Zea Mays
catctaaggctacagggacaactgctaaaacttccaatcgacgtagtcggatgcggtccaggctccttaaggtggcgatcgcctctcatcggtctatgcttattgtaaagctgaaggcttatgctataagtgtgggttgccatttcataaaggtcaagaatgcccaaattcagttcagttacatcttgtggaagacctatggaatcactttcagtttcctgttgatgacactacgccgctacctgcacaatcagaggaactccattgtctgcactggttttctttagaattggttggcattcctgtctttaagtccatgagatttgtgggggacgttagtggtctatccatccttattttgcttgattttggcagttctgcatcctttgtcagttcagtcatggctgattaattgccctttgtttcaactccttgctccccaattgtggttcaagtggccaacggtgacaacatgccatgtgctcgtgaactggtgaatgtggtttggcccattcaaggacgccagtttgtttctactataaggttttggctctatagcactatgacataatcattgcgatggattggctctcgtctaataatcctatgattgtgcattaggctgataagtggttgacactttccaaggacgaagtctttgtcaagttgtatggtgtcaagacttctaatcgtggggcttttgttcaactttgcaacattgttgacttaactgatgaagataggttggttgccaggatcttcccctggagttgagcatctcattgacaagtattctatggtgtttgcacttcctcatgggctgccacctacacgagattgtgaccatcaaatttcactaattttgggggctcgaccggtgcaaatgtgaccatatcgatacactcttgtcccccaaaatgaaatagaatctcaagtgtctgacatgttagcttctggactca

SEQ ID NO: 13453 - DNA, 336 bp, Zea Mays
tatgaccgtgtgagagatcaccgagatctcggtctcgggctgcggtcgttgccgtgctggcttaggccccttctcgagatagcgcggttggatgatcatgcgtcatgccaatttcgtctgcttagcaggctgggattgtccttgatcaccgaaatttagcttgtcatgtgatcgtttgcagcatttcatggtactgtggttaactattgcgaattgtgatacctagtgtgcctggtgggttggttcagttgtggcattgccgagtatccactatcctgcctgtttggcatggagggcttataccgatatatggcatggacaaatactgtcatggtg

SEQ ID NO: 13454 - DNA, 1381 bp, Zea Mays
cttggatgtgtttggttcctttaatcctgtacctatgtttactatttccatgatctattatttttgatacagatagtctctttaagagatatatatcacagcagcattgatgcgtcctttaagaacccgcagcagcgtcgccttctgcgctttggtctcactgatgggatatgtgaagcagtagccatagagttttctcccatcccattcatcaccgaagagatagctccaggtaccaaggtcagttgaccgtgttctgcttctacctcaattgtttttgtagacaattttagtcaaatttgatagttttcaagtgtaaactgtacatactttcctccctctgccactgcctgccatctgggtattgactattgttcatgacttcttgttcagttctgagtattaatgccatcagtgccagagaccagagagtagcttaacaacatttgattaaattctgagcatgttagaaatgaataagtaaacaagaatactcaggtagctctttgtgcgacagtatactatccttcagaatgaaaacaaactttgaaaaagataaagtaggcacactaatatttcaacttaatgatgtaaacaacttatttttgatgatgtggcattaacatggggttgggagatagcattcaattgttcccattggttacctgccactttgcaccatggtctgtctaaattttcttatgctttttctaaacctcaataggaaggcctaaaatttggctaaaaatgatacattattgttctctgtgatcatttgaagactggtatttacacttcctcaaatatacagtcgttgcccgcctgcagttcattaaatactagcattgacatgcatttttttacttttcttgcccctttatagattcgcctcgagaatagggttccaatcaataatggcatattgtgcttaagcgcgaaaaatgtgactgttattgggggggctgtccaatcattgtatgaagaatggcagatgaaccagaaatactctggcttatcccgtccatcattgaggttgtctccaagtgatgatggagttgggcctccaccatttgagaagttagacattgaagcacgcccctgcagggaaaccaaagttcaagcatatcctggtaatggttaataccctcgttttcactcctgcactcatgctgttcactaaatagatgtggaagttatgagttgcttgccttaagtaaaatacagaaacacaacaacacagcctttttatctccactcccaagcaagttggagtaggctagagatgcaacccaacatgaggcacccgcaaaaacgaaaaacctgtgtaaaaaacatcattaagtaaaatatagcaccagaagtcaatgaaaatttgcatttg

SEQ ID NO: 13455 - DNA, 343 bp, Zea Mays
ggcgagggcaccaaccaaacatgccctgcatactgagaaactccctacgtccctacacatctgaagcctaggaggtaggtctgggcaaaaacccgttacccgtaatccaacttcgaaattcacgaacccagattcgatatacatgtacccgaattacccaaccactggttcagatattaagtccaaaaacctgttttttgtttgattaattcagattacccatgccgatacccgatctccactaaattacccgaatttctaaaaggcatctccttgcaggctgcaacccaatatcttatgtttctaaccctaaccggctaaccaatcgattactcgaccactc

SEQ ID NO: 13456 - DNA, 1111 bp, Zea Mays
tatggtttctatagtaaaatggaagaccatacaatagtgaacaagttttcttaaataaggttgactttgtactgcatgaaaagtggagtaatagttgcttaaaactgggactgtcagttacagaaactgaatttcaatcagtgcctgaaaactgaagttgcactgtttggtgtcagtttgggaacacttttgtgaccattccaccaggtgttaggctaagaactatgtaacaaggttggagaccaagtaaagaagtacaagttttgttatgtgggtctgacttggtgcttaacaaactttagagtaaaatgcacctaaacttcctctgtcagactgtctgggggactgtttcacttcagctgaaactgaacctcttagtgtttttgctctacttttgtgtcccataatttttgttctatgtggtttcagcctaggggtattgtaccaaagtggaagagcaatgattttagagtactttttattagggaagaaggggccgttgttgaggaagtttgtgagataaagtagaccaaactgggagctgtgcaatgggacactgatgtcagggaagttgattcagtgtttgggataggaaattgaggaagatttttctccctttcctgtgctccactggtgtgctcgagttgggatacgggtggggtgcaaaaccaaggatctagtgacttcagctctgcttcaaaatatctagttttggattgtttgggagatgtggacaaaagagatcatatctgttttgtctactatctgcagatatctactacctgcagatttggaccaagtgatatttgtgtgttgggggcattaaagtttctttgctggttatttgaggtaataaaaaggggagctgaacttgaggtttcagtcgagtagaacagcaggagcagttttagaataatctgatgaaagtatctccatccaccaaattgatatagggaattctaggatatgccagcccaaaagagacttatgagaatggaaagtttattgtcaaaaatcatgataggaacgggggtgcccgattttccgtcaggtgaaggtaactatcgatttggtggagatgtcacacaaacgatccggcttccaatcaaca

SEQ ID NO: 13457 - DNA, 714 bp, Zea Mays
gaagggctcacccgcgggatggagctccggggacggacgacgattccggacgggtgacgcggctccaggcagcggcgctgctgcacgggcgggctgcgcggacagggggctccggcgaacggcgcaactctagtgtggcatgacatgtcttggggtggtatctccatacgcgagctcctacacacatgctgctacatggctcgaggcgagaggtggcgtgagggagaggatctaggcgagtatggcaaggagaggcactgagagttttctcaactggggtcggcatgggcggttccacgaacaagtgcaacgtgggcgccggatggagtggacgaatggttggagaagaagtcagggctggtctggtaggtgggcctcgggttgcagcggcagcgggcaccacgcgggactggcgctgggtgtttacgacttgggtcacaggggaaaacctggccgggactgggagttgggtcatgtggctgggctggcgctggtcgcgcacggggtggatatctaaaaagagtgggtgtgggaagtggttaccaaatttactgtggattgtgtgagaccatgaaagatgacgacaggagttagataagtggtagacatggttagataaaattagacaaagatagtaggagctggcccgggggccaaggatgacgaggtagacgtcgaaggggtagacggggatagacgaggatagccgacgca

SEQ ID NO: 13458 - DNA, 644 bp, Zea Mays
ttgtaatcttttgcatactcttgttgatggtgctaccatattcttgaaaccttccacattgtccatctgagcattcttctatctctggatttgtcccttaacaatcacttgctttgaggttccatttggatacacatgactagatccagtttaagattattgtatatcttttgttctagctatttctgttgtttttctttctatccatacattatcaatttgatgatcctgacgatgcccctgaggtgcatacgcatgatctcgcaacaggtgcagaaaatggcacccaattactgccctcgaggtgttgttagacttaatgggtcactacgcgaacagtcagtgtagttctatgcatgcatctacaataacaggttagtagtagtgtatttgtgcatggaccccatgttttccttttcattgaaaattgaaagcttgttctttttttactggaagatatgttctcttttgacaccatgaaatgtcgtagattgtctctcacttctgctttgcttcagtacctgtcttttttcccatgtccctaaattctaagctatgtgtggtgtgcgctgtgcctgcttccaacaattgggttaggttcagtgtcaagtatgtagattatacttaagcacacgacatgttct

SEQ ID NO: 13459 - DNA, 458 bp, Zea Mays
gaccaatttctcttggcaaggttatctttagttaaggttaccccttgtcttaagaaccagaagaagatcttgatctttaaggggagttttagtttccagatgaggccatcctgccgtacttgtccgttcccaatcaatgccgcatacatagactgagtggagaacaacccgttttgatgaaggctccaacgaaaactatctcttgcctggttcaacgtcgtatccactactaggctgactaaggtatgccatctctccaaattagcaccatgtaagcctctcttgtaggatacattgagaggtacagaccctagcacattggccacagtagcattcttccgctgcactaggttatataggctcgggaatctatgctggagcgagaaatcccccagccatttgtcctcccaaaaccttgtgtcctgtccattgttaactcggaatatcccattcgcaaa

SEQ ID NO: 13460 - DNA, 314 bp, Zea Mays
atggttgtactcataatagttgttttgcaactatccgggaggggttacataggaactacccttgtgcaaacagcctaaaatgcttaaataatgcctctttgttgtcggggaaagggaaaatctcaagcagagtggtgccaacaagatgctctttgttggtggtagggtatcattcgcaaggttcacttgaagctttctaggatgcatgaaagcaagggatggataggatatgtcatatttctaattggttaattaaatgtggcttttggcatttgttattattagtatattatctggcaatatgtgttattaaa

SEQ ID NO: 13461 - DNA, 738 bp, Zea Mays
cttatagagaagagaggaagattagggacgacttatttcttaatccaaagtggtctcttgtacatgcatatatagccaacagaggggggccctcctacattgtaggactaatcttaacaaggaaataactaacaaggaaacgaactaacaagggaaacaactaacaaggaaataactaacaaaggaaacaactaattaggtggctaactttcctcctagccactcgcctgcccttcctgtgtcctggctgcgcgctcggattccctgcgcacatcacgcgctcgcctggcgtacgtgcgcccacacatcacatctctcccgccgttgaagaccagctcgtcctcgagctagaaatcagggaaccgagcacgaaagtcgttgtaatcctcccagcttgctgacgcagctggctcaccttgccactggaccaacacctgccggaccccacgagccaggcgcccagatatgaccgccaccggcacgggcaccacagcgccgttgtgcgttgggggtaatgctgaggacgttgcaggcggtgtgccgacgaacttcttgagcactccaacgtggaacacatcatggaggcgggcccctggcggaagatcgagccggacagccacggcgttgatgacctccaggacgcgatacggtccaacgaactgaggcttgagcttgctggtgatggtacgtggtagtgatgatgtcgggcgctgccggagtcggagtagtgcccagtca

SEQ ID NO: 13462 - DNA, 592 bp, Zea Mays
gcggggacaggcgtggcagttcggtgaccatgggcggaccggtagtaattgcatcaacgggcgcgcaggagcagcgagccaatcgccaatcaaactttggccccacctgcaggctcgtgtcttcccctgaggcgggcccgggggccactgttggtaccctgaattaggggtaccccttactacagtatgaaggcacggtgctcgtacgacgatttctagccgcacagtgaacaacacccgaccccaccacgtggacggctcaaggggcaccacatgaccagaaaagaggatataccctagagtgccatcagtagggtcggacctccatgaggaaacgcaggacccctgtacgcacaacccagacccccaaatacggtccgagactcccaagtagtgtgtcgggtcccttggatgggatccggatccctccgaataaggtctggaccacccataacgaggtcccgggacaggggatatcctggtctaagcaagggtccggtactggcacgtgtcctggccttatcttgcacttgcgctccccgctcaggcagagacccgatgctgccacgtggtttgttgcccgtgacgtaag

SEQ ID NO: 13463 - DNA, 437 bp, Zea Mays
gacacttgcacgatcgagtgctgtgggttgttgtggctcatcagtcatcacagacggggtcggagcaaggaactgaagtacgtacgaatcaaagctcagtccatgatagtgactttctccatcgcgtcgtttactagcttctccaataataatggcttctattacgcttccctctttcttctgcccttacgatacaatactgcaaagtgggcgctgtacgttcctgctgactgatgcctttggaaccagggatacgagtgagctgagctgtatggaaactaaagctgatgctgattagaaattacgaagttgttgccaactgccaaggcaccgcggtagcgatagagaagtcgaaaatctgggggcgcgcggatatatctgaatctgtgtacaaactacaaaaagtgaggagattccacttgtttgctttctttctg

SEQ ID NO: 13464 - DNA, 695 bp, Zea Mays
cattattaaaaaatttagaaacttgaatgggttaatttggacttcatatgaattttatatgaatttaacaacttttacaattatttttatactagatattcattttctatttcatttatttatttccttcgagtcctggatggcgcgcataattttcgaagagtacaaggttaaaacattaagattccacagactcagggttataccgtgatggattgcgggttgattagtccaaaaaacaagggttcttatgtaaaacggatggccgaagggttaccggaggatttgagtcatccgatctctgattgatggtgcagattagattcacgcagagttatgtatcatcatgcgctcactgcccttggatcaaggatcgatggcccgaaaccgtccacgccacagggcaagcaagggcacccagatctatgatctacggtctagattttataacagcttgattcgctccgcacccacagatagaagatctacgaccctgattcaatatcgcgaaaaggtatgccaagatcagatcctgaccgcctacacatggatcaacggtgggtatcagatctagtaaagcaattaccccgacctaatctgagccctacgctctgcatctaacggctagcgcgtcatcttcctcctcatgccagctcacagcagtggcgccagcaccgcgcggcagtcaacgccgg

SEQ ID NO: 13465 - DNA, 669 bp, Zea Mays
gaagttaagccattgattggctcggctgaaggatattgtgtgctccgaccatcggtaaggggctagagcgttgtttatggccactagaacttgtcgatcattgagtttctgttgccttttgttttcttgtgccccgtgccctccgaatatgacatttacctccttgtcaatgtgtgggaaggctctgcctttacctccctcctgctgctgaggctgcctaggctcattaggctctcctcaaggagggggaggcggtagcggctagaacggttggccatgcccaacgaagtttttgaaatctctgcagtttcgtagggtgtgtcggatgtccttgtggtacgggcactgggagtcgaggatctcatccagtgtccttaacccaccatggggcgtgtcgcgggctcgagttgtaggtggcccggcggtgtgcacggcctccaggggtgtcttctcccagcgtttgtctagttactggtttgtgtcctttcgaggcgccggaggtacgggcttcgtgcctccaatgagatcttgagcctactcattcgtggtgatgtagatgtctgcctccctgaacagttgttcagaggtggcatgtgctttttaaagtataactcggacgaaaaccggatcattggatccccaatagaattcttcgatcatagctgtctc

SEQ ID NO: 13466 - DNA, 647 bp, Zea Mays
tcacacttcagaccagcctgatataatgcatgtggtttatttgttgcagtctggtagtgacactcaactacccgacaacttggatccaaggttgtccctggttctgcagtaatttcagttagttttcaaccccccagaaggtttgccaccatcccgtgcttgtgatcataccattccacagctagtgtttatccatccttaccggtatgcacctgctatcaaggatgagatcgaagcccaggttatggagatgctccagtcagggataattcagcccagtaccagtccattttcaagcccagtgttgatggttcgcaaaaaggatcagacctagcgtttttgcgttgactttcgccacctcaatgctctcacaatcaaacggaaatacccagtcacaatcattgatgagtttttggacgagctgcgcggggctagctagttctccagtcttgatctgcgagctgggttccaccagatattactcaaggagggtgaagagttcaaaacagcctttcagacacatagtggtcactacgaattctgtgttatggcttttgagttgacaggcgcaccagcaactttccagagtgcaatgaacaacaccttgttgccggttttacgcaagtttgctctagtatttttcgacg

SEQ ID NO: 13467 - DNA, 321 bp, Zea Mays
tggctcgtcggagtgactgccacggtagatgccacagatccacgcacgccagtgcccttcctttcctccgaccgccgcgcatcgtcatccaaattcccggccaccaccgttgagccctataaattgaagtcccaaccagccccgcaagatcgtcacccacccagccaccgagaatcgttagcaatcgttcgccagagctcgtgaatttcgaattctccccaaactggtctccgccaccgcatgatcaagctcgccgtggccagctcgattcaggttagcccaagttcctctgctgcttgttctagcatccttaggtacccc

SEQ ID NO: 13468 - DNA, 469 bp, Zea Mays
gctcctgactgcccgagaaacttaagagccttgtgatccgtccggatctcaaactcgctctgttggagataatgacgccaacgatccacagccataatcagggcgatgaactccttctcatagatcgaaagcttctgattggtaactcccaacgccttactcaagaaagctataggtcgcccctgctgcatcaacaccgctcccaccccatcatcacaggcatcagtttcaacagcaaagggtatgttaaaatcaggtaatgccaataccggagtggaaaccatggcctgcttcagacgctgaaaagccagttcagcttctggtgtccacttgaaagcccctttctgcagtaacttcgttagtggccgagcaattatattgtacccttgcacaaagcgcctgtagtaccctgtcaacccgagaaagcctctcaaatccgcgacattcagtggtgtcggctacttgagca

SEQ ID NO: 13469 - DNA, 516 bp, Zea Mays
cccagttttcccatgcggcccatactgcaggcttgggcatcacgcgccgacaggcgggtcccatgtgccagcctcactctccccttggcatgcgtcttcagctcgttgacatgtgggaccatcttgtcatctctatcccctccaccgtaacaaaccaaaaccgaggtagccgccaaaaccaaatccgtggattgtaactaacgccgcggattaaccggggttttagctcggagattaagctatcccagagcataaatacggtgtgccgcaccctcgcagctcctccaaatcatgggcaacgtttgccaccgtgagatccgagggaggtgagaatgggccgccgtcggcaccctgcgcatacatgcccacctagggtctggtggggagtcgcgggtgatcttgtgggtctgcctaagctatccgtgcccttcccgggtgaagcaacccaccagagcaccagtaattgctcgccggtggccgggcgttgctctgttatcgccctgcgtcgtggccgcg

SEQ ID NO: 13470 - DNA, 554 bp, Zea Mays
attgagggtgaaatcgaagcatttgatgaagtgctaactggcagggggtatttttgtgcctgtgtaggcgctcgggggggctgtgtcgcactggaaaagctggttgtgaacatgcgaaggttgtaattcatccagaattctcagtttcagcagatgaaatcaaagaaccttcagccgaagctaccgcccttggtgggaaattttattctgaagtgtggatgaacggcgaccgagagatagcagacgaagctatcaggcaaagcgaagaagaatcacatcttgcttcagaggaagcaagaaaagctgaggaagccacagagcacgaaaggcgtataggtacgtttgttatattttagcttcgtaagtactttagcttcgtatctgacaaaaacttatattttggtgtagctgaactttctccttctttggagccatatgatcctgacaccgatctagccctgaaaggtaccttcgacgaaatcaaaatagtgaatgcagcaatagatgaagttgtagacaaacttctaaacgaagctattgagggagtcctgaag

SEQ ID NO: 13471 - DNA, 1364 bp, Zea Mays
aacccaccaagctgaagggggcggcaaacctttctccaagctacaaggcagtgcccccctcttacctcttttcgacctctccaaaggaaacctttccttattttgtcaatggcttctaaaccccattgtgggatatccactgccattgccatataaaccgtcatgctggtaaggacatgctgaactaggattcttctccctgccttcgtcaataagtctgccttccaacttgaaagctggtcagcaaatctatcaataaaaggttggaactgctgcctagataacttgtgcaaggatagaggaagacccaaataacggcaagggaacgaagatactccacaaggcagcagaccttgggtctccaccatatcctcatttgaacatctgataggaatgacattagatttatgggcattattgtgcagcccagaggcatccccaaaaagctgaagaatgccaagagtgatagataaatctgctgctgttggatgaacaaaaagggcaacatcataagcatataaggagatccgatggagctctttcctgttggataactgctggagtaaaccatcctcctctgccttggaaaacatacagactaggacatacatggcaagaataaacaataaaggagataggggatccccttgacgaaggcctctccggtggatgatgtgctgtcctggaaatccattcagcatcacttgagtagaggaagaggccaacaaaccacaaataatatccctccaaatctgtccaaaaccaagctgctccattacttcaactaggaaaggccatgaaactgagtcgaaagccttagtaatatccaacttgtagagcaaagtagccttattctgtcagtgaagcagtctagaggtttgttgaaccaacataaaattgtcctgaatgaatctacctttcatgaacgcactctggttaggtgataccatctcattaagtcttttagccaacctattggctaggatttttgtgattaactttgtgaagctatgcacaaggctgataggccttaaatcctttcaccatttcagccccatcattttttggaatcatggttatataggcagaattaaggcgcccaaaattatcaaacttcctgccccaaatagcggagattgcagccatcatatcagctttaataataggccagcataccttgtaaaagcgaccagtaaaaccatcatgcccaagggccttgtcagcagggagcattttaatgatatcctccacttcttgctcagaaaagggggcatcaagctcagacagctcaaaagtaggcattcccaaggcatcgagatcaatcaccctatctcgatcaatacattttccaataaggttggtgt

SEQ ID NO: 13472 - DNA, 414 bp, Zea Mays
ccgagtcaggtcgtgtctggaccgtactttttcgtgtcatacctcggctagtccatcatattagtgctaaatggtcatcggaccatgccttgtcgcgttcggtcatggctgtgccgccttctgctaacgccgcaccgaatagaccagagcaggctattcagaaattgacaggtatgctatttagcagaacaagaagccccctattaggccctaaatcgttcacgtatatacaaatacaaataaaattatatatttgtagcgtatatgatagacatgttaatgtggcaaaaaatttagactatgttgaatacggatggaactctgctcaagaacctctccatgttgatagagtctggcccttgtagcactgcagagaggcaattcagcgtctctttgcacctttcagcattgtca

SEQ ID NO: 13473 - DNA, 731 bp, Zea Mays
tcttcgaataatcttttccccgaagcatgtcgaataatgtaatcaacatctacggatggggcttcgggagcaggagatttagctttttctgtcacatcctgccccgctgccatgccggtattcagagtttgttgctcagccttatcctcagatacgacaagcttcgtctcaataggcactgaaggcccagctacggcagcttcagcaactttctttgtaggagcaggagtcaaggcttttgtggtctccatgacaacgtctagcacgctggccattctccttctcttgggagttgtggcgggagcctttgtcaccttcggcaattctgcctctaccggtgggctcagaattttttggcatcatcactgttttttccaattctgactctctggccgcatcatctttggctttggctggcccgactataggcaccttcggcactacagtagatccttcagcgctctgagcgtcggaagcagcttgttttgcttcggcagcggaggaggtcctttcaccaaattcaggcactacgaccgtttcaatatattgaggccagtgggttaaaacctttattttcttgcccttcggcacaacagtggtggccgaagcggcagttttcgtcttttttccttgccttctcaaggggtagcagtaaacaggatatatgaagccaattgcatcaaaaaaccctgttcaatcttttcttgccccgacccccgaaggctgaggac

SEQ ID NO: 13474 - DNA, 859 bp, Zea Mays
aatcccacttattcttcaattgagttttgctgtgaagcaaaccagttctttgtcgatacttaacacaaatatttttatatgctgcagtagttagtgttccatttggtctgttaccagcttcaacctcttcaacacatatttcacaaaaagttctagtattcatggatgaccaatctgccttgtcatatttctccttctatacgaaaatatatgtacaagcatatcacatatgaacattacaaattagcaatggccatgtgttagaaaattactcaccgaattgtttacagtaatttcagcttcaacttcaattggttcatcgtcttcccgaccttgagcatttaaatcgatgtcaataccaacacttcggccaccacgaatgctccttccggcactcctactaccgcgtatcacacaactagtgccacgaccggcactacgccctgccagtgtaaatcctgcgccacgacgacctgtcgtcatggaaccacgtaccatggttggtctgcctcgtacaggtgtcgtaacatcaccaactcctgattcaatgtctgctggttccgacgtaggatccatcacaatacacctgtagatagagtagcattgtagcaattagatggtcgcactttggatctcggcaggacagatgccacaaccattcacagagcactgcgctaataactggaacaaatcgaaacttagaggaaagaatacaagacgaggatcgaagactgtagcactctgcactcgcaaaagagagagcaaattccctcaatgccatcaaaacatatgtgaatcctccgtgtgcgattaaaaattataacagcgcttatggaagccagctataatcattattgac

SEQ ID NO: 13475 - DNA, 421 bp, Zea Mays
ctggagttcagacctacccggaggctccggacttgtatgtatataggggtccggtgtccttctgtggtggtccggacttactggggtgtggtgtctttccttgccacgtggcgccctttggcctgcccatccggtggggtcaggcgcggtcctccgcatggctaggagacatcgcatgggtgcagtgtcttcatgctgtaggagagggtacccctgatttagggtaccgacagtggcccccggtcccgcctcaggggaagatgcgagcctgcaggtgggaccagagtctaattggcggttggaccgctgcttccgtgcgcctgttgctgcaattactgccggtctgcctatgaccacgccaactgtcgtgcctattcccacggctgactgacccgtgaccgtcgtacttaacgacactgtt

SEQ ID NO: 13476 - DNA, 758 bp, Zea Mays
agggttgcccggagcccaacagttcattaagcacacccaactcagtgaaaggcccaatcgctccaaaagactagtccaatggggaagggtggctctcccttttaaagtggcttcctcctcccaagttaagcgaggtgggataaatctgaggctcacacggtcaccgtccgactacaattgggccaactgggccaattgcgtctttgccaacgggtaatagtggaggatgtcctcatcattcccaccttcttaaaatgggccctagctctgataccagatgatacacccagcccaggtggggttggccgaggcccaacaaattagggttgccctgagcccaacagttcattaagcacacccaactcagggaaaaggcccaatcaccccaaaagactagtccaatggggaagggtggctctcccttctaaagtggcttcctcctcccaagttaagcgaggtgggataaatctgaggctcacacggtcaccgtccgactacaattgggccaactgggccaattgcgtctttgccaacgggtaatagtggaggatgtcctcatcagttttgctaaacctaacccgaggtccttctcccaattaaacagtacccacggcggaggaaagggcggaggggcttaccggcggcgagattgcttcggtgaggtggtcgtgggcgtaggggaggtcgtgacagtcacgccgatgtgtggatcgtctctagggatggtcggagtaggccggtccacgtgcgcaggcgag

SEQ ID NO: 13477 - DNA, 693 bp, Zea Mays
ctgacgaccaactctctaacaatcagctccagctgaccaattccccgtcgagcaacccggtgaggcagagatctaagtccagtgctactgatccacatcaactacgatgggacacgtcaccatcaagccacgtccggatatgcgcacaacacactgaatggtattagggtctctacaatgacccgtacatcgaaaggacggaacaacgtgccataccaagtgtgccctgcacacgttggcaggtgacaaagggcccatgacgacaggagaagccacgcccccgtacgactgcactttgagactgatctgtggaacccattacaaagacgtcagtgatggactcgctacaagagccagagcagcgggaaaggatgacgccatgccagaagtatgtctacgcacgaccctatgaaggacctatcacgccaactcggagagcagatttcaatctctctctctctctctcaagtagaatacaaatcccactgtaatgtcctacctttgagatataaaagagaaggccccatccttctcaaaaacacaagcacacaagttgtaacatgttccatcgcaatacaacgatcaacactacattggactatggctctagcatggaccaatataacctcgggtcctagttcatcattcgagtcccatcgattcaccattgagagtgagtctgcgttagcatcc

SEQ ID NO: 13478 - DNA, 798 bp, Zea Mays
acaacccctggacacgtaggtcaagaaacccccgaaaatcctgcctcacccatacacagcagtaccgtgcacatgtgataacgaccataaccagagccagaccttagacttgtactttagcatgggacaaaccactatttaaggatattatctgccatgtatattgaaaactatgggcggattgagtacaataaaaagaaccatgacctatctccattgctatttaacaccaaactcatcattttctcacactatatccccagtgttacaattttatgcttgcggacagcacacctgattacagaatcatatcaccaaccaaggaacttaaataattcccaaaataaattctgaatctaaacattttcgcaggattatgtttgttttcatttttcgtggtagctaaaccaaaattttaggtttgtcctctgcataaaaatagtgaacacaacacttttctctaatataaacatcatatgtggtagtacaatacatgagagcaacaacaggaaagtgaaaaaaaaaggctgcctaaccttttccggatcaagaaccagaaggcaaaaggcatctactggaccagcttaaggatcgagatgaacgcccttaacatgctcatcatcaagaaccgaaatgcctggttgtggtcctaagtactgtaatctcgacttcactgaacttgaaaaccatgctttctccttgtgctgtgaaagaagtgacaaccattgtttaccatagatttgaatagcagcaagataagcggtagggctattctaagcagcatatacaaaagctttg

SEQ ID NO: 13479 - DNA, 742 bp, Zea Mays
gagtacttgtcggggtgatcaaagttaagtcactggtcgattcggatgaacatgatggagtgctttgaccatagatatggtgttggggcattgtgggtcgccacgaggacatgtcggtcaattagcttctgctgcatcttgctctcctaggagccatgtccccaaagatgacattgacctccccgtcaatgcgcgggaatgcaccgccaccccctctcctaaggttgttcttatatagcttggtccctccacagtgggacgacgatagtgatcggaatggtcgatcattgccgactgagttcttgaagtccctgcaattacgtagggtgtgacacatctcctttgtggtatgggcactgggcatcgaagatctcgtccagcgttcaagcatttcctcagggcatgccatggggttgggtcactaggggccctgcaacatgcacttcgtttgttggcctctcgtcccagcgcctatcccattgcttgtttccctccttcggcgcttagggtggaggcttcatgtggccgatgaggttttaggccttctcgtcagtggtgatgtagatgtttgcttctcaaaaaagttgttctgaggtggcttgagctttctggaggatggcccagacaaaggccgagtcattagacccgtggtagaagtcctcgatcacggtggcctccgtgacgttggggatgtgattcctcatagtttgaaaacgcttcaagaacgagtggaggggctcgt

SEQ ID NO: 13480 - DNA, 1316 bp, Zea Mays
ccgattggggcaacggctagggttcccgagcagcagacatgaaatcggggctaccttgatcattttccctaacttaattgcgcttatgatcaactacggagctctggccacggtggccgtgagtatcgcggctatactgccgtgttcccggcgaccagaggacctctagcttaattaaatgggttgtcgagcatcacagagctatgaaaaggcttaaacaagagagagaagaagatgagctgaccggagtacggctggccgcggtgaggttgagtttcgggtgacggagaatggatttgggggaaatcttaaattcgagctctcggaggcacggttgctaacgattgctggtgatgatgttacgcagctaggggagggctcaatttataggcggcttcaccggtggcgcacaatttggtcgagcaacgcggcggccggaggtggagaggattactggcgcgcgtgaatggctgtcccatgccgtggcaagctctccggtgttgattagacaacagtgggggtttacggcgatgcagtggaaaggttgagccacgcggcgcacggccgggaagcggcggtcgccggtgagcttatctgttccagtcgtagggtagagggggaagcacgggagggtcaccggagtggagcccagctcacggtggtgaagatctttactgggcgatgcttacctgctggccacggcgcacgaatcacggcgagcggcaatcgaaagcgacgggccaccggcgacgggcaggggggggggaaccgtgatctgtttcagtttgggtactgtaccatggcaagacctcatcagaacacctaactgagcaacttcagagccatttttctcaaaattttgcattacaacttggtcatctctctgcaccaaagttgtagagctatagttaatcttcaactttgccacaatgcttaccatcaaatagtcactgaatcccattcgaaatcgagctcaaagttcaccctatcacactactactgaaaattcagttcagggattgcctgacagcctgactttgagcaagattatcttccaatttctcacaagaacatggcttgcactcttaagcaaacttgttatccattaataggtctacaagtttgatgtggtactctagggcaaaaaccctatatttggaaagatacagggctccaaagttgagtcctcaacactgaatttcagacttagaatagaacttaggtgaggtccattttgcatttaagtccaaaatccaacatttggcttacaagtccacatatttgtgaaccaaatgatttaagatacttatttgact

SEQ ID NO: 13481 - DNA, 341 bp, Zea Mays
cgaacttccggtagtagctcgccaggccgaggaagcctcgtaccgcccgtgctgatcgaggcgtgggccaatcccggatggcctggaccttggccgggtccatggcaacgcctgcctcggagatgatgtggccgaggtagccaaccgacgctgcgccgaacgcacacttggtgcgcttgaggaacagctgatggtgctgaagctcttcgaggacggtgcggatgtgacgaaggtgttctccccagctcttactgtatatcaaaatgtcgtcaaagaacactagaacaaaccggcgaagaaacgggcgcagcacatcattcatcaaagcctggaatgtcgcc

SEQ ID NO: 13482 - DNA, 448 bp, Zea Mays
gttttcttgatagcggtgaaaatcttgccattggtgcgctcgatgacgccgttggattgcgggtggtacaccgaggcaaaggcaagcttggtgccgatggagaggcagaagtccctgaagtcctggttgtcaaactgtttgccgttgtcgaatgtgagctcggacgggactccgaatcggcaaactatgttttgccagaagaacttatgggcagtcttcgacgttattgtggatactgccctagcctcgatccacttggtaaagtattcgacggcgacgaaggtgaacttgaggttcccttgagccataggtagtggcctgacaatgttcagcccccagcgttgaagtggccatgtgtgggcaatcaacttagtgaactgcgaagggtttcccgagcggggagaaaacttctggcaagcttcgcacgacctcgtgactcgattcgcgg

SEQ ID NO: 13483 - DNA, 591 bp, Zea Mays
ataaaacccgagcccgaagctcgaaacccgaaaaacccgagcccgaacccgtatagcccaatacccgatacccgaaacgtttatgcgggcaataaaccttaaaacccgatattatttcgggcttaatcgggtagtaacacccggtacccgaaatacccaaatacccgactgtataaaaatcaccacatgtgtctatgtgggcatacatacggatacgacccagcccaactagatttagaaagtagcagatcctagtcttagtctccactctccagtctatccagtatccacggcgtcaggaaggagtcgctggctcacagagctcactgccgcggtgtcgcctggccgtctggagtatccggcttccggccatcagcgattcaacagagtaagcgtgcagctgtggtgccgtactagctcttgctcttccgtcccatgtgccagcacgccgtggtgccatactgccaaccatcagtcaaccaaccggcttctggttcatcacccaactgtcttccggattgcaacagctagcagttcatcacccaaccggccaaccatcagtcgtgcttccggttccactttccagagttt

SEQ ID NO: 13484 - DNA, 726 bp, Zea Mays
ggcggccgcggtaaatacccctggcaacgtggcagcgaatcaccgaggtgtcatgctccagtaaaacggcgaccaccgcgctgtcaccggaatccgccgcacggcatgctcgccagcgcaaccgggaaatccacgatcctcatccatcgccggtcagccgtctataaatagagcgcgggcacggcttcgtcaccacattccgcacgccagcagctaagcacttgactcgagctcaccaaaaatacccgcgcagccccaattccctctcttcttcgttcttgctccgccgtgaagagcttcttcgtagccagcgctcctctggtcagtaatgatcaaattgctctttgttttagttagtatgtgatctattgctgcccctggatgcaacaatttggagtttgaccgaagccccttaccggaacgcacctaggtgccgtcaaacaccgccgtgacccccccactgtcgacccgttcttcgggccttgttctacccaaatcaaagaatgtccgtagacccaagtgcacccataaacctttccccagcctcaattcggtcatcctcgccgtcgtttgctcggaatgcgttcatcctcttacccatccgctcggtcaccgtggaccgattgattcgtagtcccagccataaaattgatttgggggaaatgatccgtaggggttcaattgtgttcctgtcgcttgggaacttcagccgtcgcgtcatccggc

SEQ ID NO: 13485 - DNA, 531 bp, Zea Mays
tgtgcccacgtcgtgcgtcaagctcgaaaccgcccaccacctagtcatttgaacccccagtgccccactcgctcgcctcctccctcatttatgcatgccgagggagattcgctgtcgcactgcacccgttctctcaccgacgtcgaggccccgtcaagtttctgaccatggtgagcttcgcctcggtactagcagctcgaagctcacccccaatttccctttctccctctggtttgctctgcccgtgctcatccgtcgttacccatgcagccccagagccgccactgtggttctaggcccaccgccacaccgttgtcgccaccaaggatacctcggtactcgccttgaggtaaggaaccaccccttccacctctagttccctccctcactctccgatgcgtgtaattactcgtcggagccgtcagtgccgctgccttgccgtggatctccacccttcggtgctcccatcgcggtttagcactcgccattgagttccccaaaccctccccaactttcccatgccatcccgac

SEQ ID NO: 13486 - DNA, 804 bp, Zea Mays
caccagtgcactgtctctggcgattcccagcacccgccggcgacctcccctctccggcgaccaccgtgctccggcgttcgtgtgcctgggctcgtcctcatccctcctcggtgagcaatctctttcctcccctctgcttctctctctctctgtttctcagacagtgccacctccttgtgtgtcaatccaaatcttgtgaattcctgtgaaatctagtgaaaccatgttgtggaatgtgctcccctgtattccttgaactctcctgcaggttcttagctccttcgggagggttttcaaacctcaaatagtcgtttcaccgaaaacctaattcctcgcacgcctcgtgctcggtgaaatgcccaaaccagccaaaaatgctccaattgaacccaaatttttcaggcactttcacaacacttctagcaacatccttgccaaatttcacgccaatccgagattccaggcttaaatttcaccaaatttcccgttctgagcgatcgtttccgagccgagtgcccaaatccctttttcttcgcctaaattcaaaccaagcacacacttcactcatattcacctatataaacctattcgtgaagtatcagctcaattccatatcgtttcgtgcctcaattcgaattccaaacctcctatgacactatttatccttcaaacgtcgttttcacgtcgtttgactcctcgatcgtctcgtctcgtgttttctgtgccatatctctctgtgtatgtatttattcacatttcatatacttatgactatgtgactaatacgtgctcacctcttctgtc

SEQ ID NO: 13487 - DNA, 423 bp, Zea Mays
gcgcaggtggtcgccacatgaggagttgtatatcaagatgtcgtcaaaaaacactagaacaaatcgacggagcaatggcttgagaacgtcgttcatgagagctggaacgtcgccggcgcgttgcacaggccgaatggcatgacaaggaactcgtagaggccgtcatgggtacgaaaggccgtcttgtggatatccgccgtcctcatgcgtacctgatggtaccccgatcacaggtccaatttagtgaagaagcgggcgccgttgagctcgtccagtatcgggaaggcgtccttgatggtgagcgcgttcagcgccctgtagtcgacgcaaaccgccaggagctgtatggcttcttgatgaggatgaccggcgacgagaactctgagttactccggcggacgatgccttggcccatcatatcag

SEQ ID NO: 13488 - DNA, 692 bp, Zea Mays
tggtggaattgatttacctcccagacgacacactctgaggatatttagacaaccccagccacagccgacggagatgaatcctcctaatcctccaccaagcggagttgacccattggttgcagctcaaatgaggatgatgcaacaaatggcggacactatggcagatatgcgggctcagatgcagcaagaacgccagaagatgcaccaggaaagagaagagatactccaggagttgcaccaggaatgagaagagatacgccaggaaagaagggcgcaacagcagctgcaacagcaacttcaacaacaatagcaacagcagcaacagcagcaacaacaacaagtaccattgcctccacctccaccaccagttccaccccgtgataagcactgggagttcatgagccataagccaccgacatttgcaagctctcctgatccactagacacagatgattggttgaaatccatagagaagatgttgaacattgctcaatgcactgaccgggagaaggttttatatgcttttggacgtctgacaggtcctgctaatgattggtgggattcatatactgctgcccacgatgctgctgatactattacttgggcagagttcagtacgcagttcaggaattatcatataccagttggattgatgaagattaagaagaaggaatttctatcgctgaagtaag

SEQ ID NO: 13489 - DNA, 551 bp, Zea Mays
ctgacatgcccatgatgatgaagctgggctactttgggggaagctgaaaggaaacttgttcgatttgccggaggagagaccaccccagcgccgaaggatgatgtagtggttttcaagagttttttcagagtaggactccgacttcctctgaaatgagatgataggggaagtcttgaaaaatttcgaaatatatctttatcagctgacccctaacgccattgttaggcttagtgtcttcatctggaccctccgaagccaagggatgagcccagatgccgaagcattctgccgagtgcatgagttgcactaccagacgaaggccagggcagacggtctgcatgaaaattttggctgctacaattttgcgtatcgcaaggatacgaaggctccagttcttagctactgcaccaaatggccaatcgactggaaaggtgaatgattttatatcaaggccgatgagaagaagagggggaaactgatgacgatggtcatgtgcccgctgactttaaacttcggaatgaccaggcccctgtgcaacatatagctagggt

SEQ ID NO: 13490 - DNA, 822 bp, Zea Mays
caaggcctcacctgtgaaaatgaacaaacgaaactgcataactaggaggatgagctgaggtttccttggtgctgagggctagccagttgccatcgtccaacatgccacgcctatcaagggcccgaatgtgctcctgatccaccaagaatctacaccagcttgccataggggatgcggtggacaacccaaagagcgaggaggaaggctaagcaaggaagatgggacaacaagggggccaagagcaaagtgaggacaccagggagaatggcacaattaaataaaggccaccctacaactctctatcgcttgatgcctaggtgaggtgactcgtctgataacgaaacatgcctggcccatcgatggggtagaaacagaccagtgcataccccaccgcccctcgatcaatggtgcaagtggtaaattccctctagtaaaatagggcaaggaggaaaagaatacacgagaatcaatagagattccctaagctacaatgttccttgcataaaagggcaccaagccttttgctactacaatttcggactcaggggctggccgtggggccatacaaccaaaagaaaggggaatctatgactatgactataagaagggaggtcatagtgaccccctccctattgcgccaattggtatgactacgagggtgaaagtccgcgttgggaagccaaaggacgattagtgaaaagggccctaaggatcccaacgcatcaagcttggaggtgtcgatttgaagtcccttgcttggtgtggtttcctccttttcttccattgccttgaatgcaatgggttgcggctcgggtgtggagg

SEQ ID NO: 13491 - DNA, 333 bp, Zea Mays
attgagcaagcttaggagggtacgtgaaggttactcgataacggtagcagtgatctcaatgatggcaacaatattgaaagagggtaggggtgaggcatgacttaaatagtccggtggggatgaaaacaagtacaacagatagctctggttttctctctgccatgaaggcgcgtgaacttctccttttggactaactgtgcagggatcacacatagatttttggtccctcggtactgatttcctatggaggaggaagggtctgacaagtgggaaccataggtcagtgacacaaagtctgtagattgataccttctcggtgttccctagcaagtt

SEQ ID NO: 13492 - DNA, 569 bp, Zea Mays
gttggaaccaaagtcaagggctcggattagatcaatctttaaccgaaccgataccggatatggatcgccagatcataatccaagggttcggatctaaagtatctagcgctctcgctcacccactcatcagcggatcaacggtcgcgaggagccctggcacaaggggtatccgcccatacggaccactggatcagcgacgtacgatgtggattaaaatacctgagcgtcgaaccagtattcaatccaagccgaccgatccacgatcaatgatccacgtttaatgagacacggtccaagatcttactcgttagtgatccaatcaatggattggattgattcacagaaaagtaccctacgatctatccacaactttcaaacaccggatcaacggtggacatgtctcctccccaaccccggccggatgcagcggcgccgcccgcgccgaacggcggtggtccgccggcgcacagaacccaagtgatttagcacaccaaattccaatcctaccgacaccagactatgaagggacgaagatgaacaacatggggtcgctctcaccttggaccggg

SEQ ID NO: 13493 - DNA, 366 bp, Zea Mays
ggagaaggcaatgttgcttcgtcctcctaatattttatgggctcgcgcggcgacattggcgtggaatggttggttgcttcagtttatagcaaattcatccatttgtcgtatgtgtaattgccgtgcactgctggcctagctagtatgtttgttctagagctgtgccgtggtcagtcgggttgccgtgtgggtatgttgaaaacatgtacactctttagaaggttctgcttcgatggtaaccatgcataagtcctggtgtggtggtggtgactggtgagtaccagacccattagccctaaacaataatagctagctacctaaacacctactccatccgtcccataatatagttctttctagtccact

SEQ ID NO: 13494 - DNA, 954 bp, Zea Mays
catatcgatcgtctgaactgcatctcctcgagtgaagattatggcatggttttggttctcaggtttgccttcaccaagcttggggttcccaggcaatttaatgcagtatatttcctatttatataacaggacggcaaaataaagagcaagatgttaaggcaaggcaatatcaataaaaaatgtattatgtgtggctagataacagcaaataaacagtcgcacatttatttgaagttcaatatatgcatcagcctacttgcaacataagtttgagagtaaacagtaatccaagctacattatctttttctgattttaaaagttcaaaatttacatgaagaggactttaatgaaattttgagttgtccacctaaaaaattgtctcagcttgttgcattctactcagcaacgcttttgcaaaaataaggatgaaatggttggtatatactatatggcagtgagttgagggcatatagaaccagtatggcggtagccgggtggttaccgtcaaccaattgtgctggtatggactgctaatgattacagaagaccaaatcaaactgttattgtgacgaaaacatgggtatgcagaacacaataaaaatttattaagcacaacagaccagaaaatagcaataagcagtgggacaaggtttgaaaatcttgagtgatcatagagcatttgtatttctagcagcagtgggaattgctcactaccttgttgaaagtttcctaagataacatcttattcactgttagaacctcgtttaggttttggggttagcctcctataattaccttcataccctgtgcaatggaccaggcccaacatcacttagtttattaatacaagtcccaaccctgagttaaggtcggagtttctcacatggtatacagatatgttcctctatcttctccatccctcccttcccctgcaagccggcccacaagcctct

SEQ ID NO: 13495 - DNA, 700 bp, Zea Mays
gtcataataaaaggaacatcccaacaacatcaagatgcatttcaataatcaagttcaactcacaattgcattttagtgatcaagttcaactcgttgttgcatttcagtctagcaaaagctacttctcaccatcactgactattacaatctaacaaaagctacttctcagcatcaacacagttacattccagggaatttctcagcgatgaacattgtgatccaatgtaatttgtgctcaaatagcaggttgtagaaagctttgccgatgtgaggattggccaccagatgagcatagtagaaagatatatgtgtagaattgaaaccaggcatttgattcagcatgtcaaatagatcacttggcagctcattatcaggcttagcaaccaatttgatggcagcggcaagattctcacctacacttttgaaagctgcaactagcccttcatcttccattccagctagcttggccttcttacttggtctggtagcagaagatgttgctccttgagtgcttgtcccctcagtttgagcatgagtagtaacatcatcttcttcttggctttcacccacattctctgtacctagagctgcacttgaatcttttgcaaagtttccagtagccatgctattgccaaatattgattccatctctctatagtgcacaaggggcttgttcaagaaatctgcatcagacttgtga

SEQ ID NO: 13496 - DNA, 514 bp, Zea Mays
ccaggagatgcgccaggagagagaggagatacaccgggagctgtgccaagaacgagaagagatacgccaggagagaatggcgcaacaacagtagcaacagcaacagcaacaagtaccactgcctccaccaccactagttccacctcgtgataagcaccgggagtttatgagccaaaagccaccgaccttcgccagttcgctagacccactagatgcagatgattggttgaaatcaattgagaagatgctcaacatcgcccaatgttttgaccaggagaatgttctttatgcctctggtcgtttgacaggtcctgctgctgactggtgggattcttatgttgctgcccatgatgctgctgacactattacttgggcggaattcagtacacagttcagaaactaccacattcatgctggattgatgaagatcaagaggaaggagtttctgtcattaaagcaaggcaacatgtctgtcagcgagtaccgtgacaagttcattcagctctccagatat

SEQ ID NO: 13497 - DNA, 374 bp, Zea Mays
cgttgacgggtgtgcaggcacaggggtgtaggcgacgacgcaggggcctccagtctccactacgtggcaaggaagttggcacgcagactgggcgccctccactgtgtccgttgtgctcccccgtggcaaggaagttggcgcccctccactgcgtgtatggagcatcgtggaggcccaaggcggacctccatgcggcaatggttggggtcgacggtgcggcggctgcgtgcgagagaaggtgtagcgtgtgaggcgaggagatccaaagtgcgaggaccggggaagggcaagggcgttgctggagagggagcggttgctgtgtgacgctcgcgcggaggagagggtgaggaggagcaaagcacgaacaggtctcg

SEQ ID NO: 13498 - DNA, 672 bp, Zea Mays
cagatgtttggggtgcccccaagcggggtactgtggcatcccaaatggatatggtggcatgccccacatttgatttaggacatatggtggaggtaaatatgtgtatggatatggcataggtggataagggggtggaggtgtccatgtagatatgttaggtctcaattggacagtataaccttccatttcttcggattggtggggtggtccaatcggtcttacctctcatgaatgggcgagcgaggttgctttgctggccggtcactcgggccgaccttcgttttcacatatttggataataattgatcggcatagcccggatgatgatgctcgggacccacgctgcccacgtcgtccgccataaagaaagaatacacgcaaccaggcgatcctgggccccacgaccgcagataactttacctgggtaaaacgtttggttttaccatcgcccggtggctcatttctgaggaagccatcactgatcgaccccctctttggcctataaaatgaagaggtttgccctagacgaacggacgcgcgtacgagcaacagacggaccgagacgcgaagacgaaggaccgacgaataggaggagaacacaccgatgacccagaggccggagccctgtcgcccaaccaagacttagttaggactccactctgtaacctttag

SEQ ID NO: 13499 - DNA, 518 bp, Zea Mays
gactataaattgagtgcaccatcaacttcgttaggtaatcacgcatctagcgcactcacccgtacctcaaataatccaccagcaagcttcaatttcgcatttcccccaatctgtttaagaacaccgcgtgttctgacctcgccgtggtccgctccaatcaggtccgattttgctaattgtgtccttgttgcagtacccatgcttgtccttgatactcatcgactcgcccaactgaactagcaaccctctggtcgtcgggaacacaattgtctagccgcaacgctcacggtcaccgtggccagggccaactaggcactcatttgcgaaattaagtgaggggaagtgttcggtaggggttcaattgtgtccctgtctcccgtgagctccagccgtggcgtcgttcggccggaatgggctcgccggagcacgacgagggctgttcctcgtcgtggaccttagtctgtaaaggaatagaaaccgggggtcctttctagaaactgtcagtgactcccgaaaat

SEQ ID NO: 13500 - DNA, 827 bp, Zea Mays
attcaattccccaacccggtcccggatctgttcctgtgtggcctggacagtggagaccgtttctggcaggtgacgaccaggcaagcaatccgtagtccgtacgcccccgtccgcggttccgcgttcaccgattgccatcgtaagcgagtgcgtccgcttggctcctcctccgatccgttccccttttcattccacttctgagtgagatgcaactagacgcctgcgctcgtcggagcggatcgagcttgcacaccagccgacgtgaccgtacgtcctcctgtcctgcagtcggaggaagcagaaactaggaggtatggatatctttccaattgtttttcacatttcccgttttagtcggagttttcatacccacataatatcacgtttctactacatataacattggtgctataaatcatgacgccgactcccaagtttcaaaacatgatttttttataaaaaaggaattaaataaaaaaaatcgtaagcaccaccgtcagcggcagcatcgctggctggccagatgtgcactgcatttgcatgcattgcgcgcgcatctcgtcgcatatatggacacggttggctggtggttcagaccgacagatagataagatgccctgtcgcgtgtccacggttcaccagcgtgtccgtgctggcttagctatacttgagcagtcaggctcaggcccgcccaggcgcccagcaggcctgcactgcaccggcagccgtgccctccgccttccgcccagtgcatatgcatgtgaagtgcagatcacgtcctacacgtacgcgtataggtagcagtagcgccagcagtgtcctcaatc

SEQ ID NO: 13501 - DNA, 424 bp, Zea Mays
atgtcacaagacctgttgggagcccagaaccgaaaaggaccaaacgacaatacaagcccaacagagcggtgtatgggtcgtactggactcagtaggggagtgtatttagtcctagtcccttcgccagcttcgttagggttaggcgaggatagagttggctggaagagaacagcttggccggctgcgtccagacttggagagtgtcgagaggcttttcatttccgtttgctaccattgatctatgtaacatgagaacttcgtgagagagagtactgggagcggtgctcatcgtcacaagatccttggtgtgattacaccgtagccagtcacacaacacactgcatttgattaccgttggcataccattggatggctggacaatgagacgatgacgtggctcaatgtggtggcaggattgctccgg

SEQ ID NO: 13502 - DNA, 613 bp, Zea Mays
agaagaccccatttggcgccttgggccattttcccctcgtgctggcccatcttccgcagaactggcctgccagtcggcccacttccccatttctcccgcgccggcccatctttcccttaaaacggtacactgggctaatttgggtcaccttagcgctgacatgtgggcccctttggccagccgctgattacctcgcgccagccacttgcacgcggaccatcttcgtcagctctatctccctgctcgaatcgaacgcaccccatgtccgcggtatagactagggcgggatctcctcccagctcccaaacatggcggactccaaccaaatcaatcgatctccacgcccgcgatctctactccgcgcatgtcgcgtcgtgttccgctcggaccaccgatttggggatatataacgcgacctcatggcaccccttcaactaccatctcctctgtgttcaaggccctgggggaattggagctcagtgccttggttgtactcccttggcctccattgtcgcactcgggggggggggggagaaattcgagtgccgctacttgctcatgaagccgcttggcctcggctggtagctcgggggattctcaccggcgtcgcgga

SEQ ID NO: 13503 - DNA, 316 bp, Zea Mays
gttcggcgggttcttctcactgtgggggaagtagcggctggaatggtcgaccgtggctgactaggttcatgaagtccctgcagttacacagggtgtggcacatattcttggggtacgggcacagggtgtcgaggatctcatccagtattcgtacattgcctcgtggagcatggtggggccgagtcgcgggggtccgggagcgtgcactttgtctctaggcctcttgtcctagcacttgtcctgctgctggtttccttccttctttggtgcctagggcacatgcttcacatggccgatgaggtcctgggcccgttca

SEQ ID NO: 13504 - DNA, 755 bp, Zea Mays
tgctgtccattcttcttttccttggagttgttgtggggatgcttgatggcttcgacagttccgttgtgcatggtggactcagtgtttttaattgctctaccgccttctccagtttcggctcttcagtcggttttgtcctagcttcagctggcatagagcaacttggctcagcaataggagcgggccctcaattagcttcggtacgtcaaccgtttcaatgcgcctgggccgatgtgtcaaaactttagccttttttgatttcgacgcgctagaagtcgccgaggtagcagctttcctcttctttccttgctttcgtgaaggataacagtagtctggatatacaaatccgatgacatcgaataccctgttcatcctctttttgccatgagccccgaaggcagttgtcatggcgtcatcttcagccttcgaatatgctccaagcatttcatcactagtcgcttctatggcatctagccaatcatcattcggctcatcaaactggctcctgtacctgaaggaatacttcaggtagaataaaccaccttggctagagccagcagcagcctccttcggcatttcccacccatttgcaagtggccacactctgtaagcaatgtgttcttgaaccaggtctgttgagccaatgtaggtgcacactgtgttgaaagctgcctggcatgcttgaacttcattcccaagtgcagtggctggcctcctaatcccgaagcgagaccatacagggtgttgaataatcc

SEQ ID NO: 13505 - DNA, 626 bp, Zea Mays
aaaaactattctggactgggcctcatttaccagaaagtgcaggggcttcggagtaaatatttctagacacagagaacagtccagtggaccgcgggttgatttctcagaagcctagggtctctttagcaaaaaacacccgcgaagcggtatgggtggatctcagacgctggattagaaatcaagggcccagatgaattcccctcccttactgaactgctatgcgctcagagccgtacgatctacatccgatggctcagagtataatgtgacgtgatctaatctaacgcgtgagatcacgatctaacggttcaagattcatggcactagggctttggcttcatctaatccgaaccgtcgcccgcagatccgacggtgcaaaggacttcgccccaaccccgacgggagagttcggcggcgccccagcccgcggcggacgccatggccggaagagtcgactacgcgctcccgcccccgaagttatgatccgaaccgcgatacacgatgctagagacaacgcgaggctagtggagagggccataccgagaaataaggcgagaacgcggctgctcgcggtgttcagtgatttggtgagggcgctcgacgtctggtgagcaattcgaagcgcc

SEQ ID NO: 13506 - DNA, 604 bp, Zea Mays
gttcgatcaagatcgaacgggagaaatcaaaccgggaatgatgagcggctgcgaatggcactgacaggcgggccagggcatcaggcgcgcgggcgcgaagcggtatcccgtggtatgggccgttcgatctgaatcggacggagggggtaatcagaccaagggaaaatagatggctgtgggcggtgtcgctcctctccgcggcggtgaggtcgccggagttgaggcaggcgcgggctagggtgcctccagggtcaccggagttgggcagaggggaagagggtgccacggcgaactccatggcggggaagaggccatgaatccacgggcagagaggggagagcggcggtgaggtggcctcgagcaagccagagaactccggtgagccattccgaccacggggaagggacttaaggcacgctaaggcttgggctagcttcagcagagacaggggtgacacagagacctacttcggtgaactaaaccgggccaaatcgtccggccaccgcgcaagcacggcggaccgccgcggccgaacaccggcaagggtgaaattggctgagcacagggcacaataagggaaattgggcacagggatgggtgtctc

SEQ ID NO: 13507 - DNA, 952 bp, Zea Mays
ctaacccactggtggattcaaagatgttccattatttccatccagcctattaacaattggtgtctccaactgtatgggcactgttatcaggggatttgtaataaccacatgagcttttccatgagaagcctcaacaatgcccacaccagcccctttctcattcgacttaacatcaactggctgcacattagtatcaattttggtagctttctcatctgacttaatatccatatctttcgccagaaggttgttggaattcaaaaacttctgatgcttaatagtcattgcttcagccaaaatttttagagaatcgacgatagcttcagtacaccttgacttgcaaattgaacaacaacccctgaccttgtcatacagaacttggcaagtactatcaatgcattcgacatccactatttggccaaaatcagctaataacttttccttgaaaaaagtgaaatcatgcggaaattgtttctctgcttcaattaacaccttctccctataagcagctctctagagataaaaaaataaaaaacaaaattaagtaacaaaaaaataaacaaaaaccacatgaaaaaaatgtatataaaaaatatacaattgagaacttgtacataaaaaaaagaagataaaaaagaacaaactacctgagacttgcaaaaaacagcaaaagtttcaatcaacttaaccataggagaggaaatgatgccctgcaaaaataacaaaaaatgtaaataaaaaactaaatataaataaacaatttctaagaactaaatatactgagaaaatacattttataactccacacaactatacttagctagcttagattatttacctaaacaataaacacaaaacaaattatcaatgatgcaaatcctggatataatggaacctactccaaacaaaaaaaactcctaagggacattaacatgagataacataaggaaaa

SEQ ID NO: 13508 - DNA, 952 bp, Zea Mays
tcctttgcattgtgttttcattagatactagtaagaacttggtaagacacggtagtgtgtgttcctattcacccagagagcgcgtagttgcttattagggataacctttactgttttgttcctagtttggtgtttctaatggcaggatccgatgacgagattgaggtagtcattcccacacaattttctgattgtgtcagattcggcggcgccttccagtggatgcacttcgaacattcagtgccaccgctgccatgggcttggtcacgtgaagaaggattgtcctagccaacggacgtacattgctacggacgatgggtacattagtgcgtcggatgtggaggatgatggtgttacaagtgatgatgctagagatgatgatgtcgttgatggtgatgctgccacagcaaatttccagaacatcattgtgtagtgtgtcctcagtgctcagccagagaccttcgggcagcagcagcgccataatttgttctagactttcttcgtcatcaaggatcgacgtgctcgtgttattattgatggaggaagctgtaacaatttggtgagtttagatttggtcaagaagcttagcttgcccacacgcccacgtccgcatccataccacattcaatggtttaatgataccagcaaggttaaggtaacacaaacggtacgcgtgcatttttccattggtatatattctgattatgcggattgtgatggtgtacctatggaagcatgctctcttttgttgggtagaccttgggaatatgataatgatgcacgtcacaatggtcggagtaatacatacactttcttgcataagggccagaaaattactttgcttcgtttgactcctgctaagattgtacaagctgacaaggatagagctgcaaatacaaataatgaaccacctgttaaatctaaaaatcagcaagccattcatttgaaagct

SEQ ID NO: 13509 - DNA, 315 bp, Zea Mays
tgttgattatggacaaaggtaggcgctagtggtggtggtggtggcaactgagcctaagaagcttgggaatgactcgccgaatcaacggacgctgtaggttgctgattgcccacatactcatggatatatggggaatagcatgaagtactatgcaagacctgcttcggttggttttgctgtgcttcggctttagcaatctccttctgcttttggatcgtgacatggcacgtccttgtcgtgtgtcccttatcctccccacagaataagaagaacaatatcctgggttgagtaccaaaccttcctccgaagttcctc

SEQ ID NO: 13510 - DNA, 792 bp, Zea Mays
gcaaaagatactcatcacgaagcttttcttatgacgaaggtcctgtaatattcaataatacactagaaacaaaaggttagttgtgtctttgaggaccttcggaagagaaaggcccctaataggaccctcctcgccctttcagacaggacaaggggaagactgtctaccttgagcagcaagggggcaagaagaagagacatctcaacagagccacccgtgtagtgattgcagtagcagcagtagatcaggtagagcagggaggttagttgaggatttcctctgatctgattgctttctgagtacgtcgccactcgtctcagactcgctcctccactgctcggtccactccctcagacccagtctccactccacctcccacttcgccagctccttccgctctcgagccttcctccacactcgctgctactaccacctccaccacttcagcttccactgctccccctcccgcttccgctccacctattcctccacctcgcttctgagagcgtgacgagaccgaggtgcgacccctcactactgatcctcgactgcttgaccttcagcgggccacgattgccagggtacgtcggttcagacacgtacccgtggactcgtggttaccagctcagagagacccagcggctgcgacacttttcatcaccaggacccaggagtccttcttcagggcacaactgtctgctcagattgctctaaggtctcaccaacgattggatctcactgcctttcgctcagcagccggtgcagagccagagggtcacatcacctatctgc

SEQ ID NO: 13511 - DNA, 363 bp, Zea Mays
ccggcccgcttccaatcccccgcgcggacgcctccaccgcggcaagccctagccgccggcctcactcctctcacgcgcgcacataccgctgtacggtgggacccgcactccagtgctcagccgttcacccacgtcgctgactcgtggggtccgctcggtcatccagccttgcgctcgcgtttggttcactggtagtggggccgccccgtcagatgaccttcttccccgcgtgaaccggatcgcgctgaccggatcctccacgatcgcgcggctccgttgccagctgaagttgttacggcctccaccatttccgcactaacttcgccctgttatctagccgagacctcgcgacctcctctcttc

SEQ ID NO: 13512 - DNA, 603 bp, Zea Mays
atcagctgccgttggaaccactgctcaacccgggcaccactattcctcttcccgaactgcttctcccacttggcacacgcccacgatgtgaaaatttagcaattgtcgctcgttcaaaacacccggcccgtctctcccctccttcaaacatccaggaaccacccctcgcacctatcgtcgtgcacacacaccttgtcgttgcaccatgagctctgtcgtgctcacacgcccggtggcacccctgtgccttgccatctacgctccaccctaaccgtgcatggtgagatgttagggtaagcgtctaccctctctcctctcccttccctccttccccttgcccctcccactttgatattgggcattactggccggcaggccctgttgcgtgccccagtgagcatgtcgatgcctctgccaccatgccccatacaggcccccactagtgtgcatgccaagggcaatcccttgctatggtcgagccaaccccactcctccccatcgctggttgcagcgtcggccatggcacattgggtgcacgcatagcaggcctagcagcccacgaccacgatcggctatgccggcacctatgcctcgagccccaag

SEQ ID NO: 13513 - DNA, 490 bp, Zea Mays
cggtcaagaccaacaaggtatggtttctctggtatgctatcaatatgttgagtcaaagtttccagtagcatgtggtatgggctttagagtatcagtaggcaatatgtgtttcacaacgttgctcttgatactaagtgaggaaggcgatgagcatcggtagcgaaattatgtcttgtatggttgctctcatagttgttaaggcgtcgcttaagcggtaaggcgagcctggcctgcaaggcatcccgatcgccttgcctggacgcgtaaggtgtcgccttagcagcagggcatctccaaggtgtccacggggcatctatggggtggcaccttggccaaatggtagggtttaggaggggatttaccagggcataagcgctcccaaagcagtgcagctgccttagtggagcaatggatacaggctcccgctgtctgccggctgcgcgcagcgcagccgctggggcccggcgccgttaacagttcactatagggg

SEQ ID NO: 13514 - DNA, 438 bp, Zea Mays
gggcgacatggttgacactccggtagtgatccctcttttatcgcttcgtctcgaagtcgatgctggaccctccggtgatcatgtgaatgactccgtgatacgactgatcggcgaagtcttcctactttggttcctgggggtgattttggtggtgtgggttctggtgatgcggaggcggaggcgagggtgggacgacttgtacttcttgatgttgtggatatgcgtggttgggtgggtgctggacatggccgttgttgtattgttgtgggtggtggtgatgatatgtgtgcgtgacaactctatggttgtcggttggttgtgctcgagacatcctgtctctggtggcctttgtttccgggcaatctcttgttgggtgtgcacaatcctcgccatgaaacaggcagtaatatctgcgcggttgctgcacctgtccccggc

SEQ ID NO: 13515 - DNA, 592 bp, Zea Mays
agagaagcgacgttcagtcgagcaaactaagatggacaaaaaataatattcgacacaaaagcattcggggcaatcagtcgtcggaattaagtttcaacacatagggaaccaaacaaaatcaggagtttaatactgtaattagatctcaaaacatgacaaagaactcgacaatcagaggagacaagccatcaactttattatataagcaggggcatcattacataagaaggatcggttcattatgaactaatccttacaaaagacccctaccactactaccacccctacactacataatactactatttaagcagtggtgtcttgccaccggtgtcgtggccatcgccgccctcgccgccgatgttgttgctgcccttgctgctgccgacgtcatcgcctttgcctctatcgccatcaccacctttgccattgccattgtcgccattgccgaccttgtcatccttgccgccctcatcgccaccatcatacccttcatcgtcaccctcctcctcctcctcctcgaagtcattcgagtcatcaaggatggctcgctcgatgcccgggaggtaggccctcttcgcgcgcagacggc

SEQ ID NO: 13516 - DNA, 709 bp, Zea Mays
cagttttcttcatattcttctctgctacattatttgtcgtgtttcccttgccttggctagaacttctcaggttctgctgattattggagttgttccgcttcggatatgggcagtctttgatgaaatgtccagacttcccacaattgaagcaaccagtagttgaacttgggagtgcagagaaatgagcaccaggggcactcgactgagttgttgaagtgggggcagtagcagggcggatgaatataggctgtttaaaggggtaggaggctggacgaggtgaagaacggttttgattgaaaggtcggatcaccaacctttgtcgcttttcaggcccctggttggacctgacacctccatagccctttgacttgcctgggcctgcatacttatctttaactaccagtgctgtgctgacagtcctgctataggagaggtcgaggcaggtggacatcttccgttgtagccggtcattaaggcccctcataaaacagttcttctttttcagatcagtgttgacttggtcaattgcgtactgggacaaatgattgaacttgttgagatactgaccttgcttaagcttcatgaattcttcttgcttcatatggagcactccttctggaatgtagtgctcccaaaatgccaatttaaattcgtcccaggtgacttgatggccaacaggctgaatggccacataattcccccaccaggt

SEQ ID NO: 13517 - DNA, 707 bp, Zea Mays
tttggactcctgcgtaccttggcaagaaggcaacgagaggggtcccagatcctcatgactctatactcagcctccacgcatgaaccgttctcatccagctatcccaagctggtgatagagttcctcaacgcggggatgtagtaaactccggtgagctgcctgtgctcaccagacgtggcggtgaagacgactgagctagcgcccttgatctctaccccggacgtgtccccgaacgtaacggagcctcggacgctagagtcaaactcggtgaagaactcccgtcggccggttatgtgatgagtggcgccagtgtcgaggcaccatccttcgatcatgtctttgctggagccgtcaccgaggaaagcgcgtggtttcaactcatcaaggtggaggagtgctgatgcggccggtgccgatggagatagctcgatgcttgcgtgtgctaggagcagagcttcctcctccgcctccgcctgtgcgacgttggtctagccgcgtcgtgactgttgacattccttggctcagtggccaagcttgccacagttgtgatagccgtcatctcatgccgccttcttgttgcccacagcgtcgccttgggcgcctccgtggacaccaccctcaccttgtcctcgtgccctggcctgggcgcattcgcacgccttgcgcggcttgccgtgtttccggacacgtgtcgaggaggactcccc

SEQ ID NO: 13518 - DNA, 632 bp, Zea Mays
taacagtaagaatgtttttttctttggttcccttcctttttctttttctgtaccataaactctaaacacaaatctgtaaaagttccagtgagacatatgacgggaaggggggagaagaggagtgaaaaaaaacagcagattctagatttggaagaggagagggtagtaaagcgaacaacataaaggacaatttccttcctatgtccttttctgttgagaaagcataccttggtttaccgacaccaaggaataagtagcaaagatcactaataactgtattttaaaaaggggggaaagggtcaaaatctggaagcgcagtgagtaactgtccatgccgtagacaggggacaatgaagacgaaaatgtggctgcaatataaaacgaccaatgtatcccaaattctaaggtgcgaatggcatgaagcaatcgactaatcttggagaggaaaaatggatctggtagaagcatgaaacattgggggaaaaggaatacaaaccttgcaattgacgaatcttgcgaaggaaaatggatctagtaaaagcatgaaacgttggggaaaaaagaatacaaaccttttcctaacctgatgaatatgttggacgacggaactagctgtagatgaagaatacgga

SEQ ID NO: 13519 - DNA, 574 bp, Zea Mays
gttgaggaagcatgaagggaactatcctattcatgacctcaaattggttgcggttgtctttgccctaaaatcgtggaggcattatctttatgggcaatcttgcgacatttacaccgatcataagagtctcaagtatattttcactcagaaacagctaaatttgagcagtgtcggtggcttgagttgataaaggattgtgatctatccattcattatcacccggggaaggcaaatgtggtggcagatgcccttagcaggtctggtgttccaaaagtggccatgcctttgattgcagatctggaccgtatgggggttgctttgtgctatgtcgacactgctagagaggagactcggatgctcattcaatcctcccttctggagagagtgcgcgtggctcagcagcaggatcgtttgttgcaggaagctcgaaagagggtcggcgatggtaaaccccatgagttcaccattgatgagaaatatttggttcattttaggggccgcctttgtgttcctcagaaatcagaggtgaagatggatatcttgagagaatctcataaaacgccttgcaccgttc

SEQ ID NO: 13520 - DNA, 745 bp, Zea Mays
cgtggagcttggagggtgtcgcaacaactccctggctgctgacaacgcccccggagacgcccttgatggagtccaggatgtttgcactaccgtgtgctgccgtgcagtgtgcacagcaggggtgactggtgccgggcgattgggaggctgcggtgtggaggaagtagcttctccctccaccgcaaggtctaccgaagtctcggcgcggtgctctactatctgcaccatcatgtttgggcaagaaatcaagcgaaaacctaatgcctagtacccctacctagcgggccaaatgtcggagagtagatctccggccgggtggcagagtgcacctgccctgagtcctgagatgaggaggggcttaggcgtttcgcttgattgatagagagaaggggcagtacacaagaacacacgaggatttagagtggttcgggctgctagagcgtaataccctactccactatgagatgtattgcttgagggcttgtatgagctagcgagtctgagatcgcgtgtgtgtgtaacgtcgcatgcctccccttttatagctgaaggggggcatgcacaaagggactgggccccgacatgtgggcccaggtacataaaggatatagtgctttggatcctctgatatctattgtcgagacttctgcccaagatctgcgtatccctggcgtaccgaggaggcttcttgcggaagagaagatgagtatagcgcgccgctcagcataggcatactgttcaccag

SEQ ID NO: 13521 - DNA, 1194 bp, Zea Mays
cgataagatacatcattatattttgttattgaagcaatggtttctactaattttaaccccatattcaccttttctatccccatattgttgtaacatcccaattttcagctatggaataaaacttgttcagaattattgatagctatgatatcctaatccaaactatgcaaaccaatgcctctatgggttatttctcgatattcttctaaattataggctaagcttgcctttcaccgtggtaaattcttgaaaacgtctaatgcccgcccacaatagacagagggagcccacaaccacctgtggcaaaacacatgcgtaaataaatcgtaagcctgcctctagctgccttggcatttgtgcgtcctgacaagccccacctacaccctctgccctgagacagccttgtcatgcacgccaaactgctatattaaaggggcctggttgtagaccttgaagtgatacctcagtgcagaaagtcactccgacaagacctcgtgcacccgcctgaacacacgtcagtcacttgtcgcaatcacaactaaatgaatgccccaccatgagccaagttaccctgccaacctcgggatgttgcgactgcactgtggcaacatcaccaatcatagtacgccggtcgagactccctccattataaactatcgttcctccgcatataaataccgatgcccttgccgcggaacctcacagtccagccaccatctcattgtcaccctcacatacgaacaacgcgtgccttactcttcaaaccagaggacaagctctcaccgtcgatttgagccataggtgagcatgccatgatcttcgacctcttcctcccctgaagtcattcttaaactataaaagttatgaccttagcatcaattatagcagctttttccatggccatcatttgcccattgaaaatatgcaaggaaaacctcgcttaaacaattgtcatataataagcataaccaagtttctagaagcttctacaatattcatgataaaccttaatcataagcaagacaactttctaggaacaaccatggataaccatgatgtacatagccttctagaattccctacactaatcatggtaagtcacgaagcctagatatttttggacctctctagaactatggtgatgtgtcatggtgaagtgttccccccatgaaaggtggaggtgacacatgcatg

SEQ ID NO: 13522 - DNA, 277 bp, Zea Mays
gtagagcgcgccaacggcaaaatttttagcgccataaagaacagacttttagacgtcaaaaagggcaagtgggtcgagcaactacccaaagtcatttgggcactcaacacaacagaatcccgagccactggattcactcccttcagactaatgtacagatcagaggccatgactttgcaagaactcaagcacggatcaccctgaacaagcaccacgaccataccagacatcgacgagccatcagcaaaatacttcctcgatggggatcgtgtcgccg

SEQ ID NO: 13523 - DNA, 335 bp, Zea Mays
ccgacataataaacgtgctagacctagtgcacaagtctcctgtgggcacgaccgtatcagctaaggcacacagcttcatcatacaaattatagttacatacgtacagcgagggcatcacactttacaatggttcaaccttcgggatgatacccatctccctatatttaaacagcattatcctcagctcctcaccctcaaacagacttcgcaactccccctcacctacactcgccctatctggcgaggacaacaattcccgcctaccagccctgtccacacgaagacaaccaccctccacctcactcactctacgcttcgccaccgcccttcgccg

SEQ ID NO: 13524 - DNA, 424 bp, Zea Mays
gccggcgcaaataagctcatcggtgttggctgcctgccgatcatatgctacgtgcccaggcatcttaccacgtcgcggttagtcgtgttaagcatatccggtgatcaccggagggtccgccacggtgaaagccctaagcgcttgcgccagtacccctcttcctctccggctgtcgcgcgtcttcatccaattcaccggccaccgctcacggactctataaattgggcacgccataagctctgtagggtagtcaagcaccaagccgtgccctcaattgatcaccagagctcgctaatttctcattctccccaaatctgttctccgccaccatgaaagagccctcaccgtggtcagcgtattccatgtctgttcgtgctccctgctctcttgttctagcatccttaagtcctcctgaagctcctcg

SEQ ID NO: 13525 - DNA, 1221 bp, Zea Mays
attttagtgatcaagttcaactcaatcttgcatttcagtctaggaaaaatcgttcttgcattttagtctagcaaaagctacttatcaccatcactgactattacaatctaacaaaagctacttctcaccatcaactcagttacattccagggaatttctcagcgatgaacattgtgatccaatgtaatttgtgctcaaatggcaggttgtagaaagctttgccgatgtgaggattggccaccagatgagcatagtagaaagatatatgtgcagaattgaaaccaggcatttgattcagcatgtcaaatagatcacttggcaactcattatcaggcttagcaaccaatttgatggcagcggcaagattctcacctacacttctgaaagctgcaactagcccttcatcttccattccagctagcttggcctttttacttgatctggtagcagaagatgttgctccttgagtgcttgtcccctcagtttgagcatgagcagtaacatcatcttcttcttggctttcacccacattctctgtacctagagctgcacttgaatcttttgcaaagtttccagtagccatgctattgccaaatattgattccatctctctatagtgcacaaggggcttgttcaagaaatctgcatcagacttgtgatcctgatcatggaggagaaattagtcaatgtagaactagcagtagacaataaatcaagaattgatgaaaggtggtcaattacttggacatagctgttgtagtgctcattatcaagtgtaatcatgcaattatcttcatcaaataaggcagcactcaacttcttcagtttaattatctttgcataccttttctgccatgtttttaaatggttcttaacttgttcaccattgattctagtgctgaatttttcattaatagccctggcacaaccattgtacatatgtttcttgaagccctttgatgttttcaaaccagcagccaccaagtcattgaggtgacagagcattaaagaagacattgctgatgtccaggtggcatgaccactagttccccccagcccttcaactacttcttccattgttctagcatacaaaaataaattcagctatgagaaaattcagcaccaatacatgtagaaattcagcaccaatacatgttaaaattgagcaccaacacatgtacaaattcagtaccagtacaatataagcaatgtaccaacaca

SEQ ID NO: 13526 - DNA, 566 bp, Zea Mays
atcatgactacaaggtatcattgaaatctgcaaaaagaaaacacaatcgttttttacgataaagaaaacaagatctaaaaaatagaagaagaaaaaaaacaaagaagatatgagtaataccacaacagttggctgacgctgtagtttacgagccacgattctccaaccacacccctctgctttgcattcagctcgataccttgtcttattagtcaccacattgtgtacctcaaactctttcttgattgcgtgttgtctcaaagccatcctaaaatcatgcattgtaggaaaagattcaccaacctcaattttgggattttccttgtcaaccactatgctagcttcacaatctgcatcatcatcaactaaaatttgcgcctcacagatctcagcctcagtaacctgttccacctgaggagcttcctgagcgccatccctaaatcccaaggcagcataaaattgctcatcaccaacaaaaatatcagcatcatgcatcatagtaggatcgacatcccccacatattgacttgcatttttggtgcatggcaatttccccaacaatttct

SEQ ID NO: 13527 - DNA, 534 bp, Zea Mays
cacgactgaggggtcgtcttcaagcagctgctgaccttccaatgcacgcatcctggccatccaaactggacggtttctctgaaagggcgaaaagaatctgagtggggtgtcggccacttcttcttcatagatttgacacagggtcctcaatgccttgcgagcgacgacttggcaggtgtctttgaatctatgcccagcagcagtgacactccattccacatggtgcggactggatccaatgtatacagtcacgacacacttctctgtgccatgctcgatgaattcacgaccatcatactctggctggctcctgattccgaggcgaactgtgcatgctctcagcaacttggggaaaccatcttcattctggcaaaagctggtttggcaacggacctccatctgacttctgagagaaggaaagggggaaaccatttttgaaatgaagggataagagcaagaatttttttaagaaaatagttttgactcaaaaacttttggatcaggctaagggttacgtcctgcggccaacctaac

SEQ ID NO: 13528 - DNA, 605 bp, Zea Mays
cattatgttcgacgatccctccgactcctaccatgcgtggtgccccactttgctggtatcgctgatgggacctcagaaactgggcgaacaccattctcctcgtcgttgggggggttcttgctcgctgctctctggggactcgaatccatgtccgatcctgcgcagagtgcgtcgaagatgaggtccccactactgtcggccctccctacaaactccaagtcatcgaaggtgaggaaaaggtcgcgggccactagggcatctatcaccgctggggtgcagcgtagttgaggcgggaaggcactggagctactgctagagccactataataggatgtcatttctacgtcgtataatgcagagagctccacgtaggacgcgaagaaagtcgacagataatcatatgaggggtttggccccatatgaatcatgatctgtcgccttatttcgtcagcctcggaaggcggggctgtcgtgtgccccctcacgccgctcgcacggggcaagtctgaggtcaccaagggcctccgagactatgtcactgatctcggttggaggaggccgggcgagtgtcgctctgaccataccgccctctcggttgatgacga

SEQ ID NO: 13529 - DNA, 541 bp, Zea Mays
gctcgaggttgtccttaaactctgaatcaccgaggagagctcggtaagccatcttattccaaacttgtttagttcattgaagactcttggcttaaggccttgtaagatcaagtcattggcacgctctacttgcccatttgtcctaggatgagccacggttgaccagtctacgtggatgtggtggtcaatgcagaagcttaggaatatcttccttgtggactgtgtgctgttgtttgtgatgatggagatggggacctcgaagtgatggatgatgtctgtgaagaacgctaccgcctgctcggatttgatgcactccccatgccacgcgcgcaccggaaacctttgccccgcgactctgttacactgcaacgcaggacccacccgtcagctcggtcatcttctccgtaacgaacgccgccgccgtcgcgagcttcatcgcttctgatgccgccttttgcacgtgggtagttgtggaccgagtcccttggggataaataggatttccgcgtcccgtttcgctcctcacgcccagctgtgtgat

SEQ ID NO: 13530 - DNA, 523 bp, Zea Mays
cgtagacgagtagtatccccctcggccccactccgaagaccgaggcccagcaacgatgagactcactggcggcggcactctctgctccccccttctcactctcgttcgaatttggcacgcggctccggcttggtctggcaaaataggagggcaggagggttgcgggtggcgactatatacgagctggtagcccaatttgtaggaacggtccccccggcgagcacgcgaagttagttgagccgcggcggcatttgcgcggaacttgagctcgaccacgacctgacgcagggaccctgccggccagtgacagagtaaaggagacggcgcgagagcgaggggatgagaggctgccccgtggggccctactgggtgggctgtgctcggtgtcgaggccatgggccgaaagtggcattctgggcccattcaggcgatttattcattttccattttattttcttttatccctttctccatacaatctccctaccagacgtgtatccggagaatagcgggtaggtgctgc

SEQ ID NO: 13531 - DNA, 753 bp, Zea Mays
gtcaaccgccaacatttgataaatgggggaggctgttagaacagcacgtaccatgaccaaacgacccgctctattcattaaagaggctttccaacccggcaagtaatcagagactttgtccacaagccgctgtagggcttccttaggtggtttatgaatagaaagaggcaggccaaggtaggtaataggaaaatcagtgatagaacaggccaaaatttcctcagtttggagcctttcttcatcggtacagtgtataggagccactgaactttttgataaattggtctgcagccctgagacatgaccaaagagctcaagaatggctttgataaccagcaggtccatccggtcaggccttagaaaaatcactgcgtcatcagcataaaaagaaatccggtgtctgccgtgctgaatagcaatagggcttaacatattattcctcatagcataatcaaccagataattaagcatatccattaccaagatgaagaccatgggagaaagggggtctccctgacgaagtccacgccatggtggacaggcataccaggttcaccgttgacaagaattcgggtggatgaagtggaaaggagcaaacaaatgaggttgcaccaacgctgtgcaaaacccacatatttcatggtctctagcactagcagaaagggccaagaaatggagtcgaatgccttagagatatcaagtttgaggagcacatgagcttctttcttgtgcaaggccctgaccatctgctgt

SEQ ID NO: 13532 - DNA, 402 bp, Zea Mays
acggggaaaacttcaaaccctaaacgggtattctaacactgtgtcattacgtgcatggatattattatcagcaaagtgcgagtgttggcgtagtgggctagtgtgtagtggttgtaggcttagcgcttaagcatttggttatctctttatttaaagggtccagtagtaacgcaagtgtcgtgggggtgctggctaagcatgagatgctgctaggtgtttgtgtgtattgattaattagtgaaatgcaagtgctaagtgcaccggtgtgtggtgccaaaaattccttagtatcttctgtgcctgagcatttatatgagtaatacaacatttcatatattttataagaatttgtctttgataatagatcattttaagcttgcacaacagtaaacaaagagtgta

SEQ ID NO: 13533 - DNA, 313 bp, Zea Mays
atttatagcaattgtttgagaatgcaaacttggacttaatagatataagtcaggccaggccacaatagcaagaattgtaaatgtcatgcattcatgcaatggttctttcgaagcttttagaaggctgaagaacttttgaacaactaacataagcaaccctcagactctagtttaaagtccagccacatagcatcaaatatctcatccattctatcatcatttgtcctgtaatgctcttccacttctgcatgttgatgctatgactcaacttggtgcacccacaccttacaacttgacatgaaaccaaaccgaa

SEQ ID NO: 13534 - DNA, 713 bp, Zea Mays
gtaagtattagcagccattcgatccccatcccacggttgacgctgcccctgatttggtacactcccgagatcgtagaatcactcattaatggctaagattcaccacggaagggttatcccttatctcaaatcctagccatatatgcacggatccacgacccatgcatcctgttcttcgtcccacggacagagcccggcggtgcacgcccggcacgacggagggcccctagagtccaacatgcaccatgatcctgtgccagatatccccttggaagttcctacatggagaggatgctatattgaacagggtgggtgacaccttaccatttatcgcacagtgaggatctacttcccgtggtgaggcgtggaaccgaggcatcaatccacttcgacgagcaattgtagcgatctcggcaatgaatgtccaccacctctaccatggacaccttcgtcgtgtcatggcgaagctcctagggcactttgttggtccctgagcggccatgtgggtaggatccactacggcggattccctttggtctttgttcgttcgatagaggtggctgatcctcgtggcgcgtggtgccccggctcacataagttggagaggaggtgtggctagagctttatattgggcgcaaaggagtccgagcccacgatcatcgccgtcagttgattggtgcccggggatgtggtggttgttgtgcattcggcta

SEQ ID NO: 13535 - DNA, 621 bp, Zea Mays
cgggagggcgggagcgtggacgcacaggattgggtggcggtggtgatgggtgtagtagaggtgcagggattgggttggtgccggtggtgggggtgactggtgagtggtcggatgcggcggggaggtgagttgatggctcgtgggtgggggtgggggaggtgtgggtcagctttttgactgctgcttccctaggtcggagagaagaggaatcaccgaatcagccgctttgacctttttgacctctacgctggcaggcccgtcctggtgccatccgtactcccccccagacccccgccgatggagcgctacttgggtcgaccaactgcaaaaccagataaacgagagcccaagagaacttacgtagcccttttaaaacgagagcccatcacttccggatattaacattaaataacattttagaaaagagtgaggtccgtttaaccccctattttggcgccgagcattaataaaaaaactcaacttcaatactaaaaattatactccctagattctaaaatatagttctttctagcccttttttgtctgtgtttaaataaataataatgaatgtagatatacgtatatacaaactatattcataggttaattaatgaatgtgtg

SEQ ID NO: 13536 - DNA, 806 bp, Zea Mays
cagtcttagttgtgacaagagaacagtgaagttagtgtccctatcaggataagaagtgttagtggaattggacttatctggatcaaggaaagggagttgtcaccaagtcatcacttgtattgaggagattaaaccatcagaggctatcaaggtagtgtcagaattcccagatgtttttcccgaggagttaccaggtatgccacctgaaaagaaggttgaatttgccatagagcttataccaggcaccgccctagtgctggtggaactcaagaagcagattgatgagttgtcagagaagggctacatcagaccgagtacctcaccttgggcagccgcagtgctgtttgtggagaagaaggatggcacaaagaggaagtgcatcgattatcgagccttgaatgaggttactatcaagaacaagtacccctgcctagaattgaagacttattcgaccagttgagaggatccagtgtgttctcaaagatagatctgaggtcaggctaccatcagcttagaatccaaccctcagatataccgaagacaacattcatcaccaagtatggactgtatgagttcacagtcatgtcattcggtttgacgaatgcgccagcttacttcatgtacttgatgaacagtgtgttcatggactaccacgacaagttcgtagtagtgttcattgatgacattcttatatattcccagaatgagcaagagcatgaggagcatttgaggaaggtacttcagaggctacgagattgtcagctgtatgccaagcttagcaagtgcgagttctggatcagtgaatt

SEQ ID NO: 13537 - DNA, 849 bp, Zea Mays
caagattccagggtatgtctgtaattaatttacatagtgtgtggactgcgggttgatttggtgattcccctgggactcttaagtaaaacatccaggctgaaagggtatgaaaggatctggtacgtccgatccataactaacggcgaggattagatcgggtccggcccgaaccggtacctcaccgagaccgcacgattcgaattctacgacacagatttcattttagcgcgattcgaccgcatccctccgatcaggatcctatggatcacaactatgcgatcgaaatgttactccgtgtctaatccttagcgtccattctagatcgagtggatgggatacccattgccctgcccgaccctagaagcggcggtgccgcccctaaacacggcggggggggggggggtgtggccggacttatggcgattccacgccccgacgttgctactcgatgttgcccgaggtatacagagacaaaaggatacgtcgaattcgattgaatgactcatactccgaattggtgctcggccgatgctatccaccgagttaggtggagccgtggtggcgttgaagtccggcgagcaattcagagctgcctcgatgatcgaatccgccaatcgctgcaacgggtgcccgcctgaggtaacggtgaagcttcaccgcccgactcccaaacctcgacggtgacaaggccgagtattgacggcggcggcgcccgacttggttcctacttcaatggtggcaaggaattggggcacgacaaaaggaggaggggtcagttagggttcggtaccgcgctttatggccgccagggaggtgggtcgatgcatgcacggatgacgagacgttcgg

SEQ ID NO: 13538 - DNA, 777 bp, Zea Mays
gcgacgcctacaatcttgcctgcaccattagtttcattgattgattctggagccaattcttgagaaagaataccgccagcactagtagcatcaacattttcagcatcctgcttagggtcatcctcaagcacactgaccacactagcaggaataaactcatccctgtttcctccattcataaccactgcggttgcctcatcttcaacgtcaccctccttcttagctgattcttttaaggcttcttcaccttgagcaagctgctgcagtaatccttcatgcgtgtgagtttcagcttgcatctccccatcccatgccactgtaagacccatttcactggatattgagtatgtacttacttgctgtgacattccaacaaacaaccatggggcatcaggcacaacatcctgcttgcaatcgttgggcatctggttccccattccatgagctagacgctgccaaaaatcaagtgaatcggaacgaagtaacacttcttcatcccagaccaccttctcagcagatgtttcatcgaacactgaataaccagaacctccaaagcaccttggaagggcaatgacctcctcactgcagtaggggggcatttcatcgaacacaggaggggccatacctccaagcaaagctgggatgttccgcactgctgcttccacgttgcacgtatgatcgtgcagacccttctgctttcacctccatcgcctccaacctactgtcgaggcgatccaggacccgcatcactttgtcccatcgttcctcgcccttctg

SEQ ID NO: 13539 - DNA, 390 bp, Zea Mays
ctgtcgtcttcccccgcatacggctcaagatgcgcacttctctgcttatggattcaaacacatggccaccagcccaccaccatttatatgacaaagatgactacgtgaagggggaaacacaatagagcaaataaaaacataacagaacacaaccccattaatcatccaggcttcaatcgtccagagctcagcgaagaacatgcaacagggggaatggcagggacatccctctcggcctctcctacagaccatgcccaaatcagaaatcaccacgatactcattcaaatcgaaaacaaaactggcagcttgaagccacaatatcttgtttagaaatcaaacagtagcatccggttcaggcttgaagccagccaaacgaacttgcccacaat

SEQ ID NO: 13540 - DNA, 466 bp, Zea Mays
cttctggctgctggttatgaaccaaagtaggcacaagtggtggtggtggtaactgagcccatgcagcttgtgaatgaattgctgaagcaactgatgtcgtgggttgctagttgcccacatattcagggatatatggcaaatagcatgaagcaatgtgcaagacctgcttcagctgattctgccgtgcttcggcctctgtgatttccttctacttttggatcatgacttggcacatccttgttgtgtgtcccttatcctccccatagaataagcagaacaatctcctgagctgagtaccaaaccttcctccaaagcttctcccccctctgcctcttggggctggtgtcctgtaggaagtttactgcattcccgaagattatgagctttgctagctgctctaggtgtgatttgctctgtcatcatttgtgttgggattgtggattgttctgacatgcctagggtggag

SEQ ID NO: 13541 - DNA, 565 bp, Zea Mays
ctctgactcatgtctaagtatctctagtgtccctgatagcttgtaaacccattcgattgaatgctaccatagtatattgatgagaacactacctcgctgtccttatgcgccgccatggccttccttagagtggtcggctaattatatcttctttccggtcatgtcgttggttgttacaatagtcttatgagccactgaggcttgccatgcttggtaattgaacgctatcgcactgggttgacgggaacggcttcgccaatcctcggtgtttcttcgcagtcatgggcagaaggaatccgagcctgattagttcaatgaatgtatggattagagtcaccttggctcagggatgatgactaggtgcttgagttcgatggtcgtcgccgtttgtagcgtgtcccggtgaggagtggtcagcgagagagcgctgtcgtcgggggcatggagttgtaaagaccagagaaggggagggcgtatgtgcatttgtcagtgagaaatatgaatagtgcccaaggatactttactggatgttcaaaacactagggcctttgtgcaaagtcatgcg

SEQ ID NO: 13542 - DNA, 752 bp, Zea Mays
taacattggttttaattaatcactctcgattacatgtgtgctcttttatgatgcaaatatggcacatgaaatgaggagatctactatacattccttgtatacaattttgagtattacaaacatcacatagaagggcatgaactaatctgtagtcggctagccatgacgaggtgttcacggtggcgcggaaaacggatttgggggaaatgtgaaattgggaggctctggtggatgatcagaggcgagagctggtgcactaggtgcgtaataacctagcaaacctggttgatcactcaatttatagaatctatcggcggtggtgtccaatttggagaaaacgcgctggcagccggagagaggggaagttcactggcgcgagttaccatggcattcactggcgcgtcgactcaagggacagaccggctatctattgcgaccaacgacgatgtggtaacaaggcagtagcgtggtgtgcttgggttaacggcgatcagcaccgcacggccacgtcgcggcgacaagtggatggggtgacagagtggccacagtgctctgacttcatcccaagccaaagatcttttaccccacgaagttatccgggcgccactgggcacgaatcgcagtgccgacgcgaatccgggcgtggggtcaccggcggtgaggtttagtgcatctactgatcttcttcaggcactgtaccatcaggaccctcatcagagcgcctgacagagcgatttgcagggccttgttct

SEQ ID NO: 13543 - DNA, 501 bp, Zea Mays
tggcccaaattgaagctagaatcccaaaagctaatcttttcagatttgagaacttctgggttcatcatccgggtttctttgatttagtccagcaaaaatggaataaagacgtcagactaacgtccaatgcatctagaattattgccaaacttaagaatgtcagaaatgctctcaggatttggagcatgaagctctccaatcttaattccttgatacaacagaataatgaagttcttcaaattatggacaagctggaagagtgtagacctctgtatattcaggaatggaactttagaatcattattaaaagtcatcttgagaagttgctaaaacccgtggaagttgctcggcttgtggtttatgggttttgtttttgcttccctttcttctccttcccttacttactaggtaagtccggtttggtttagccttctcttttcctttctctaccattgtttgtgcagtcctctcccgtttcttttgtttatcttttaataaaat

SEQ ID NO: 13544 - DNA, 993 bp, Zea Mays
gcgacggatgggtcggtcggtggtgcgtagctgcgaacgacgacggaacgtgtggtgtgagatgggatgtcttgaatgcagctgctacgtcatgtggtgtgtgggggtgggcttctgtttcttctactggcttctgccgccgcgactgctgtgtttggctgcattatattgctgcagctccagcctccagcacgagcagtcaggcagaggcgggcccgcggggtttcccacgatattctgaaaacccaaaagggagactctgatcggcttcagttccctcggaacgtgatagttctggcagattcctccgggtccgcggcatggatagttttgtcacactgtttttttaaagctgccatatcaatatttatctaggaaataatgtgttctgagttttatttctcataaaattctatcattacttaaaaaacgactactatttattttatgtacgttgcagccgagttgcaaaggcgcagaaattaaagactggttcaatattcccgaagtcgagcaatggagttaatccgctcgaaactggtcaatcaacatggcttggtttttggagttgtatcggcgtttcggtgtacactttgatgcagtgcgcgcaccagtttctggtttcgtccaacaaggtccctgggcggagacagcagtccaagacaaaattatttaatgcggaaacaaatctgcatcaccccgaattggccccaccagtcaggctgcctgcctgctcctgagagaagatgctctctggcacacggagtgagtgagtgagtgaggtgagctggtcttgtcactcgtggcgggccctctccactccccagttcgcagagaccagaagctgaggactggaggaccgaataatcaacggccgcgattccaaggccgttgccatgaggggcagccggatcgatgtaacacacactctctctggtctgaagaccagtagctagcaaacggaaaacggggcctgatcatcgaatctactgg

SEQ ID NO: 13545 - DNA, 662 bp, Zea Mays
tcacaagcacatgtgggtgctgaaacacgaacaacgagggcgaggacggacctggaatcatctggccgcgagcaggtgattcacggcggcgcagtcgactgaattggggaaaaaacggcgttgcggtggctctgggtgaaattgggggcggggattgaggctacacggccgtaagaaactatgctttcactgtgcgtaaacgatttgggcaaaggtggagagggcagtgcgaatttgactcgatttggttcactggtatgtgtgtgatgaccgagcctcgccgcgaaccatgggctatttatagccgcggaggtccggcgatcacctcacggcacaaataccatcacaagcgcatgctaagcacgtagagaattggtacagtgaggaagaatcacggtgccgaggacaccgcggcagaaaggattaacgcgatggccgccggtgaatcactccggccgagcacaggagatggcgccacgtacgattcacccttttcccggcgttatccgtctataccgtgcacgaatccgggcggcgatcaacggcggcgagctgagctggcagtctgatccatcggggcactgtaccatggcacatcttcgttagtcgcctgaaccgtcccccttccaccgactagctctcatgattcttgtgaataactg

SEQ ID NO: 13546 - DNA, 378 bp, Zea Mays
gaggatgaaagggggcaaggcgatgggcccggatggtatcccaatagaggtgtggaaatgccttggggatattgctatattttggctaaccaagttgttcaaccatgtttttcgatcaaacaagatgcccaatgagtaggggaggagtacattagtaccaatcttcaagaacaatggagatattcaaagttgtaccaactatcgagggattaagctcatgagccacactatgaagctatgggagagaattattgagcatcgcgtgagaggaatggtgcatatcacgatgaaccaatttggattcatgcctggaaggtcaaccatggaagcaattttattaataagacaggccatggagcgatacaaggagcagaagaa

SEQ ID NO: 13547 - DNA, 482 bp, Zea Mays
aaaattccagccaatactgtgcatatcaggctatccaggctacctcagccaaaatgtaatgtctcatggattctggtaccaaagctcttctggcgagttaggcttgaaatttaataaaagcttcctttatcaaaaaatggctctcccttcctgcttggctgccccagctgcctggtgcatctccttcggtagcagctccgaagtcaataatcactcacatcgtaggccatgtcattgtcctttctccctcgctaattccgtcatggggcctgctacctgcagtcctgcatggatgcagcacttgcatgcctgcagcagtgctgggtttttgttttgttgatgaagctttactagtcttgttcctcactaccattttgctggtcctaaatctgtcagttatcacctccatggctccattcatccaatgagtagacagctagccagctctctcttatgtgcttgtcaaccgatcgagaatagag

SEQ ID NO: 13548 - DNA, 742 bp, Zea Mays
cacgaaggtccagaatagagaaccaagaagcaccatataactcatccaatagttcatcaatgactggaactgggtatttggatttaagggtgagagcattaagatgccggtaatccacgcaaaaccgccaggactggtctttctttttgactaacagcatgggggaggaaaaagcactgttgttgtgttgtataacaccattgcttagcatttcttggacttgagactcgatctcatccttcatggctgtagagaatcgataggggcggattgacactggccttgctccctccactagtgggatcgagtgatcatagaaacgactgggtggtagggaggtagggggttggaatagctctgaatattgttggagaagtttgagtacaggtgcaggtgcagatatattttctagtacccaaacttgagctgaaggtggtaactcagttgccatttgtctgacttccaacagtgtcccagcaggtaagcttgatgaacagccgcgcaacaccactgactgacccatataagaaaaggataaccacttgttcttctagtcgacaaacatggggctaaacatttcaagccaatccattcccaatatgaggtcataaaatggcaggggcaagattttgaatgtagagcaaaaagacaacccttggagagtccagtcagtttgaggtaattcggtggtgcactgtaattgactcccattggtaaccttcacagacagtggacactccag

SEQ ID NO: 13549 - DNA, 766 bp, Zea Mays
acaccagtttggggagctaactgctaatatagtaatatacatcgacctaccatcacttaaacaattcttttagaacatctaccttcacctaaacataagtttttgttcggcatgctgtcaacgtcgtcaactcacagtgacagcttactcgtatgtgtatgtcacaaggtgatcgagggactaataggctatttggtttgaggagtgatcccgtctgaaattagtgtatccggtatgtgttggtccgactatttctagaggaataagtagatgtcgtgaatatactagcgtagagtgcagtcgcatggcgggcagattagttccctttggcaaaccaaacaacttatcgagattcgaacgcaggatcggacaactcctcacggtgtcattccgtgaaccaaacacgtcgtaaaattcaccgaaccaggaagggattcagcggttccctcccttgtcgcttgatcaacttgggtgtctcaaaaagtagtctattcggttaatccccagcacctacaactgagctctcttgtgcttacacaaaactgagcaaaaagaaacgggcacagaaaactccatacacataaaaaaaactcggctgacataaaaaaaacttggcccgtagaggaaagaccggtctcacggtattatattaagaagaaactcaatcaaaaccctggtcgagaaagatcatgaaagctaccctgcccctgcaatatgagggtccacccgtatagattagatctttattcctgatttgagtcctctg

SEQ ID NO: 13550 - DNA, 780 bp, Zea Mays
atgcttgatggcttcggcagttccattgtgcatggtggactaagtgcttttaactgctctgccgccttctccagtttcggctcttcagccagttttgtcctagctttgactgacacagagcgacttggctatgtaataggagcggccccctcaattagcttcggcaagtcgaccgtttcaatgcgcctgggccgacgtgtcaaaactctaaccttttttgtcctcgacgccctagaagtcgcctgggtagcagctttcctctttttcccttgtttccgcgagggataacagtagtccgggtacacaaacccgataacatcaaacactctatttaatctctttttgccacgagccccgaaggcagttgtcatggcttcatcttcggcctttgagtatgctccaagcagctcatcacttgtcgcttcgatggcatttagccagtcatcattcggttcatcaaatgggctcctgtacctgaaggtatacttcaggtagactaaaccaccttggctagagccagtagcagtctccttcggcatttcccacccatttgcatgtggccacactctgtaagcaatgtgctcctgcaccaagtctcttgtgcctatgtaagtacacgctgtattgaaagccgcctggcatgtttgtatatcattcccaagggcagtggctggcctcctaatgacgaagcgagaccatatagggtgttgaataatccctcttacatcctccctttgacttatgtcattcttcacgtaaaaccattcctgcatccaggag

SEQ ID NO: 13551 - DNA, 588 bp, Zea Mays
gcttttgtgatcaaacaaaatgtatgcatatgatgaaggaaaatttaggggaggattttagaattagaggatgaagggggggggtaaaaggtggattagggtttcaaacctagatttggattttgggatgctacaaacctaccccacttaaaggaatctcgccctcgagattagacggggctcgagaaaaggtaagggtattccttcctcagagagtcctcactttcccaggtggcttcctcttcaccatctctgctccactgaaccttacagagtctcacttcggaattgcgggttcttctgactgctgagtcgagaatcttcactggcttttcccggtactggagatccttttgaatttgaattgcttctgcctcgatacgggtttctggtacttttaaacatttgcggagttgagacacatggaacacattgtgaatatctgacatggattctggtagctcaaggcggtaggccacaggtcctattcgggaaatgatagggtaaggaccgacgaaacggggtgctagctttcccttcatttggaaccttctgacaccacgcattggagaaaccttgagataaaca

SEQ ID NO: 13552 - DNA, 840 bp, Zea Mays
gtcctcatgggtatccggtgagttgctcccaccaaacttggatgaactgtgttgctgtcatcaaggaatcatggcgccggtaacgcagccagtggagttacagcatgacgaccatcagacccacaaggtaacgtcgtcgctgtagcctctccacactgcaccgatccactagtcgtcgccatcgtgtataccctacctctcctaggtcatcaaacaaagcggcgacggtgcgtagcccagtttttttggagttatcctactatattcgccaaaaccgtccttgtcgatattcatggcatgttccaaatatcccgcacgattcgcatgttgcgagatttccgtgagtcgacacggttacgattacctgccaattgtgttacaacaccataaacacggctcaaccccacgcgcgaccccaccacgatcccagtgaacaagcatggcacccccactacccgacctcaccacacacgacgtgtcagatggatatgcagctgttatcgacaaaaaatacaagcataaacgccgaaccacaccccgaccgcgtcccgaccacaccactatgccaatttacgcagctgttgccgtcaaaatacgcatgcataaacgcgtgaccccaccatgatcccggtgcactcgcgcggcacccccactatgcccatttacgcagccgtttccgtcaaaatccatatgcataaatgcggaaaaaccccacgcgcgaccccgccacgatcccggtgcacccacgcggcacccccaccaaccgacccgtcgcccgcggacctaccctggccggggctctctccagtaatggaagcccagggcttccattacctcaac

SEQ ID NO: 13553 - DNA, 873 bp, Zea Mays
gtcaatgagggtggaaagtgaggtatatgtgtatcaagtggactcgagacatgtgtgagcacaagtgtgtaggtgtgacattgctgaatatgatgagtagcaactggatgcagtttacttttgttattaatgacctcatgcaaacattcaattaatcataattgatgctacttgattattatgtctattagcatgtaattgttgttgattgattatgactaccatcatgtaatttatattgatcgattaaaacaatcaacatgaaaaccgacatggctttactatctataatttcaaagttgatgctctcatgtgtatcgagtgctgacacatgagagatatgcaaatcttcctatcttggtagtatacaactcttgagacaccaagacactgccattgttctatctattgtagtagcattcttgattcgttgccattgaccttctacatgcacaaaacaaggaattagacctttgaaccatttatgttcttatggtcttactcatgataagtgacaacacatgtttttagggagcgcacagtaccactatttctatttaactatgtttacttcttatataaggtgaatgtgatgcaacaaaactattcctagattaattgatattgactacatcaacaaggtcccatcaaattatagattgatgtgggtaacaatgcctacaggactacctacatgtgtactactgttgactttgctttcatcctgttacatttacattttttgcattttgtggctttaccaattttagtgttgttaagctagcatggtaggtgactataggttgtaaaacattcaagatggtaagttaaaaacacttaaaattagatatattctttgaggttgttctatat

SEQ ID NO: 13554 - DNA, 420 bp, Zea Mays
aatgagatgcaggatgcatatgtatgaatatgatgaaatatatcacaagataatcccaaaatggacggtagcgaactaaacattaaattgtaaaacaccgcgacaactgtacgcaagcgctagttatctatacgtcatcgggcatacgcagtcaatcatcactggaaaacaacaaacacttcctataattatctattgcaaacaggacatcataagcacaagcatttaccatgttcactttaatcatttattagttactctattattaaactactttaggcacacatacatttactgtgacttctaaacatcatacaaacaatttagtttaatagggaataatcacttaattgggttctactaacattctcaatattctaatgcaagcacacgcccaagataacacatagaagatgttag

SEQ ID NO: 13555 - DNA, 342 bp, Zea Mays
ctggaggtcggccatggggagaagcagcgccgtagaggaggcgcgctggggtggagggcaggaatcaggacctaggcggctgataccatgtgagagagttggaagcgtgtgtttgtatattgatgatgatagacagtacatgtacaagtatatataggggaggaaggtgagaggtaaaaggaagccatctacacctaaggaaagatctagaatacaatcagatcctcaatcatagtgattgagatcctcccctaatcctctctatctatatcagagacaacacttccatatagggcggccggcatatctgccaggcgtcagccaggatacactttctaacac

SEQ ID NO: 13556 - DNA, 388 bp, Zea Mays
cttggttagcctgtctataatgacccaaatagaatcgtggtgccgggaggtgttgggcaatcccacaataaaatccatgcaaatatcctcccatttctaagatggtacgggaataggctgtaaggtaccagctactttcaagtgactagctttgatcttttggcaagtgtcgcactcagctacatacttagctatttctctcttcatccgggtccaccaatacaacgatctgaggtcatgatacatcttgttactgccggggtgcatggaaaatttggaaagatgagcttcatccaatattttcttcctaagttcgggattcttaggaacaaccaatcagtcttcaaaccgtagaactcccttgctatccagaccaaagcatttgtac

SEQ ID NO: 13557 - DNA, 731 bp, Zea Mays
tgtaacccattgtgtaaaatttctattagtggtcgtggtatgtgtttgcagtacccatcggatacatatacgttcacatccctaccggtggctgtggagcaagggaatggaggcccttgggcaggttttcttgttagcctaaccctaacacttctacatctaggcttggttgtttgaaatgagggcactacatgtgagtaaggtcaccgatcgtgatgagtgtgttggatggtagtgacaggggagcaagaacgaacttggcaatcgggggtaaggagtaaggacgacaatggtggataggaccaagggctattagtgatgtcgaacaatagcactgctggtggagggagcacatgagctatgcgatatgaggctactacgaccgagagttgaggcggtggtattggcctagagtagagtggtgcgttgggcaaagatgtgcagcgtatagagaagatcgacgaagaagaagatggtgacatatgctgtgtgggtcccacatgaaggtggcatgatggatcacaacgactgcccgtctgctgcgtctcaatcctcataccgaacactaaatatggtgttgacgtctttttggagcgccaatgtgatacccaattttctcaaaagaagttaaatgtatttttcccttttctttcgtgatctgtgtagttggggttggagtttttttaggaagcattcaccaataaaacagtagaatacttgttggatttgtg

SEQ ID NO: 13558 - DNA, 331 bp, Zea Mays
ggcagagggtagctggatgtggagctcctagagtaactgtcgaagccagcagcactcggccacaacatgagccatggcccgatattctgcctcggcgctggagcgggacaccgtggtctggcgcttggaggaccaggaaactagattgtcgccgagatagacgcagaagccggaggtggaccgtcgagagtctggacagcctgcccagtcagcatcagagtaggcagtcagcgtgtcgacagattcggtgccaatgtgaagactcgaggagagagtcccctggacgaagcgtaggatgcgcttgataagcgcacggtgaggctcgtgcggg

SEQ ID NO: 13559 - DNA, 1135 bp, Zea Mays
gcctcgtcccaggatacgggttgtgcggggtcccgttcttcggccttgtgatgatgtcgaatgttacggcgcctgttcctgcattggtgtgcctcacgctgtgggggcttctcccctagtatagtgggctcatcatcggagatgagagtgtactctcctcttccctaaataaagaggacatccatgaagaaagagcttggggcacgtctcgtactccggtcatctcccccacgggtagagcggccggtgtagccgtcggtattgttcccgcgaccacgctagtgccaaggcggtccactccttttcaccaagtgatctgagtccacacacgggtgggtgaggtggacagaggagtttgccgcgacaggggcataacttcagtcggtcggaccgcatgtgttgttatggtcctgggcccacccgacgcgggcgcaatcctgcgtggggtgtaggttggttgaggtgttcgtaccttcgagtttgtcagggttgttccatctgagatcgagtgggacgagcctgcctctgcgatcggtgccctcgaagaaggcctcttcttggaaggaaccatgatgcggtgcacaacatcttctcgatccgcgatgcaggagagggatctaaagcggaaaacctccccagcgttgaagataatcggagtattgaagatgatagccatggagttgttgggaatcaatgtcgcaccccctacctagcgcgctagctgtcggcgtttatgacccaactgcgcaccacaaggttccccacatagtgcttttgagcaggacgacattgttgatgacgactcgatggtacgtgcagatgcacgtcagatcaccctacttcctgtcgggctgagtatttgagtatcactggtgaatatggattacaaatgagctgtggcggtagagagtgagttctcttgtcgatctagtggaggcacgattgctgtgagaggactaatgaggtatgaggttgccacgagctgagatgtgatgagctgagagatgagatgtgttcaaaggggtaccccctcggccctatatagacgaccagagggttatcccattacaagtcgtgatcactctctaactgaatcctccttttaacatggcacgccttccagcttatccagaat

SEQ ID NO: 13560 - DNA, 586 bp, Zea Mays
ctttggagttgttcaaccactatctcagcagttggtcattttgccaaaccttgtagcacagtctggcagctgtattgcaaaggaggttgaaccggccagctagtggcggctcaactatccctcggtcagaggaccattctgcaaagtcctgctaaataggcagttgaatgggcccttaggggcggttcaaccagggtaggatgattgaactccccaattgagttggcttgttgaaccaagtttagttttgctaaaaactagttcaattggctttggggtgtagttcaaccgcatttcacgcaaaaagttcgaacagtcaaccccatttgagaggcccctatatatacactctcctctctctctcccccctcatttactccggctaaccaacacattcattgttcaccaaacttgagacaaaaagctctaacttttctctcacaccccaactctctccctcgtcgatgtttgaggctaaaaccagttcaattgattgaaggagccttggtgtgaggtttgagttctttgatttcagacatggtttttgatctccctcctctttatccatcccttgagcttgttgcaa

SEQ ID NO: 13561 - DNA, 516 bp, Zea Mays
cagcagtgttccatcacgagttcttgaatgtactatctaatttgactaccaggaggctgatgagatactgggaaaaagaaagcaaggtacactaaaccctcgaagtcagaatcgctgaagaagggaagactggaaataacaaagcaaggtgtaccgcaatgaaccaaaaaaccaaagcaacataacaaagcgaggaccggtggaacgattacctcaaatcgctgaagaagggacgactggacgatttcgtgaccggtggttgttcgccaggtatccaatgcggcagatctacacgagcggcatgaacgatgagcacatgaatccggtgccgaaacggaaatcaatcgaaacaaaagaaacagggatcccaagaagaggaacggacggcggcgacggagtcgacgagaagaaaggagcggttgcagttagggggaaaaggaagacaacacagcagaggggcttcatataagagattgggagaaagcagcggcatgggcgctgcggtggaaggacagg

SEQ ID NO: 13562 - DNA, 1007 bp, Zea Mays
ctcaggattcccacagacaggactgcgggcctatttggaataagacgaggggctcttttgtaaaccagccatgccgaaggggtatgcttcaatctcagccgttggatcggatttcagcggcccagattaggtcatccattaaagcgaagcggtatgctatgccagccgttggatcagtagatcagtggcacagattaaattgaagcgaactctaatctcacccctctgcaaccgatccaacggaccacactacatcgcatgaacagctgcgccagatcgaaccccaaccgtatatcccaggatcaacggctaagattcaacactacgaatcgttttctcctgctaatctgaaccgtccaaaagatcgacggtccacatccctcttctctccccccaaatcctcgcgacggctcagcactgctcacccacggcggagcatcgtcggcggacgcgcaatccgacgcccggacgcccataacctgaaattagccggtgctaaacctagacggggtgatggcgagcacggaagggagattcttacctgcgattgaaggagtagcgagctcgtccacggttcggggcggatctacgacatgaacagagcgtcggtgaggtattcctagttcccagattccgcaaactagcgcactaacctcaacgctacggggtgctacgcaatcactggaggctactgaatttggcgcaagggtactcaccagtcgcgatggcgaaggagactgcgcccacggtgacgcgcgaactctgtgacggcggagacaaattgagcgcccactggtcagccacctgccccataatcgccaccggaccggaccagggacccgggcgaagctttcgggccgcacacggggttccaatttggtgccgagaacgaccgccgacggtgagggcggctatccgcccgctcggttcccacggcccacggcgatcgcgctcaacgaggtaggggaagggctgaatagtggatgggcgaacgagtccacgaccac

SEQ ID NO: 13563 - DNA, 512 bp, Zea Mays
ctttgttatagcgggagtagcacatggaaccacaatgccgctgccaataccaatagtctgcatataagggtcagtcacagcgcgtactgtttgctacataaatctgaaagtgtatgggatgcacaccttatcttgcacactggttgcagaactttggggtgtgagcggggtcgaaggcatgaccaagttagaggctttgctaggagtgtcttcaatgcttctgggtgcgccttgcaatagcacaggttgtgactgttttggccccgatgaagatgtttggatggagtcctttgcagtacctatctctgccacgactgcgttgacctggaaacaaatatttccagtattgattgtgtggtcagagaaactcacattccatatatacgtcttctcgagcagatctgtgattggatcaggaataaagccggtcggattgttggcaatgagcatatcgcacagcttcttgatgatgcgttgctccatccgaccaaagaggatgaagttagtgtcac

SEQ ID NO: 13564 - DNA, 518 bp, Zea Mays
gcaagcaccgagcaggcaggctttgggcaaaggcacgcacgcaggcagcaacaaggccgaggcagtggacactggacactagtagcagtagtagatctagtgagagagagagagaggaagccagaagcaggacggagagctcaactcaaccgaactttctatctctacagctctgtttttcctctttctcctcaatctctttctctatctctctgatttggggtttaggagggtagagagagagaggggatgtagtgagagaaggttgtgatgagaagctataaaacggaggtcaattgtcttgggatacaccggcgtacagctggggaggagggcgattggggtctggtgaggaagtgatggattacaaaatctgagcctccggctgctgcagcgttgctatgggatggaagatgaggttgcggccatgctgttgcctgctggagcgcgtgtactgctgtgccgcggcattgcttcaggctcacaactgcaggctgcctctgtgccgtgtgggcctt

SEQ ID NO: 13565 - DNA, 401 bp, Zea Mays
gcgctccctgtcacaccggcggtcgctcgagctccatgagctccacttgccacgccaggctcatcgcagcggcgagagtggtcggattatggatgcgcaccgcatgactgagaggcgggaggaggcctccggtgaagagttgcactcgttgagcttcgtccagccgaccggcacggggcaggagcatctggaaacgatttgagtactcctccacagatccggtgcgccggcactccgaaagttcgaacagcagcgcagaacggagtggaggtccgaacctctcattcaggaagtctttgaatcgaccccatgacggggcaccatcatcttcttcaagctggctgtaccacagctgcgcgatgtcgtccagatggtatgatgccaactgaacacgttcctcc

SEQ ID NO: 13566 - DNA, 582 bp, Zea Mays
cgcgggatgggtgctcgtctggcccatggtattgcagcattcttttccatgtgcaaaaatatatctttagatgtgcatgagctggctcggcggcagcgggagactgacgacaatcttcgtcgtcaatgctcctctatgggtatgccatttgctccctgttcgcctgatgtgcctcttcatcctcctcctccggaaatcaatgagtggcaccagcaggcatatggggtgtctttcatgtctccagaagatgaagaagaagattaagaatactttgatgatcgtgagcagtttgccctgcctctccaccaaggggatccgggtcaatcctcttctcatcctccgccccaggatccttcgggcagctatcctcccccagctcagtctggggaagaacactttgcaactcacctggcgcatcaattctttggtccgcatcatcctcctcagtggtgatttatggctggtggttctctcctttttggtgctagttgccaaaaagggggagaaggattctcatcttggcaacacttttaatttatgtaatgaacacctggtctgtaataattattattcgtctgactt

SEQ ID NO: 13567 - DNA, 792 bp, Zea Mays
aatcaattaagaatataagtggtgcatcccatgttgagttgttttgttatgcatataaacttgagtggaagttcatagccaattttgaatcgaatttgaaacttagaagttgaaaagaaaggaaaactaataaaaaataaaaagatacatcacctacccgctcgcaggccacattccttcagtccaggtcgctacccttcctccttcaccgaactgggctaaaataacactgctcgcaggccacattcattcatttgttgatcgatgtctcactggcttgcgggccccacccgtcagcctgccagccgtcttcttccccgattctgcgcggagtatgttacgatctaggaatcggctgttacgatcctatacatccccttgtgcctataaaactatgcacctctccatgcccgccaccacctacgtatccaccgtcgagttcgccaccaccacttggtttgtatgccaccatctccatggagagtgtcgacgccgaagtagagagtggaacatgtcgccacagtcgaacccgcggttcaccatcgccaggtcctcgaggaattaccatggagcgtcgtcggggcatgtgggagctggcgcaagtgttggcgtgcacaggtagcagtggggtgaccgggaattgctcgctggagtcctccttcgccgcctgaaccatcgcttgccatgggcgaaggccaccgactcatcgtttggcggtaagtatgtcttgattgagttcgcgtggttctctgctgtgtgtatgacttatccactgtagatcctatcctccgg

SEQ ID NO: 13568 - DNA, 609 bp, Zea Mays
gggttgagctcaccaaatttctctgctgccgtcgtcgcgacttggtcgggatctggtcggttttgctgtgacaccaggggtgagttcttctactgttcgtcgtcatgtaggtttcgggtagtggcgttcgggccgtggtctcgggctcagatggcgagctctgccaagcttgctgtcgcgactatggctcggctgcaggcgtaaggtaggagatgtactggtgccgttgatctgcggggtaacggtctagattagaaaggtggttgtggctgtcggatcgatgacggatggcctagattatatcaaggataccccccttcgatggattggtccagatccgttgatcttggatccatcggttagggctctcgcgtcggtgctttaagggaagatcgttagatcgggatccgaccactgacgttggacaccggttcggagcctgggcttctaatccgcacccttgatttgtgatcgcgcgaccaccattcacccgtaccccttcgctgaaaccgttttacaaaagagcccccacggtttatacaaaacaacccgcagtccacctctgagttgcctgagtctgggaaaaacttctagttctgcccctgtgtt

SEQ ID NO: 13569 - DNA, 316 bp, Zea Mays
gtgatcgggtgctccgaccatcggtatggggcaggtggaccggtagccgccacccgtatctgacgatcgttgagcttttgttgtctcttgttctcctgcgatccgtgtctgccgaagatgacattgacctctctgtcgacgtgcgggaaggctccacctcctccctcctcctgctgctggggttgtcgcggttctcctggtcctccttgcggcggaggaggaggtagaggttggaagggtcggccgtgcccgacggagtgcttgaagtctctgcagttccgaagggtgtggcgcatgtccttgtggtacgggcact

SEQ ID NO: 13570 - DNA, 632 bp, Zea Mays
ggctagggcacggttgcagtttcatggtggggaggaagacaccgacatggtgggcatggaattcagcgtggcggtgcatgcacaggaatgagggtgacatgcggctgggcgtcaagatgaaggagggcggtggtgtagataggatttagggtggagaggcagagggcggtagagtagatggtgcagcaggtcgtcgaggaggcaaacaccgttaaatcaaatgtgagtagaggtggaggtggcggagggcagcgcgcaaataggtttgagggtggaggggcgacggatggggcggagcagatgatgcagtgggtcgagggggcgaatggggctaggggttgtggtgtcaaagggtggcgccgcaaactgggctgaggatggaggggcagtgggtggctgaaggggtgaagggcggtgccacatctatgggtggaggatggtggtgggcggcatttgcggattgaggttgaatgagggaagtgaggagagtggacaggaatgggggtcccacctataaggtcactagcatgacggaaatggagtgagaatccatttttatgcttaaagtgggttgatgggtaaaactgagtaaggtgcaaaactaagggtggcaacgaggagcggggttaaac

SEQ ID NO: 13571 - DNA, 439 bp, Zea Mays
ttccgaacgagacaaagactcacgtcgcacgatgaaactcgggtgaaatgatgagtagcgttaaggatgatctattaaagaattgatctaggatgttgttttttgaccgtatgatttttctagagataaaacactgggtgcatttagcaagagtatgagtgcgtggatgaatcatgttgtgtacttagcgtagtttaaactggtggggttaagggtataaagaacatggagagacgaattggcgtgtgcccgtgaaaaatatatgcatgcatcatgcatgggtcacaagttgcatatataattgcataaacagatcaggtatgcctcatgcccgttaaaactaatccgtcgtgatctgtagtcaacgcgctacggatctcttcctctactagtaaaagctttcccggccccatctcaagagcacgtacgtacacatggc

SEQ ID NO: 13572 - DNA, 1546 bp, Zea Mays
gtcagactgccaggattttcgcgcagtcaacaccgttttctgcgcgcttttactgcgccgtttgacccgaaaccggttgaaccggttttgaaaccggttgaaccggttttcggttttctcgtggccgactccttccctttttatgtctctccctctctcctcttcccttctcagactcattttccagccgccgccaccctcttgttctcctctctctcaccttcacactcctcgtcaaaaactttctcgagccctcactcttttggaagagtggttggagatccgttcttcccggcgtgtttccaccatcttcctccatctcattgggagatcttgaccaaatcttcggatcgaggtattgctctatattatttccttgtactcgatcctacgcgttcttgattatcatatgtatcattcattgggtacattttagtttaagtgattgcaacacttagattatcttcattttgtcacaaacattgttagggattagcgatttgatattgttcgttgtagttgaaccgctcatatgaacggttgaagtgcatgctcaatatcttatgcgtttcttctcaaacgtgtttgatccttgctcatcataggttctatttcttatttcttatttcttagaatggtgcgtcgaatgaacccgtcggtggtcgaatccgactcctcggatgaccaggaaatccacggagataccccacctcgctctcgatccaagcgagggcgcggaagcggcaatgtcatgccgggtgctgaggcctccgggtctcaaagtgctcgcggtcgaacatcccggaatccttccggacggtctcgacctgcgacgaatctgcaggcgtgggagcctacaagtgatgatgatggcgggaaggacgatgaagtcgatcttcccccggcccacgctcctgtgattcgcggcttggtcctccaccgggcagaggctcggcgtgctggcaatgagccagtcactgactttactgccagtggaggctctgctcttctccaggatcttcgtttccaaaatcctgtattgcgtattcgcgatgccaggatcgatggaaatcgcttttggactcttcaccacgtggatttctataattccgtcattctacccaagaagcatcaacccatcctgcatcaacgatatattaactgggaaggttgtgaagcgattggggacccagaaatgtcacaggcactgagggcctgtgaaaggaaacaaatgaagaatatcatgacattccaatatgattggaatgatgaagtgattgctcaattctactccactctctggataaagcttgctgacgaggagagtcattacaactacccctatctgaacttcttcattgaaggtagttggtacaaggtgagctatcgtcgatttgctcacattcttggcttttctgacgatgatatatctggagacaagatcaagattcatgatttccggcagcccacaagagatgaagccaaggatcttcatctgtctgagtctggaaagtattgggagtcgaccaacattcataagtattat

SEQ ID NO: 13573 - DNA, 360 bp, Zea Mays
gcccaaccacgggtgaatccacgcccgcgcgcccgcactgacgtgcaactttgccccgaagaccctggcgccttgaataaccacagaagaaacccgcgcactatttcggggagtcactgacagtttacagaaaccaccccgcacttctaattcttctccacaaacgtccctggccacggcgcgctcgccgttcatctctgacgcggcccgtactggccatggctggcgatggatgctcggtcgagcgacaggggaagtataactgtcataaagcgacctaggatcgagctttactgtggcttgaacacttagagaatgtactgcccgcgtgtatggcagaaaccgtgatgtcgatcccgt

SEQ ID NO: 13574 - DNA, 399 bp, Zea Mays
tgcttgcgcggtggttcgcctccttgaccgctggttgcggcagagatgaaagggcgtataaccgtagggcggttgcatgctccttgtgcggcggttcgccttcttgaccgctggttgcggcgaagatggaagggtgtataaccgtagggcggttgcacgctccttgtgtgacgattcgccttcttcatgctttgggccagcttgtacgacatgtgaggcctggcccccatgtcataggaagggaaacctggtgcgcatcgggggagaccttgctcgtgatgcttcagggcgcgagcagggaaatctgcctttaaaaagggggtcatccctcgagtagcagccatgtcttgcttctttcccactcgcggtgtcctttcgcctccaagctctctgtgcccc

SEQ ID NO: 13575 - DNA, 893 bp, Zea Mays
caatttcgctagaggtggtctatcaagctctgtccacggtgacagtgcgggtgatcaagtgaactaaggtgttctggataacggaaggcttggctggctaaattgaagctagggaaaggtttctgggttcaccggagatgacgcacacgctaagttttgggctaggcacgagcagaaaggtggggcgacagaaagggtgtcatggcggcgttttacagcgcacgggtgcgttctggtgatgggcttcagccaaacttcaatttgccgcatccaagagcaataagagatcaaatactaactgaaaaagggagcaatttgataattactgacccgaggagcgctggccacgaaggagttcttcacggcggagcaagaacagaggagagagggatttgtgggttctttggtgaaattgagccgagtgctcgatcgcggaggtgcggtatgtgataaacaagtggaacccgggcgcaatttataggccaacggccagaattggatgaggaccacagactttagattgcgcaggcgagctcaccgcgcgacggaacccggtgatggcacggtggccgccgtttaaccggagcctgccacctcagtgatttgctgccacgttgccgaggatatttaccgcggccgccagcccatcccgaccgccgtggcgttcttatcgccggcgagggctgacccttatccacgacgcgatttttctgaagactgatgaacagtgcgcctgactcagtgaagagcttatctaacagatcaaattggagctcgattttctctcaattttcaatggtaacatactccatactctgcagcaaaattgtagagctatagatcagctacaagtttgtcacagcagccacagacagattcttgctggatcatag

SEQ ID NO: 13576 - DNA, 370 bp, Zea Mays
atccttgcgatacgcaaaattgtagtagccaaaattttcatgcagaccgtctgccctggccttcgtctggtagtgcaactcatgcactcggcagaatgcttcggcatctgggctcatcccttggcttcggagggcccagatgaagacactaagcctaacaatggcgttaggggtcagctgatgaagatatattttgaaaattttcaagacttcccctatcatctcattcagaggaagtcggagtcctgctctgaaaaaactcttgaaaaccactacttcatcatccttcggcgctggggtggtctcttctccagcaaatcggataagtttcctttcagcttccccaaagtagcccagcttcatcatcatg

SEQ ID NO: 13577 - DNA, 602 bp, Zea Mays
aaaagcatccagatcaaatatgcatcagtagcacacccaagagccaatgggcaagtagaaagagccaacagaatgatattggaagcactcagaaagaaagtctttgacaagaataaaaagttcgcaggaaaatggatcagagagttgccatatgtgatctggagcctaagaactcaacccagccgagctttgcatggaaacactcctttctttatggtttatggttcggaggcagtgctgcctgctgatctcaagtttggggcgccaagattgatcttaaaaaacatagctgaagctgaagctactagactggaggatgttgatatactagaagaagaatgattgaatacagtgattcagtcagccaggtaccaacagactctgaggcgctatcatgataaggccatacagcatcgatcctttgcagtgggagatcttgtcctccgccgaattctagcgggggagggacgacacaaattgtcgccactatgggaaggaccattcatagtagcagaagttactcggcctggatcatatcgtcttactcaaatggatggcacggaaatagggaacttatggaatatagagcatctcaggaagtt

SEQ ID NO: 13578 - DNA, 592 bp, Zea Mays
tgcgccctagtctagtgtagtgctgatcgtagtattgcctgagaacgtgttacaactggtgtgtgtgtgtgtgtgcgaaggaggagggcatgttcttttatagctcaagggtaggaccttacagtggagacttgttctctactggtaagagggtgatttgttgccccgggttgaggtagcattcctgacgtcgttcgtagggtcatgtgtagtcgtattcccaggatagtgtaccaccttatttgtctgccatacaggtccctgtagtgagtcaattgttgatgtctttatagtagtgtgtggtaggtccaacagatcagactcatggtgcggtcatgcatggtgcgactccaattgtcgtcatgagccctacgtcacctgccagcgtgcgtaggcatacactcggtatggtgtactatcccatatttaccgatatacaaggcaatgtagagactccagtgctgaggtccttccacgactaaggttggctgaccccacagggcagtggggacacgcctgagaccgtacgtgggggcttatagtcacgttgatagtgtcctcccgatgccccttcagtatgctgcacgtatct

SEQ ID NO: 13579 - DNA, 1075 bp, Zea Mays
gagacagccagacttatggaaagagctcgcaaggagcaacttccggatcttaggacagatgaacaaggagccctttggttcaagaaccgtttgtgtgtaccaatgggagaggcacgagaagtcctactcaatgaagcccacaactcagcttactccatccacccaggaaccaccaagatgtacctggacctcaaaaccagatattggtggaaagggatgaagaaggaaatatcacagaatgtggcccggtgtgacacctgccagcgaacaaaggccaaacatcagaagcctgcaggcctgctgcaacccctcccagtacctgaatggaagtgggaagaaatagacatggatttcgtaaccggactgccccgaacgcaaaaagggaatgattctatctgggtaataatcgatcgtctcaccaaggtggcccacttcgttccagtaaaaaccacttttggaggagcctcccttgcccgaatataccttaaggagatagtcaggctccatggcattccgcagaagatagtgtcagacagaggaatgcagttcacctcaaaattttggaaaagcctccagcaagcaatgggcaccaagttagatttcagcaccgcttatcacccccagtcagatggtcaaacggaaagagtcaacaagatcctcgaagatttactaagagcctgtgtgttaacgttcgacagggattgggagtccagtttgccgtacgccgaattctcatacaacaacaaccatcaggccagcatcaaaatgtcaccgttcgaagcattgtatggaagaaaatgccagactctcctaatgtggtccaatgtaggggaaagggcactagaaggacccgactttgttaaagaagccgaagagaaagttgccctaatccgcaagaggttacttgaagctcagagtcgacagaaaagttatgcagacaacagacgaagagaactcagatttgaggaaggagatttcgtttatctcaaggtctccccgatgtgtggtgtcaaagggttccaaatgaaagggaagctagcaccatgtttcgtcggcccctaccccgtcagccgag

SEQ ID NO: 13580 - DNA, 375 bp, Zea Mays
gtcgtggggaccttctctctctctccgaaccagggcctaggagataaaggagcaccccgtgacccgttcctctcccctgccacctcctcgcgcgagcctagttctccagagcaaactgacaccgccaccaccgctgtgaggaagaagacccggcacgggggaacctccggtctagtcgtcgtctgcattgtcggtgtggttggagacctccctcatgatcaaggaaagacattagtggtcgcgctacccgtgattgatcgccagctcggctcgaatttcttgccatcgatcatgcgacgccccgattccgcaccgcgtcgtcgctggaagtttctgcgcagtaaccttcggtaagtacccgccctccatgttcgc

SEQ ID NO: 13581 - DNA, 1142 bp, Zea Mays
ttttttatgaatgaaatgacgcactagaacattgaagatgggaaagaaaagaaacaaatagaaccgctacctgttctggaacttcaaatataaaatgttcattccacttggcacagtgggtcagtaactcagtagtttccacaggttttacacatctcgtcctggcactctgtgggaacactttgtgctgatcagaagcatggcttccaataagtaagcgtaaagcacagaagtagctgtgaccattgccgtcatctatgataggcaagccctatcatggagaaaaaaaagaagctgtaatcttcataaagaaaaaaaaagtatgcatttgcagaatgcaagaagttcaagtacaaccttagactcaaagatctgtacaacaacatagtatcttgattctgttgaattggataacacatttagtttatctgaaaacctgggaggcggaagcaacaacgaaactttgctctcatgctgtaaaagctcaatagtgatttcactatcttccattttttttttaagataaacatcacatcctaatttattctcaaaaaccactctctggaaatcatcttcattcaatgcagagtacgaagaatcatcagcttttttcatgttttcaatggtaccctgtcacatggatataaaaacataagcaaaataatgaaacatcaagggcgaggaaggataagtttatacctcgctttttgttgacgatttattttcaagatcaatctgtcttctccatgaaactaacgtttctataagcagctcaagatttgcagagctcaggttagcatttagaggacttgttgcagcaacacgaatcctcttaccaactttggaaggagggtgttcactggtatcatatgtttcaaaccttcaatgatggcagaataatgataaggttgcagaacaaaaattctagaagagaacagtactcattgacaaacagatacaaatgactaaacagggctcacttgaatattccatcaaatggctcaacaaagggttcccatgcctccaagtgtctattgaatgtggatgcagcaattgaacagatcaatacagcattcaatgtctcaaatcttccatgtgttgcaagatttatattagcgattgttgtgtcaaaaagtggtgtg

SEQ ID NO: 13582 - DNA, 529 bp, Zea Mays
tgagtgcggacctgagagcggctagccccgacggggtgattcacggcggcgcagatgatcaatttgggggaaaacccaaattctacggctatggtggctaatcggagatgagagttagtgtcttgggttcaaaataacttggcgaagtagagtggggcatcaatttatagaagctttaggcgggggctccgaatttgggaggagtgtggagcttatctccctcgtgaggcaatcaccgaggctcaccgtggagcgcatgcattcaccttgcgcctgtaactatctcggggtgccacaatcacgacaatgtggtgaatcaggcgactacgtgtcccttgctgcgatcacgacgagcaccagcggcgatattttaccgaccgtgcgggcaagtgggcacggcggtgactcagccccgaccaagaccttcttccccaagatctttttaaccctcacggttatctactccttatcggcacgaatcatggcatcggcgtgaatcacagtgcagaggtcaccgacgacgaggtac

SEQ ID NO: 13583 - DNA, 1380 bp, Zea Mays
agaatatatagacaggaaagtaatctcaaataagcttgacatattcagtctgggtgtcatcatcataaagattataagtggacctacaggttacacccagtgtgctgaaatgccttccaaacaatttgttgagcttgtaagaaaacttgctacaaatggtgatcaattgtattttttgtggaaatagcacttactttttttaatatatactcaattttctatgttccgaatccaaaccatcaggtacatgaaaaatggaggaataagttacaaacaacaatggatgcagctgcattggagacatattgtgaacaagtagtgagatgcattgaaatggctttaagttgtgtggagaccgatcggcacaaaaggccgagtataggggctattattgatgagctaaataagatggagacaaataccgaccaggtatagtcactgatgacactttcatttctgattatttaatgtttatcttactgttaaaatctagccatgacataatacgaaggaagttatatcagccaataaatcttcataatcacatcatcaacaacctacatgtttggtacagagctactaatgcatgagatggacggttcaaaccacaacggctccttttttattgtggaactccacgttttggacaagaagtgattaatgttttctattgaagtagtaatatttgttagtaagacaactcatttcacatgtcttttcactgctctgaataaatgaaagaggaaagtctgttttgcacagtgaatttaggcatttacaaagcgtacacaatatttcaattttaccaccatgttacaccacatttaaaattgtaactccaacgttttgattttcccattaaacattttagctttattacatagagaaacaacaaaactgccaaaacattattgcctgaattaaattaatgttttcctaggttctgatatccacgtttaaaataccatctccaggtattttcagtggatatatgctcgactccagcacaaacacaaccaccaccccttcctgattctagccacagcacagaagaaacaagcaacacaaagggagttagcagactgggaccgagagagtacgtacagagcacaatgcgggacctggtaattgggataaccaagtcggtggtggagggggtgatcagcaaggcccagtcggtgatggaggaagaaaatatgctacttattagcatgcagcatgacctccacttcatcaccgatgagtttcagatgatctattcattccttagcatcactgatgaggagcgtatcaacaacgcggtagtgaggatctgggtgatgcagacgcgtggtctggcctatgacctggaagactacatggatgccttctcctgcctgg

SEQ ID NO: 13584 - DNA, 1039 bp, Zea Mays
ctttgttctttttttgtaataagaacatgctcacgcgcatcacatgttgtggaccatcgttttgtgtgattcaaatagaatgaccttatttatgtgtaagcgttaatctgttggtattagcttatctagttccttatattattgtggttggactgctttatctgaaattttgttcctactctactccaaatctaccttttgcagcacagtattagtttattgtaggaacctgtttatgcatcaatgagcagattatcagtggaaactgataacttgaaaagaactgctatggtccatcccatagtatattggcttgaactcctatgtgtcatatccaaatctactttctgcataacagtagttatttatagcagacttgttcatgggaaaatactcagtggaaagtggaaactgatattttgggtgttggcttctctgatgtggtcttatctgtgtgatctggatggttcggacttcacttgaagagaagtgactgcatacagttcctcaatcagtgagcaagtgatctaaaatatatccacccatagacccgagaatccctcttaaaatgctagataattcaaaacctgatcagaaggcctgtgctgaagtcatgtgttggtttgattaagcagccccctttgttaattcttgtacatttaacactgtgtttctgttatgaagttgtattccctgaaatgtgtgtgtgttttaatctttgggcatgaaccgtgaagggtctagttttgagtcaattcatgcagtactgcattgaattctgttgggttaataacaaacttctgtgaccctaataattattggcttgttaggttgtagttcctattgatcattggttcatgggtgtgatatttgttgctcaccttctaaaatgattgtgttgattgatattgacctgctgattacggcgagtggagatctgcacctggttctaaaagaatgtatctttctttttgctttatttttgaccttccatgatttttgtggatcatgacatttttgtgtagacgtcacttttctg

SEQ ID NO: 13585 - DNA, 674 bp, Zea Mays
gaagcaccggccgggtgaccgccgccgccggccgtttcgattcatttgcgggccgctgcgcgtccctcatacctcaccgccggcgccgcgccgtcctctcacctatcgccacgcgcgttcccgcccgccccttcgacctccatctactgcctcgcggcgttgcttcccgatgtcgttccgaggtcgtggaagagggggccgagggcgagggagaggtgggggcttcgggtacgaccacccggccaagcacgtgccacacgaggactttccggtaagtctctgctccactggctccgccccgacgctgcattgcgtggtgcggtataagtagaactgatgtgcttgcataatgagcaggacatcgctctgcctgagatgaagtgcgccaaggcgagcaacgaggagaaagcgctgattgtgtccaccttgaaactcgaggagttctggaggagttcctgctactacctggaggaggatgctcccaagaaaagtactagggctgaacttatcacggcttctctttttgttcatcatgctgattcttcgtaatggtatagtggcgtagtgctcctcatcttcggttctgcttgcttgcttgctcggaagtcaagattttctttaaacctgttgggtaggcaatcaaccctgtgaatcatctgcaggcatcaacttag

SEQ ID NO: 13586 - DNA, 840 bp, Zea Mays
cgcaaaatggcatggcgaaggggtatagatcgatcttggccgcacaattggcaatccaaggtctggattaaatctacaaccattagaaatgtggtgcaatataggcccttggatatggatcgaacagctatggctcctaagtcgcgtggatcgcacggtgaccgctcgattaaggatctacggcttggactaaatcgcccccaagccgaacatccatatgtgatcaatgccacacgctggtcatccaatggtcgacgctaaccaaagctttcccagctggccccgacggcgccgcccacaaactacggcggagcttcaccggcgaaccatgcgcccatgctctagtgctcggtttctcaatcttttaggtgctaaacgatgtgcgaggtgaaaccaatcgacgaggcagggtctgaccgggggtggcggcgcagagaacccccaacgcgaccgactacggatccgcggcggcgctaaggttcccgcgagcgattcacgtagctagggcgagcatctacctatgattctcggtgttgtgtaacaaggggtaacgagcgggaggtaggacagtttcttaccggcaatggcgcggcacagagctccaattgcggaacaatggcgtcagtggcggaatcgcacggcggcagatgagatccacgcggaattctgcccagtcctcactgcaacgaacgctcccgcaccgcgcacaacctccacccacgcaaattgaaccgcgaccgagagttccgtggcccgaatcgaagtctcctcgccggtcgacggtggcggcagaatcgtccctccccacgagcgctcggagcgatggcggatgaggctaag

SEQ ID NO: 13587 - DNA, 658 bp, Zea Mays
catacttccctgtggctgcaacccaaagtcctggggagatagaggcgtcgctctgaccaccaaggttgcgtccctcacggacttgtgtggcacatacacgttggctggaaagaaaggaaaggaggagtagacaatgaataaaagaccgaaagcaggaacacgagcaaattgatataacaggatgagcgcttcgtggtaatcaccttccctagcgcgatcgacgaaggaacaaaaaattgcgacgcgacccgacaagctgccaccacgtgactccctgcaggatccaaagatgtcacggtgcatgttgtcgcctactctgtcccgctcatagcgacgagtactgcaacattgatagaaggcatcgcggtcgaggcggggttcatgaccgaccgacccgtctccgtccggacgttagatatggttgtggtgtcaccatgtcgcaatggaccacccaccaacatcgcagttcccgctccaccgaaaattgtggaagacgcttcctccgaggaatgaagaagaccgactccctctcccgattcaatagggcgcgcgacgcccttacccttcttcgctttaacaacaaccccctcagggagcggtggaactgtggaaggctaggcgctagaggatcgatcccctgtaaggaccacaactcaac

SEQ ID NO: 13588 - DNA, 712 bp, Zea Mays
gtcgtggctacgttggaacagcaaagatagggcgtgggctgccttgaagcttccttgtgacaaaactgacgaagatctcttcaacgcttccacaactgtcacggtaggcaatggaaagatggctgaattctggaagtctagttggattcaaggccaggcccctaagaacattgcgccatcattgttcaagaagacaaaaaggaagaacatcacagtggccaaagcgctcaataacaacaactggattcgtctttgctcaccgtatacgggggagggagagtttggagagttgatctctctttggcgggccataggtaatatgcacgagcttaacgggctagaagacaacatctcttggagatggacggcagatgggcagtacagtgcttgtagtgcttataaaatccagttcgcatccaatttcagtagtatgaatctaggccccatttggaaggctaaagtggaaccgaagtgcagattttttgcttggactcttctccataagagaattctgacggccgacaaccttcacaaaagaggctggccatgtaatccagtttgctgtctctgcaactcagccccagaaacaatcctccacttgtgcaaggattgcccctttagtagagaggtgtggaacaaagtttggattggggccaacgttcctttgctgacagggtcttccaatgacatttctttatatgattggtggatg

SEQ ID NO: 13589 - DNA, 429 bp, Zea Mays
ggacagaggagtcttcggaagaggacttggattattttgtagcgttggatgtggctgtggcggagacttctccgcgtgtgatgggtgctgaggatcttccgggtgcgagtgctgggcgcaggcggcgaagggcggtggcgaaacggagagtgagtgagttgtcgcaaagtgataggcgtcatcgtggtgagatggagggtggtcgtcttcgtgtggatgtgactggcaagcgggaattgttgtcctcaccggctggggcgagtgtgggtgagggggagttgcgaagtctgtttgcgggtgaggaattgaggataatgttgttcaactatagggagatgggtatcatcccgaaggttgagccaatgtaaagtgtgatgccctcgctgtatgtatgtaaacatacttttgtgtgatgaagctgcgcgcttt

SEQ ID NO: 13590 - DNA, 911 bp, Zea Mays
caatatttctatctgtctctattcctttactccacaacctctatttccataccaatatcctcgtccttcgtatctctatcgaccttccatggatgctcctcttctctcaataaaaatcctaccactaatgttcctcctcctaccactaaagctcctactatcaatgctacttgtccaccaccattcacttatccatatcctcctccatacccgtatgaatatccatatgacggtcctgtgtatggattctatggtgctcctcctccatatgatgttccatatagtgctcctccattgttctctgttcatgcatggtggtattattggaagcgatgggaactaattcccgaggtgcctttggggtccgggcaagaggggcgtaggggtcggtactcaaggtgccttaagaaacaggacaagaggccctaggggttgatactcgaggtgtcatctgccatggggccagggaaagaggtgccccatgatactcgaggtgccctagggatcgggacagaaggtgcattagatgccattgtctgaggtgcccaaagattagggcaggaggtgccctagggccaatgcacgaggtgtcccgaggtgtcggggcatgaggtgcctgtgaggccgatgtgtgaggtgccctatggtgcgaaaggggcctagggttgtattgttgagagaaatatcctcatcctcctcctcttcttgcatttgaatttcccccgactcaagcttatcctcgttcctaagaaatggtcgcaaatcaaaaatgttaaatgtcggtatgtccccaaaattcgtagacaactcaagtttatatgtattaccattaatcctttctaagactttaaaaggttcatcaaccctatgcaataacttaaattttcttaaattagggaaccaatctttcc

SEQ ID NO: 13591 - DNA, 653 bp, Zea Mays
gcgcattataacagagaagtgcaggggctctggtgtaaaacttctcaagactcagactattctgagttggatggcgggttgtttttattttttccgagggctcttgtgcaaaaacgacagggcgaaagggtatcgactaatccaagtcgtgagatcaaccagggacgactacgattagatctgatctcccgcgaagcggtatgcgatagcagccgtcagatccaaatgcaacgctcccgatttaataacctaagatcttatcctgtgcacacgatttagatcggacggttccgtgacgttgaaccgaaccggtatacgcggcctgatctaaaccgctcagggatcatccaatggcccgcgatcgtcttctccctctggacacggacgacggcagcgccgccctcaattcacggcgaacctcgccggtgaaatcccaatcaagtgctccagtgccctaaactccatcccgacaggtgctacgcgcgatagggactaattcaaatacatgggaggagttcataccatgaatgacgcggtgtagcaccctgcccacggaggaggtgcggccctcggcggaccaatatcgacggtgagaaattcccgacagcacgagaccacgcacaccaggattccttccttaacgcaataagcgc

SEQ ID NO: 13592 - DNA, 774 bp, Zea Mays
ccgccatcgccaagtcacacatttttcgttggccctgaaggcactgcatgtgtgtcacaactattgagtcacaattgcgcttgttgcgtctgttgtgcctattgcgcgtacttatcgtgtaccccaactaccaagccacaactgcgtctgttgcgctgattacgaaggtttgatgtgttgtcgttgccctgatggccgcacacgcgttgacgccagatacactagagcttgtactcacgtggattgtggtgggtcgttcaagcccttgaagtcacattatacgcaccttcgtaaacaatttttttgtctctatattttatttgattgtgttgtgaggcatcatatatttctatatatcgccaagtggccataatgactatatcaagctctatagtgcttggaaatctgggaaattaaatcaaaatacaatgaaacacagataagttaaatctctgctctcttctcgcgcataaagttttagccggagtagcctgaagaaattcaatattaatgcatgaaagcctttttggcacagaaaacatcacaaattgggattctattagtaagcaaaaggccttaccaaatgatttaagactataaatctcagccatacattgctcaaccagatgttagcacattgctctctttgtcgctaaatgacatgaagcaaactatgagataaaaggacatgtaatcgctagcaacacgaagttgcgagtataccgagaggttattctgagaaatttttcactatgttggtgtgaaaaccatagt

SEQ ID NO: 13593 - DNA, 554 bp, Zea Mays
tccactagcagtaccaaaacaaaataaataacattattatacttctgctactgtaggtaactacagtaaaataatatagcttttgacaaagataaataaaatacaatgattggtagttatcaaatatgtattttattggtatggttgattttaagggcatggtatagggagaacggctatgggagaaggtgatatgggcagagtgatcttgctgagtggcgcaatagtgttatataggaagaaccactacggacagccttagccaacagaccaactccaactccactccatgtccaacgagattttgctctatcccggtctcctctccccatcctctattggtcacttcccactatggcacacacaccagcctcactatggcacacagaccaacctcgtgtcgtgatgtctttccctcgagccttagcggtttgaccacattctcattgtctcatcatcatcatcgcttgtcgtcttcgggactatttggtttcaagctactaaagtttagttagttttagtggctaaaataccaaatagagtgactaacatcc

SEQ ID NO: 13594 - DNA, 333 bp, Zea Mays
gtgacgcaggctacgtcgcgctgacgggtcgctcgtttcggagccccccagaagtgccaaaggaccgcaggtggggccgaggaggccagctcccagacccacggcgcagaggcttgtcagtcctccggtcctgccaccaccaccaccatctgggggtgatcacccccagggacaccagtatcagcaacagcagcagcagcaggagcggcaatctcctcgcttccagggtcactggaaggtccaggtccccaagtaagtgtagtccctttttctttgagcctaaacatcatgccgacaagtcttaacccatcgtctgttttccagggcttcttc

SEQ ID NO: 13595 - DNA, 640 bp, Zea Mays
ccagccactgcaaccctccctgagccagaacttaggcatagagcacccctaccctctcctcgaagcctacaccggctgtagcgcgccggattagcccccaccacgatgggtatggctcgccggagtgacctttggttcgcccaaggtttccctccattgtttgcccatctcagtcccgttctcgcgacccaaaccttgccatagtgcttgtcgagtcctccccaacctcttcggctacccagaccacccccagcgcccctaaaagccctggtctacctcgcctccggcgactgcgccaccgtgactgtgaacagcgccgcccctggcagaccagagaagataaagcccctagcacccgatcctaactgtccagtcttaatcgaatggcctggatgtgcggataacgattcgcgtggtccgtggaaccagaacagttggtccgagatctagtggctagagcgccccgtgccctcaacacaccgttgacccgtgggccccgcgcgtcagtgtctcgacccgccctaagcccacctgtcagacgctcatgtccgcgcgtccacgtgcccgcccgccagatctaatcctggccgttgatcgtggatctgacggctggcatgacccgataccccttcgcgtggtc

SEQ ID NO: 13596 - DNA, 680 bp, Zea Mays
aattccagtggactttggaccagcttctccttttcttcgtcaactttaacgtaaaaccatttggtcttccagccagctggccacttcgttcgatagctgataactggaaactttgtattcttgcgatatgcaaagttgtagcagccgaagttttcatgtagcccatcttttctagcttttgtttgataatgaagctcgtgtattcggcagaaaccttcggcaaatggttctacccctggcttcggagggcccagatgtagacactaagcctaaccatggcgttaggcgttagttgatgaagataaattccaaatttcttcagaatatcagcaatcatcctattcaaaggaaatcttagtcctgctttgaagaagcttttgaacaccactacttcatcctttcctggcttcggagtaatctcctccccgccgaagcgaaccagccccttcttcgcttcactgaaatagcccaaattcatcatcttcggcatgtcaccttcggaaatggtggattccccaaaatctaagtggctgggtttagttggcgcagcgccgtaatcatcctctgactcaacttccacagcatcagtctgctcagtttcagcggcaggtgcatcctctgatactaccagcccttactgttgcatcacttcggaaattggagcagttccagcaccttcg

SEQ ID NO: 13597 - DNA, 352 bp, Zea Mays
tgcatatgtatgaatatgatgaaatatatcacaagataatcccaaaatggatggtagcgaactaaacattaaattgtaagacaccgcgacaactgtacgcaagcgctagttatctatacatcatcgggtacacgtagtcaatcatcactggaaaataacaaacacttcctataattatctattgcaaacacgacatcataagttaagcattcgccacgttcacttttatcattcattagttacctattattaaactagttaagtacgcataaatttacgatgacttacacatagacagacttagttcaaaaggaatagttgcttaatcgggtaatcattcacaaccttctac

SEQ ID NO: 13598 - DNA, 663 bp, Zea Mays
tacaccaggcaaaatcaacgaaaccgtgtatgtcaacaacgagagggtgttagatgtatcttgactttggattcaccggagggagatcaccggcggttgcgctacacattagactcatgagcaggagagagagaagcgaacgagagacgatggtcttggcaaccatgtatgctagaaatgagagagtgttggatggaccttgacttcggagtcgtcagaggggagattgtcagtgaggcggcgctgcgtaggttactcgtgcgtaggacaaatagaaggagagaggtgaacaagagacgtctaggcgactgtccacttagatggataatacacataggggcagaactatccgtgacactgcctgatacgaggaaaagaaacacaacaacataaaaataacgagaaggggcaagaaatacctaaaaagaagaatttgtgagctatagtgtcaatttctagaaggacgatgaattggatctcttacattgagagagagcaaatctaggcccttatactaaaatcttgtgggtgtctagggttgaggctgagtcattcttttattagagatgagggtggggtggggctggctagatcgagggcgtttcctcaaatgtaacgtccggtcactgatgtataagacctggctctgaccgccccgtacat

SEQ ID NO: 13599 - DNA, 522 bp, Zea Mays
tgagacttacatatatcatgaacgatgttgactataatcattccacatattcaatgcaatcatatctctaacagagttcccattatccacttggctattaagtgacacaacatcattgctatagtaattgtctcctccaggaagatcaacaaaagtttctggcgatatgttacttgtttggctattcaaccaaccttcatccccgttgtgcatccgtataatattatggaacaacactgccgcagctgctattttcacttggttcgtaattgggtggtgtgttccaacttttagaatgggaaaacgcttcttcaaaactcctattgctctctctatgtggtttcgcaataaagcatgttggtgattaaacaattccttatagtttcttggccgttggtgacgatggccaaattctttcaagtgatatcgaacaccacgatacggtgcaaggaatgatggtgtgttagcatatcctccatcgacaagataatattttccctcgggaacatggaatcctgcaag

SEQ ID NO: 13600 - DNA, 671 bp, Zea Mays
tgacatggaaacgtagaatggcgtcgtctgaatgaactggttggtcccaagtgcttcgcactatttccttgaagccgggcattgaggtcaaataagattcaaaacaaaaacccttgtagaaatccaaggtaacatccccctgtaggagcaaaggggcatgatctgaagtcatggacgccaaagcctggagatcagaattggggaaaaggtcctgccattctatagagcagaatacatggtcgatgcgagacatagtaggtgtgacctgttcatttgaccaagtgtatcgacgacccctcattgctagttccactaattgcaagccatctattactcgtttgaaacgattcatcatttgaatattaactctagtgttgtttttgtcgctcatacgttaaatcaaattgaagtcacctagaaggagccattttgggtgtacgatctgtttaagatgggtgatctcatcgagaaagagaatcttgtcctgatccgaccgtggcccatagacccctgtaatggaccaatctgtgtcatcagccagtaaagtaatagtagcagagactatgtgatcagtggtatggggggagtggagttggaaaaaacgatcatgggctgccagcaaaatgcccccagaggtcccagtggccggtagcgccactgactgggtagca

SEQ ID NO: 13601 - DNA, 458 bp, Zea Mays
gtcgtggttgggtgagtcaccggcgcggttccgccgttttggctgggcgctgttgctcgggtcaccacgggagaagaatagatgagagagagaaccgaggaggggatgaagacgatgtcctggccatcggatgcaccaggaacggctctgattagaagcaggcgataccccttcgcgacattaaatcggggccgttgatcttcgatcggacgaatagaattagatctagaatcctcgccgtcgtatcctgatccatcggttctggttataccccgagtcagccgcggcgggatttaatcctggccacgagttttgaatccaatggctctagttacccgataccccttcggcctgcaaatctttctaaagagcctccgaagtatttagatattaacccgccgtccagggggtattgtgcattgagtctaggaatctttacccgcgagcccctgcacttc

SEQ ID NO: 13602 - DNA, 590 bp, Zea Mays
cagcattaggaagagattttaagtatcaaaaggaatgtagtgaaataaattggaatattaaatgtgttctaggtactgatccacgtactacagaaactaaactgcaagtttagaagattacacatttgcaaggacttacaaatgaactgtcagatgcattcactaactataaaggtataataaaatccttcatttctgctagacatgcaccagaaagagtggaagtaccggataaaatcactcaactcgttgagagaagtatggtgactaagcactgttctattgctaagaagcaaagaaaactagtgaatgcagacagacaccaaacctagctccgatgtgcacattgtcgaggctttaaagggagatgagtctttaaagacacatcagtttgagatatcctgctgagtctttaaagggagatgaaattgccatcaagtatgttaaatttggtgaaacctatgatagaaaagctaccattgttgacatatatttgtccgagaaaattgttgaggaccttcagaatgatttacatcctaagtccatggtacagtacacaaagtgctcggattggatcaagtggaaggaag

SEQ ID NO: 13603 - DNA, 683 bp, Zea Mays
tcagcttgaacatgtgtagcttcggcttctgtttgcccactttcggtttcggtctgcgatttggcttcagttggagcgactttctttgcaggagcagggctcagtgcctttgtagtctccagtacagcatctagcactttagccattctcctcttgggagttgcggcggaagttttttgcacctttggcaaacctgccgctcctagtggacttaggatttctggtatttttgtcattttttccacctatggctctttggccttagtatcttcagccttggctggctcaactgtagtcatctttggtactacactcagctctacaacactctgcataattgaaacactctcttttgctttggcagctgaagaagtaccttcgccaaattcaggaatcacggctggttcaatgtaacgcggccggtgagtcagaaccttcatcttctttcccttcggctcagctatgatggccgaagcagcaatctttcccgaagcagtaatctttctctttaacccttgccctcgcagcgggtaacaatagtcagggtatacgaagccaatagcatcaaataccctattcaatcttttcttattttgacccccgaaagctgcggacaaggcattgtcctcggccttggagtatgtcccaagtagctcgtcgctagtagcttcaatgcacatcag

SEQ ID NO: 13604 - DNA, 985 bp, Zea Mays
gttttgggtctatttgcaaaaatcacctcttaaatcctatatagcctaagtctgaatttcagagttttggctcaactttggggctttgtaactttcaaagtataagattttttccctaggtcaccacatcaaaattatagatctaacaaaggagaacaactttgcttaagagtgtgagcatagttgttaagaaaatttaggagataattaagcccaaagttggactgttaggctgatacagtctgaatttcagatagacagtgacttggatccaagtttgagagccatttcgactaagatccagtgagaatctacctagggttgctataacaaagttgtagagttattaaaaaggaacaactttgctatagatgtttgggcttggtaccatagaaaatctggagaaaataggacctaaagttgctctgtcaggctatttgaaggagcacttgccatggtacagtgtcatgtatggatcagatcgccagcgcgactgacctcactaccgacggcttcctccgccgtgattcgtgctgccgacgtcgcgattcatgcccaggggagatggatagcgtcgcggggtgaaagatcttcgccgccggtgagctggatgccactccggctagccgcagtacctctcccctttattcaccgccctcggataaggattttcaccaccattaagccgtcgccgttgttcgccgcgtgactctcactttccatcgcatcgtcgtaagccttagcggctccccgttgatcgccggagcaattgccacggcgctagccacccagccactgcgccactaacttcttcctcctccgaccgtcgcgcgtcaccgttaaaattcctggccgccgctcttgctccctataaattgagccctccaccagctccacaaggtcatcacccacccagccaccgcgaatcgctagcaatcgttcgccagagctcgcgaattttgaatttaccccaaatcagttctcc

SEQ ID NO: 13605 - DNA, 473 bp, Zea Mays
attagaacctcaagatacaagtgagaaccctagcaacctgagggtgatcaaaccttattttgcctgtcactattttgtctgcataccacatctccacattgcatgcactagttctatttggttttatttactagtaaaggattaaggatcgaactcctgcaagtgcacacaacattactaaatggaaggggtagaaggcgaaggaggtggatactagggcaacttcgggtaggaatggtgtcaatatcttgatcgacatgagccttaaggatggagtagttgatgttaggaggcaaggtgacgtgattgtcctagtttggttgatagttggagatgtggctctaaatgtgatcaacgcctatgcctctcaggtaggtatcggtgagagcaccaagaggaagttttaggaagatatggataacatggttaataccgtgcttattagtgagagactcttcataggagacctcaac

SEQ ID NO: 13606 - DNA, 505 bp, Zea Mays
gtgaattagtagtgattcggttgtggtcgagcatgtttctgcccaccactgcctatataatctagccacgtcctcccctctcatctcagcttcttaaccatcgccgcaagcatcagggaggtccgccgctggcgagtttcgtgcatgcgccgccatcgtgggaaactcgctccacagtcgattgaccatcggtagatgatcagggaggaatgataggatgtgttgaagccgctacgatcactagtctgatgaaggagggcgtgaatccatggcaatttctcaccggatcccgggaaccacacaccgacgtggctgggggactccgcgtcatcaatcgtcggtaaggggttattaaagatgttcgctatcctgtagtgtaagtttatcgccattgggagagaaggttggtgcatggaggcgcgggatggtcatcgccggccatggctccgccatgggagctgacagcgtcgccgcacctgccatgagtacgatagggatgtcacgg

SEQ ID NO: 13607 - DNA, 279 bp, Zea Mays
tgaaccaactggtccctagccttccgcctttatctgcctctgggccataaaaaccaagcgtcgtgctccaccaccgcccatggaagaagaattggggtagacgcaactcgccgccaggaacggatgactggagagagagatcgtgcgcctgtgcggatccttaacgagcgcgtgatggttggcctcggttcgttggtcgacggcgagcttcgatgcttgcgttgtcgtcgttgggcgtggcggacctcctccagtacgtggtcgagcacctcctcaaat

SEQ ID NO: 13608 - DNA, 343 bp, Zea Mays
gcgccagacgcatttaagaggcccgcctctacaagcacgtaggcgcactaacaccagtctgggcacccactgcctgccaaactggaaaaccgtaacacgcctctcgtaatcatgtcactgagcgggaggctcccatcacatcccgcacgggacatagcatccagtcacctcaagagcagaacacggggacggccgaaccgcccgaccgacaccaagctgtacagggagagggcttcgatcgacccacaacacgtggaccctgagggccatcatcacgacgaagaaactagatcggctgcgccctgcactaccacaacgctacaagtcaaaacctacgggatag

SEQ ID NO: 13609 - DNA, 1302 bp, Zea Mays
gttttacgcacgcataaaaatatgtagtaatgtgcataaatcatgtatagaaggaatcttttgtgccacgaatcacgggaacaaatattaccatgtgcacaccgtttacgactgcataacgctgtgtaacatgatagtataaaccatgcaacatttaaatctccaccgctttgagataaggaaagacgtgctccacgttcgcgtaaataaaggcacagttacgggaggaaacaaattctaatttacagccgctcgtccacgttcgtatctttgatattggcggcggttaacggcggcggaagggagagcaccgggtggcgattaacggcgagaaaatgtccagcatcggcgctggcgatgacatgcaacctgtagcgtctgtgcatagatcaacatgtacgtctatttcaatggacatgcatcctgtagcgtctgcgatcaccagttacacagagggtgtatctgttactccccccgcgacattgagggcaccttgacatattgatgagcacacaaaatcggtagacgtggtcggcgcagataagcacattcccatgagacatattggggcgcatgaacaggatacacctcatattcttcaaagccatgtaagttctcccaattatgatactattattttcttacatactttttttaatgttgtacctatattacgttagatttaatcgctattgaatcgtaaacgttaaatttttgtgcgcagccggacaatattgatataagattgatacctaaagtcggtatgacatttagtaacgtggacgaggcgtataatttttatagtcaatatgcatacgaggttggattttcgttgaagaaatatagggagcgtaagaattgtaaatggttgaattgttcaatggaaggaaagaatgctgaaagggtagctggaaatccaaggatacataacacatgttcaaaacatagcgttgaattgttcagattgtgaaacttataaagcatagaacattgtcgaatgtagcatacatatatgtgcaactatgcataacatggcgttgtttattgtataaactggtcagcctgtgaagcatgactgtacaaagagatgtttccagtataaaacggtgataattgtatcataaacttgagacaaaacaagcataaaacagtgataattgtattataaaagtatgggcaacaatgcataacacgacgttgtttactgcataaactggtcacacagtgaagtttatgactgtacagcggtgataattatatcataaacttgagagaaaacaagcataacacgagattgttgac

SEQ ID NO: 13610 - DNA, 476 bp, Zea Mays
taattctacgagggctcttacgcaaaactcccacggcgaaggggtatccgtgattctaagctgttggatcgccaaccaccggacccgattagactttccccttaatgaacccgcataccacgtcgaccattagatctaggatcaatggccagtgactcgtccacgcccatgcgagaccagatcaacggttgagatgagcccgacccaaaagggcatgtgtgcacaaatccaggccactatcttttgatccaagggcccagagatgcccaatcccagatctaatcctaacccttggtcagagatggacggctaggagggcttctcccacctcgcaaccagccaccgagcggcggcgccctttgccacacggcggaacacgacggcgagatccccccatcaacccaattcgcgtgaggtttgcccaattggtggccgctacacgtagcagggatcaagacgaacatcctagaacactc

SEQ ID NO: 13611 - DNA, 392 bp, Zea Mays
gaggaggacccggagaacctcgacaacctcagcagtaggaagggggaggaggcggagcatttccccgcgtcgacggagaagtcaacgtcatctttggcggacacgggtctcaagagagcaaaaggcagcagaagctcaacgaccgtcggatactggtggcgaccaccggtcctctcgccccgtaccggtggtccgaacacctgatcactttcactcgggcggatcaatggtttaacttcgaccatccgggcaagtacccgctccttgtcaatccggtgatccaagaaagcagggtgaaaaaggtgctagtggacggggaagcagcatcaacatcacctttcctcggacactcctaggcttggggatcacactcaaagagctccaagagtcag

SEQ ID NO: 13612 - DNA, 640 bp, Zea Mays
cttgttgaccagatctcgacaggtggtgccgacgaggaatgccccgataacgttcgagtcggtgacattaggcagctcgatgcgttgcttggagaatcaccgaatgtactcacgcaaggtttcatctggcttctgccggcagttcctgaggtcctaggagttactagggcgcatatatgtgccctagaagtttcccctgaagacaggtcgtctcagtcatggatctatgcgggcagaaggtgctcgagtcaggctcgagcaacatcggatatgaatagggggaggttgcgaatgatgagcttgtcgtcactggtacatcctaactaacatgttaggcggtaatcagcgagccatagctcgggctttgtttctcctgagtacttggtgagggtagtcggtgcacgaaaccaatccgagaatgacgccttgtgtatatcttgactgaagacttatgggcctaaaggtatcgtagtcgttccttctcttcaccgagcttggcttgaatctcacagatgtgctcgagttgttttccctgactccccacgggggtctagaccacatcccgttccctcgggccctcgatgtgtggtgctggtgctggggtgttatcattcctgggcatgccaagctggttctctcc

SEQ ID NO: 13613 - DNA, 476 bp, Zea Mays
agatctcctgtctaacacccccccgcagtaggaacgtcggtggaacaaacgtttagactggaccgaaactccaaaaatacagaagatggcaggcctttggtgaaaatatcggcgtattgggaagtcgttggaacatggagaacacggacagccccagcagccacacgctcccggacaaaatggaggtcaatctcgatgtgtttagtgcgttggtgctgcaccggattagacgagaggtagacggcactcacattgtcacagtagaccagtgtggtatgctgcacgggctgatgcaactcctgtataagcaggcgaagccaggaggcttcagcaacaccgttggcaacagcacgatattcagcttcggcactggagcgggagacagtttgttggcgcttgctgttccaagagatgaggttgtcaccgaggaacactgcatagcccgaggtcgaacgacgagtatcgggacatccggc

SEQ ID NO: 13614 - DNA, 834 bp, Zea Mays
tccacccaatggaccaagcttcaacaagccagctggacccactccatcacgtttcagtcagcagggtcaaagctcccttcaggcgccctccgttgtaagcaaccaacctccagccaatgcctgttggcactacggagaccctagtcactacaagaataattgtcctcagttgaaggcatccatgcctacttactctaactcggtgaatggccccaagagtgcctcagcacccacctccaaggcgccctcctccaacagccagcagagcaagactcggtatcatggcaaggcatgagtaaaccacgtcgacgcgcaagaagctcagcaaacctcgggattagtactcggtgagttcctagttgaatttactcctgctgttgtactttttgattcaggagcatctcattcattcatagccacacctaggaattcccttggccacccgaaccctagggtcggaccttctatgccatctcaaatgttcccaaatcgggattcttttaagtggggtagtgttcttggcagacttagctgtcttgccatcccacgaaattgatgtgatcttaggaatggattggttaaccaagcacaatggcatcataagttgcgcagataagaccgttcttctcactgaccaccaaggaaagttagtttcatgtcaggctcagccacccgcccaagatccaatggtgtttaacctagcagcagaaagcatatatgtagtagaagaattcatggatgtattcctagaagaattgccaggaatgtcgccagaaagagaagtggagttctacattgatctaattcccggcaccgcaccaattgcaaaaagac

SEQ ID NO: 13615 - DNA, 591 bp, Zea Mays
gataactcgtgaatattgcagaagcacctagcatccggctctagtccctgactcctcatagcccatataaaaacccccactttgataagagcttcaggggtaagatgatgaagatatatctcaaatgacttcagaacctcaaccaacatcttgtggagtggaaatcgaagcccaactttcatgaagctcttaaagaccaccacctcgtcatcttcgggaaggagaacgatgctttcccctagacccgcactatagaaacatcatgaaaatatttgcccttcatcgcttcgatttgcccttgtttgacagttgacttcccaaaaatgacatggctcagcctccacgatagatcttcgacatcttcattcccgctctccatgtcaaaactgtcgctatcgctggaatcctcaaacaacctagccagcatctcattggtgatcttttctgtgttggtcttctccatagcttcgtaaaactcagacattgtggggtccgtaatcttcttgtcctcagccattcagatgatggttgcggcaaatgccgaagctcaaaagtcaatcgagctcgcaaaagagaagaaggctaagatgg

SEQ ID NO: 13616 - DNA, 676 bp, Zea Mays
gggcctacccttttatagctcaagggttggaccttacagaggatatctattttctacgagagagagagagagagagctagagtgagagagagatcggctccttcgggtagtcgtgtgggtcctccgtagggtcgtttgtagccatgctcctggtatggcgtattgtctcgctcgttcaccatacagatcgatgtagctagtccatcgctgacaccttcatagtagtgtgcggtgggtcccatgggtcaataccatggtgtggtagtgcgtggcatgattttgtctatcgtcacgagcctgcatcacccgtcggtgtgtgtaggcatacaccctggtatggtgtatccgttgcgttcttttgagaatgcgggtcaatgtagagactccgacgctgaggcccttacgactagagttgactagcccgatacgtcagtaggggctttcttgagacaagtacgtgatgtgtatcatcagtgtttgatagggacctttcaacaccgtacccgaggtccagacatggtttggtggtgacgcatcttgtcatgcttgatgtgggtcagcagcattgggttagtccgtcgatcaggttgactcagggtctgatcgtctgcctcgcctcgcggggtcgctcggtagggacttggtcgtctgctccgcctcgtggggtttgcttggc

SEQ ID NO: 13617 - DNA, 296 bp, Zea Mays
gccacccagatctaattctacggcccagattagattgccctaatatcgaaacggtacgcagcaggaacccttggatctaaaatcaagggcggggatttaaagaagacgagatcactctggatccatccgatccgatcctacggcccggatttaacccttgcctaaacgattcgcgtgaccaatctaagccgtccgctatcgatccgatggccagcagaccgtcttcttccttacgatcgaacaaggggtgcccagggatcgacggtggcgccaccacgcccgacggagcaccatcg

SEQ ID NO: 13618 - DNA, 384 bp, Zea Mays
ctcgtagctagatagttacccctgggtcggtgcactcccgttaccttggagggtccttcccagctgggggagagatgcggagcacctctcggtgtggcacttgccgccgacccagggtttctatccgcatttgacacgggaacccctgtctctggctgtgatcacttctgcatgtacctgtctgcagctcggacccgtgggaggtccggaagggcctccggaggaaggcgtgcttcagcttcgtagaccgggggagacagagttcccctgaggtccatctagttgtcttcaccggagtaggagcctccggcaaagatatccttcaggtccccctcgggcgactgatacccgaggtctcgttcagccgcggccacctcaccgtcg

SEQ ID NO: 13619 - DNA, 298 bp, Zea Mays
ggaacacatctgggaactcggacacaactttgatagtctcaagtggatctgcttcactgctatcaatagccatctgataacaactccctttccttggctcaggcgggactaactcgatcaccacttcctctcctagtggggacatcaacttgattgtcctcttatcacaactgataactgcctgatacttatctagccaattcatccctaggatgacatctattccctgagtacccattactatgagattagcgggaaacactatcccccttatttccacacttacattcaagcaaat

SEQ ID NO: 13620 - DNA, 558 bp, Zea Mays
gccagtgaaagacatttgtcccaatccttgccatagtgtatcacgcaggctctcaacatgtcctcgagaatctgatttaccatttctgtttgaccatcagtttggggatgatacgctgagcttctaatcatggttgttccaagtgatttttgtagctgctcccagaaacgtgctacaaacggtgctcctctatctgacacgatagtcatggggatgccatgcaagcgcactagttggtcaatatagatttctacgtatttttctgtcttgtgggtgctatgcaccggcaagaaatgagctgtcttggttagcctatccacaatgacccaaatagaatcgtggtgtcgggaggtatttggcaatcccacaatgaagtccatgctgaggtcctcccatttccaagatggtataaggagtggttgcaaggtacctgctaccttcaaatggcttgctttaatcctttggcaagtgtcgcactcagatacatacttagcaattctcttcatcctggtccaccaatataaggatctgagatcaagatacatcttgttactcccc

SEQ ID NO: 13621 - DNA, 695 bp, Zea Mays
agtctgcgctgtcagtttttgcagtctgtgctgtcagactgccagaattttcgcgcagtcaacaccgttttctgcgcgcttttactgcgcagtttgaccagaaaccggttgaaccggttttctgtttttctggcggccgactttcccccttttatttctctccctctctcctcttcccttctcagtctcatattccagccgccgccgcccactcttcctcctctctctccttcacactccactccaaaaaaactctcttgtgccctcacacttttggaagagttgttggagatccgttcatcccggcgttctccatcatcttcctccatctcgttgggacttcttgacccaatctccggatcgaggtattgccctatttcatttccgtgtactcgatcctacgcgttcttgattatctaatgtatcattcgttgggtacattttagtttaagtgattgccacacttagattatcttcatttgtcacaaacattgttagagattagcgatttgatattgttcgttgtagttgaaccgctcatatgaacggttgaagtgcatgctcaatatcttatgtgtttctactcaaacgtgtttgatccttgctcatcacaggttctatttcttatttcttagaatggtgcgtcgaaggaacccgtctgtggttgaatccgactcctcggatgaccaggaaat

SEQ ID NO: 13622 - DNA, 372 bp, Zea Mays
attaatttctcctttagttctgcactatcaattgttccaggatcaaattctttcttatctttcttgaggatatctgtcagcattttcttccatatatcttcgagtttatatgactgagatatagaaacccatgcacggcagtcaaagttgaacccttcatttttgtacacattattggcaagagtgctttttccaatgccacccataccccggacagcaatgattcgaagtgatggatcttcaaattttaatgaactaatcaaggtttgcttatttttatcaattcctgcaagctcctcatctctgattgagtaatcgtgtccaggaagatacatttccttttctgtttcatagctacctgcaggtacatca

SEQ ID NO: 13623 - DNA, 626 bp, Zea Mays
aaggataacgataccttcggcgcgcagctcatcggcaccgtcaccgtccccgccgactgcgttgtgtcgggcaccgaggccgaggattggttccccgtcaaaggcaccaacggcaagccgtacaaacccgacaccgcgctgcgcctccgcttcacattccaccccatcgccaacaacccggcctaccgccacggcatccctggcgaccctggccacaggggcatcggggagtcctactacccgctccgccacggtggccaagtgacgctgtaccaggacgcgcacatcagggaaggggacctgccagagattgagctcgacgacggcaagacgttccagcacaactcgtgctgggaggacatctgccacgccatcctggaggcgcaccacatgatatatatcgtcggctggtcggtgtatgataaggtgcgactcgtgcgcgaaccatcgccgtcgcggccattgcccgatggtggcgaccttacgcttggagacctgctcaagttcaagtcacaggaaggtgtcagagtgtgcctgctggtgtgggatgataaaacttcgcatgacaagttcttcatcaagacggtgaggttcctaattttgtttccttcttttctctcccagtt

SEQ ID NO: 13624 - DNA, 726 bp, Zea Mays
cggggacactaattttggtatagaaactttagatttatttgatggtcgtggagatggctatggagaaggtggatccctgaagggcgatgtatgtggcggagacggtgggccaccatgaggatgaggagaaggagggtcagaaagaggatgaggagcagcatgtgaagtttgaggaggtgatgatggatgtacaataggaacaacaatttgagaaggcggagacggttgggcctgcgacaaattcgaccaatcaaccaattcgacatcccttcgaggccaaaggataaaattcttgatagcttgtccaagtgtctcgataccttcgggcccagggatgtctagcatgttgtcctcgtatccttggacgactgtcgtcacttctaccctacaatattcttctggaatgtcgtttccatggaacttgcgtcctgggatcgcaaggcctgtggctactttctttgtacgctgattgttaataccatatcttataactagtgtgcatgccacaagccttgtgatgtcatcaactggatagcggaccttatttcccgttgacgcgacagagcttggatggtcgtaccctcggtggaagccggcgtttgagctgctggaattatttgcatctgtggagtggtcatctgttgaacagacatcgcactcgccatcgccaattgctgcatcaattctagaggaggattcgatagcatttcagatatcaggcctttg

SEQ ID NO: 13625 - DNA, 1255 bp, Zea Mays
tcgcgctccaaggtcaacgaggcacgggatgatctcaaccctgcatcaggcacgtcaacgcaagcctccattgcaccatcatccactggctccgataacaagtcttctgggaccatatcttcaagagtctgatcaaagttggctagggacagttcttgcagaccaatgagggcagacaaagcaggagagggaactccactactttcaccgctggcgatgaactgccgactgtttttccgagtcaaaggagcttcattttcttcttcctcatcatccacattggcaacacaagcagcacccccattgggatcagcaacagatggagcacccacattgggatcagcagcagattgggtacacccattggggtcagcatcaataagtctagtcgcaggcatttcttcagtagcaggaaccgaggtaccagcgtcctgatcaaagctagatactcgccggaggcgtcttcttttcttcttctgctcatcagcagaaggatcaggctgattggctcggcaagggcgcctcgggcgagtactgacaggtttctgagcatccaaagttgtatcaacctctgggaggggcaccacggccgacgtcccagcaggagtagcatcggatgaatcttcagccagcaaatcaagcatagcgcttatatctgcatcactagggttcagaggcacctcaaaatgaacctgccgttcgtcatcaggaatctccccaagcgaagcaaccaaagcactgacttcttcagcagagggtcgcactctaaggcccaaaccgccatcagtaatgggcggattcgacacgaaaagggtgaaggctttgggaggaggcaagttccaggccgagtacgccactggagcaccaacatttgacaccttgcccctgaggatcatttcaagtcgactcaccaagtctgcagaaggaattctcctgttggtaacccgagttgagtcggctagccctcgatacagataagctggataggccctgtctttcagtggctgaatattcttgaaaacaaagtcagtaaccacagcttcagcagtcagacccctctctttcagcagtccaacttcagctagcaacacacttgcctcggctacctcctgatctgtgggagactcggtccagcttggggtgcgaacgtccggctgccttcccgaccgggaggggagagaattcccataattctcaactatgaaccactctaggcgccatcccttaatgctatccttgagggggatctcgagat

SEQ ID NO: 13626 - DNA, 689 bp, Zea Mays
gcgagagcggacctgtagacggctgaccacgacgaggtgactcgtggtggtgcgaagagtggatttgggggaaaaacgaaattagggcgctacggtggacgatcggaggcgagggctagtgttctggcttcgtaactacctagcggagctaacggtgcactcaatttatagcctctgagagcgatgggctccgaattttgaaggggaaagctggcggccaaagagaggggtgagtcaccaccgaacgctaccgtggctttcaccgaggcaatgttccaagcaatgagcaggctatcaacaacgacctactgtgacgtggtaacacgtctaagtacgtggcacggctacgaagggcggcgaactccagcgaggacacctcggttaatcacgcggcaagtgggtacggtgaacagtccggtgataaggctccaatcccttccctgcgacgagatctttcaccgccatccgttatcagcacaccagggcgcacgaatcgcgacgccggtaaggatcgcggagcagagtttaccggtgacggtgcactgaacctggtgatctttgttaggctactgtaccatcaggaccttcatcagtctatctgacagagcatcttcaggggtgtttttcacaaatttttatgtggcaactccctaatccgtctgttacaaagttaatctcctatataccag

SEQ ID NO: 13627 - DNA, 552 bp, Zea Mays
gcgtggcgaggaatgcgcggcgcgaccttccattgacggcggggaggaattgcgggactgcagactgcgggcgaggcgttgatggcgcggactatgggagcggcgtggccttccattgacggtagggaggaattgcgggacggggcgcggggactgcgagcgcggggagcgagcgtagcgtgcgatggcagaaccaaagtgtggacgcctacagtccacacatatagagtagtagagaaataagaggaaagaaacacggctttacgcacaaatacccaaatgttcaggcctcggcagccacggaaaacaaacacacgtacttgggataactatgctacgtagatgtcggcagcaccctcggcggctttcccgacctatagcagatatcttagtacttggagcaattacattttgctcttacattcccttacaaacgggacccagctccattcccgcaggaatgaactacctccacaccggaggagctgcaagataacgagctccgagcggctcgccggcgaccactgcaccagcagcgacaacgacctccgc

SEQ ID NO: 13628 - DNA, 778 bp, Zea Mays
cgcgagtttggagatgcgccgtgggaggaagacagagtacctcgacatcccactcaagtatagcatcaaaggatggcgcttggagtgatttattgtggagaatcatggcaagtctctgccccctcggtcagggagacagccggatgttcgtgctccgagttggactgaatcccccacagacttggagatagctgaggccagggttctgcttgctgaagttggtttgttgaaggagagaggtttgactgctgaagctgtagttgcagactttgtttttaagaacattcagccactgaaagacaaagcatacccgacttatttgtatagtggtgtcactgactcaacccgggttaccaacaggaggattcctgctatggatttggtaagccggctggagatgatccttagaggcaaagtgtcgaacattggtgctcctgttgcatattctacctggaattagccaccttccaggacctttttcagttttgtgtcccatcgtcctgctagcgacagtggcctgggtcttagagtgcgaccctctcccaaagaagtcgaggctctagttgcttcacttggtgatctcccccacgatgagaggcaagttcactttgagatgcctataaacccgagtgatgcggagataagtgccatgctggacatgttagctgaggattcatctgactccgtccctgctgaaactatagctattgcaactatccccgagcctgaaaagacattgactgctcaacaatctgatggtgctcgcccaaagcgcctt

SEQ ID NO: 13629 - DNA, 509 bp, Zea Mays
tatgacggaaaagtgccttcctctataaccataactgatcgtcatagaatgaattcacttccaggacaacgcgtatttcgtcacagaatgtatacacatcgatgacgaaaatgggtagtccgtcacaacacaacaaatgtgacgcgacccctatgaccaaatcgaactcgtcacaaattcgtcacaaacctttatctgtgacgatatatacacatgcagtgacgcaatacgaacgtcatcgatgataagatctctactagtgcatgctggatcaaaatttgggttggggatagccggatggctcatcgccaccatgtcgccgccgcgacgctgcgggcagcggcgctcttgccgccttgcatttgggggatgaagacgggtagcgtaggctgttggttttaacaccagcggatgggatttgatctgtgagggggtaaatgctagccatcggattctttgccgataatgcggatatgatcgggtattacccttttgctggttctggcgag

SEQ ID NO: 13630 - DNA, 344 bp, Zea Mays
gttcagtgctatgaagatttccttatatactttcttatgttgaaagactgcagagtcagatctgatgtgtgtatgctttctacagatgtctgagaacaggcgcagaggtgcaaggcgtgctcagccggaacagtaggcaccccacgaggaggcagctcaacagcagcagttgccaccaccacccccgatgacagttgagcagatgttcatgatgcaaactcaggcagtccaagcaattggtcagaccctagcagcaatgtagcaggtgcagtagcacccatccccacctcagcctcaagtgcaagttcagatgccacaagtgcccagagacaagcaagcagaat

SEQ ID NO: 13631 - DNA, 583 bp, Zea Mays
gccacgttcgagggcctcataatagcatctagcatgtttgctattcttttcccctttttaggaattcccaccgaccccctcttttctgaacacacaagcacaccagttgtaacacgctccagagcaatactacgatcaacactacactggactagggcacaaccctatactagtataaacccaccgtctcaaacctcacgttagagtccctttgattcaccattcggagtgagtccgcgctaatcccccatcgaacacaaattttactacccctagtttccaaaaccacgatagttggcacgccaggtaggaggacttttagagtgccaaaagacacctgtcacttcgattgtccacgcatcgacattcaccgacgacgaaaccttcacgtcgaggagccacatcatgttcagcaccctcgacttccttgccaccgccaccgatgatctccacctcgccacccctgacattcccgtcaccacgggcacacgactcacacactccaccaggagcaaggtagagaagcagagcctaaaaaggcgagccgtcgccttgaagcgctgcctcaataggcacaccgacg

SEQ ID NO: 13632 - DNA, 1171 bp, Zea Mays
cttcccatggcccccacgagtgagtcggccatttgatgcaattaagcccgagagacagggggctcttcgtctccatggtttccaccgtgaatacttgaattggatcctgccatgttagagggaagcaagagaaagtagaatatgaaagtatttgtggaacactcgatctcaccacttacttacttgagctctttcctgatctctaggactgtgatggtgctggtgtgacagcttcgacagaggtggtagagcggtcgaaaggatcacaagtcgaacgtcccggttcaggttttttgtggagctataggaggctgatcaaggtgggctatggtactgttaaccaagtgtgttgacatgctaagagatatgaaattgttgctggaaacattctcaccaaatcaatgtaaactaaaattttcagcaacacactgcaacacaatcccctttcacaatttttttgacttctttttttatacttctttctcttctttttttataacactgatggggtgctgagatcaaatgcaatgacacaatatgaatacgatggtggtaactagcaacttgaggaattttaaacaacacaaggtaacagtaccgccaaagggttataggtttttttgtggctttggactattggaaaaaatatataagatggatgaagactgtgataaatggatgacagtaagacctaccgtgacaacgaaagctttgataccagatgatatataccgagttatattcggtattggggtggcccgatcttcacgatagtaggttgataaataggatggttgggtataaaagtaactgaataacaaggtaaaattgtagaaaaacagaaggtaactaactttatacctgatcaaggtcggaggtgaccaagcgacggggagagagacaccgaaaccatgtagacttcgactcgatctccgaacgaccgtagaaccacaaccgaagctaatccacacaatgcgaggcagccatactggaactcacaaggcacgaactagtggatcccagagggatctcttcacaagtccaggagaacaaggaagaacagtggtagagtaaacactcagcagctcggctatggtaatcacttggattatcaaattatcaaaggttatcaaaagttgtctgacatcatagacataggggggtatttata

SEQ ID NO: 13633 - DNA, 423 bp, Zea Mays
ctcaagggcattagcagagctcccagacttcagggacgcaacaaagctcttacaggccaccggctccaagaggtagaggaggcagaaggttcggaggaaggttcagcacctagcctaggagattgttctgtttattctgtggggaggacaaaagacatacaacatggatgtgccaagtcacgatccagaagtagaaagagatagctaaagccgaagcaaggcagaatcagtcgaagcaggtcctgcatactgcttcatgctattccccatacattctcgagtatgtgggcaaccaacagcccacaacatcagttgcttcggtaagccactctcaagttgcatgggtcccgctaccaccaccacctatggcaccagccttgacccacaaccagcagccagaagggcaccgccaaacacagcaac

SEQ ID NO: 13634 - DNA, 380 bp, Zea Mays
cacctccatcgcagttgtggacgccaactaggaactggggaaggagtgtctaggatggaaccgagtctgatactagatgttaacaacctcgccagcaagggagctagcgtcggtcgcgtatggcctagagaggaggtaagggaaggaagaagacgagaggataagcaatgacagtgtttgtgttacgattactgatgcccttctcaggttcgcgtataggaataaaagacttccactccagtagcttcctagcccaacaggctacgcacaaagccgccaagcgcaacaggcccacttcaacgcacgaccacatgtctcactctcgcgtgacggccttcggctcgctgacgctgatcttcacttgtggttgctacttcggc

SEQ ID NO: 13635 - DNA, 504 bp, Zea Mays
ggaagtttgaaattcgcgagctacagtgactaatcggaggcaagagctagtgttctgagctcgtaataagttggcgaagcaggccgaggcatcaatttatagcagatcaaagcggtggctccgaatttggaaggagagcggagcacggctgtgacaagacattgtactggcgggtccgtcgtggcgctcaacggcatacaaacgcagggacagtaattctgagcgtgccacggttacgactacatggtaaaggatctcagcgtggcgcaattgagctcaccggcgacccacgatgacattggtcgttcggccacgtcgcacggtcatgagatgcatccgataagcccctgcccgcgaccgaatccatcccctgccagatcttttaccccccccccccaccccgcgcggttatccactttgcgatgagcatgaatcgcgccttcggcgaggatcacggcgtggagttcaccggcggcacgatacactgcatctgaagatcttttc

SEQ ID NO: 13636 - DNA, 514 bp, Zea Mays
attttttgcagcttttgtttcttggggcgcatggtgggatcaatgcccaagctatgttcaatgatggtgcggctgacgccgacgaggtctatggcagaccacgcgaagacgtccttgttgcggttgagacaagagagaagtctttcttcttctgctggtagaaggtcttcgctgactagaactgtttgcttgggggtgacgagtccagggggactgttttgactccctcattactctgtagttgtgccttgatctttttgcctttgtttgtgcgagggctgctggtgtcctctcattctattgtgagacaatgtacattacgctggccaagaacaaagtctctttctatgttcctggctgcctgtcgatctccatatatggtgattgcgccctagggcctaggattttcatgcacaggtacaacccgtgtattgctgcctcgaatttattgatggatcctcaccccatgatggcgttgtagggatagaccatgttgactatgtcgaaggtgact

SEQ ID NO: 13637 - DNA, 2391 bp, Zea Mays
agcattgagatggtcagaagtgatttccttgctggacactggaaaccgtacctacttcgtgctctcacacttcaaccatgctacaatggcccaataaatggtggtgaggtaatttatcatataccgcataccttatcgttgttattatgtccaaattagcttgaaatcaaactattcctgtactcaattgtattatagcatttgcatttatgcaaaaccaaatgcttaaggtaccattgagataaaaatgtaatactggacttccgtcataatactaatctttgaaaccaaattatctgtatcctatgaaagttatattatttgtggatcgataggctaatactttgtccgttcaggtggtttcccagattctccaggacactgctattggaaacaaatgtatttctgataaagtaagtgattatgcatgatcgttgaatggtcagcatatttccatacctaccatttctgcctacataactttgttctcatcctgaagttttatagcttttgtgactgatatgaaaaaggaaatgctaatgaaagatctttatcttcttttgaaaattaccactttgaaagctttatatgctttgtgccaagtaaaaccagtatatattaaacatggaaagcccatagaaaaatggaagcaatatatttagaatcctgcttaagatggtaaaatatgagccaacctggctatctttaattgtaggctagtggtgcaagaagattgcaagatgccatggtctcaggatatgtacttcaaagggttcctgggagagatgcaggcattcctgactggtactctgtgtccgaaaccaaaactggtggcggtccgacctcacaaaatgttgctacaaaggaaagtgcagcattgtgagtaccttctcttgttattgtcagacatctcaagttttgcagtgaaatattttgcaactggaattgcatatttgatttcacagatgtattgaagacattgagatactccatggggaccttcaaggattaacagatacagtggactttttgaagagcttatctgaacttaatggaaatgatttgaagagccctaagaagcaagacctagagagaactgctgcatctgttctttttgactgggaggtactaatctagcagtcctctatttcattttagtgaactgtaaccctgtgcattaatgtttcatgtatcatatttggaatgtaggatatctaggtttcatgagtttgaattatgagatgattccttacaatttcaagtagaccaactttcttatgctgtaaagttttatttccaacagctaatctatttgtcctattatagcttttgggtatgaataaacatatggtagctcattttgttgttttgacaagacatatgtgtttccaattaacaagacaatgtaccatgttaggcttcaaccttttatcataaagcacaatatagtggagttctaataagagaagatggattacacagatcctcatgcttcaatttgtatcaaaaaatctattgtataaagttcagaaccattttgttttcaatgaacatttttatttcaccagtctcttttttccttgattcacctctattttttcttgtatttttcatggatacatgtagcttcagttctgataactgattacttgatttgtttcggtagcttgtttctatgtacttgaataactgaaataagtcactcaaaatggtgaataaatgattggtgtgctataatgatttcccttattgttcctttgtagacagaaatatatgtagcaagggcacctggacgtttggacgtcatgggtggcattgctgattattcagggagtcttgttttgcaggtatgttcaatctcaggccaaatagatttctgttacaaagtagtgctataagtttagctaatagctggatactctactcataaatatttgattatatgtgattcccatctttctcgaaatcagtttgctactgttcaatatgtaatggtatagcatgcaagaacctggattttcattgaatcctgatgtctactgtattttctgtattcttgatttcttttttggattccctcagatgacacaagtaaataaataaataaactggaaagaaacatagctgcagttcttttatcatgtatttggcagttgtgattcatattttggatgtaactactagatgcctcttcgggaagcttgccatgttgctgttcagagaaaccatcccagcaagcagaagctttggaaacatacaaaagcaagacagcttgttaacggaggcttggtacctgtgatacaaattgtatgtttgacttgttcaaataattcagatgctttgtcatttattctaaattttttgccacttccatttacttttgagttatcc

SEQ ID NO: 13638 - DNA, 559 bp, Zea Mays
gtgataactgccgccatcagatcagccttaattacgtgccaacaagttttataaaaccttcccgtataaccgtctggccccggggctttgtccgagacaaggctagcaatagtggcccggacctcctcctctgtaatgggaaggtccaaggccccaagatcaacattagcactgtggcaagcctccaaatctagagtgaactcacgctgtttctctacacccaacaaattggagaaaaaatcaaacaagacctcctgcttttgctcttgagaggtggcaatctggtccccatgcactagttcagagataaagttccgctttttcagatagcaagcctgtagatgaaaaaaggaagtgttggcatctccctctttcagatatttgatccacgatctaagtctagctattgtccttcccaaagaagcaagccccaggcagtggctgctcccaagtcagccatatctcttccccacacagcagtctattgtcttgagcaatctcaagtctgtgcaaaatttccctggtcaagctaagctgagatttaacatttctgatcctt

SEQ ID NO: 13639 - DNA, 567 bp, Zea Mays
aagtttagggacctagaatgtgtactttgggagtttagggactggaatgatacaacgctacaagtttcgagaccgccaatgttattttactcataaaataatatgcatgtttcttgcatgtccacaaaaaaacttatgggtgcttcatatataaaatttacataagtagatttatatttcgcattgttagtatgacattgattttgtagcaactaaagacttcctcaaatcctaatgcacctactatatagtaaatattcgagtaaaatacaatttcgttccttaaacttgttgagctgtgtcatcctggtccataaacttttaaagtatgcctcttaaaggctcaattgttgttcgagtctcagttatatcctaatgggttgttgtggctggactaggcccatatgtcaattgttgtggtttgttgcactccaaccacccttctccctccctcccatgccgccacgacacaccttggtcgttgggccgccattgctgtcgcttagccaagctcgtcacacggccacctcccctaacatttgcgttaggtttgcctgaccaccctct

SEQ ID NO: 13640 - DNA, 462 bp, Zea Mays
tccctacacaggaatggcgattggcggctggacgaagggccgatggagttggtcgttggtgcctggctgtgctcgcgatatcctccgccgccggcttcgtgtcaaataccgacgagctagatctgcgacggagggccaatggagttggtcggggacaagctagatctgcgacggagcacccgatgtacacctaaccctccctccttgcgactgccgattccccatccctgcaagtctacgaccttggccagcttccacgtattagagtatgtatgctgtgacagattgtaaacgtgtacaccaaagatagaagaggcaaggagatatggtagctagcgctgtaaaaggaaaagagataatctgttactatctttacctccttaattatctcctggccgttgtctaggtgctacacctcccctatatgtaagccacggctggggcttttccagtcatcaatcc

SEQ ID NO: 13641 - DNA, 481 bp, Zea Mays
tgagagcgaggagggcgtgaatggacctgtagagagctggccacggcgagctcacacatggcggtgttcttgactgatttgggggaactctaaattagagctgtctggtggacaatccgaggcacgggctggtgcgttgggtgtgtgattacttagcggagctcactggggtggtaatttataggttccatcggcggtggcggctaattttgagaagacgcgcggtggccggagcgagagaagtgtcactggcggcgatctatcgtggcaattgcggggtaataagctacggcggtcactgggtaacgaccacgactcacgacgacgtggtaagatagccaaaggcgtggcacaaccgaggaaaacggaggtagccacggcaatggccgtgcggccacgtcgccggcaagtgaatgggtgacagagcggctacagggttctgagttcatccaaggtgaagatttttccatggtcgatcata

SEQ ID NO: 13642 - DNA, 403 bp, Zea Mays
gaagaataccaccaccacttaggtacaggtggttacaagcgtcaggtttctaaatggagacaagaagacatcgagaaggccgtagggttgctgacgctttttgagcaacttggtgaaaggacggctaattgaatccgtgcttgaaaaccaagtgaaagtgaggctggtgtatcttttgatgattcaaatgtcaaataagcggcaaaaaaacatatatacaatagcagctaagcagagcaaaggaacatttaagccacaaagggagagagatcctaacggccggtctcgttaatcctgaacatcctggtcgtgtaagaggaatctcgtctaaggaaggatagaaggaagaattcgaaccatagtgagaaggtttatacaagaaacgtaatcgatacaaaaaaga

SEQ ID NO: 13643 - DNA, 2637 bp, Zea Mays
cggtagtggtggacgtcgatgagcgctaagaaggtccagcaggagggccggctgaagtagcaggcctaatgagcggaacacccggtgtacgggggtcaccggctggtccgctggtggacccaatcgagttcagcgtaggggcaaccggtggaaggccaaggttgctggtggtagctgcagtgaagaaaggtgacagctcgaatggaactgaaaccatgttaggtatgtcgtccaaaaaatcaaaagttgtgcttgtggatctcttcgaagaccacatggcgagagatgatgatgcggtgagagagacgaccaaggccgaggtatcctttgtggtggggagaatacccaaggaagacacatagggtagagcgaggagataatttgtggggtgtagtgggggtgagattaggatagcacttgcagccgaaaacacgaaggtgttcgtacgaggggtgtttgccaagtaaggcgaagtggggtgtgccggaagcaagtgtatttgtgggaaggatattgagaagatatgtggcagtacgagagcagcagcccagaaagtgggagggatgctggcttggaagagaagcgtgcagacgacattattgatggagcgaattatgcattcggccttgctgttttggggggaagtgtaaggacaagacatgcgtaaaagaactccatgggaggagaaaaacttgcgagcgttgaggttgtcgaattcgcgaccattgtcacattggacaccctggatggtgacaccaaattgggtgcgaacataagcgaaaaaatttgtaagggtggaaaaggtgttaatacttaaggcgcaagggaaacgtccacaagtagtgtgaacagtcgtccaaaatgtccagataatatttatgaccggaaacactagtgattggtgaagtccaaagatcacaatgtattaattgaaaattgcgagtggcatgtgatgaagaagaatggaaaggtagacgaacgtgacgtcctagctggcatgcatggcatatgggggtgtttttattcgggggtacaagggatgacagaagactgagctagctgagtgaggaccgcagatcctggatgtccaagtcgttgatgccacaacgaagaggtggtagcatggagagaagatgtcgtgctcctaagtgggtagagtgggtcggagctatcacaccgaaggatcacgcgccgagtgggaagatccttcacagagcagccaagagggtcaaattccatagaacaattattgtcagtggtgaactggcgaacagaaattaaatctttaatgagagaaggtgaaacaaggacattgttaagacaaaagttatgagaaagttgagtggtgccagtggaagtgacaggaagaaggttgccattgccaacaacaatgttagagggtagatgatgagaagaagagaggtgggaaagtataccagcgtcgaaagtcatgtgactggaggcacctgtgtcgaagaaccactcttgctgctggggatgttgaagagtggtggtttggaaattggtggcgagttgttggatatcccaaccaggagggggtggagcagcgccagtgtagtcaggggccggcccatatgcttgaggggggggggccaggagcctgcccactggctgggaggaccagcaagaaaggcctaaggcggttgagttggagcaggaggccctaaggtcggtggacgaggtgttggcggtcgtgaccctagccacatgtaaatggatcccgtctagggattgtagtagttgtggccgcctgggggagtggaagcgtggctggaaccaatgttgggtgcaccgcggttgccaccggaggatcggccaccgcgcttgctccgcttgccccggtgctgaaatgaaccgccaccgccacacccaccagtctgctgctgttgattgggtgaagggggcgtggctgggacgactgggatccactggagctaccgatgttggacagggcagcgagggcagcggccggagcagcctttgcccgtgagttcctcaagagccaggtcatcgcggacctgcagaaaactgggaagtggcttggtgtggcgtagatggtgaccgagagcctggaagcgctcgttaaggcctctgacaatgttaaggactaaagtctggtcagagacaggttcgccgagatcacgcagatcttcggcgagtttcttgtagcggcgacaatatttggcgaccgggagaccgccttgggagaaggaccgaaattcttggtcggcataaagagcacgcgtggtgcgatttccaagaaactgggactctatagggagccaaaaggtgtgggcagaggcgccgcgctgagaaatgatgtcagcgagggcatcagaaagagtgccaagaaaccaagttcggacgacgacattcatgcgaatccaatcgggtgactcgggaaaagcagaatcggagaggacgtggcactccaaggagaatttggtgagggagagaaggaaagattcacaccagcgggcgtagaaggtggagttggtgtcaaggagtagtggaacaagagcccggatgttggttactgcaacagcctgggcgtgaaggtttagcagcgcggttgccttgtggtggagaagagcagcatgaagagttgcaggtggg

SEQ ID NO: 13644 - DNA, 431 bp, Zea Mays
tattatatcttgtatgaattccactgccttagctgaagtcagagaagcgatgggtttgtactctatccatttagtgaatttgttgatggcaaccagcacgtgagtgtatgctccctgagctttcttgaagggtccaatcatgtccagtccccagcacgcaaatggccatgttatgggtatggtttgcagttgctgtgcgggtaaatgctgctgctttgataagtactgtcaagctttgcacctctagactaacccggctgcatcactttttgctgtcggccagtagaaaccagacctgaagaccttcccaaccagagtcctggatgctgcgtgtatcccacactgtccggcgtggatctcatctagtagttgcttcccaatagccgaaagaatgcacttcatgaggactcctgttgcatcttctgaacaat

SEQ ID NO: 13645 - DNA, 287 bp, Zea Mays
aaatattccaaccgtcaacttgtcaggagtctgggtgggaggaagaggaacggaaccaagagaagactactcctactagctgctgccgctttgcgggctttaaattgctcgcaaagtttactttagtacgcgggagcggccgcgagacccgtctctcggctctcgcccgcgtcgtcgcgtgtggttggttgggagttgcgcgactgcggcgcggtctggcgcgtgctgacagctcgcccactgacctgagagtgcctaattactcgttttggtacggaggatcggcg

SEQ ID NO: 13646 - DNA, 470 bp, Zea Mays
tcaccctgcaccaaggtaacgcgcgcaaattgtggatgatgaactctgcgtacctaacccttatccctaagaaagttgatgccaagacaactggagattacaggccaattagtcttattcacagcttcgccaaactggtatccaaagtcttggctaatcgtttagcactgcaccttcaaaatccggtgggcctttgtcaagggtcgcttcattcatgacaactacatgttggttcagcactctatcaaggcccttcacaggaagaagatcgctagcctgtttctaaagctagatattacaaaagcttttgactcagtgtcctgggcctttctcttagaagtgttatctcatcttggcttcgggcccaggtggtgcggccttgtgtccaatatgttatccacttcttccacacaagtgttattgaacggaactccgggcgattatattcgacaccggagggggctgcgcca

SEQ ID NO: 13647 - DNA, 458 bp, Zea Mays
aaatcatccaaaatcaccaaatagtatttgtatccagacagactgagtacaggggaggtccagaggtcacaatgaaccaggtcaaaagcctgcgcggccctagacgaagatatagtaaaaggaagacgggaatggcggccaagctgacaagcatgacagaggccctcaaaatgtcccctattacaagaagagtctacagtgctagaaagcttggtcatgacgttgggtcctgggtggccgagatgacgttgccaagtggtggaggtagtgatggagaccaggacggcaggtggagacacgtcggtagatgacagccggagtgtgtagaggggcccaacgctgtcacatcgggcgagtggggtcccggtggccagatccttcacagaaaaactagtacggtcaaactcaatggaacaagaattgttggtggtgaaccgacggacagaaaggagattgtg

SEQ ID NO: 13648 - DNA, 422 bp, Zea Mays
atcggcaaccactaggctaggagaacgatccatcagcacgaggagcagaaagaggcggctaggttttctcaccggcggcggcgcctagggttccagtttggaagcagctcgcgtcgaatgcaatagacggcgtgaggacggagtgagtttaatgttgatctggttaccaaatcgctctctgttttccattttagtgattgcctgctgcctgcgtctccaaaacagcgaagccctcggcaacgcctccgattcttcgaaaccgtttctctgatgttttataatggcaattgtctcgcgggcggaggggtcttcactgggttgggtcgggacgcgggtaagggacagtttgggattgaggtgtccgtgccaacctgtgtgttggtgcggtgggagtgggaccatacttccatacttttccgccg

SEQ ID NO: 13649 - DNA, 383 bp, Zea Mays
gttttgaatgctgttggtgaatctgctgcctaggtttgagtggaactctttaattgttttcgtgcattttccatcttctgttttgattatgcaccatcataaaagaacagaaccttgtgatctaactagatagaagaaatcatgtaatcttagtcacttcactagatagaagaaatcttgtaatcttagtcacttcaggaatgtatgttgttattctccattactcctcctagggtcccgcctctggccctattccagatcctccgaacgatcagtgtgacacggtgttctctataaactaagcaagatcaatcaggtattcctgtcgattttgcatcattcctatcctatgcactttagatgccctcgctcacatatagtgc

SEQ ID NO: 13650 - DNA, 643 bp, Zea Mays
agcgagtgctctactctacccaaaaactctgggtggctgtgctgtcttcagtggctcagttccgccgaataaatcattcgccgataaggtgtcacctgaagctagaaaggtaataagctgcagctatgcttatgttttcagaactgcatcttgttgactcttgttacctaaatacgaactcttgtttcagacaccggtgttatggtttcatgggatggcagatggggtggtcctatttgaagcaggacatgctgggtgtgcatttttagaggagcttggcatgtcctgtgaattcaaggtaatacaggaagctgtagtcaatgctcacttttaaaacattttgcctccctcccaacaagtggctctgcaaacatttgagctcgttttcaaacacgcctgacttcagctatatgtctgttttcccaattgattttttgaccagttttcccaatcatctactcaggcttatcctacccttggacattcattggttgacgaagagcttcaatactttcagcaatggatcctgattcgtctagggatggctgcatctggagcggctgaaaccgcaaggccatcatcgtcatctaaccacaacgaccatctccaatagctgttttttttgtcattgcttagtttctag

SEQ ID NO: 13651 - DNA, 473 bp, Zea Mays
acatcgaagaagaggcagtgcagattcagaaagatattcagtaccgtgagaagccagtaaagatccttgattcagcagtccggaagacccgcacctcagaagtgaaactctgtaaagttcagtggagcagagaaggagaagaggaagctacctgggagagtgaggacttcttgaggagggaatacccttatcttttctcaaatccagtctaaatctcgagggcgagattcctttaagtggggtaggtttgtaacatcccaaaaatctcaatccaaggtttggaaccctaatttcctaaaccccctcttattttgttttctccctaaaactccacccttaggtcatctcatcatgtgcatacacttgaattgttaggagcacctcacataaactattttcaacactcaagattatttagcaaattgttgattcaaaagaaaaggaaataaaaagaaacaaaaatagaaaatgga

SEQ ID NO: 13652 - DNA, 348 bp, Zea Mays
ggataggcagtgcaagtgggatcaggatatgtgatgctgagacagttaaagttatgatgaagaatcaacagaattgcagtatgattgggaaactggtttcagaagttggactatgggttagcctctcaataacttagttttaaatggtctacgttgacatgtctttgtctaaaattttattggtacttgcattatcaacctaccaagaaataaagtttgttctgttttttctgctcctttgatctctttgctaaaattcatgcggtgatttgtgttccaggccaatcaagaggctgaacagagctatgcaggcgagcatgcattcattatattcccacagttgatatt

SEQ ID NO: 13653 - DNA, 606 bp, Zea Mays
ggtagggtgtggttctcggtggcggagagggatttggggcgaattcaaaattcgcgagctctggcgaaggactgctagcgattagcggtggctgggtggaggatgaccttgcggagctagcgggggcttcaatttatagggctcttcggtggtgaccgtgaatttgggcgttgatgtgcggcggtcggaagtgaggaagaacgctggtgcagtgaacacgtgttcaccatcgtggcagtaactccgatggtcgacggggagtttagagggagtcacagcgatgcggtggcgcggttaggacacgcggcacaaggccaaaaggtggcggtgcaccggcgagccaatttgcccagccgcaaggtagaaagggaagccccgatgagtcaccagagtgacctccagctcaccgtcggcgaggatccttaccccgcaacgttatcaatccaccccgcacgcgaatcttaaggctggcgacgcgaatcgcggcggaggggtgatcgacggcggtgaagtgctctgaattcccccccgatagcactgtaccatggcaatgatgttcaggcactctgacataccattttggagcttggttttctctcaattttg

SEQ ID NO: 13654 - DNA, 456 bp, Zea Mays
tgatggcccaaaacaagatgattgtggtggttctcctccttgccacctttcttgtggtggcaagatcgttgtgggttccagaagaaccctcaaatgcggatgacataagaggtgcttgcatcgaggagtgcaccaaagaaaataaggctcctggcgacaagaagacatgcgaagtgttgtgcaccaagctcacaaaaaagcctagcgaagaaggcaaacatgattgatgaagtagcactccgataatatataccctagtggatgagtggtcatctttgtagccatgtctgccacacgatggccttgattatattgtcttattgttttgtttttggtttccactagtatcctaattccttgttcatgtaacctaatgtcactcaaagcattttatatgcttcacttaattaaataaatacaaaggcaaaggcatgttctgttttggtctaattggaa

SEQ ID NO: 13655 - DNA, 1177 bp, Zea Mays
gttggattgcaaagggaaggtaactgtcttcacctatcacaatgaaaaggtagtgaattaagaactgaatgaagtaatacataaacatagctacaatttttcagttagcaacaagaactaactaattgtatgaacaggaaggtacgtccagttgtaaggtttactatgtacagtttagtactatgagtagcatcacccattgaaattagctggagcatgagcaaagagcaggcaacaaagttaaagatatatgtactactaaatagtctagcaaaattggtttgacaaacttgaattgtacaaaactaacatatttaaacgcacaaagataagatgaacatatttaaaattatggtaccaaattaacaggttgatttaactgaaaatcgaatgagactgtgcagtttagtactatgacttaactgaaaatcgaatgaaacataacataccagttgtttggagaggatcggtaaacatgtaacctatgtctcagaaataaacttatttcagaaataaacctgtaacctaaccccagtgatcaacaacgcaaaacactaatgagccacccaatccacaatcaccaaggctaggcaacccaacccatcgcattcgaagctgccaccccacatcgagtacacacgtatcaacaaacaggaacaggctaaaacctcacgcaacccgaacaggttccaaaaagaacagcatactcaacacaggaaagaagtgtgcaggatgaaaaggtagtgaattacatggctgatggtgggcgccggatgtactcgcgtgtgtccgcttggtaaactcgtgtgtggcctccctttggccttttaattgtgctcggatcagatccatggatttttggaatcacttaaagatgcttcaaaaatccaagagcagatatgcttaagagtagtgtgtcagtttgtcagctaagcatacactatacagcaggccaacccttctatcattcaaaggacaaaattcttttcacataatttgcagctaaaaattagtgtttcaatacctacaccagaaattgattgccatatttcacacaagacacacggccaaggcgaataattgcatctgttaccgacaccaatcgccaaaaaacagcataatggacaagtaaacctacaaattggtcttactccaaggattccgcggccgcgccaac

SEQ ID NO: 13656 - DNA, 715 bp, Zea Mays
gaagaagggagtgtttccaagcaaagctcggctaggttgggttcttaggctccaaaccacatacgacaactctttgatccactttcctgcgaacttttcattcttgtcgaagactttcttcctgagtgcttccaatatcattccattagccctttctacccgaccgttggctcttgggtgtgctactgatgcatatttgatctggatgcttctttgttcgcagaaaactaagaattccgagctagtgaaattggatcccaggtcagttataatgctattcggtattccgaacctggatattatatcttatatgaattccactgccttagttgaagtcagagaagcgatgggtttgtactctatccatttagtgaatttgtcaatagcaaccagtacgtgagtgtatcctccctgagctttcttaaagggtccaatcatgtccagcccccaacacgcgaatggccaggttacgggtatggtttgtagttgctgtgctggtaaatgctgctgctttgataagtattggcaagcttcacacctctggactaactcggctgcatcactttttgttgtcagccagtagaaaccagatctgaagactttcccaaccagagtcctggatgctgcgtgtatctcacactgtccagcgtggatctcatctagcagttgcttcccagtagccgaaagaatgcacttcatgaggactcctgctgcg

SEQ ID NO: 13657 - DNA, 739 bp, Zea Mays
gagagaggtatgaccgctgaagctgtggttgcagactttgtttttaagaatattcagccactgaaggatagggcatacccagcttatttgtatagtggtgtcaccgattcaacccgggttaccaacaagaggattcctgctgtggatttggtgagtcgactggaaatgatccttagaggcaaggtatcgaacattggtgttgttgttgcatattctgcctggaatctgccgccttccaagttctttttcgattttgtgtcaaatcctcctgctagtgacagtggtttgggtcttagagtgcgaccctctcttgaagaagttgaggttctggttgcttcacttggagatcttcccaatgatgagaggcaagttcactttgagatgcctatgagtctgggtgatgcagagataagcgctatgatggacatgttggctggggattcttctgactcggtccctgctgaaacaatggttgttgcaactatcccagagcctgagaaaaccgtggatactcgaaggcctgaaggtactcgcccaaaacatcttcgccaagtcagtcatccagctgctcctaccgaggggagaaaaagaaaaagagacggcttcagcgagtgtcgtgcttggatcatgatgttggcccttctgttcctgttgctgaagaagtaccagtggaactctttactggagctgatcccaatgggtgtgtccctgctgatgctgatcccaatgggtgtgtccc

SEQ ID NO: 13658 - DNA, 758 bp, Zea Mays
atcgatgcgtcccttacccactagtttgcatgtttaacttagacactacttgagcactactaatttttcatccgcgaccataaccatacgcatttagactacaacaagcaaatcatcgtgactacgagcttaaccaaaccatctaacaattcggctaactagaacaacgacatagcccgctaaataacctacacgtcggcttgcctattattatcgcaatccgatacacaacatacactacaacatttttataaacacacatcttcacaagtatttttgcaccccgaccaactcatacgaatcgtaaaccactaatctccccatcgcaatcactatgcatttacttcccaaatcatgaacgtatatatatttatcatacgaaccgagtatttcaataattatactaaaaccactaactccattacacaacttgtattacgatcctacttgaccaccagatgtgactactagaatccgtgagcacaaccatacactatatgcaaagcataatttaacgaacacataatgcgcatcgactcgactcgacttataaatatggagaagcgatgactactttggcatgtcaccacctctctatttaagccaatccaattattaactattacgactaaacattcatgtcgatcacacattattttaccctgtctcgcatacaaccatattgtggcgtgcactcgagacctttcgattaatgtagcgtaacctactagtatatgaactccggcactcatgtctta

SEQ ID NO: 13659 - DNA, 484 bp, Zea Mays
caatctggactgggcctcaattccagagaaatccaggggtctcggggtaataattctaagacatagagaacagccagcctggaccgcgggttgataaatagtttactagggtttcttttgcaattatagctcggcgaaggggtacgggctaacgtgagccaccagatcaaatacgaacgaccaagattatattgtggaagcaatggcctagaacgcaatccatgctgtcggatctagaacctatggctaagatcttatgaagccttgatctcatccaggccgaacgattattgatcaacgccttagaacaccccgctggaacgctgcgccaggactcacatctcagccctccgccactaatccaacggcacagagcccatcttcctccctgcctccgcggcgaatgacggggaaccgcgccgcggtgccaaactgtactccggcgagaacaactccgaccccggagcgcccaatcttcaatcac

SEQ ID NO: 13660 - DNA, 399 bp, Zea Mays
gggaatccgacactcttcgacagggtgcctataatgtttgcaccagcacgatcgtggatgcatcccaggatttcttcgtcaaccccgccaaagagtacctatccaagctggtagccacacgagatagcaaattccttcaactctgccatatcctcttcggaaagctgttggccacctaggtgtcgtaggtcgaagtctgcttctttcgaagagatttcttcagtcttcttccctttgtctgaaacttctgtggccacctccttctccgcaaccacgtctgatataattctgtcaattttggacatgttagttgtgataccttcgccttcaatcgtctgtagtatgttcatcatacgccgctttttctggcccccgtcttttccatcggcagccgaaggg

SEQ ID NO: 13661 - DNA, 853 bp, Zea Mays
tgagtataagaacagtagtctgcctggagtaaagtcagaccagaagaaaccaaattacctgaaggttggagaaaaacaaaggaacacccaaatcatgggaagtcagttgatagttcgatgaaggatcaccaaccggagcaatccgcaatacatcagtggggaccaattcagcgtcatcagcagaaatcaaaactttgtcatcaggagcgccagactctaaggcgactttctgacccgaagcttgtgttgctgccatgcaaccagaatgcggaggagaagatcctacatgaacatccgtggaagtatgagagggagaacccactcggacaccctcgggggctgggtcatagctcatgctacccatccgagccggatcatctccggcaacaccctcgggggctaggcaaacgctagcaccatccttgaggaccgagctctctgtggcagccacctctaaggctgaaggaccttcaacaacttccatgggaacggagcaatccggatcagcctcttgactcttaagaccgcgctccaaggtcgacgaggcacgagatgctgctcaggataactctaacccggcatcaggcacatcagcgcaaacttccatcattccaccatctgtcggctctgacaacatatcttctgggaccatgtcttcgagagtctgatcaaagttttccagagacaattcttgcagaccaacgagagcagacaaagctggagaaggaacaccactactctccccgctggctatgtagcgccagctattcttccgaatcaagggaatttcctcctcctcttcctcgtcttcgtcaataacgcagacggtacacccattgggatcagctttggc

SEQ ID NO: 13662 - DNA, 513 bp, Zea Mays
tacaccaagttgcaggggatacccacaccttggtgacaatcattacaaagatccaacttcattacatgtccatcataacaagcatccaacataagataagaaaattaactctaactaagattgactagactgagacactgaattaagcattattacacactccgactttgtcgatctatggatccaaatctatcagggtcctgcagtatggagtaccatagtcgaagtgaccacggggcggcgaacggtaagggtgctaaatcccgacaggggtgggagaaccaccatccagatagtggcgtgctgcgcactcagcacgcaattccgcaacctccgcccgaaccttgcccaactcgtcaagggcgtggtccaactctgtgttgagcacggcggccaggttgaccatgctattcagcctaggattgccctcccaactggcgagacaatcacacctccagcactaccggtcgaacgacgagggtagtacttcaggtcaaggccatcagctacccc

SEQ ID NO: 13663 - DNA, 559 bp, Zea Mays
acaacaatcctcctatgatggcataatgggccgactgcctcgcaatgtgctcggcacgaccttatcatctcgctcctcctcatttttgatgtatttgataattggctccctccagtcctttgggtctggttctgcctgctccactgctttgcattcctccgatggccctggtgcgatgctcgactgttgtatttcctagacaaagatgtcgggtggaacttgtgcccagctcgacccaagctttgacagtacatctgctgctgcattgtgatccctttctatgtggtggaattctaaaccttcgaatttatcttcaatcttcctgaccgcagcgtagtagttacccattgaatcggtggagtagttctagtatttgttgacctggctgatgacgactagggagtctccgtacaccatcagtctcttgatgccgagtgacacgatgatgttgagctcatgtatcaaggctccatactctgttgcgttgttggaagcttagaataagagttgaagtgcatacttgagttggtctccttaaggggcgatgaagaggatccca

SEQ ID NO: 13664 - DNA, 334 bp, Zea Mays
ggatgactttgtatgtgggaggtgtttacaagtggtgtctaccaagtggtgaggtgctaatgagatgaaagtgatggggatcccccttggccttatatacacgaccgtagggcacttcccgcgtacacattgatcacactcttccagcttatctcctagctgataacaaacaaacttcgctatcccaaggaaaacctagcgcctccgctccgagctatctccagcgtttgaggatgtcgggcgcgggaaaagcgaacagcttcaactggatcacacccaagccacgagtaattcgagcgtgggcccatcgcattcctgggtcggcccatttctg

SEQ ID NO: 13665 - DNA, 497 bp, Zea Mays
gccggtggaacctaacgttaatggccacaacaacgtgatgttgaactttatgttttcgcatgactggcagccggaccctgttttgctgagtcacttggaaaggaaaaggaatgcccagttctataggatctgggctaactattttgccccgactggtaattcggtgacctcggtgcaggttcccaagaaatgggcgccctttttcctatccaacttgctgcatgaagattcttttagttggtcaaaatctttcttgtcttcagatattccttctgctctgatggagccagagactaagacacatccctttgtcatccccaggaagtgccctgatggcaagttccttgattcggtcctttctgaggaatctgctgacgacgcttctgttccctcagacccggcctcctccccaccaaaacatgttgttgtggaatctgacctgaggagaagcaagaggctccgtgacgcccgggctgggttcagacagggttcctgcc

SEQ ID NO: 13666 - DNA, 848 bp, Zea Mays
cacagacaacccattcagttgcatggttactgaatcttgattcatgtctggccgtcgagacagagcatcagctaccttgttgtcactaccctgtcgatactgaattttaaactgcaacccaagcagcttagtcaacgctttctgttgccaggtggtggacaatctctgatcatcgagatgggttaagctctgatgatcggtcttgatgatgaattcaccatgctgtaaatagggacgccattgttctatcgcaaagagaatagctaaacactctttttcataggtagataaacccagattctttggacctagtgctcgactgataaatgccactggatgtccgtcctgctgtaagacagcaccaactcctcccccacttgcatctgtttcaatggtaaaaggcttggcaaaattaggtatagctaatactggagtctgtgttaaggctgttttcagagctcgaaatgattggtctgcaaattcagtccaagcaaatatattgtctttttttagcaggctggtgagaggtttgctaataattccaaaatgtgccacgaacttcctataatacccaaccatgcctaagaaactttgaaattctttaactgaggtaggggtaggccattgtgaaattactgtcaccttcttaggatcggttgatatgccttcagcactaatcacatgtccaagaaattccagcctcttctgggcaaacaaacatttcgactgtttcagatgtaattgatgttgttggagcagttccaagacttgtttcaaatgccttacatgatcttccagggtagcactgtacaccaggacgtcatccagaaatacgacacacacctccg

SEQ ID NO: 13667 - DNA, 883 bp, Zea Mays
gcgcagttcagagcaatagttgtactataccaaccaggcacggagcaccttgcccaatttttctacaagtggccttggaggcagctatatgaagtacgagaaagctatgttaagtactgtccaaaatgttcaattggtgctgtcatcaggatgcaacaccatggtaccgaggctaccagagaaaaatagagagagagacgtaggcctaagagagagaaccatagacatgggaccactgcaatagagtgctgacacgacaatatgcacaagcacgagatagagaggttcaggctgcctgagcataataccctatgttctctttgtagtggatgtttagagacaagcatggacagagcttacatactaagatgatgattgagctagtgagtggaattaaaaacctagagacttcgaagtccggtgccaggatctgaatgcaggtgaaagcgtagcctgacgcagccctagcaaccttagccacgcgacgcaacccaatgcaggtgagagcagccaaaactcaggaagcagcagcaaccctagcgacccgggccctttctatgttgctttatacttccttttatagcacaaggcaggagagttacatcctttcctagacggcaggccccgtccagcagaggtccaactactcctaccttgtcatgtcatagttgttgtatcgtacgcggtgcacacctccaatgtgcacagtggtgagtatgacgtgccaatggttggtacgggaggccacgccgtcgagtatggcgtagtgctcacgggtatgcctacagtctcagacgtggctacaatgacgcctcacactatcgactatcgagtccaagtagttggtagctattgtagccgcacgcaccgcatagtgcacacg

SEQ ID NO: 13668 - DNA, 416 bp, Zea Mays
ctgaagtgacgagatggacacattctaatcttggactagtcaaaattcgacaggattccaccttagcaggagacgatgtctatatcgtggcccaacaggccacgcaagtgtattatctcccatatgcgtgccaaacgaaagaacatcttaagggttgggatgttgtgtataaggtatcaccgcacggtaaattacctgttccaaacgatgaagattataacttagacccggacacatatgacggagagttcttccaagaagatgggctagaagggcgatttgagatagacttaatcgaagcgattagaatggaagtagatattgaaatggttattgatgaggaggatgatgaggtgcaaaatgagaatgacttagaaatgcttgaaggcaatgataatgacgaacttgcgccttca

SEQ ID NO: 13669 - DNA, 519 bp, Zea Mays
taaaactccataagacctacatttgctactgacaccaacaatacttaccgacctattattcaccacacgaacacagttacacgccgcatactagtttctaacataatcctcacataactcgtaatcccactactcactaacaataaatcacgcacgacaactaccacatcaaccggttaatttatttggacaccgcctgcctagcgtaccactagtaccccgcattttgactcgactcataaacataaaggaagcgatgactacttcggcatgtcaccacctctctattcaagcaaagacaatttctacctgcaacgaccaacattcatattgagcacactttatattttcctgtctcgcattcaaccatggggcggcgtgcactcgagacatttccgtttagtttaacgcaatcactactacaacgcatctcggcacacagaatcatccaccgacttgctcctcgtataaaatttgcagacatttttaattcttgtcgtcacatcagacaagcacaac

SEQ ID NO: 13670 - DNA, 467 bp, Zea Mays
aaaggacgggaccatcggccgggagcgtggatagtatgagctcaggcacggacggtccgaccgtgggcaggaccgtgggtttatcccaaattggtggatgaggttatggttgcccgatgtatgagttcatctgcatataccataagatggctaggtttgtgaatgcccatttgtagcctatgaattatgtgtgacagccttagtatcaatctcatgcaatggaaaattagagacgacaaatttttcatatgcacgtgttgattttttaaatgactcttccataccccatgtattgttttaattgatctcgctgctcatctatatattgcctaagtattggatgttgtcggatttacttacattaggggcatgtgtagtaggtagaagagatgtcatctcgaactctccttgttggacgatcctctgatgacgatccaccttgaaatgtgccagatatttcactttcg

SEQ ID NO: 13671 - DNA, 346 bp, Zea Mays
gcgaaggtgagatggttcgactgaaatacaccttcagatatgaagataaatttgatgaaccaaatgacgactggctaaaatgtatcgaagctacaagtgatgaactgcttgggccatattccaaagcggaagataatgcattatccacatccttcgggggtcgaggaaaaaagagattgaacagagtttttgatgccattggttttgtttaccccgactactgctactcgctgcaaggacggggaaagaagagaaaaactgctgcttcgaccaagactgctgcttcggccactccagatgagcctgcgccgaagagcaaaaagttgaaagtccttacccaccggcc

SEQ ID NO: 13672 - DNA, 1102 bp, Zea Mays
cattcgtcgcctcctccgccgccgacgacgaccgcggccaccgctgccttcatcgactcacgcggttgctcctcctaggctgcctcgctctcttctctctgcggtctgcgcgggtgggtgaggggacgggcgttagtgcgttaccagcgtcgctgttgaaaaagagcggggcaacggcacggagcgtcggagcctgtgataaggggctgaacggcgtgtagtttcggagcggggaaagcgggcgtcaacttacaagctatctacgggagtgccattggcaaaggtggccagcagttgcgcggggatcttctgtggttgaagagcaacaacataaaccgtcctactcctgcagtttaactttggttggttccttttcctccttccctttcgtcctagtagtagtagtacgtgtggcaagtgagaagccggcggagaacgaaccgaaacgcgcgagcgtggaaccagagatccacgcacagggcacgggagacagcagcagccgtgctcagtttgttcacagaaacacagtaggaacaggcacaacacgtcgttagggtcacagacgatcccgacttggggtctaccgataaggctgccgccgcacgtgcggggcgggaatgagccgtgtgggggacagcatcggggggtccgcatgtcggtcttgaagtcgtgaccgagacgcctggcccagtctccttttttttttctcccttgctgaccccttcggcccttcccttcttttatgctgagcccgtgtggcctgagtgcgaggctgcgactgcgagcagcaggcgtacagagcacgtacagcgtcgctgcccgctcgctggtttccacgttggtatcgtgccgtgtctactgccacgcgcacgcgagcgtagtgcggccgcgatgtcaacggttgtaccgcacgtgtgcttgacaatcctcggacgcgcgcgcgagctgtgcttgtgtggggttccgcatctcggcacggaaatttccggctcgagcttgatccgggaactgggattagtcctttgctcctgtttaagtaactcctagggccgtaacataatgtgtcaattaaatgcaggtgtacggtgtacccgctcggtgg

SEQ ID NO: 13673 - DNA, 748 bp, Zea Mays
cgggatgcttcaggtggtattagagccataggactaggcgtagaatgcaaccctaacctaaaaagcttttctcaaaaaatcttaacgtcttaaaagggtcttcccttctttctccattattaacaaattgttcttctcttgactaccaaatggagggcacctttgtccttaaagtgtcctattgcttggagctagaaggattcccttaccttcttcaaagttgttcgcttcgcctcaaagttcgcaagaaaccagagtatgtctgaaaggaatattgagagaatggagttgagaagtgcttcatggcagtctacctgggggaaagccgaagctacccaaaccacccacctttccagatcaccaccactggccaccgcttccaagacacatgccaaaatgctgccctaaaagccctctgcatgccaaactacaactatgaattcgccgagacaccccttcactacttcccacccagcaacaaaaataaccctccttggaggaaaaggcaccaagctttatcagggagagatcataatgaggaccaccccaccgtaatcaagatggccgaatatctccacacccttgacacccactttgatgaccttttctcccattgcacccacctaaactcctgggtagaaagcctagagcaacgaatcaaggaactgaaggaagagaatgcagcccgccaaaacagtcttgagatggcagaaggcgaggaagccaacactcgtgaggcatacaggac

SEQ ID NO: 13674 - DNA, 336 bp, Zea Mays
gagagatcatcgtgcactgctgcactgcactccgcaggctttcactgtggagtgatgccacccaaacagacagacagctgctgtgttctccactcgtcgtgatggcgatttcaggtgaccaaaaaatggtacgtacgcgtgccatgtcattgttccgtccagattcacagacgctgaaaggatccgatgccgactgcccgaggacgaggaacgccgtcgcactgtatgtgtacatgtacgaggtaggtttctagttggtgctccaactccgaggccaaaccggtcggaggaagaggaactgtttgtagtacatgggaggaggcagagagagccgct

SEQ ID NO: 13675 - DNA, 973 bp, Zea Mays
ttatcatgtagaaatcgaagaaaacacctctgaagatgctctgtcagaacaactaaagaagatcctgatggtacaatagcgaaaagatcttcagatgcagtgaatgtgccacccgtgaactccgcgccgtgatcctcgccagcttcacgatttgtgcgctcgttgtgcggatatcggtcggcggtgaaaagatcttagcatctggattggttcgaacctggtcactagtaggttcaccgtacccacttggtctgcgatcgggcgagatgatccccgccggcattagccgcttaccgaccgtgcgccacgtacctaggggctttaacacgtcgcagtaaaccattgatgcaagtccgtccatcgccggaggcctttgccacggtgaaagccacgatcacccacgccagcgcatttctcctctataaggccgccagcgcaacttctcaaaattagccaccaccgccctcagacactataaattgggtgtgccgctagctctgttaggttgtcacaaagctagagcacccgcccctgcctccgattagccaccatagcgccctaatttctttcttcccctaatctggttctccgcgccgccgtgaaccaccgtgtcgtgaatcgtcgtttccaggtccattcataccctccttaccctcgtttcagcacccttgtgtgctatggatgcttatcggcctagccaattgaactagaccacgttagatcaccgggaacacctcgggttgtccttggtttgcgccatcaccgtggacagagagattttgagctagaacttcgcaattggtagagggattagggtcgcccgaggtagaatttaatgtcgaccaagtaagaagcttagcctttgcatattccggccgatacaagctcgctggagcaactgctccgtcgtctgtggtcagggacctgatcttgcaatgaaaagaaaagggaagggcctctgagcaaatgtcag

SEQ ID NO: 13676 - DNA, 821 bp, Zea Mays
gaaaggttaagttggtttctaatctcggacgttggctgagggctcaacggcatccgcgcccaacgcattaaaacgtggcggccagaggcaacgctgcctgctcacacggtggggaacccaccggcgaccgcaccatggccccccaggtgataatttcttcccccagaaacgtgctacacaatgtggaggttggcgcaaacttgagaatggtggatttaccgtcggaggtgttgggatttcgggtgcccacggtgtgacgcggcttcgcggcggtggcctgactccggtgagaaattcatcacggtccgaggcttctctatgatctgtgtttgtcatgtgtagtttagaagcaacccaagcgacactccttgacaaccacccagaggttggtgcccccgtaggctcgaatcagccatggtcgcgattccggacaccccccgactcctacttgctcgatcctggtagctcaagcggaggtgttggtgcccaaggtgcggatggacgaggggagggcatgactttataccctaggcagagtccgagcaggcgggcacgctcccgagatcatggtcgattcggttgttacagctcgatccgagcctcacggatccgagcgctcaatgggtagaacaactgattgttgagggggcccacatggcggtgaggagtgcagagcgcagcgcagctggagttccggtcccacacaccagcgcctgagttctccccccatgggccgcgcgacagccagggagaatcggacttactaggctaggagaagaaggcggcccatatacaggttattctctttttttcatttttca

SEQ ID NO: 13677 - DNA, 321 bp, Zea Mays
ccgctcgggctgtgcgcggcttcctcggcttggcgggctactaccgcaaatttgtccacaactacggcacggtcgccgctccgctgaccgctctcctaaaaaaggaggggttctcctggaacgacgctgcggccgcggcttttgaagacctcaagtctgcagtcacttcagcgcccgtcctcgccatgccagatttcgccaagtccttcaccgttgagtgcgacgcttcctcttttggttttggcgcggtcctcatccagggaggccacccgatcgccttcttcagcaggccgatcgctcctcgacatcgcgcactcgctg

SEQ ID NO: 13678 - DNA, 385 bp, Zea Mays
caaataaaaagataaccacaagatcacctcgagttcttccttcccttcttccttcttcctcccaccaaaactccaatagaaggcttgcaccaacacgaaggagatccaagcggggagggctgcaccttggagaggaggagatgcgggtagctaaggttgtgtgatggggtggctacaagaacttgggggcggctgcaagaacttgggggaagaaggagagggagggggcggcggccaaagagtggacaaggggggcggctgcaaaacaaaagagggaggacggcggtaggctagggttggggggaaagagtgggctcccatccatcggatctagatcaatggcccaaacccgctctcacgtctatgctcccaaccccagcgtaca

SEQ ID NO: 13679 - DNA, 807 bp, Zea Mays
ggccacacaacgtgtgtcgctggagaactccagtactgcctatcgttggcgatagggattatctacatcctctagcaggcaggattgcttgctcggatatggcgatatatactaaagtatgcttgtgcggtggtttcggttacacctgccttttgtgcgcatgtcaggacgaaggtgtgcccgtaatatcacgctcgcatttaatgtgagcgttgttatactcatcccttcgtaaggcgacttccataccgactaccggggtaggtattataacctacgacatcggcttccaaaaccagagcttgctggcatcgggtgattggccgcttatacagtctcttgtagtttattgtattttatagtatgccatgcatgttcttgtgtggttatgagaccgtcgtgtgcaccatatagcagcttcgagtgccatacagtctatgttgcatgtctacatgctgattttgtcccgtcatgtccccatcatgcatttaatcccttgtactcgagacttacccattaagctattgctacaggacagtcttaagggtatttagatgcaggacccatgttttggcgccataccaccactagtgggctagccacatccttcagccccaaaacagtcccggactgtcactcagagttcttgattctttgagggagtctatagccccaggagcttataccgtcaggtggcctgggatgagagggggctcaggggcttataccatctgatgctccaggaagcaaggggcccaagggcttataccatcaagtgccttaggacacgaggcaccttgggggcgt

SEQ ID NO: 13680 - DNA, 1132 bp, Zea Mays
gccggttatgttgtgagaaatgcatcaatggaaatttatgtgaggagtaattttggaaatacaagttatgtgagggttgaattagtacatgtatgtgtgtgtgtgccgtggtgtattatagtgatggtggcgtaagatatttgtttgaggtgtgcgggtatatgccgtaatatggttatactcgcgacgaggaaagatgcatgtattgtgtaacacgacgcttaggtcgctattatataatcgtgtgaagaatgctcgtgatggttgtgtgattaaggagtgatgtagtggcaagcgagcagtaagtttagtttttcaacggttagtggatagtagctgtcggtgtcgtcatgctttctgttgtatggcgggtcgatgccttgccttgtcaaatattgcattccatgcccctttggataaataaatgtcttgttgatcgattagaggtcttatacgagtgttatcgcagcccaataattattggaggcaagtagcgtgcacaagtcggtccttgttaaaattgaagaacaatccgctaagatatacacataagtgctttaggtccttcagtagccaatgtaagtcttatgaagttttatgccatgttttaatgtctctatgttagacctcctaaaatatggtgttttaagtgacttgtgtgttaactaattcgagtagagaaatggttaagaaaaactaattaacctgcttcaacccatgtttcgagttacaatgtctaaaatggtttgctaagtcttatacggcgttagccaactcatgttaagtaagagtcaatggcgtaagtgattgtgatatatatacatgtggtgtctcggactgcgttaataataggcaagccgacgtgtatgtcgtatggcgggctatgccattcctttggttaatcaacttgttagatgaatttggttaagctcgtagttatgatgaattacttgttgtagtctaaatgcgtatggttatgatcgcgggtaaaaagtagtagtgcttatgtgatgtctaatttaaaacgcaaattgttgggtgattatcgtgaagaatgcgttgttaattggttgtagtaattttagtgcactaaatgatttggataaaatttgtaagtctacttgctagttct

SEQ ID NO: 13681 - DNA, 309 bp, Zea Mays
cagcccggtcccgcttgtcaacgtcgtcgcccgcgcgtgcgttctctccctctgtcctatgaacccgccctatcagagcacactcctcgctcgcccgctgacgccccaaccccatccgtcagctccgtctccctccccgcaaccatcgctccgcctggcgcgcacgcacgccgagagagccagcccacgtcgcgaaccccccacgacccgagctcttttgagcctcgcgcacacctactcccctatgtccatttctcttgcccgcagctcacctcgcgcaaaactgtcgccgtccgtcgtggttgcgcg

SEQ ID NO: 13682 - DNA, 348 bp, Zea Mays
gccagcgccgctgccccctccaaccatcttccccctcacggctccctgcagaccagaccccactaccctcctttgagccagtcctccaagtgctccgtatctatggactcgccaccgccaccgggggagcgaggtaatgccgccaccatggtccggcatctctgcctccattcggtgtccatggtggggtctgggagaatcgccggtgcacgtggatggtgatagggcatgtgcttagccgcggtggccttcagagtccagtgaatcgctcgccggagaaccatccccgccgtgttgccgccttctaccgtggacaggtatctccgcggcgtaattggtggtatgagc

SEQ ID NO: 13683 - DNA, 455 bp, Zea Mays
gaggcctacaggttttccgagatgaccaggggcttcggaggaatgcttcatcctaggcatgtccagtccattcataactccaatgccaatgatgaaagggccagcaatgctcagcatagtcatcaaaattctcagtcttcaagcatgacttctttcagaccaccggctccgagaggcagaggaggaagaagtttcagtggaggaaggtttggcaaccaacccaggaaactgtactggcttttttgtggcgaggacaaaggccacacaacaaagacatgccaagtcacaattcagaaacagaaggagatcgtcgaagttaaggcgaggcagagtcaaccgaagcaagtcctccatactgcttcgtgttacgctccgtacatcctagagtacgtaggtagtcaacaacctacgacttctgttgctttggcaagccactcccgagcttcatggcccca

SEQ ID NO: 13684 - DNA, 679 bp, Zea Mays
ctggaagttgaggaggtcatatatttcgtattggtcagcagggtgatgctcctccctgacccgacacgggtcaagcgctccctcttcttttcccctttcctccagtaactctgtttcttccatgctatcatggacgcctcctctgcgtcccgctgcctcttcctctctgccttaatggcggcgtccctaggaagggggagagaaaccgcgatggagcaatgcccctacaagaatgggtgttagaacagatccagggcaaaggaaaagggggagaccaaagtgtaccaggtcagggaccctcgactagttaaagggcaaggggccactttcgtccatgaagtcgaacatcaccccgtcgtgacaacaagaacgcgggccaccacttcctccttctctaggttcacgacggagtgatgatcaggatcgccctcaccactgaactgtcacattgtcctctgacaggccacaagaggctaaagccggtgttgcattaaagtgtgaatcagcctctcgccagaaggccccgtctacgctgcttggcgacaacatccagtatgaaagatatctttggcttgaacttctttttcgcaccataatcccacttgggcttgcccgcagggacaaggccagtgaacgcgggtgcactcccctcaaggttccaaacaaagaaccactcccg

SEQ ID NO: 13685 - DNA, 967 bp, Zea Mays
agctcccacaagccacatatgtgagtccagttatggtcctcaccaaaaccttgataccttttcccactctcgtctaggacaagtttcctatgctcttctgtaatttctatcccactacgtcgcttgggtggtcccttcgtgacgatggtgcccttcctaaactcctttctctgccttctaaaggggtgattgaagggtagaaacatctatggcaaccaaagtaacatatcttgccaccagcactaagacgaaaacaatctgtatctttagcacaataaggacacgtcaatctaccatgcacgctccatccagagaaaataccatatgccataaaatcatgaaccgagaacagatacgcaacacgaagattgaatttctgcttcttgaagcagtcataggcttccactccttgccatagcttctttaactcttcaatcagtggttgaagcatcacattaaggcgtacgctaggatgctcaggcccaggtataacaagacataggaacataaactcatatttcatgcaaagagcaggtggaaggttgtacggtatggcaatgacaggccaacatgaatacgacgcaacggtcatattgaaaggtgtgaaaccattagttgccaagccgatacgaacgtttcttgcatcgctggcaaaatctggatcaaagttgtcaagagccttccatgcatcaccatctgatgggtgcaccattaacccatcttgtctgtgagtaaaatctttatgccacctcatgtgcatagaggtcttcctcgagagaaacaaacgtttcactctaggagtaagaggcatgtaccgaagctgtttatgtgcaacctttgtcaccaccttctccccttctttatttacaagctccacgtacctcgacttcccacattttaagcatttctgctctctgtcatgttccttccaaaaaatcatacagttgtcctggcaaacatcaatctt

SEQ ID NO: 13686 - DNA, 318 bp, Zea Mays
caagaaatgagttgtcttggttaacctatccacaatgactcaaatagaatcatggtgccgggaggtgttgggcaaacccacaatgaaatccatgcaaatgtcctcccatttccaagaagggatggggagaggctgtaaggtacctgctaccttcaaacaactagctttgattctttggcaagtgtcacactcagatacatacttagctatttccctcttcatcctggtccaccaatataaggatctgaggtcatgatacatcttgttactccccgggtgcatggaaaacttggaaagatgagcttcgtccaatatttt

SEQ ID NO: 13687 - DNA, 1093 bp, Zea Mays
ttttattcatttggccggagcttacttcagcatgacctaagcagtgacataagcatgcaagcctctcaggcggtgctcgtttccatcccagccagcactcaccgcacgcatgcatctctggtcgaagctatcctctaggtcccgctcgacatctacaacatcacaacaaaccgtagctaaccacgttgcctgcggggagtttgttacgatccttggaccggtgtataaatccggaaccttgaatcatatcatcatccacccggtccaccgagcgattatggtggaaggcgcatgcgctaatctacggccccctagccaaactccttatttcgtggcctgaagcatcttggtttggtgggccaacgctgtcggctgcttcctctccttgccgaatccatccagaagttgggcgcataaaacggcgaaggttcattgcgattagctcgaattgcgtattccgctgcggtataagacagcacggggcccttgctccatcctacggccgacgagttcacatgccgaggaagtcgagcgagaagcgtcgagttaggggagagaaaggagtagctgccgccatggatgaagctaatcaggctccagccgtggagtccttctactgcgctgagaaccggtaatgataactggaccttccttatgtcacgtggctagctttccgtagcgactccttgcactcgattccgttcacgggatcgcctagacaattgcccgccgtgagcgccaccatgggtcagcccgccactgcgggagctcacgctctgtcgctgctgattgacgggaggtggaagaaggtatccctggccgttggatcggcagcaatggtccatattagaggtggaatgccggtttgggttgatggagcctaggccgtctgatccgaatcgaacgcgtgagaatcgatttagaagttttaaaatccagggcgttaattatggatccggcggccaagatttcatgttgggtcgaattaatctgcaccataggttggtaatccaatggctgtggcgccacgataccccttcggcatagaaagtttgtaaaagagaccctttgctttcttaaaaccaaccaccgt

SEQ ID NO: 13688 - DNA, 569 bp, Zea Mays
gtgacagctacgtggctgacactatggtagtgatcctttttctgccgtttggtgtcgaagtctacgcttgatcccccagtaatcatgtggatgaccccgcagtaaggctgctcagagaagtcctcttgcttgggtgctggcggcggaggattttgatgtggaggattttgatgatgcggtggcggagggaggacttggacctcttgatgatgatggtacaagtggttgggttggtgagggatctgcttattgtggtatggttgctggtggtaatgttgggggtgataagtatgtgcgacaactcattggttgttagctggctgatttatggccatcctgtctttggtggccttggtttccgagcaatccctggtggggtgtgcgcagtcttcgccatgaaataggcagtaaaatcttcgtggttgctgggcctggcctctgcctcttcctcttgtgttggtgccgtagttttgttgtgcagggtactcctgacgacgaactatgtctccgacgagtgttggttggcgatagtgtttacctattgctggttgcggttttccctgtcagaa

SEQ ID NO: 13689 - DNA, 411 bp, Zea Mays
gatcggctgcacgcgattttcacgccgtaattttaggccccatttgctgttacaaaacagatataggatttacgctaaatttcgtactcatttacgctgttttagcctacggtttacgctggaatccgcccgagccagaaccagaaccacatactgcatgatttatgctgtcaagtacatgtcattatgcagtcgtaaacgctgttggagattttaaatgttgcatggtttacgctatcatgtctcacagcgttatgcaatcgtaaaccgacatgcacatgcaaatattcgttcccgtgaatcgtggcagaaacttttccatttatgcatgagttatgcacatttccacatacctttatgcgtgcgtatatcggttgcagcgtctcagccgggatacgttgctatcctatg

SEQ ID NO: 13690 - DNA, 1007 bp, Zea Mays
cctaattcaacccctaacgactattacccctgaaacaattgcaaagttctagctcctaatctctctgtccacgatgagagcgcgaactacggatgaaccgaggcgttcccggtgatcctacgcgttctagctcaattggccgggtcgagaagcatcaagggcacacaagggtactgaaacgagggaacagagggcgtgaacgggccttgagacggtggtccatgatgtgatagctcacggcggcgtggagaagcgaattgggggaagagagaaattgggaggctctggtggataatccgaggcaaggactggtgcgttggatgcgtaattacctagcggagttcactggggcggcaatttataggttccatcggcggtggcggctaattttgagaagacacgcggcgggaggagagaggggtagtcactagcgtaagtgattcgtggctttcaccgtggcttgaccaccggcgatgaccaaacatgctaaggcaagtcactgcgacgtggtagagcacctaggcacgtggcacccgagcggtaggcggccaactccggcgagtttatctggatcggccgtgaggcaagtgggtacggtggccagggcggaacagtgtcctaagctcatccccagcgcctgatttttcaccggggatcgttatccgcgttcaaccgggcgtgaatcgcgacgccggcgcgaatccgggcgcgagatcaccggcggcgagggggctgaacctgtgatcttattcaatcattgtaccatggcaagcaccatcagagcgtctgacagagtgatttcaggagccaggatctttgatttttatgtagcaactacttaatctatttgtatcaaagttgtagctctatataatagctacaattcgactacagagatcttgctcatttgcttactccctcgagcttgaatcgagtccaaagttcatcagaactcactgtcagtcagtattcagtctcagggtggtctgacagccagactttaaacc

SEQ ID NO: 13691 - DNA, 359 bp, Zea Mays
gaaatgtgggaattattctagggcaattcagaggagccccctcctgatactgatgccaaatctgcatctaattagttgttggccatctcaatgtctgctatatcaggatctgctattccacatactctccaattatctggtgaatgtcaggggcaccccatatccattttggttgattcaggcagttctcactcttttatcagctcaacattagcttccaagcattagggggtctcactgctctccccttcagtggcagtcaaagtggctgatggcagtattattaattgcaattgtgtgattcctgctgctatctggacaactcagggctattcatttactactgatttccatgtctt

SEQ ID NO: 13692 - DNA, 386 bp, Zea Mays
accaagctgcttgctaataggctcggcccccaccttcagaagttggtggcagctaaccaaagtgcttttgtgaaaggaagatcgattcatgacaattacatgatggtgcaacattctattaaatctcttcacaaaaaaacgagtctcaagtttatttttaaagttggacatctccaaagcttttgactccgtttcttgggcttttctcattgaggtgctttctcaccttggatttggaaatgtttggcggaatttgatttcgaatctgttggtttcttcttccactcaagtgctgttaaatgggtctcctggtcttcctattaggcatcggagagggcttcgccagggtgatcccctttctcccatgctatttgttctaattatgg

SEQ ID NO: 13693 - DNA, 524 bp, Zea Mays
aaaagggagcgggaggaggagcagtggaagcaggagtggtggaggtgataggtggtggatggctcaggagtgactggagcgggcgaagtgggaggtggggtgggagcagtggcgggtgtagagggagcgaaggagcgaggccgagaggcgagtcgacaaactctgtaagcaatctgatcggatgaaatctatagctgaccacctctctctacctgctcagctactgctgctagagctgctcgggctgctatatccaaacgtcgctcttgcagccttcgtgctgctctaggtagacggtctttcccttgacctacctgaagggacgaggagggtcctcgtcgtctcctccccctggcactgaaacattcttcgtgcgcaccatcctgacctgaagactgcatatgggagggaaaaactaagcaccaaaagagagtagaggaaatgattatgactgaggtgataaatacctagaaatctcacgagggagaatctaggaaggacaggagacaggcttacgagcaagc

SEQ ID NO: 13694 - DNA, 434 bp, Zea Mays
cttggatgggatgtgccggcatttgctgggaggacttatgctggtgtctttcctctcggcgacctttatgtcgaagagtttgtgttctttgtttccaaactcccaagcgggttggctctatcgatcccatctttcttcgtgcagctgctggaggggcttggcctccagcctctacccgtggcgtcctgcttcatcttttaggcggccatcatcgcctacctccgcgagatgtccgtggaggcgacgctctttcccgcttcttcctccagcattcggggggaaggatgattaccagcctcatgaaggtggacagcgggatgagtcacggctccatccctcgcgccccccaactctttggggtgggaagcgagccgtgctgcggttccatctctttggctttgatggctttggtgtcgcctccaacgctgcctccc

SEQ ID NO: 13695 - DNA, 658 bp, Zea Mays
atccttaccgctatccgtgcggtggcgatggctggtcacggtgcagtgacccagcggcaaagcactcgatgccggagaggaattgtgccaactccgagggtctccgctactcgccgaggtccccgaaagttgcaacacaaactggcgacccttctgagcaactctccaaggtccaggcgatggtgattcatgagttcgacgatgccgaacacctcactgctcccaaccgatcatgcaggcgatgcacaacgccactacggtgatgatctttccccgcttttcctctctaagtgcgtggacgtagaagcaactccctcggcgcccgatgaagactaaaggatatcatatgtgtggatcgacgccggtggcttgtggttgaccacagaggaagtactcttctctcccttctctctcggtgttcaatgatgttgtgctagggctatgcgaaacttgcatttatagccacgacgaaaggtccggctggtgatcgatatgtggcgagattctaggcgtatatgtggagtttgttgggatttggataggagaggatcatcggcgaaatttgttggggctgttggtgggatttgcttaggaaagaagatgacgacgtgaccccaccagtcagggacacgggcacgtgtgatcacaaggatgtgag

SEQ ID NO: 13696 - DNA, 320 bp, Zea Mays
cttctttcaaaactttatctgcagcttcggtcagcagttgggtaacgacttcatctataatagtttcggccatgttaataatttctgatgattcctttgcctctgctttggctagtgactcgaagggctccgggggaggagaaagttcagctgcgatagaaagagtaaatcagtttgaagtcacaaaaataaacaacaaagttaaaaatcattaagtaatacctattcatctctcaagctccgcaaccttttcagctgcttttgttgcttctctagtgtcatgagtatctttttcgctcttctttattatttcgtgagcc

SEQ ID NO: 13697 - DNA, 563 bp, Zea Mays
aaaaaagtgttgtcagtatgtctaatttattcaccatatggatgttgaagatgttgattacttacttgaatttgtagccatcccatttacaccaatcacaataatatgctgtattatgtggagttgtttttcggccgcattttgtgcatgatggataccaccatgtgtttgatgtatctatttcggtgattgtcactgtgcattcatatcccgtgtcctgaaaaagataatagtagaaaggttaggtggtacaaaagtgaagttgttaagtaatgggaagtagtatttttattggtcttactgggtaatcatatgggttcattgtcaggagttgctccagagttttatgttctattgttggaggttggaaggtttgtagtgcatgtttcggttgtgtaggaaggtgcagctgaattgtttcaccaccacgtctgtaagcataatactttgttatactataatgtgatgtgaatagaaggtgacataagtaaaaaaataactttgatgtttttacctattttggtacgcttcagcttcaggtattgtgggattgaaataccaat

SEQ ID NO: 13698 - DNA, 393 bp, Zea Mays
caaaaactgataagttgggtctctttccatgtacaaagcttttctcacttatgggtctttttgaccttcaaattacagatgatgaaagtgatcacaatggaaggggcagaaatactgcagctgctatatgtccacacgagccagctggtgttccaattgggctaggccaacttgctcctcctatagccacccatgtcgtttatggtatatttctctcaatggcgtactatcattaagaccatttacttaagtcacatgcaaatcctaatagaaggcctattaatctaggtgcaacatcagcagcggcaacaggttgtgttaacaatgatgtttatagtggtgttgcttctgtggtgttgtctcagaatccaaaggtatagtttgtggttattt

SEQ ID NO: 13699 - DNA, 566 bp, Zea Mays
cagcgcggcatgcgggcgtgcacggcttggtgcgggtggacgggctagcgtgcatcgggcatgtcagccacgatcgagcacgtggcaccattgcttctgcccgtgttctaacgtcgatagggcgcacatctttgcgaatttgggcaagatcgtcgtgtaagatttgttcccccgactaagctctgtcgtttgtgcgtggagccgagcggtttcgggtcaaggcagagagttgtcgcctcatcaatgtgccagtgtcacaaggccgagttccgaggtaaatccctgccaagatcatgtcaaacggtcgagtcttgctcccaaatttttccagggtatgttcaaggtagtttggcgccattttttatatttggaccaaatggatttgtgtttttgaatcaagtgaacacaactgttctttatgaagaggtcagatttcagaaatctgaatttctgaatttcacaaggaggctttacttcaagggctgttttgggaattttacacaactcttttgattagaatttcttattaggctttgtagcttatttggtgtattacatctttgata

SEQ ID NO: 13700 - DNA, 1504 bp, Zea Mays
gggaatagtcataaaatgttcccaagaatgaacttgaatcacatttatacccctgagacaccaaaaacccccattggaaccctagaaaaccctaagtccaaaccctaggggcctatgtgcaaaaactgtgcacatttggactaaagtgtaaaaactataatgttaaagcatattaagtcctttggctcacaaatatgtgaatttgcaagttaaaccctaagttttgggtctatttgcaaaaatcacctcttaagccctatatagcctaagtctgaatttcacagttatgggctcaactttggagccttgtaactctcaaattctagggttttttccctaggtcaccacatcaaaattatagacctaacataggagaacaactttgcttaaagagtgtaagcatagttgttaagaataatttagagataattgagcttaaagttggactgtcaggttactagatctgaattttcagacagacagtgcaatcactacgactttgagcataaattcaactatgaccaagcaagaatctgcccatggcagctgtgacaaacttgtagctggttggtagctctataactttgctacagagcttggtatgagttaccattgaaaattgagagaaaaattcagctccaagattgcttgtgaggcgctctgaatcggttctcaatggtacagtaactgaaatggatgagatcgccagcgcgactgtcctcaccgccgacgactccctccgccgtgattcgtgctgccgacgtcgcgattcgtgcccagggtggatggatagcgtcgcggggtgaaagatcttcgccgtcggtgagctggacgccactccggctagccgcggtacctcttccctttctcaccgcccctcggattagaatctcaccgccattgtgctgtcgccgttgtccgccgcgtgtccaagccttgccatcgcaccgccatgattcactttagctccccgttgctcaccggaatagctgccacagcgttgaacacgtattcactgcgccggtattcttccttatctccggccgcctgcgttgctcggccaaattgcacgccaccgtcaaagctccctataaattgagcccgcggttagctacgctacatcatcacgaaaccagagccccaatcccaccctcaatcattcgccagagctcgtgaatttcgaattctccccaaactggtctccgccaccgcatgatcaagctcgccgtgaccagctcgattcaggttagctcgagtccctctgctgcttgttctagcatccttaggtaccccgcaaacccctcgacccctctaattaaaccgaaccgccagggatcaccaggaacgcgtaccattgtcctcatcgttcgcggttcacgtggacagagcatgatagcttaccaatcgtgaaattaagttaggggaatcgttcggggagggtttaatccggtgtacgccgctcgggagcatcggtcgttgcataaatccatcggcacaacctcac

SEQ ID NO: 13701 - DNA, 526 bp, Zea Mays
cacttatttagttcaatatcttgtatttttttgtgtgagtaccttcaatgtacagcatgggtacggactggaaccaagttatggcacaatatggaactttcctatccgaggatgatggcactcagtttcagaacactgcatttgctcctccgcctgagataccagcccagggctcaccagtaccacctccagtgaagaaggctcctcaaagcacaaagctagcaaatttcacgtctgaagaggatatgagggtttgtcaagcttggttggctgtgagttgtgatcccattgtcaacactggtcagaagcgtcaaggattttggaatcggattacagaggcatacaactctcgcagaggatcaatgccagagaggtctacaaaatctctcatgagcaggtgggacagtatcaaaactcaatgttctacatttgctggatacatgatggttgtgcttcgacaaaacccaagtggcatgactgatgcagataaggtaagtgtatgtactattatgcatatgttcttcat

SEQ ID NO: 13702 - DNA, 368 bp, Zea Mays
gttctgaatcggtcggaggggatcagaacagggggaaacggacggctgcaggcggcgctgttcctctctgcggcggtgaggtcgccggagttgaggctggcacgggctagggtggctccggggtcgccggagttgggaagagaggaagagggtgccacgacgaactcaatggcggggaaggggccatgaatccatgggcagagagggaagaacggcggtgagaaagcctcgggcgggccggagtaactccagtgagccattccggccacggggaggggacttaaggcgcgctaaggccttggctaacttcagcagaggcaggggtgacacagggacctactccggtgaactagaccgggctaaatcgg

SEQ ID NO: 13703 - DNA, 302 bp, Zea Mays
ttggtagggagggtgagttcgtaacatcgtcgattgggcgaggaatgaaggaatttggagatggaggtcgggttagccggaatcgccgcgcgctggtggagagccgccgcgggcctctgctccacctcccctggtcgtcggaggtggaagagtgtacgcgcgccgtcggattgccagcgagcggtggcgattaagtgtgtagcagcgtttcagctagagcaatcgtggttggatctcgggcgttgacttcggatcctacggtcacagatgcaaaccggttcacataatgcgccatctaatcc

SEQ ID NO: 13704 - DNA, 759 bp, Zea Mays
cgcccatcggcttcagggtctcctggtttgtcttgtttttttatcacggatggtgtgggcagcatggcctaagcgccatcattcgagctacgccgacccctggtctccgtagcctggggctcgatgcggcttgtctcgttgtgccgtgcaggtggtctgcgcactcgggtctagtcccgataggtcatgagtgcgccgcaggccagggtttgtgtgggtcgtatgtgtgccgcagctcgaggggctcgtagaccatgagtgtgaggcggactgtcgcctctgttgtggctcggttccaggcatagttagtgcgactggtcaccttatggcagatcagtctcggccaggtgagggatccatttgagtgatttcccttcgcacccccccccttgtgtggttcctccatgttcgaccccaagctcggtgccacggggttcgtccgagggcgggtgcttcgagggtagacgtttcctcccccaactgacagacggatcctagttgccagagccttttccttaacactcttgttgaccaatggtcctcaaggacaagggaccttatccctaacagtagcccccgagggggagtatctcttctcaggggctaatgaagggtcgggtggcgtttgacctcagcgactgtggtacttatttccttggggctcttggcattgtgctgctatactttggtggtaatcttcgcaatgccatcgatccgcctgagggttcatcagcggtagagctggacctgttgttaggt

SEQ ID NO: 13705 - DNA, 672 bp, Zea Mays
gtcaaaactttaaccttctttgacctcggcacgctagaagtcatcgaagtagcagcctttcttttctttcccgacttccgcgaaggataacaatagtctggatatacaaatccaataacatcaaacaccctattcaacctctttttgccttgagccccgaaggacgttgtcatggcatcatcttcagccttcgagtaggctccaagcaattcatcactggttgcttcaatggcatctagccagtcgtcatttggctcatcaaactggctcctgtatttgaaggtgtactttaggtagattaaaccaccttggctagagccagcagcagcctccttcggcatctcccacccatttgcaagtggccacactctataagcaatgtgctcctggactaagtcccttgtgcctatataagtgcatactgtattgaaagccgcctggcatgcttgtatataatttccaagggcagtggatggccttctaatgccgaagcgagaccatataggacgttgaataatccccttaatatcctccctttcacttaggtcattcttcacgtagaaccattcttgcatccaggccacgaccatctcttccgaaatgtgggaactgggtagcttgccttagagcgaggcacgaagctgtaacaaccgaagttgttgtgatattgcc

SEQ ID NO: 13706 - DNA, 368 bp, Zea Mays
caaaacagcccctaaactaatgcacttgggggaaattcagaaattcagaattctgaatttcagcccctttccaaagatcaatcacgttctctgtttttcaaaactcaaataaaaaaagtccaaatatcaaagtggcgccaaattcccttgaacacgccgtggcaaagtttggaaacctctctccaccgtttgacacacccttggcatggttttacctcggaactcaaccttgtgacactgccacctttttgacacgacaactctctgtacactgccccaaaccgctcgacttccacacacaaacaacaaagctttgtcgggggagcaaatcttgtgcagtgatcatgcccaaattcgcgaagatcttc

SEQ ID NO: 13707 - DNA, 312 bp, Zea Mays
ctagcttgccccgggactctgttctggtggtccttatgagtactaagtccccttcgttgaattctcttgggacgacattgttgtcacgccatgccttagtctgggcttgatacttgtttagggcctgcaaggcgaggacacagtctccgtcaatgagatctttggaggttgattcgtcgacgtcagggacggctaattggtttgttcggggggatccgtgctttaactcttgcggtgtcattgcctcggatccgtacatcaggcagaaaggtgtgaacccggttgctcagcattctgtcgtgttcagcgccc

SEQ ID NO: 13708 - DNA, 293 bp, Zea Mays
cgggaaggtgtaacttgtaggctactgctcccacccttttaaggatcaggtagggaccaatgtaccttggggccaactttccacggacctggaatctgcgcgtgccacggatcggggaaactttaagatacacaaagtccccgacactgaaagcgagggcacgcctccttttatctacatagcttttctggcgggattgagctgctttcaagttttctcgaatttctgccactttgtcctctgctgtcgtgataaagtctggaccttcaataattcgatcacctacttctgac

SEQ ID NO: 13709 - DNA, 382 bp, Zea Mays
ttgcaccctcagctgagcaccctcgccctctctctcgctccacgcgcgctcgtgaagctcgccgtggtccgccgcccgttctgtggccgccattgagtttttgtcatgcccgttgcctcggtgagctttgcccctttgccagcaacgtgggacacctcctggttctcccccagcaccttttgttcgcccggccgcgctcaccggcttcctcaccttgcagtcgtagctccccccaccatcagcccaaggtctccctgcgtccccgtcgttgctcaagcaccccagagtctccacccgaggtgagcaactcccccacgcccttaattccccatgtgttgccctatcattcgtgcaattgcttgtcggagagggtctgcgccgc

SEQ ID NO: 13710 - DNA, 673 bp, Zea Mays
aaattagcctatagctctcatgtgcatgtagacactcatgtagctgtgaattaatcttacagtgcttttagactccacatagatagcaccaaaaactatattccaacaatttaaacatttcgtgtgcagagaaaatgacaactcaagctttgtccaatgctcttgaatgattctgcgctttatgtggaaaatgaaagaagctgtttaaaagagcaaccactgtaatttaaggggcatataagaccaggaaggttacacagaagcacaagcaggactgcataaggacagggtaggaggcagaaagacaaaggttaccaaaccagaagggccagcaggaaacaggaaccagacaccttggcctgggaggccaccaaacctgttctgttgccaaacaatagaaatcagacaatcgtcatgagctcaaagggcagacaccaggccgagccatgcccacacaagcatgaggcaggtcagcaggtctagctcaaagcttcgactatgccatcaacaaatgcagcagtgcagcacatgaattcctaagccatcatatgatcttgcaagctaaatgcctgcctgttttaccggtcacagctgtattatctcgacctacaaatattctatagtggcatttgataatcgtgcaagccaaatgtctgttcttccaatcacaccg

SEQ ID NO: 13711 - DNA, 656 bp, Zea Mays
gccattgctaattggcgcgttccttcttccatcaaagaattgcacagttttttagggttggcgggatattacaggaaatttattcgtcactttggaatcatatgtcagccccttcatgccttgttgaagaaaggtgtactctttgtgtggacatctgatcagtccctggcatttcagacactgaaaaaagcattaacgtctgcgcccgtattggccctgcctgatttcataataccatttactgtcaaaactgacgccagtgactcaggggttggagcagtgttgatgcaacgtggccatcctttagctttctttagcaaagctctgggtcctaagggcagagggttatccacttatgagaaggagttcatggctgtgttgtgtgcagtccaacagtggcgcttgtatcttcagcagggtgaatttgtcattctcactgatcaccagagtttggctcaactcaatgagcaatgcctacacactccatggcaacgcaaggtgttcactaagctactgggtctccattataaaattgtatatcgtaagggtacagataatagggcagcggatgccctgtcccaacaagtgcagcctgaattgtcatccatctctacagttactcccaaatggttatctgatatacaggccagttattc

SEQ ID NO: 13712 - DNA, 767 bp, Zea Mays
cgaggcgccaaggcggatgacacctgcaactattgcggcaaaatcgaccactgggcgagggaatgccgggggaggaagaaggaccagcaggctcagcaaagtcagcaggcacatgtggcccaagacaacgagtcgtctcttcttcttgcccatgttgcagatgtcgccatcaactcctcgccaaagctgaaccaggcacaagcaccgagcgatgcagcggtgatcagcaactcgtcgaacaccacggcagcgcgctcaccacaggagtgtgttcatctgatggagcagaaggtctttgccacgctcgacgaaaaggaggagcgagatccacgacgctggatctttgacacgggggcgtccaaccacatgacagggtgccgcgacgccttctccgacttcgacatgggcgtccctgggaccgtccgttttggtaacggatcaacggtgtgcatcaaggggcgcgacaccgtgctcttcgagtgcaagaacggcgaacactgcaccctctccaacaccttcttcatcccgcatctcacggccaacattgtgagctgtgggcggttggatgaggagaaccaggagatcttgatcaaagccggcgtgatgcgcatccacgacgaacaccaccgccttcttgccaagatccgacgggggccggggcgactgtacgtgctcgacctcaccattgcacgtccgatctgcctagccgctcatgcgggagaggacgcgtggcgctggcacgcgcgttttgggcacaccaacttcgg

SEQ ID NO: 13713 - DNA, 912 bp, Zea Mays
ccaaacgtcccctgcgaagcaagtccacgaggcggggcaaccgactaggtccctatcgagcaagtccgcgaggtgggacgacaaattaggttcccaccgagcaagtccacgagatagggcgactgaccaggtcccttccgagcaagtctgcgaggcggggcaaccgaccaggtccttgtcgagcaagtccgcgaggtggggcgaccgatctggtccctaccgagcaagtccacgaggcaggacgaccgactaggtacctaccaagcaagtctgcgaggtggaaacctaagtccagcatcgcgagtctgcgtcaactatgataagatgcgtcaacctaggccgcagccaggcatgtgaacggtaggtcgagggcacaccgaggggtcactatcgacatgactgcaccttctcaagtacgacccgtggtgcaccccactgccctgaggggtcagtcgaccctgttcattgagacctcagcaccagagcttctacagtgactcaaatacccaatagtgcgcagccgatactccataccgggtgtatgcctatgcatgatggtgagtgacataatgagtcccggtggttcaccattcagagtgagtccatgctagcttcccctacgaacacaaatattattgtcccctgcttccaaaatcacgacatttggtgcgtcaggtaggggaacttttagcgtgccaatagacattcatcactccgatgacccacacattgacattcgctaacggcgaagctttcgcgtcggggagccacatcatgttcggtaccctcgacttcctcaccaccgccaccggcgagctccgcctggccacctctgatgtgcctatcaccatgggcacacaacccgcacgctccaccaggagcaaggcggtgcctaaagaggcgtgccgccgc

SEQ ID NO: 13714 - DNA, 436 bp, Zea Mays
cttcaggagcttcatgaaagctgggcttcgctttctgctccacaagatgctggtcgaagttttgaagatgtttgagatataccttcattagattacccccgaagctcttattagagtgggagtttttatatgggccatgaggagccaaggactggagccagatgtgagatgcttctgcaatattcatgagttgtcttatcaaacgaaggcaaccggaaaggaacaatatcataacaattttggttgttatagcttcatgcctcggtctaaggagaattaccctatgcccacgttttggaagaagtggccaggttcttggatgaaggaatggttttacctgaagaatgacctgaattagagggaagatgtgaaaggcgttatccaacatcctatatggtcacgcttcgaaattagaaggccatccatcgcacttgga

SEQ ID NO: 13715 - DNA, 510 bp, Zea Mays
attctccctgcaaatcgctctgtcagctgtctgaaccaagctcaccatggtacagtataccccaaactgaatccgatcacgggattcatttcccctcgtcgccggtgatccttcgtcgtgtgtgttgattgatcgtcgcgattcgtgcaccacggtcgggggataactacggtgaggtaaaaatcttggcataggatcgactcgagctcggttgcggctaagcccgccgtacccccttgctcatcggtcgatcggataagagctcaccgccattggttgatcactgccgtgcgccgcgtgtgtaggctctgtaccatgtcgcaattagttatgttaagggatccagtgatcgccggaggaagcgccacggtgaaagtcacccatcccgagcaccagtatccctgtttccctccggccgccagcacaacctcgaaaaattggacaccaccgacgatgggaactataaattgccacctccgcccgctccgctaggtaactgcgcagccggtg

SEQ ID NO: 13716 - DNA, 562 bp, Zea Mays
ttacaatattaggtcttttgattaattaacaaattcgttacatatgatcctaaactataatcataaacccttacaatatcttctttcctatgcaaccttcacacgataaaagagttcagcttaagagcaactccaacagtctttgtaaaatgccttgaatcggtagaaaaaaataaaactcaggtttaaactgcatccaacagaatcggtatctccttccttatccatcttgctcgacatactatctcccacgctaggcatatttgcctagggcgaacggctcgatatttccttccatcgcaccctccagcggttacctttgagatcgtatgtgcacaacaccaggcatccaaggtgtcacgtcgtccaaggcatctttcaaggcatcacattgccacggtgctaggaatgaatgaccgcattgttgggaacaaatagactgacacctcaattagtcgtatgtggttgtagacacacgatacagtactagaaacgaaacagagtcggaaccagtgaggacataaaaatccaacgccgctaaggaacgaatgaccacgttgtt

SEQ ID NO: 13717 - DNA, 582 bp, Zea Mays
ataaatgatgggggcatgtgtgtgtaggagctgtgagatgcagcggtcgtttttgcgctagtgtcatgcactcgctggtggttccgtccacgtatgatctagcctgaggtggaagatgggaaataataggcatccaaggggaaataggaaatgctaatcaaatacccttgcatagatctagagctactgtgtaagccaaactataaaagtaagcacacagcctatgtaagcaataaataaagtgtggaaacctaattgagatagagatgcataaactcccatcaatgactctagtatttttactgaggcatcgagaagcacacgcttccccctcgtttttgttgaagcctctcacaatgatgccctcacaagggccaagctctcggtcaggtaactctgtggatagcctttagttcttccccacacataagtgcgcctccaagatagcctctctcagactgcttcccatcatattcactatcaagcttctgaccaaaccactgcatgcctcattcccttcggtatacggtggtgataacactacaaacacggttggtatgatcgtgcaagactacaagcatc

SEQ ID NO: 13718 - DNA, 1402 bp, Zea Mays
agacccgacatggacatccatggaggtatgagaaggggagcccgctcggacaccctcgggggctgggtcacagcctgcattacccatcggagctggatcaccaccggcagcatcctcaggtgctgggttgtagctcgcgctgctcacccgagccggatcattgtcggcaacactttcggggactgggtaatcactggcgccatccttggggaccgggttctctgcaacagccacctctaaggctgaaggattctcagtcacctccatgggaatggagcaacctagaccagcttcttgactctgaagaccgcactccaaggtcgatgaggcttgagacgctgctcgggataactctaaccccacatccggaatgtcagtgcgaacgtccatcataccaccatctgttggctcggacagcagatcttcaggaaccatatcctcgagagcctgatcaaaatttgccgtggacaactcttgcagaccaacaagagcagacacagctggagaaggaacatcactactctccccactgactagataacgccgactgtttttccgaattaaggggatttcctcctcttcttcctcatcctcgtcaacaatacgaacaacacacccattggggtcagctctggccggattgcacccattaggatcagcatcatcaaggtcacacccattggggtcaccgtcagcaggttcacacccattgagatcagctccagtaaaaagttccacagacacttcctcagcagcaggagcagaagggccgacatcctgattcaaacatgacactcgccgaagcctcctctttttcttcttcttcccctcggcaggagcagttgggtgactggtcaggcgaaggcgctttgggcgagcaccatcagatttttgagcattcaaggttcttccgggctctgggatagttgcaacagctatggtctcagcagggacggagtcagaagaatcctcagccaacatgtccaacatagcacttatctctgcatcacttgggtttacaagcatctcaaagtgaacttgcctctcatcattggggagatcacccagtgaagcaatcagagccccgacttctttgggagagggtcgcactctaagacccaagccactgtcactagtaggaggattggacgcaaaattgaaaaaatccttggaaggtggcagattccaggcagaatatgcaacaggagcaccaatattcgacactttgcctctaaggatcatctccagccggcttaccaaatccatagcaggaatcctcttgttggtaacccgggttgagtcagtgacaccactatacaaataagccgggtatgctctgtccttcagtggttgaatgttcttaaaaacaaagtctgcaactacagcttcagcagtcagacct

SEQ ID NO: 13719 - DNA, 2139 bp, Zea Mays
ccaacttttttccacaaccagcttattctcacgaccatattaaaaaaaagccgaaccaaacgtgacctatgattgctgctcactaagtgttacccaaatcgtcagagtgagggggaggcggagggtgaatgtgaacttccggatgtctccaattgcttctgatcctgtccactccattaccaagaatagcactccatgtatcttggagtagagggaggaggagggagctcagccagtcatctatggattggtgccccaaacaacaagaccggccgagagggaagagcggaggccggaggggtcagctcttgcacttgtcaggggaggctagtctaggctaggggatctctgattgcctcctatcctctcctagccctgccctgccgcagcgcaacgactccgaaatctgaatcgccgcctccctccgccattcgcgtcagtgacatctattccttcaattcattcagtcaggtaacatcctcgacgcccccagcatctatttatgtgtttccattccattgtacattgccagttggcgtatagctgattgcgatatggatcatggatcgacaggcgacagcccatgcccttcacacaatcaaaatcgaatgttggttacacaactggaaaaataacgcacaccccgcaacatactaggcacgtctttatctcggatcagtattcggtaatatggttacctgcgcccgttatttttcaccttactctttttgggtgcggagcacaaagctcatgactttatgggcactaacatagtactctgcatctctcaatagggagtaagaacgacagcgcattgccaggatagaaatcgtcctgatgttcttcgtaagtctggcatttagaccaggctgacaatgtcagcttccgagttcaggattccataccagcaagtaagtggctcatatgtttcaaccgtatttttttaatgttttgggctggagtttggctatcaatgtgtatatatagcccgttgcattattcaagtgctttacttgggtgataaactggatatgactgttagcaatcacaccgtatgagcttttactttggatggagttttagttatcaatcattggtacataaaagagtaaatcatggagaatatgccacataatgcatgcctatggaggatatgctgatacaaaattcatgtcttattatgctttattggataataactgtgagagagttggaagcgtgtgtttgtatttattgatgaagatagacagcacatgtacaggtatatataggggaggaaggtgagaggtaaaaggaagccttctacacctaaggaaagatctagagtacaatcagatcctcaatcatagtgattgagatcctcaatcagatcctcaatcatagtgattgagatcctcccctaatcctctctatctatatcagacaatacttccatatagggcggccggcatatctgccaggcgacagccaggatacagtttctaacaataacaataataaatttcaatatgtaaaagcctcttctccccccttccttttgcactaaagtcaagttcacaagatcactgtttagttgtttggccgaggcactgttctacatgtccacttcactttgtttaattctcttgataggtttcaccttcgcagcctgctgagaatgtaaatcagtttaagacctgtcgatgtggggagggagacccgaactccacttctgaaactggtgacagtccaccggcctcttgtcctaattgccaggtttgtatgatcttcttacaactaaaggctttgtgctgcagtaaaggaaataaaagaaatggcctttttatgatcaacacgtatgagctgactttatacagtttgatgttttcacaagatgtcattactatgcatgtctgccactgatgcttatctgcaacttggttgtgcctcagcacatggccaaagcaaaatttatgagaaacttattttattattgcaaagtatactattattcaagttatggtagacagtaaaaatagagaaaaaaaatacctggttattttctccatcctttgtaagaaaactttcgaggacaatgataaatattcttctagtgcaggtccttaagagtggacatttactactttcatctaaaggtat

SEQ ID NO: 13720 - DNA, 296 bp, Zea Mays
caggattgccgccgcggtgcgcacacaccatcgctgcggctatcggggaggaagaatgacctgccttgccgttggatcgtagggagaggtggagattagacgttgggcatacctgtttggggaatagatctgagccataggatggaatcgaatagattaggttagatcttgattcattaaaatatgaccgtcgaactttgatccgatggacagcacttggtattgcttcgttataagattcgagctaatcttggccgtctgccatgaatccaatggctcaggcggacagatatccc

SEQ ID NO: 13721 - DNA, 313 bp, Zea Mays
gtagtgtagtggagcggtcagctactaaccacgtgtgtgagaggccagcaagctgcacccacaagtccaacctaaccagccggcgacgttagctaccccaacagtggaactcccccctacttcacgggcctacaaatatgcatcaaagcatcctgtctagcagcttggagcttagccgtcttggacgacgtcttgactctctctcttgaggtaaacaatgtctgacgtcttgagagcatccattcatgcttgtaaaatgcatgttgtaagatcgatgtattgcttgtttttttgtcgcagtagcttggctttg

SEQ ID NO: 13722 - DNA, 289 bp, Zea Mays
tgagacacgtggcagtctcatagatccaaagcacgagggcatcggctaaagcaatacaagtcgatgcatctgcatgtaccttttctacgtcatcacctacccattgcaataacatctggtgtaaattagaaggtatacaatgattcacatgaatccaatctctgcctaagatgagaatataattcccatctacttcgatgatgaagaaagcaccagcgagggtctttgtcctaatggttaactcaatggacctgacaccctcggcctcgatcgtactgtcgctcccaac

SEQ ID NO: 13723 - DNA, 575 bp, Zea Mays
cgatttctcgtcgttgccagtgctccgccgcggagccgcatcccgtcgtggaccgctcgttggtcgcaatccatgcccacggtgagtccctattcagcattgtcgcgtccgcgagattttgtagcgatattggtattgggtttcggtcgaccgggcatggatttcgccgcactccggcggggatccgccgtagtcatgggggcggcggcgccgtgctctgggtggtcgagaggtggaggatggctgtgtgccattgattttccgttggatgatgtagattagatggtaggatggccctcggatcttgatcgtgtggcttgcacgaattcagacatcataaaatcagagctacccatttcagatcgtggggtggggattgtataccggctcacggtggtagtgatctaatcgtgactctcggttttagatcgagcggccagagtgcaacgtaccccttcggctagcgtattatacaaaagaaaccctatgttattttagtatcaacccgccgtccatattcactatgctctgagtctaagatatcttgcgctgcggtccctgtctttttccgaaaa

SEQ ID NO: 13724 - DNA, 453 bp, Zea Mays
cgcacgtggcgaggcgggggagagcgtcgtaggctctcgcaggcggggccgtgcggggaggcgtggtgaacgaacctgcaggaaagggggggcgacattgggcgacacaggggcgggatcgaggaacacgtcgagctcggtgagagaggtagtggaagaagaggaaaaggggaaatccaacttgtcgaagatgacatgacaagagatgaggactctatgtgaggtgaggtcgaggcaccggtaccccttatggtcgggggagtacctaaggaagacacaacgagtggagcgggacgctaacttatgaggagtggtggaggcgagattagggtatcaagcgcacccgaaaacacggagatgatcgtaggaggggtggatgccgaagagagcgaagtaaggaatggggtgagcaaccgccttgggcaaacagttgaggaggtaggtggcagtgtt

SEQ ID NO: 13725 - DNA, 607 bp, Zea Mays
ccttgaagtcgtgcaatggctcccaagtagtgtcatctttggtcagaccctgccactgtacgagaacttgttggacaccatggtgtaactgggcgcgcaacgctttctttggagcacgcaacaaccaaccatcctaaacaagtggcacgtgtggcgaagtggttggagggttcccgtagaacggcttcagcagtccaatgtggaacacatcatggagacgggtgccggtcgggaggtgggaggtggtaggccacctgcccaatttgctctgatacttagaaggggcctacatagcgaggcgccgaggcccaatctttcccttgggtcaaggctctagcgagcgggaggtggagaaggcagagccacacccaatcacccactttggactcgagctcgcaatggtggtcatcgtagtaccatttcccatgctactaagcctatctgacaaatttcccagaggaaagcatctcgatcacgtattagggaatccactgccttcgtttgagcaaacccctgtggtgtgtggtaacagagatggcgggggctggccgtacaccacctagaagggagtggtggggagcaccatgtggaaagaggtgttgtacca

SEQ ID NO: 13726 - DNA, 475 bp, Zea Mays
ctcaaatgtaagggtggaaataagggggatagggttccctagtgacctaatagtaatagacaccgctggggtagatgtcatcctagggatgaattggttaatgaagtatgaagcgaatgttagctgtgacaagaggaccgtaacattgaagtccccgcccggagagaaggtagtggctgagctaaggatgcctaaaatagcgaaaggtgattgtcaccagatttcagttgatagcaaggaggccaacccgctcgaggctatcagggttgcatcgaacttcccagatgtgtttcccgaggaactaacgggcatgccacccgagagaaaagtcgaatttgccatagagcttatccctagcaccgcccccatttctaaaagagtctatcgagtgtctgggccagaattggtggaactcaagaaacagatagatgagctgttagagaagggttacatcagaccaagtacctcgccttgg

SEQ ID NO: 13727 - DNA, 635 bp, Zea Mays
cgctcaccaaatcacctgatacacatcgagaaagagggtgggggaagtcctcatccattaagaatcctgacgacagcacggtgatgaccttgactggcgcttccattttagatagtgcgagcggcccagaggagtggtggtcaggatcattgatgccagaatactaatgcattggcccctagcgagccatcagaggttgaatttggtggtgcataaagacgtgcaccagtctcgcgctggtgagaccttgctacttcagcgtcttgagcgtcgtcagaagaggttccaccttgcccctcagactcggccttgcgccccacgattctagttgcccattgacaccggctcccgatcgatgaaacatggggcgttgtcggccgtattcctgacatagaaccactcgctctcataccacacggaggtagggagcgggatcttgaagtacccaaccttccagtcagattggagttggaagttgatcgaaccgacatacagttagtcgccacaacccaaggtcaccctaccactgaataagtactatcacaacttctagtggaggtcaatccctaggatcgcctcgcacggggtgatgaagcacaccatgtgcaagacagagttaggatggagcttctaaa

SEQ ID NO: 13728 - DNA, 734 bp, Zea Mays
acagaatagagtgactagtgattcgttggcttcgcaacgaagggacgaagagctgtgctcgattgatttggatgaagggggaagagagcgtggtgaatttataggcccagtgagccaccacgatggccatggtgataaccatcaccggaccttgctggcgaccaatgatgacatcggcgctgcccttttctaagagtttgccacgttccgccgcgacagtaatgatgtcagatcggcgatagcgtggatggacggagaagagcggcgccggtgaccaagggccggaaggatcagtggccgcgtggcggctggaataattatcttccaccgcggcgatcttacccacttcaagaatatcatcgcgaggagatgctcgccgaacgctcagcccgaccacggcgcaaatcacggcgcagatcggtaccagcgggcagcggcgaggtgtgcggtactagagatttttcttgctactgtaccattgggacttctgcttaaagcgcctgacagagcataatcaaggcataatttctccataatctatgtgacaacctcataatgcatctgcatcaaagttataaatctataatccatctttatttttgctatagcatccctagtcgaattcctactgaatccaacccaaacttgaacttcaaacatggccaatttcagtggtggtcatacttttctgaaattggtgttcagaactgtccaattgacttctgacagcacgc

SEQ ID NO: 13729 - DNA, 1064 bp, Zea Mays
actgaatgaagtttccatggtacaataacctgaagaagatcccaggtgtagtgaatctcgccaccagtgaacccgcgcctcgatccacgctggtgttgcaattcgtgcccagtggcgcgcggataactgcttgaggtaaaagatgtcaacacggagaggagttggagcgttatcaccggactgttcaccgcaccacttgctgcacgatcggccgaggtgccctcgccagagttcaccgctctttgtagccatgccacgtgcttacgatcgttatcatgtcgcaagacgtcgcagtggacagcccatttaccaccagagtctttacctcaccgagcgccacgatcgtatactccggtgactcacctcccctccggccacaagttcatctcatcccaaattcgcaaaacactcgtgtgatcactataaattgagtgttcgacctgctctgctatcttgttacgaagccagtgcaccgctcctcactgtcgattagcctccagagcccccaaattcttattttcccccaaatcgagtcactcgcgccgccgtgaggcctccagtcgtgatcagtcattcccaagtctgttcatccccctctgttccatgttttagcatccttgaatgttaacgttgcttgtcagctcaactgattgaacactactgtgataggttatcgagaatatcacctcaccgccgcggaacacctccgagcacgtactcacatcgacccactcttccacccctgttctgttcaaattcacacatgtacccgacctctggtgaatcagtgaaactcaccctagcttcaatttagccgctaccgcatttagttgcttagaacacgctcaccggagccctagcgccgtcgtgaccgtgaacaagcatcgattaaggtcggaccagtccaattgagtgagggcttttgctcgggtagacttgcgcacgcttttcgtatgcttgttgcctactgtacgggtcgccgtcgtcatggaaccgtgactccggccatgtgctcgacgcggttccgtcgtggactgaaagccagaaagaaatagaagttcaag

SEQ ID NO: 13730 - DNA, 1060 bp, Zea Mays
cagcaagataataaagttatctaccacttttatatagcacatatctatagaaaatataatttagttcatcaaacatacagcacgacaaaaacagcgcgtgcagcccaaaacagtaattaataaaattcagcttctatttacttcaaaaatcgccgcgttctagagactcaacttattctaacttatatctaggcacatttaagcatagtcacacaatagatgacgtgatggctacgtagtcatgccatcacttcatcccacaatcccaaataacaaaatcgctctaaccgaacttggcatttagccgatcggtccctaacccatttttcataccaccactaccacgacatgcctaatacgttatatgactcgttcacattttacaatacatctttaccaaaacattcccatatcacttgcaacttaacctaagcttcactacacaatttcaggacatctacttaattcatgaatatcatcgtcacacacttcgactcgatttgaattaaccacacatgtctatcacatgaatggagcatttcaacaaatatcctaaaacaaattaacttcatcacacatcttgcattacaaacctacttgacttatttgaagtgtctacacaaaaccgtgagcacaatcatacaccatatgcaaagcataatttaacgagcgcataatacgcatcgtcacgacttgacctataaatatagagaaagcgatgactactctggcatgtcaccacctctctatttaagccaagacaatttctaccatcgactaagagttctaagtattaaataccttactactttacacggacaaacaaacctcaacttaacacaagtgacatcgatggaattttttgccaaactcatcatacgcataaccttgtctcgcatacaaccatatggtggcgtgcactcgagacactccaatcaatgtggcgcgaccactaatatatgaactctgatactcatgttttaacaatacatcctccacgcaaactagcattctctaaactacccgtcacatcaataaatatactccctatatagtcacc

SEQ ID NO: 13731 - DNA, 463 bp, Zea Mays
ttccaatcaacgaataatactagttgcaacacttggggaaaaaatggggtttacctgtctattaccgaaaataacaaaacaaatccaaaaaatggggacagagaaatgggagagagagcggatgcgcttacacggcgggcgcgggcgcaaactactccggcgcgggctacgtcgacgttcgcggtctacgtctcaggcgagcaaacaattctgacgggagcggaggatccgttcgcggagaagtgtggagggggccagagctgggaacgagcgggagcgtgcgggatggacgaagacgggaacaggagcgagcgcacaacggctacggcgagggctaggtcgccggggaagagaatggattgagtcgtacgcggagggccaggaaagtggaaaaggcgcagtcgggcgcggggaagtgaaaaggcacaatatcggttccgctgcgtcggttcggctgtgtgga

SEQ ID NO: 13732 - DNA, 313 bp, Zea Mays
tggagctctctcctccctaattgacataacaacgtcaatctcgtactggacaccgctcgcaacaaatctgatttctcattgcacatagaccttctgacgcacattagccctaaactgcactgcatatgacaagagggctgcacttcttgtgtcattctttgtctccatcactgaacatctacatctactttaaggttaactcttaatttgtccattctcctggaagtgcatgcccacacatataccacatcatgacagcattctctaacttagacaccctcagaccctctccactgctgggccttaatctcgt

SEQ ID NO: 13733 - DNA, 398 bp, Zea Mays
gggtccggtctgaatcgctggcacaactggagcctgaagcagaggaggtggagcaaactgaactgggggaactgagacaccagaatgctatagcataagagccatgaatgccctgctctcagcccgatcctgaagtagctgctgctgaagtgaatcctgtctgtcctgtatggtctgaaacatcgtgagcatcctctcggacaaccgggtctgctcggctgccaggtgagcctgctgctgagtgagagactggagaatcgaagcaatagcagggtcaatagccggaggggcagcaggggtggcactagaactcccagcctcatgatcatgtgagcgtggaggcataggaggcggaggaggaaccccaaaatcatcatcatcatcatcatcaactgctg

SEQ ID NO: 13734 - DNA, 893 bp, Zea Mays
taacaaacaaatgcttgggctggtttggaagtattactgctgatgataccttacgttgaatcttaggtactcaccgaagacctgcagaagttcttggcatggttcatatctctaatcgtgtccgtccagctgaatctttatgggcattggcttatggtggtcctatggcattattaccactgattgtgagcaatgtcgagatggataacctggaacctatacttggcgatttgtcatcgtctcttgctactgcatctctttctgttcctattttcaggatcatttctgtggctgttcaacatcctgggaataaagaagagttatgccgtactcatggaccagagcttctatctcaagttttacattatgtattggacacactatccagacttgaaagtggaaagaaagagatactgagtgatgaagagcttgttactgcaattgtatctttgtgtcagtctcaaagaaacgatcatagtcaaaaggtgcagctctttagcactttgctgttggacctgaagatgtggagttcatgcaactatattttgcagaaaaagcttctttcttcacttgcagacatggtttttgcagaatctacttgcatgcgtgatgcaaatgcactgcaaatgcttcttgatgggtgcagaaggtgttactgggtagttcatgaagcagattcaattgataccttcacacttactggaaacgagagacctttgggaaatgtgaatgctctggtcgatgagcttttggttgttattgaactgttgataggagcagcaccttctacattggcttctgatgatgttcgttgtttggttggatttattgtagactgcccacaacctaaccaggtaactgcacttggaactggcagtctagcacaatattac

SEQ ID NO: 13735 - DNA, 328 bp, Zea Mays
caccgccgcgcagagagctctgctcgccgtagctcaccgacgggaaggagacagacttatggccgtaggatctatcgaggggcattctggattgatcgtggctagatcgatctggaccattgaagcgtcaacgcacggataggattagggcgcgcataccccttcgcgcgatcggatctggacctccagattttgatcggatggcttagaatagaacgtacccgttcggtcgaggcaagcttataaaagagtccctgggattttcaattattgatcccgccatccctgcacagtttagaacagttacagataagtccctgtgaattac

SEQ ID NO: 13736 - DNA, 585 bp, Zea Mays
cgccctagaactaaggatttccatcgcacgggcaaccccaagccaccacggacataatgaaggcagtcacatcgcggataataccccggcatgccctgcccccgacccaacgcgacaccgcggcggagcatagattccggtgagtaattccaggggttcttgtaagctaacttcaattcaagttggtgcaacacgatgggggtatgaagtacaagcgagggataggatgtttaccacggttttcgctgcgccaagctttggccacggtgaggtgtggccacggtggctgcccaacccggtgaggaatcctcggttgattcgagcttcgctttatgccgcggcgatgcctattttgtccacgaggatgccacgaaagtggtagggcagtcgcacgcccccaatttgccacgtcggtgaagaacggctgcaacagaactccctttctcccacccccttacggcaatggcgcgcccgaccctcggatcgcgagtgtggcgagtatggtggggagttcgcgggtggatgagaggggcaaggaggggcggctcaaatacccacggacgtggccccgtaagcagttttccc

SEQ ID NO: 13737 - DNA, 475 bp, Zea Mays
gcttggccgaacctcgggataaattcttgcgtctgtgtgcttcactctgtattgtgtgctgactctctgtcttactcactttttatatctgcacttcaacacttatctgtggtacaagttatatttgaagtgcagggcatttcgagacatgatcttctattccactgcaacctactcgaaggatctttcattccactgcgatctggtctttgagtagagtaagaactaaagttttaaagtgataattttttattcgcctattcaccccccctctaggcgacatctagatcctgttcccgggcaaagggaacttttaggttggtatttattaattgttttgcaccagctgtaatgttagacccgtacttactatttttttgtaggagacgaggaaatgcagttgggagagttacgacgacaaaggagaggtgatgcgcacaatagagtccaagagactaatgggacagaagatgcg

SEQ ID NO: 13738 - DNA, 730 bp, Zea Mays
gaaacaccgactgaagtcgctccaatcgtcgatgcagtgtcgtggcagatgtcagagccactacagtgcgtcttgccctaggacgatgggcaaatatgctatcattacgtcttacgtcgccccagcggcccgggtggcagtcgtgtagacggccaaccagccccacgaatcttgcttgggctcatacttgtcgacgttggagactttgaagttggaggtccactggatggcccggagacgcggagtaagcgtggagaccctgcatgtgtcttcctaccggcattcatgaggtcggtctcggggaggggagctggtagtgtgtcatctcgaccgtccccgggtcgggccactagtcgaggccacaaccaactcaactcgggtggctcgactttgagccgggatgccatgatctcagtcatactcctcccagcacctaatctcactttcgtgctgtcggtcgcgtgaagcgttgatggagctccgcgcgtctcgtcggctattgatggcatggcgtaggtcgctcgggggatgagcgatgggcagaaggtgattagctgcttgggtaagcagccgccggtagccttccacatccggagttcgcaggaggccatcagctatctgggcaagcacacctcttacttcactcggcgtgttcattgtgcgagcgaagtcgaggtacaggttccgagcaaagagagggttctctcggtgctgccttgcgccttgctcg

SEQ ID NO: 13739 - DNA, 346 bp, Zea Mays
gggctcaaactggcccaagcggcccaacctcgcgcagaagcgcgcccgcgctggccattttgcacagcggtcctcggggttctggataacaggaaacaagttcctttactgttctgatgtgtcgctgacaaattacagaaaggccctccatcttctattcctttacacgacacgacctcgacgacgttcacgcgcggttgagctccgacgagctcgtagaccggccgattggggcaacggctagggtttccgagcagcagacatgaaatcggggctaccttgatcattttccctaacttaattgagcttatgatcaactacggagctctagccacggtgaccgcgg

SEQ ID NO: 13740 - DNA, 535 bp, Zea Mays
gcccagtattcttgacatttttgcccgctgaattattagccatgttccctttgccttgatttgagctcccagagttctgctgattgttggacttattctgcctcggatatgaacagtctttgataaaatgaccagactttccacagttgaagcagccagttgaggaactagggagggcggggaaacgagcaccaggagcactccgctgatttgtagaactgggggcagtggtaggacgaatgaaaacaggctgtttgaatggataggagggtggacgaggcgaagaacgattctgattaaatggtcggattaccaacatggttcgcttctcacgtccctgattggacctgtcacccccaaatccctttgattttccttggcatgtattcttggcttctactgccaacgctgtgctgatagctctgttgtacgtaagatccaggcaggtggccattttccgttggagctggtcgttgagtcatctcatgaagcaatttttcttctttaggtcagtgttcacttgatcaattgtata

SEQ ID NO: 13741 - DNA, 331 bp, Zea Mays
cgttggagttgaaaggtttgacttagtaggaccaaaatcgagtacatgatggacgatttcagcgcgactagacatgaggatggagatgttaccttcgatgggcaattggtggccaaggagtctcggtaattaaggtcgatgggacaaaaggatggtggcgttggtgaagatgttagccgtagaatttcagcctgttggttgaaatgacgtcatgcttctggcgttctctgtgacaagatggtgccacaaaagcttaaaggtaagttttataggacggtgattcgtctggcgatgttatatggtgttgaattgaatgttggcagacaaaaag

SEQ ID NO: 13742 - DNA, 736 bp, Zea Mays
attctgtgactttttgtgggtgcacaatgtagcaaagttagagctggtatattaggctacaactttgctgcaaagcattgatctagttaccatacaaaatcgggagggaattcgccccaaacatggtatgtcaaactgactgaagaagaatctgatggtacagtgaccagaaaaatctattggttcagtgaaccgtccgccggcgaacccgcgcgtggattcacgctggtgaggtgattcgtgctcaccggcgcctggataacattccgcggtgaaaagatctttcccccctggatgagcttaaggcattgtttgtccggccgccatgttccactctaccccgattgccttgaatcaaccctcgccggagttagacacctcacagtcttgtgccacatgcctcagcactttaaccacgccgtcgtgactcgtactgacctatccagagatcgctggtgaggttgccatggttgcggccaccaatcgtgtgcgccagtacccctcttcctctccgaccgccagcgcgccaatccaaaattgaaggccaccgctcaagcacactataaattgagcacactgacgggtccgtagggtagtcaagcaccaagccaccaagtcgtgcctccaattgatcaccatagctcgccaattccagattttccccaaatctgctttgcgccaccgtgaaagagacctcggcgtggctagctcgtctcaagtccgctcataccctctg

SEQ ID NO: 13743 - DNA, 859 bp, Zea Mays
acatcgtcaaggtcgggcgtaaagactccagaacacgttgttttccaattgggccgactttggtcgtagtttgttgtgcgaaaatggtatccattgacgtcatacccagaatatttcttgaccctataagcaaagtcgttagctacttatctcaactcggcactcatagacggatctctttggccctgcaagtattcacaagttaaaagacgctaaattgagttcatagacggatctctttgacagactaagcaggtaccttacgtttgaaccaggaaatgaaatcgggcaatccatttctcgcaccctttctaagaagagtatcatattcctgtggagttgggtcccttgatcgatgccaaaattcatgaagaaattgttccatgtatggcgtcacctcttcaaggttggtcaatacatatagcatgatatgccgccactcttcatgtgtcagggtcttggtggtcgagccacttgcgcttccgagttggcctcgaaatatgttgaggttcgattcattgtcgccatgattataacgagggggtggattatgcaagctcagcagtttgtcaccatagtaagttgttgtgaagtttacacctcctctagaatgtatgcctctgcaatggaagcctcgattttgcatttatttctacatttctttcgaatagtatttagacatctctcgattggatagcaccaacgtccctgcatgggcccccattcgtgcctcataggggagatgaagaatcaaatgctgcattggattgaagaagccgggtggaaatatcttctcaagcttacacagtaacacgggtgccaatctttccaagtctgcaaccacggtctgagataactc

SEQ ID NO: 13744 - DNA, 375 bp, Zea Mays
gcagtctatgtgtctcaataaattcccatttatctgaataacctacacttgttacagcctccaatcaatgttcgcacagcacagatcataagtatctttagtatgtacttagaaaaggaaacacatggcaagttagatgacagtagaaggggaaaattaatgaaaagaacatgttagctgttagctgcaagaagtggagaacaattagggcatgtttggatcacagctaaaaattgaaccattttgcaagacgatactgtagactgcccccgccaaatacacaggaggtgagcaaatgttgtatgttctcctcttcttgatcacacaatggatagctctcatgatgctcaagtccctagtgagctaacctgactg

SEQ ID NO: 13745 - DNA, 1379 bp, Zea Mays
cgaggctccatctaattggagctacaatgtcacgcctgaggagaaaatctgagtctgatgccatcttgcgggggtgttcttcctctgagagaaaggtgtcataggcacggacgtcatcagagcctatctttcgcgaggggtggctcctctaaaggctcaatctatgccccttataagatgggaaaagatttctcgcctcttctgcttgggtccttctaagtgactcggacatcgcccggtgggtgaaccaggctctggaaatttggaaggaggtgctggggacaacgagaccaccctttcctatagccctgagtgccctccgatgtgctttgaggcgagctttattgaatttgtaagtatcctttattgctcctttgggtgccttcccttatcacacggacctgatgattttatttcgttgccttttttaccccttcctgattggggatatggtgccccaagggtggcttacaatgatgccatcgttctgtcgtcccgactcccctcccatggtggttgtctctagagaaacttttttgagttcggaaaaatctttgggtgagacataggcattgttgaaggtcatagtcccccctacgcatcccctatttgcggcccaggagcccgccacggtgagcatgattgatgacaatcctctccagccgggggatctcgccacaagaggtcatccctttgttggactgcctcccacgggtgtcgggcccttacgccaaccgtcaccaatgggggagatgcaacctccctgtcatcggtgcggattgcgttcggaggacggggatggtccacacgcagcgtctgaggtgcgcgcctgccccgtggaggtcaagggagcgttttttccctaagacggggcgtcagtgattcgacaacatcttagccattttgaggaggcatgggactcatgccaccgttcgaagtcccaccgtagagggagttgtggcagcagggtccgtgttcggtcaatcggtgtggcctaagcatctcgtggtcgagacaaataacagtctcccaatagcctagctagacctcgcagagacatagtcgcaaggttgttgtgtcgatggatctttgtcaaggtccatgtctaaaggtgagtatcgtactctcccatccctaacttttgatccttttagtcccagtaattcgttgatgggttttcctgtttttaccagtgatggtgctggaggagcttgcgcgtgcggaggagcgtctctaggtccttagttgtgagcgctccaatctgtccacgaccatcgaccctgtatgcgaccaccttggggttttgcaggtaagtgtccgcccgtactcctcgaatggcacttgtctctggctacattcacgaactagaggccactggg

SEQ ID NO: 13746 - DNA, 394 bp, Zea Mays
gaggtgccaccctgttgaatacagatgtttggggtgccccccaagcggggtattggggcatcccaaatgggtatggtggcatgccccacatttgatttgggacatatggcggtggcatgtatgtatattgatatggcacaggtggatatgggggtggaggtgtccatgcaggtatgttgggtcataattggacattatgacctgtcattctttccgattggtgaggtggtccgataggtctttcctgctgtcgctcttaagtgggtgagcgaggtcgctttgctggccggtcacttgggtcggccttcttttttacatatttagacaataattggtcaaaggtcgggctagatctgaccagtcggccagctacctttaccgtgttagttttcca

SEQ ID NO: 13747 - DNA, 469 bp, Zea Mays
tcccaatccagttgacaatcaattgggatgactcgtcttatgatatttggtggatgaccaatattaagcactccgtcaaccgcaatgtcatcatcttcatggtaacctagcttttgtttagcctttgtaaacacatcactcaacgagggtctaccatcgaatagtaccggcacgtgtcgcatgtcaatgaacttggcatttccatacggatcttgttccacattgcctccatgatataagctcaaaaaattgtccatctatttcaaacacgaattaaacattcaatataaactatggatggttattgcctaaccacaacccactaattactagctacataactataaatataaccacaacccactaaaatactaaccaccttataactagctactaaataactaattataaattttgacagcacctcccctgcgcggggaggatataaaaacccgcacattcaactcac

SEQ ID NO: 13748 - DNA, 420 bp, Zea Mays
ccccgcatggcttacaggtgggacccgcctgtcatcttgtcgccccagctggtcatgaccgaactgaccaattcctccgccatggccgtcgaccgtgccttgctccgcgaaactcggccacgattggttacttctgatagccctgctcgtccataaactcgttgcctgcggatccgcggtctcagccgccctggagaaaagaaagcagcatgtgcgccatcgtattcgcagccggggcggggtggaggagagaagctgtgcgccgccgcgggggaaatccccagccgagcaatcgaccgccccgttgaagtgcacagggaccttcctcaagttctgggaggtgcgtgtgaggccgcgctactcgtgatcgaccgaaggttttgctccaatttctcgccgtcgttactagtcgctgcggga

SEQ ID NO: 13749 - DNA, 447 bp, Zea Mays
ggtggctcgcggataatgactcggggtaaaagatcttggcgccgggatgagctcggaccctgtcactggactgttcactgtacccacttgccgatgacgttgctgtgtggccgtcgccgtggctgccgccgttcactcggtcacgccacgccttaggttgttttaccacatcgtcgcgagtcatggagagtaatcagaggcctccgtagctcattagccagtgaccgccacggtagctcgcgccagtaacttacccctctctccggtcgcccgtgtgtcttccccaaattagacgccatcgttgttgatctttataaattgagtgcatagctatctccgctaggttgttacgcacccagtgcatcgctcctcgcctccaatcgtccaccgtagcaccttaattcgggatttccccaaatcggtttcccgcgccgccgtgagcttctc

SEQ ID NO: 13750 - DNA, 530 bp, Zea Mays
caggtattcctgcactaagtctctagtgctaatctcagcagctaccactctaaattggacttcggccatttggcatggagagccgagctgcatattgcataatggccttgtcattccgaagctcaatctcataggactcataaccatagtcatcattttccctcctcttctcgtcagcttttatgtagaaccattcatttgtccacccggtcgaccactttgtgtggtagtcgattattggggccttggtgtcttttcggtacgcaaagttatagcatccaaagtttttgtgaaggtcatccgccctagccttcctctgatagtgcaactcgtgcactcggcagaaaccttcggcattgacacttatgccctggcttcggagagcccatatgtaaacactcagcctaacaatggcatttggtgtcagctgatgaagatatatctcaaacctcttcaaaacctctcctattatatcatatagaggaaacctaagccctgccctaaagaagctttcaaaaacaacaacttca

SEQ ID NO: 13751 - DNA, 754 bp, Zea Mays
gttcaggtggcggtggaagaggaagtgctgctgcagggggagggtgctgctgctacgactagtggaggtggtggtgctacagaggttgaaggtactactgattgagagaagggaaggaagcttggttcgtcttagtgtttgcaaacattgatgatgatgagtttagaggagactagagcaaaaaggttggaggaagaggctggaaaaagagcaatgattcgtggtgataagaaagaagaggatccactaatcacaaaaagtgagatgagaaatgagatgaggagtctgattcaggaactcatggggctaggtatgattggtcccaagactttgcctatctcatctgaaataaagttggaactcgttccaaatgatgtgaagctagaagggagcaagaattacttgagttggtctaggagagtgcgagtgctcttaggagataaaggagtggagcactatttggaagagggttgtgttgaacatgttgataggctcagccctgaatggagggtttggtataccaccaactcggttattgtggcatggttgttagcatccatgtatttgtctgtgagtaagatggttgaagccatgcgcactgctgcacaaatttggaagaccttgagcaatatgtattcaagaaaggggaatgtgatgatgatgatggaaatccaaagtaaggcagatgcagtgaaacagacagggagaccagtggaacaatatgctagtgaacttcagtacttgtggggtgaac

SEQ ID NO: 13752 - DNA, 607 bp, Zea Mays
ctaattttgtggcggcttcgaccgtggttgctgaagacgattctgatgaatatgtgtctaagtgttttgagtctgatgattctaggagttcgattgtgtggacagaggagtcttcggatgaggatttggattactttgcggcattggatgtggctgcggcggaggcttcaccgcgtgtaatgggtgatgaggatcttctgggtgcgagtgttgggcataggcggcgaagggcggtggcgaagcggagggtgagtgagttgccgcgaagtgataggcgtcatcatggtgaggtggaaggtggtcgccttcgtatggatgggactggcaagcgggaattgttgtcctcgccgtctggggcgagtgtgggtgagggggagctgcaaagtctgtttgcgggtgaggaattgaggataatgttgttcaactatagggagatgggtatcatcccgaaggttgagccaatgtaatgtttgatgccctcgatgtatgtatgcaaccatactcttgtgcgatgaagttgcgcgctttcgttgatcaggccgctcccgtaggcttctgtacggagttctttagaaaagacttcgattttttcgtactagtattccgg

SEQ ID NO: 13753 - DNA, 778 bp, Zea Mays
caatggtaggaggggcagcaccactggaactcacagcctcatgatcatgagtgcgtggaggcataggaggcggaggcggaggaggaaccccaaagtcatcatcatcatcatggactactgcgccctgagtctcgaactggtgaaaagcggtatcatcggcctgagtgtcaatcactggagcaggtgctagcacaggatcctcaggggctagacggtaggacccaaagaggaggcgagaggcctcaagagtgccctggaactgtggtggctgaatcagctgagcgaagatgtggcaaagatagtgagcatacggtagctgtcgccgggcatgtagaccatccagtacggtgtccttgatctcacaaatgaggaaatccacaacatcaaactcggagtgagagaccagggcaccaagtagccaaagctggatatgagtagcagcctccctgtaacccatccgtggtagaagcgtccgtctcatgagctgatataaaaacttggccgctgtggtgaagtctgtcggagaacgtcgtgacccatctgagaagggcggtcgaaacaaagccgcgacgtgagctgtaccaggagcaactccgtcgtgagggcaacgaggaggatcagaggtgccatagcacaagctgtgaagacgagtcaatgactcgttgaatccaaacaactggcgaatctggctagcatgaattgtaacatcctctcgctcgaagcagaatctcatccactggtgatcagggtcaatccatacagaagcatagaaaactcg

SEQ ID NO: 13754 - DNA, 440 bp, Zea Mays
gtggaaaaatgcaatagtgttctgaagctttgccaaagcaggggataaacatatgtgtgagacatttatgtcatttctgtcaggaagaacttcaagtgcgccaacaaccaaggatatccactgtgcactaactggagtgttcaatttatacacataagttcttttttaaggatcttccttactagagaccttctaagatcagaaaacagaacataactaacatgcacagaaaagaaatgaactgtaataccaagtgtattaaagctaaaagagcttccttgttacttcacaaaagttagttcttcaaaaacaaggaaattaatattttccctccagatctcttgatcaagactgaacgcatacctggtaaagcaagtcaccattgctgacagcaatgaaatccatgctaactgtaaattctagatcaaatctgagcataa

SEQ ID NO: 13755 - DNA, 444 bp, Zea Mays
atggatttgatggcggattgaagtttatcaccgtgcctgtagccattgcgacgtggccggaccaccagcgtcgtcatggaagctccagtgacctcggttgcgccacatcgtaccttgttactgtgcggtagtaatcgtggcacccttaggagtataatccttgagccgttgcaccggtgaacgccacggtcgcatccacccgtgttcttccctatctccggccgccagcacgccgtgaccaaattgagacccaactgcccccggagcctataaattgagtgcgccatcggcttctctatgtattcaggcatctagcgcacccacccatacctcagatcctccactagagagctccaatttgggatttcccccaaatcaaccaagaacaccgtgccttgtgaccttgccgtggccagcccaattcatgtcagatcctgccctctg

SEQ ID NO: 13756 - DNA, 449 bp, Zea Mays
cttttttttgccgtttttttaaagttcctgacttcaccttggctacctgcttgcctctcacaatgttctccatcactagctacacccaccatccatacaatctcctccatcgtcatgcccaccatcacattgctctggcgctctggcaatgtacacttttttatgccacctcactagacatcattttaggtctgttccatcagaacctcaaacaaccccagcctaacacatgaactcaatccctaattcgtggggacgtcgaaccacatatgtagcaatttctttagaagtttttatgtgtgattttcaatgattacacatgaactcacggagcaagcaagaaaaaaagggtgctcacgataatgaagggggtgtttgttttggcttatttttagtttctggctaccagaagttgctgcgaactattaaacccttagcttgtcagtcgg

SEQ ID NO: 13757 - DNA, 293 bp, Zea Mays
ggtaagatattccttagtagatgtgcttggattcaagcacagtactgttgactgtgcaagcttcggactccttccgaaaattgcgctgatgttgagcgtgttgctgcccttctggctgctggcttcgggccagagtaggtggtagcggtggtggtggtgggagctgggcccagaaagcttgagagtggcttgccgaagcgacagaggtcgtaggctgttgattacctacgtattctaggacatagggagaatagcatgaagcagtatgtaggacctgcttcagctgattctgc

SEQ ID NO: 13758 - DNA, 433 bp, Zea Mays
tggggatcgcggcgccgcgggagtcctgtgtccagaggtgggggaaggatctggggccgtcgatgcatttatgctcggccaagatcagatcgggataggattgtcgtgcaccgtcggatccacggttgaccgctaggatttaaagctgcgtatcattttgctcgggcagtctgagaccgtagatgtgagatcctgcggtagaaagcgattctgggttgcattaaacgcctaccgttagatcgggatcggagggggcctggtgccgtaccgattcataaggctcggttctaatcgtggccgttcatgcatgatctggcggccagattcagaccataccccttcgccatacacatttcacagaaaagaccccctgttactttagaataaacccgccatcctcattcactattcactgaggcttggtaagcttgcg

SEQ ID NO: 13759 - DNA, 294 bp, Zea Mays
tagaaattggaatgctagtaaaacaaacaaacaggaggagcaagcatttacacttttgctgatacgcttgcattgtcgacattggccaagaaaattaatcgatgtgctcttcccctgtattgcggttaatcccctcccagcctgggtatgtcatatctaccaacacacgcgaggacggcgaggcttgggagcggcgagaggacgacgagaacggcaggcgatggaatggtgctacaggcgtcaagggctcaagaggggtgacggtaggagggaatggctaggcggacagactcg

SEQ ID NO: 13760 - DNA, 711 bp, Zea Mays
gtcagaatcaaacagtaattttgttagttcactgatatgcatattctttgtttgtgccttcaggtcatataaataatcagtacaatacctgcttctggatgttggtgaaatctggaaaaagtgaacaagaggcccagctagctttgaaggtagtacaatttttcttgagttggtgacctttctatcacaatggtataaatgttttaattcagattttgtttttctagggaacatttgcaaaggacaagaatgagctgcttgctaaacaattccaaataaactatgatgatgaactggctatgttccgcaaaggatctagtgtttaccgagagaaggtgatactgcaaatattatcagacatgctacataacatctatcttataatgtattacatataattgtaggtagaaacaactgtgaagattgatgactatggggagcccataaaaagaccaagattgaaagttacagtggcacatgttgataccatagggactgcgttttgggaaaaccatccacacattcttcgagaaggttggtttgaatttattcagctgtcctttaaactacaaatcaatctacgtgtgtgcatatagtattaatttaattgatatattttgggaacaggaaaatttatgcacgggtttgtaaagaaatttggcatcaatcacatattttcaccttgtaattggatcattgttcgcatcattg

SEQ ID NO: 13761 - DNA, 359 bp, Zea Mays
ggggagtcggtattaggtcgtctcgaccgtccctggaatggactattggttgaagttgtcatcgactcaatccgtgttgcatggcttcgcgtcggtacaccatgatctcggtcgtactcctcctggtgccttattttattctcgtgccatcagtcgcgtgaagcgctgatggtgcttcgtgcatcccgtcggctgttgatggcgtgacgcaagtcgttcgtaggatgagcgagaggtagaagatgattggccgcctgagtaagcagccaccgataaccctccgtgtctggggttcgcggaaggccgtcagctatctgcgccaacactcctccgacttcactcggcgtgttcaatccccg

SEQ ID NO: 13762 - DNA, 594 bp, Zea Mays
cggaaatatcaccaccgtggataagtccggccggtaaaacaaatccgaccaccgtactagcttgtcgcggtggaacccgataggctcgccggtgaaccgccgtcgcacggccttgtgccacatatccgagtacctccaccgcatcgcaatgattcgttttagcttcccgtcgatcaccggagtagtcgccacgacggttgacacgagttcacttgcaccagtaacctttccccaatccggctgccaccgcgccatcctcaaattcaagcgccaccgtccttggaagctataaatcgagcccgccgttagctccgcaacctcattacacatcacaccgtccagtatcgcccccaagcttgcaaccgtgagctccaatttcaagtttccggtcagccgcagggtcgagctaaccgcggccagcccctttccggtcagttcatccccctctctccctcgtttgagcactcttatagctctgtgatgcttgccaagccaccaattcgaactaagagatcaccaatcaccgggaacgcgatcaaatgttcataaccttcgctgttctcgtgggcagaatagaataggtcaccattcgtg

SEQ ID NO: 13763 - DNA, 292 bp, Zea Mays
cgttagtagggtatagtggtcaccctatgccgagtaagcgtgctgattggtaataaacagtttgagtgcccttgagaatgaaatcttttttattgatgatgtattttccaattacagaatacaatgctgcctcgatagcttttgaaatcttgctaagggtaaaacttcctgagatgctctatattccatgaattccctatttccgtgccatccatttgagtaagccgatattatcctggccgagtgacctccgctactacaaatggtccttcccatagtggtgacaatttgt

SEQ ID NO: 13764 - DNA, 1337 bp, Zea Mays
ggaggggtatcggctcattctagccattggatcaccaacacacgattcagattagatcttaagttatacccaaccagtatgaacttgccgctacaggatcaaggatctatagccagcgaggccaccacgtcagcagcttcttccagacgtacgatcgaattggacggttaggatttaattacacgaagggatattcagggttctaatcccagccgtttgctaccaaatcaatggcacaggtcgcatcttcttcatctcgatgaacgcctgcggccgtgtctagagcctccgcggtgacggtctgccagcgtggcacatgtcggtacacggatgcttcaagtttactttcgaaaagtcttacgccatatggaaataatgatgaactagttagaggcgtattaccggtgggtgtggcagacgtacgtgatggccacagtgaacgatggcccagcgacggtgggatgtctccgacaagcaattctgtgcgcgcaagacgaccccgggatcaggcgagacacagcgagcttctacggtcccccgacaatgacccctgggcgtcaaccgaggctaagtcgatggcaaggtgaagatggctagctcacggcgactcgcactctctctcctctctgggcttacggcgtttgacgtcgaactctcgaccgcggcggccccgcacttggctaggcaaatgagatcgtgttttttgatgaaccggggacaaaacgtggtgctatatatagccttgggtggaggcgggctgacgtacgcagtgatcggcttgcacggatcgtaacagactcagccaataatccggggaaggagaaggttctagccccatggggtccatctgccgcaacccccacgcacgcagagaccaaagtctgagggcggaacaaacgaccggggtcaaggagagcccgaacagatcctgcgttccagccttccaggttgagcttatccagaggtggaagatgatcccggtatagcggacccacgcataaggctggctccaacaggccagctatcagaccaggcaaagctagtttagctgtccaactggtactgtagcgcctccaataaggcagctatcctggctaggcaaaatacatgggaggagagagaagagccaaattggctggcattgacacgccaggcatttccctctgacaaccgtcagttgggaccctgtgagagaatcgacgagcaggatgcttcggtgatttggcgcaaaagcaaatgggccagcagtcacagctaatttggcttccttgttgcaaactagacgcctatcgctgtccatgtaaaatgcagagggcaggtaaacagaaaaatggctg

SEQ ID NO: 13765 - DNA, 760 bp, Zea Mays
ccccttccggctttggttctcggcgctgtgttatgtgatgtcggtctgctcgagagcagggatagatacaccatccgcccatacgcctgaaatcgaacttgctactaaattgccagtaacactgagcgcgattatcgcacccacctacgtacatagaaattgatttcacgtactgttcagggcctcggcgtttcacttcgccatttcgttgaactgctggaagacacgtcggtgcacactagatttggattggggagaggagaagcgacagctttcggatgtgcaaatgtgcctaggttggtttcaaacataggagtatattcagtacccatttattaccaattcgtaactatcttcttcgacttattgtattcaagggaccccttgatatgttagacaaaaaagaagaagctacattaacaaatatcgaaagcctgtaaaatcttttaccaatagatggtgctgataaggacgtagtgatagatttcctacttgtgtatgggtacctcctcagacatagcaaaattaaagcctggtccagctatgcccaaagtacaaatgtgttgggagaagtgagcagcaactgtacttgaggaagaacttgtatcagtggtaaagatattatggtttcgggacccattgcttgcactcttacgtccacgttcggtgtattacatagtgacattgccatatgaaattgtaaaggtaatgtactgaacacgtgcacctttctaattcctcaccagtggttttaatcatg

SEQ ID NO: 13766 - DNA, 343 bp, Zea Mays
cccaaggaccctgagcttagaaagaagatactagatgaagctcacctttccaaattctccatgcaccctggtagcaacaagatgtaccatgatctcaaatctttatattggtggactagaatgaaaagggaaattgccaagtacatatccgagtgtgacacctgccagaggatcaaagccagtcatttgaaggcagcaggccctttgcaaccccttcccataccatcttggaaatgggaggacatttgcatggacttcatagtgggactgcccaatacctccaggcaccatgattctatatgggttatcgtggacagattgaccaagactgctcatttcttgc

SEQ ID NO: 13767 - DNA, 647 bp, Zea Mays
gttcaaacaattccatagtatattacttctaacaaccttggttttagattgcattagtatacttgattgatattgcaaccatgcacattctagttctcatgtgcaaaccaagatgaaactcttctacatcttcgtctctgtgtcttgatcatagtccatatctaaattacgcccatgcttttactcttcctacgacccttgctgcgagttatttcatcgttccctgtttcgagtcatatcatcacacactacttcgttgcaacaaactctcccaccgccgcatcactttccacagttcaccttccttgtgcacatcatagatgtctactctagcccgaaaggtcccttctcctctttccattctgcagcatggtgcctctgtgtgcccatgaaagaggacagaatcaccatcttgtgagaaacaaattgcagcaccacatccaaacagaacaaggtaggagtgaaaaacatacaacaacaacaaaatcttataggcttaagcaagttagaataggctaaagttgaaacctaaaagaagccatagatcaaagtttagacacgtgaatagctatttgtttctatataagactaaatctttatatatattctatcttttcatatcttcttttactacatctttccatatc

SEQ ID NO: 13768 - DNA, 527 bp, Zea Mays
ctaaccttggtacggagatttccaactcctgagtcgatttgtggtttccacgccaccaattcacgaaccgatgctatgttgtcttccagggattacttcattgattcactctgaatttgcatattttgtaagagcgcggataagtcggcgatgttcttctccatcccttccgcttgcagctgacctcaagttcgatactatgatcgacacggatatggtggaggtaccgatggtaactacaccaagggacactagacgcggatatgatcgcgagcaccgctcccggctccctccaccactcacgaagtatctatagatcactagaattctagggttttggagttacagaggaagaacccttgcctctagacgcagccggcctcaacgtgtgttcccagccaagcttacagacatcagcccctccccccttccttaagtacctactgccaacaaaaaaggattaatgggtccaatctggtctatagacatagctggcccatagacatggctatggtcgaccactccgc

SEQ ID NO: 13769 - DNA, 715 bp, Zea Mays
atgggaggcaggcgagctacaccatggcatggtgatggaccggagtcaggcatgcatgtatagggggtggttggagtggtggcgggaagatcgctagccgttaggcgtgtctgcaggtcgtgcgggcgagcgtgtcgcgtgggcacgacgcagcgcatgggcacggacatgggcacaacgcagcgcatgggcacggacatggcgaggaagtcgggtggtggagagctctgccacggctattaatcaaaggctaagttgtaggcgagtagtggccacggcgttcatcgcccaaccaagtgcattgttcatcttcttccttgcatccatgaccgtgtgagtgagggacaacgagttcctaggcaaggttagggccaacactcgagatggcgttgtgagaggacctaggctacgtcttcggtagctccaaacccccagtgagttccccttctgctgcaagaaatctctactaagcaaaatcacaaggcttgtggatggtttattccaccctgtgtgtgttcaaaaacaaggaaacaagggtaggcctcccggttctttaccacaacgaagtacgagggtggctggggttggcccctgttaacagattagattctctgtcgtcatcttgggctcccaatcagctatatatggctatctagttcctaattgatcttgattgagtttgattgatagttataaggatagctagagatatgag

SEQ ID NO: 13770 - DNA, 557 bp, Zea Mays
aacccagaaagagatcctcccaatccgcagaaccgaacatcctatccagacgtaccaaggtggggttactctgcccgtttgaccaagtgtatttgcgaccagtcaagggaatttcaagaagagccaaatcatccttccatcttctgaatctccccatcatagcccgatcaaggttggaattgtttttatcttcgttgcttaggatcatgttgaaatcaccaaccactagccacggacccaggcaatgagctctaacagtcgtgagctcatgcaggaattgtattttttcagaattaccttggggagcatacacacaagacaaccaccatgacacgccatcctccagccgaaaattcaccgaaacacagtgatcatcaatcctcgacccaagagaagtaacatgactcctccaagcaaccagaatacctccacttgcgccattcgagggagagaaaacgaaattgccaaagtctgaaccaaaactacgacaaaccaaccacttggtaacatccgacattttagtttcttgaatacagatcacatctgctttgacgttg

SEQ ID NO: 13771 - DNA, 342 bp, Zea Mays
gtgtattttgccacataaacactgagtgaatttaaagtaagttgtttttgtgttactaggcacccagtctgtgttagaatatttggtaatgctatactgttctgattctttggagagttagtgccagttttgaatgcatggattttttccccagaaggctgcatatgtaaaattctgggtgcaccaaactgggtttatgtattttgatttcagcttgaaaacaaatggcattgtgatatgatttctatcaacattgtggtttgcttgaaatttctttgcttcagttacgcagttggtcatttgtgttcttatgtccttatgacctgggggagtgagtttttg

SEQ ID NO: 13772 - DNA, 402 bp, Zea Mays
ctaggattcattgaggccaagtcgggtacctccttgttcactaaccgccagggctcgtccacctcttatttgttgttgtacgtggatgacgtcatattgaccgcctcaacgccatatttgttacaccagatcaccaccgctcttcgggctttgttcccgatgaaggatcttggtcccctccaccacttcgggacagttgtgtcccgctccgccatcgggatgctgctctctcagcgtcagtacactatggagattttggagcgcgcagggatgacctcatgcaaaccatatcagactctagccgacactcagaccaagttttcctccactaatgcaccagttgatgatgcctaccgtagattggttggcgtcctcgagtatcacacgttcactcaaccagac

SEQ ID NO: 13773 - DNA, 536 bp, Zea Mays
cggatggacgagaggagggttacggtcgtcttatagggcgaggaacgagtccggagctgtgaggattgatcggcgcttgttacggaggtgacgcctagagccgcgtagatcttgcgcagttggttgaaactgagtccggttggggaaagtatccaagcgggactagcctacgcgtgcggaaggaggtcccttggaacaggccccaccagcggcgccctccacgagtgtcccgcagaagagggggaggctgttgtgcggacctcggcgtggctgttacggcagcgcccgactcgcgcggagatagaagaagcagctgaatccgacacccagggcccacatggacgcgagggatgtgagcacgtggtgagaagagacggtggcgtggtcgcccctagtcacggaggatcgccaggacccacgtgcaagagacgtcgtcaaagtgatacaaccatgcggcatgcctgggaacgacactaattgttgggctgaggccaaggcaattcggcccatgcggcaatatgcaccacacatttttt

SEQ ID NO: 13774 - DNA, 576 bp, Zea Mays
gggacccgcctgtcatcttgtcgccccagctggtcgtggccgaacagaccaatttctccgccatggccgttgaccgcgccttgctccgcaaaactcgaccatgattggttacttccactacccctgctaccgtggacacgtccggagtataaatcctccagagtcgcgactctacaacccgatttgcgcctagggcataaccactgccgcggagagccgaaaagaaattgccgctgccgctgcttctcctctacaccgtcgtctagtgtgccgggattggtcatggctttttgccaagacctcacatgtgttttcagtaacctgtcggagacgattcgcgcgccagtgcctcggaattgctcgtcggacttgccgttcgaccaccgagccgctccacccaccgaccgcaagcattggcaccccaaactccggtaataactcccctacaacattcgctaccctctcgactacgtggtgcgccagttaattttaggaatagcgcgccagggcatcggattggctagctccggccaagctccgccgcagaccccctggccatcgtcgctggcatcgaac

SEQ ID NO: 13775 - DNA, 1113 bp, Zea Mays
aaaagaccgctccaacggccttcggcattcgaccgatacgaagtcaccgcaacaggtagcatagactaccctcgcgtgcgacaaaatctgggcaaaagtcacctaagggtgcagccggacaagcacaataagtgcacgttacgaggtctttactaaaagacaaatccgcgcaaaagtcgcctaagggtgtagctggacaagcacaataagtgcacgatacaaagtctttactgaaagacaaatccacgcaaaagtcgcctaagggtgcagccggacaagcacaataagtgcacgatacaaagtctttactaaaagacaaatccgtgcaaaagtcgcccaagggtgcagccggacaatcatagcaaccacgaagtccccatctcattcaacaacatcgcataaacaaataagtacaaatcacactttgttgcccctccctctttatacaaacaacaatgttgtcacagattacatacacacaacgaaggatcaccaaccacaccgcacaaataagtacaaatcgcactttgttgcccctccctctttattgcgcgcgggggagggcagcgtttttattcagtaccgcaagacaagagtgagggcaacaaagatgctacatcggctcagccttcgagataaggcccgcctcccaaaaattaaacaacatcattttcaactcctcgcccttaaaaagattccacagatcccactcaccaatacttgtcccgaacaacgaggacaacaaatctcgttgaccaccccgatctactcgaaggcgggttcgctccatcgccatccgacgacgtctaccacttcatgacatctcgccaacgctatgcttcgacaccacttttcgtcgacgccgatcggtcctcgcgccagccgggggatcagacacttcgcacacctccagctgcggcgaggactccgccgtggccacatctaacgcagcaaaataatccaaatcttcatccaaagactcttcagtccagaaaaacgggctcccaaactcactaccataagatgaccaagaccaagatttagaaccagacaaactatcattaacaggcactgcgtttgcagtcgccacaaaattagtatcatcagtagggg

SEQ ID NO: 13776 - DNA, 440 bp, Zea Mays
tgcgggttgattttctggaattctggagtttcttttgcaaaatgggtaaatcgaaggggtacgggacaatctgcactgtccaatttagtttgtacgcgcaaggttagatgagcgttattattaatcggtacgctatccataccgcacgccccgagatctacggctccgattcatttgcccaaatcagaacgctacttcaatcctacttgtccgctccacatccaatggcgcagatccatcctaaccctaccagtacacagatctgatcatgatcgatgcccatggatccaacggccaggaagcatcgcctacctccctgcaatccgacgcggcggcagccctgggaccgtggtggcgaccgtggccggagttggtcaagccgacgtaccaatgccccattcccaggttcagctagtcctacacgacacgtaaatcgacgg

SEQ ID NO: 13777 - DNA, 357 bp, Zea Mays
ttgtgcaccaagctttctcttagtgtcgcttttcatcctcagactaatggttagtcggagcgaacgatccaaaccttggaagatatgttgtgtgcttgtgttctgtcttggaagggtagctgggaagatcatcttgcattggcagagtttgcttataacaacagctaccaggctagcatcaagatggcaccatttgaggctttgtatggcaagcagtgtatctcccctctgtgctgggagaccttgggagggagatccctggttggtcttgattgggttcagcagacttctgaaaaggttcgggaaattcgtcagaatattttggccgttcagagccgtcagaagagttatgctgat

SEQ ID NO: 13778 - DNA, 700 bp, Zea Mays
gtttgatgaagttcacatgcaaattttagagaaaatgtgacctaaacatgggctgtcaggcaactgaatggggggatcgccatggtacagtagctcgagtggatcagaatgccagctcagacgctcgtcgccggcgataagaacgccaccacggcttgggatgggtcatcggcggccacagtaaaagaatctcgcgacgtggcgttaaagcagagaggtggcgttttccggttaatcggcggccactgtgcttttagccgtggcagcgtggacggtctaccgacgtcgccgtggaagcgccggtgacctcggttgcgccacgccccagcttgttaccatgcggcggtaaccgtggcacccttaggagtgttatccttgcaccgttgcaccggtgaacgccacggttacagccaccgtgttcttccctatctccggccgccgcgtatcttcattcaaattcccggccaccgctcgctccttctataaattgagcacccaggtagttgcgctaggtaattgcgaagccaacgcacccactcccactcgtaatcgttcatctgagctctggaatttcccattcgccccaaattcattctccgccacccgaaactcaacctcaccgcggccagccgtactccggtcagtccaaccctccctctccctcgtttaagcattctcacatgtctacaatgcttgctga

SEQ ID NO: 13779 - DNA, 304 bp, Zea Mays
ggaggttgccgccaaacgagccagcggtgaatgctaccactgctctgaaaaatattcaatcgatcacaagtgtgctgctcgcggagtttttctgttggaactggatggagaagataccgggacaactgatacactggcagaggagatgggcatatcacttcatgctctcactgggatttacatcgtcgacacactaaaactgaaagtctctatcaatggtgtggctctcattgctcttgtggattcaggatccaccgatatattcatccgcgatgctattgtgccaagactgggactgcatgtg

SEQ ID NO: 13780 - DNA, 467 bp, Zea Mays
ctggattgggaacgcgctggctataccccgtcgtggtgtgctctacgccgcaggtgggtcagccgatggggagaagaagctgggtgggccgttggatcggcaatggatgggcgaggggtcgcggaccggtgatccatcctgaacgatcgagattaaaacgtcgacaccgtttcgagttgatcgcttccacaacgttgatcttcacgtctagggtcgcgatcgagtccatgttactttgaatcgccaccctcggttccggatctatgggttcatataagcatactacggtgatctaatcggggtcgttcaattctgatcgggtggctgataataaaccatacttcttcggcctggtaatcttgctaaagagaccctgccttatttcaaaaacaacctgccatccttttctatagaatataggttaagaacagtccaggttattaatagaaactaccctgagtttagaa

SEQ ID NO: 13781 - DNA, 679 bp, Zea Mays
tgctcatgcaacaaggaaagcccatagcttatatcagcaaggctttaggagagaggaatagacacttatctatctatgataaagagtttttagccttaattcttgctgtggagaaatggaggccatatctgcaacggagtccttttgttatcaagactgatcataagtcacttacatttttaggagagcagcaacttcagtctgagctacaaaggaaagctatggcgagattaatgggccttcagtttcagatcgtttacaagaaaggggtagagaatcgagtagctgatgctttatccagggtgggggctatgatggagttggttgttctttctgaagtgcaaccagtgtggattcaagagattttgaattcctatgagacagatgttgaagcccaagagttaattactcagctgctggtgcatagtccaaatgaacaagggtttagcttgcagcaaggtattttcaggaaaggtgaccgaatctggatagggtccaactctgctcttagaaccaaactgatagcagctttacatgacagtgccatgggggggcattctggcatacatgcaacttatcagagagtcaagaaacttttctggtggaagggacttaaggtggatgtgactcaatttgtgcaacagtgcctgacctgtcaacaggcgaaaccagaaaggac

SEQ ID NO: 13782 - DNA, 446 bp, Zea Mays
tccctacgaacttttcattcttgtcgaagactttcttcctgagtgcttccagtatcattccattagccctttccacctgaccgttggctcttggatgtgctactgacgcatatttgatttggatgctccgttgttcgcagaaatcaaagaattcagagctagtgaaattggatcccaggtcggttatgatgctattcggtatcccaaacctgaatattatatcttgtatgaattccactgccttggctgaagttagagaagcgatgggtttgtattctatccttttagttaatttgtcaatggcgaccaacacatgagtgtagtctccctgagctttcttgaagggtccaatcatgtccagtccccaacacgcaaatggccatgttatgggtatggtctgcagttgctgtgctggcaaatgctactgctttgataagaattggcaa

SEQ ID NO: 13783 - DNA, 441 bp, Zea Mays
gctgcaacaggagcttgatgacagggctagcaacatctctctcgccgaggagaacctcaaggcaaaggatgcctccctagaggagcgggcgacagatctcatccgacaggagaaggacctcgcctggagggagcagatgcgggaaaggcgggacaagttgttggccgagcacgagctcgaggcagaggagaaggagaagaaactggaggagaaagagcgggcactggaggagcgggtccaccggttccaggcggcgcaggcagcgtaggtagcccagacggtgcaggcggcagagacgatgaagaagacgctagaagatctccgggcggagcatcgcattggagtccagcgtatcgccacatgggccgacgaggcgagctcggctctggtgccgctaggggtgagccccatcccagtgtcgaagcagtcggtgtccatttc

SEQ ID NO: 13784 - DNA, 354 bp, Zea Mays
ggccgccgtgaaccgccaatcgccgagggcggcaccaccgtcaaccgaatcactggtgagtcatatgccatcgcgttcaccatgcccccatagttgtgaatccatagtcggtcaggagtagggtgctccgtggcaccggatcggatttctctggtaagtcaccaccgtgctgggcgtggcgagaggagggagatgaagtcggggccgttgatctgactacgtatgatcctgattagaacgcgaatacctcttcatgcgatcagatctgggccatggatccatgattgggcgaacaagggtcgatcgcgatcgtttataatttggatcgtagattgtcaatccaacggaaccctg

SEQ ID NO: 13785 - DNA, 441 bp, Zea Mays
cagccccggaatatttttcctaaggggtcattacagcgatgttaagtacagcatgatcaaatacacaataaatcctacctagagagtggcttatagatgggcatgaatggcagtaggacgtggcatgggccctgccattgggcggcgcagtcctcgcccatgtgtggcacctttcgcccttgacactgggtcttcgatacttgccaagactatagctcgaaaccatctgagcggggtcccctacgcaaagtcatgaggagtcccaccataaacggtagatccttcgcttcaatgccttcgacgactcttgaacaaagacctcaacatcgataatggtcgcgaaggagcgaacggccttcgctcccatacttacaatttaacatggataaagtaattaaacatctctatgttcacgaaacacaccaacgactacacaatccg

SEQ ID NO: 13786 - DNA, 698 bp, Zea Mays
gggcggaggttgcggaattgcgtgctgagtgcgcagcacgccactatctggatggtggttctcccgcccctatcgggattcagcacccttacgttcaccgccccgtggtcgcttcgagtatggtacccctgactgcaggacccagatagatttggatccatagatcgacggagtcggagtctgtcataatgcttaattcagagtcttagtctcagttagtcttagttagagttagtttgcttgtcatatgtcttgatgcatgtcgtgatgaacttgtaatgaagttggatctttgtaatgattgtcaccaaggtgtgggtatcccctgcaacttggtgtagttattaataaagtcagttattcagttgggtaatccctttatttccactttcctctttatctaagaagttgttagtgaggatgatcaattgttcagtgttatgaagattttctatacatcttttcttatgctgaaagactgtagagtcagatctgatatgtgtgtgatttctacagatgtctgaaaacaggcacagaggtacaaggcgtgctcagccagaacagcaggcaccccaggaagatgcagctcagcagcagttgccaccgccacccctgttgaccattgagcaaatgttcctggtgtagactcaagcagtccaagcaattggtcagaccttagcagcgatgcagcaggtgca

SEQ ID NO: 13787 - DNA, 1285 bp, Zea Mays
tccattggatttgggtaaaaaagacgggtttatatagtgatctaaaccatgatatgttaagtctaggtgcaactgtttggtggatttagcgaaacttacgggtgtgggggtgatttggttggattggttttgcaaagtttaaactagtcaattatatagtggtatagacatagataccaaacatgagagataagaataatatttaaaggctcttgctaactttgtggcggtggtcccctcctctggtgacaaatttggagggtatgtggcaaggttttatgacatggtggccggaccgagtgtccctatggttggatcttgagtaaaatgtatcagcgattttcaaatttgacacaatgtgtcacttgggtatcagaacctagaaaactagaaaaataggtcgaaaagttggtcgactcatgcaaatttatctaaaatcgattttgctcaaactagatgccaacgtggcatgctactttagagctcactaatgaaagtttggggacacaagttcagagacttaagtgacataacatgccaaatttggggacttgtgtatcagcaggcacatgatgcgtgtgggaaggatttgatgtagcacgtcacatcgccatatggtttgagcaaatccagatctgaatgattttgcactagggtctatttttctagtttcctgagttcagggacctaaataacacatcgtatcaagttcgagaaccgatgatacactttgcttctggatctttgcaagcttggtgttgatgcatcccttcccaatggacaacaatggttagtcattgttgtacgaggtgacggggagggccatcaaccccacttcactctaggtcgcggaaaggctatttgacaacaaaatctagcatctcttctgggatacatcgacaccatgttgcagggcggcaccatcacctcactacttagcacctataggcttagggtgtatttgttttcgcagctcacatatgcgtgattgacatgagcagcgatcgagaaaatcatgattttacttgtgatacgggattttctgttctcagtacaaatcccgtggttgagtcgaagccgcggcgacgagaatcatctgcgctgcaggctgtttagcgagatttttctggtttctcgcgtcactccatcaaaacacggcttttaaccgaaaccacctagtctacttagcaatatctttccactaatggtggcaattttgtgaagtgtgaacataattcgatgggtccggcaaatttagttttataaaaaatagcttagaagaaca

SEQ ID NO: 13788 - DNA, 420 bp, Zea Mays
cggatttcgtgctcgtcggcgtaccagccaccgtgggagctgagctccatcgccggggcgctgtcgggttggggaaaagagcctgggcgtcggattaggaacgtccggtctggattagatctcagcgtacctgttcactagggttgatccagagtgtttgcggttgatcggacgaatcgggcgattaagggtgatggcgtgatgagcaccgtcggatctggatccaaggaaccacgcgcgtaacggttcgtggagaagtaggttcaatctgggccgttgatcggaatacgtgcggtcaggaatagagcggggcgtggatggatcctgatcgccgatctgggatcctggggctgataacacttaccgcttcacttattacatcaatctaatatggatcgtacgttctcgatccgtcggccc

SEQ ID NO: 13789 - DNA, 448 bp, Zea Mays
gaggccttaggcactccgggttggatcatggatgtgtcggggtcttggacgtcgcaaatgatcatcgagttcatcgtggtctgggacctattgagttgcttgcccggtttgacgctggatcacgaccgtttcgtctggaagtgggagtgttcggggacagttcaccacgttgtccgcctaccggccgttctttgagggacgaacagatctcaacggggtgtcgatccattgggcctcgcggacaccagggttgtgtcgcttctttgcttggttggttttgcaccataggtgttggacatctcaaaggctttggcactttggtttgatcaccagtggcctctacgcgctctgcgatcaatgcgaggaaggaatcgatcatcttatccttggatgttcgtatagcaggcaagtgtggttcaaggttctacgacctctcgggttgcagggc

SEQ ID NO: 13790 - DNA, 613 bp, Zea Mays
gctggcggaagaagcgtcacccccatgaacatctcgcagaggtgggcgaagatggccgcctgaaggatggagtggggcatgaggtgctgaagttggaggccgagctcctccagcagcaacaggaagaaggtcgagatcggcagtgccaacccggcggtgagatcgccgaggggagaggcgccagcgcggatccttccagcaaacgacggcgcaccccatccgagcaggttgcgcaccaagttgagtgccacctcggacttgaagtgctcaggatggactagcgaggccatggtgactacggcggtggaagcagaggagcgccaatggaaaggggctcggagagctcgaaggcgaaaagggcgccgcggttggagagaatgcgaaagcataattgctgcacgcggggtgaatcccttttcaaggaagactctcccgctcacgccccgaggcaccgcaaatctcgcccagcgcgcaccaaagcaacccaacctctaacacgggggcccgggcccacaagtcatacaactggtgtgcgggtctccgagtgctgagaaggcaaaccgccacgaggagcgaaccgctgcctgcggtagtgcgcctcttcatctccgca

SEQ ID NO: 13791 - DNA, 353 bp, Zea Mays
gagtagggtaagacaagactccatccaaaatttgtggatcttggttcatcttggtgacctcacttgatccttgaagacttgagttggtgctcattctcccttgatgaagttgatcatcttcttcggtcttgtctcattgattaagagttagtgtatattatcgggctggggaatatggttaagatagatatggatgagatagactacgtgatgtagattaaaatttgtgtgatgttaggtggggataggcagatcatgcaatccatcaagactctattggttgggttggtttctcattctttatttagtgtagggtgaactaagttaaaacatgtggagagggtctaatctat

SEQ ID NO: 13792 - DNA, 355 bp, Zea Mays
gtaaaatcctcgtggttaggtagccgggtactcagacactgggaggtgttttgtcggcgaggcgtccgccgtggatggtgctcacgcggccgtcgcagcggggtgttggaagagagagtccctgtccgttcgtccatgatcggacgacggtgattgattgcagcttaacactttgcaattagatctacaccattggatggggatcagacgcataggaagccgagcatgattatgatgaatcagatccattgatcctgatccgaacaggtgggatcgagcccttgcattgagtcacaaaatcggttgtggaccgttggatctggagccaagggtccgcatagcgcattggttccgg

SEQ ID NO: 13793 - DNA, 619 bp, Zea Mays
ataggttttgccctgtccccctcaacaactgggttcaacgtacacataattcgactgtacaacaactggatcagcccaaagaaaatcatacatcgataatccaaagctaatcctcagattcctaaaccataaaagaataaatcaagctcaatgtgatgctcgtacagggatctaaagctaatcctcagaacccctacaccctagaagaataaatcgagcacaatgcgatgctcgtacagagataaaccaaaggctaatcttcaaaaccctaaaccctagaagaataaatcgaacacaatgtaatgcaacgctcgaaccgaataactaactacaaaattcctactcgaaccaatcaaagcaactaattggacgaaacaacagtagcgaaccaatcaaagcaagtaattcgacgctgcattagcgaaccaattagagtaacaatccatcgaagcagcagctcggcgacgaaattggatttgaaggaggtcggggcatggtagcacgggtagcaccattcaggcagtaatcgacggggacacacgagaagattggggcagagatagaagatgtgaaacccacggccgcaaccgttgcataacatcatctcagcgaccgcctc

SEQ ID NO: 13794 - DNA, 569 bp, Zea Mays
attatagtcggttttggtgcggatgatttgatgctgtcgtttctgcttttgttgtactaggtcggctgcgcccttaggcggcttactgcgcggagtctatgcgatagacttcggactttttcgcacttgtgctggtccggctggacccttaggcgacttctgcgcggatagtcttcgcgatagacgtcggattttttcgcacttgttgtgcttagtccggctgcacccttaggtgacttctgcgcggatagtcttcgcgatagacgtcggattttttcgcacttgttgtgcttagtccggctgcacccttaggcgacttctgcacggatttgtcgcacgcgagggtggctagcgcttagcctcgcggtgacttcgaattggtcgaatgccgaagaccgttgtcgcggtcttttttcgacacatgtttttgcgggggatttttgtcacatatattacatggctccgcctcgttaaaaacctcaccccccgggaggaaaagagtgcgggccggtataagtttgattgtggcggattacaagggcgaaatcagccctaaatgggtcaaacaa

SEQ ID NO: 13795 - DNA, 456 bp, Zea Mays
ttcaggtatggggataagttcgatgaaccaaacgatgactggctgaaatgcatcgaagctataagtgatgaactgcttggagcatattccaaggcagaagataatgcattatccgcagccttcggaggtcggggaaagaagagattaaacagagtttttgatgtcattggcttcgtttaccgcgactaccgctatccgctgtggggacaagggaaaaagaggaaagctgctacttcggtcaccccagacgaacatgtgccaaagggaaaaaagttgaaggtcctaactcaccggccgcgtttcatcgaaccgaccgcgatacctgaatttggcgaagggacctcctcggctgccaaaacaaaaggaactattcctcccgagcagaggactgaagaaccggctataatgccgaaggtgcctacaaccaaggtagttgaaacgaaggttgataaggct

SEQ ID NO: 13796 - DNA, 613 bp, Zea Mays
aatattcagatttggaataccgaatagtatcataactgacttgggatccaacttcacaagttcagagttctttgatttctgtgagcggaaaagcattcagatcaaatacgcttcggtggcacacccaagagccaacgggcaggttgaaagagctaacgggatgatattggaggccctcaggaaaaaagtcttcgataaaaatgaaaagtttgcagggaaatggataagggagttgccctacgtcgtttggagcttaagaactcaacccagtcgagctctgcatggaaatacccctttcttcatggtctatgattcagaggctgtgctacctgttgatctcaagtttggggcgccaaggttgatctttgaaaacatagcagaagccaaggctactaggctggaggatgttgatgtactcgaagaagaacggctgaacacggtaattcaatcagcacggtaccagcaaaccctgaggcgctatcacgataagaccatgagacatcgatccttcgcagtgggagatctcgtcctccgccgaattttaacgggggaggggcggcacaagttgtcacctctatgggaaggaccattcatagtagcagaagtcactcgg

SEQ ID NO: 13797 - DNA, 1074 bp, Zea Mays
tcgtaaggaattccatttagtctctgagctaattcctctaatgttatgggacaaaattttcagggagcagtgtaagttctgagggccggaagtcatggaaaactatcagtcttacaattaaggaataccggtatgcgtagcatacaccaataggtccttgttccagtataaatccgtaaacagaagaattggaagggccacataatcaacatgacatgaggggaataaggcctccaatgggcccgaccggaaaagtgcaaagagagtccacataaaaaataaccgaacctccagccatcaaaataaaccatttcgggcagcaaagagtcattgactccaacatagttaattgtatcaaacaggaaagagacctcgattccatcagagtacatttcagcaaaagcaaaaagcgccacatgcgcgccagctccaaccgttaaccaacaaaatagttgccaaccagtgaatagaaaataccaaacgacccaaaagggggaggccaaagccttacaaccccgccgaggtattgtcttcatcataattgtcatcattgaagtgagggtcccccacctgttcatcagagaagtcggattcctcatccttgctgtcggtggaagcagccggcctctgaatggcagtaccagtggccttggatctgttcaagtcgtccggatttagcttggaaggggtcattttatagaactcagcacccaatttcttgatgacgtcaagatgcatagagggaggggcattttgagtgcagcatgagcaatttttcttgccaatcccagtgcaatttttgaagcccttggcctttgccctaagcctggcactccttctgactgtcgtgtcgactgagataggctgcctttttctgggagtgtggagttgtggactaccggtcactttatatttaaaaccgattgatgagtaccacaaatttcttcattcactttggccatacctaatgtggcatcattagggcctaattaaaaaatacttttaaatcatcatcctgatcgctactttgtcggggtcggaggagttgggttgggaagtcgctggagatgttct

SEQ ID NO: 13798 - DNA, 576 bp, Zea Mays
ccgtgaaccgccgcgatatgtcagccgcgaagcgccaagtagatgaggccccgaagcttccaaaaccctagccgcccgaagcctttgggtcacagttaacggcaccagtggagagaacgcggagagagagagagagaggggttgccgccgcgacgattcctcggaatgttgacgttcttgcttcggggaaggcgagattggagttcactggcgcgtgcggatcgtgtgggtgtgcgcaatttggtgtgtgcaccaccggcgtcaaccggatttctcgccggtgttgggtggcgccgcggattcgtctgccgccgtggcctgagctctacactgcgaacgcgccggtaagaatcccctccttgtgctcacttggttctcctacttgtgtatgcgtctcggattgggttatggggcaccggaggtcgagctgtgggtgctccggcgggcgctccgccgtggtgtttggtcgccgccgcggtgccttctacttgggctaggaggacggttcgtctgagttagaggtaggaggacggttctaaatcatgacttcaaagggccatcatatttcccttcatt

SEQ ID NO: 13799 - DNA, 537 bp, Zea Mays
gcagcggcaggggcgatggcggcgacggcaacgccggtggcaatgtgccactggcttacatattaatatagtgtagttgtagtagtattagtttagtagtagtataatgtagttagttagtagtgtaatgtagttagtatgtaatgtagtgttggatcaaggggtcagttggccgactcatgatgtgtcggtcttccttttgtaatgatccctgtcttatggattaatgaagtctgtttcatgccatttcgctgttgcgtattctgttcttttgtctgacgttctgttagcttagagatactgaccgaatcctgctactctgctgtgaccaaaactctcccgagccaccggcttgtccttctgcgcccaactcagtgtgccaacctgtacttttgtcgatgtcctcttggcccctgaaccctagttccaggtttttccttcgccgctttctagctttctaagttcccacatcatttcgcgtcttgctcctgaaccacgttgtttgaaaacttgtgatggcgcccaggaagagaaaat

SEQ ID NO: 13800 - DNA, 884 bp, Zea Mays
atggggatttcgctgtgattgcgactttgtgccggtcaatggagtccgccgcaacaccgggtgagcgcatcggtgtcggccgcaagggaagggaggaaacctcgtctgggcagttcctcgcagccgtggacactcgccgtcatccacctagcgatcgactccacccccgttccgaactctcggtaagcgtcactctttgtacgtagtcgtccctttgctgagtagggggcatcgttcagttatagcgtagcgggcgtcgcgtcgccgggcatcaaggtcatgctgccatgtgccgccgtgggcagagctttccgcttcgccaatcgcattaaaacctacctagatcgatccatattcgcccccttgccatgaataatcgtgcttagggctgaatttgggttcctgggtacatctccgacactacgctggtgttgcgccgccgggtgggctggagctccgtcgagctcgggtcgcagtgataaggtaggtgaggcattggttgccgtcgatcttgtgatgggcgatctagatggaatcggcgtaccgatcggatatgggatggcagtggccgttgatcttctaatgaacacgctggattagatctaggtgatgtttcacccgcgactgtcggatctcgatcgtgtgaatgtggttagttagagcgggatgaaatctgcgccgttggatctttatccatcggtggtggttgcataccgcttcacttgaatcgcgatctaatctggggcgcatggtttagatttgacggcccagatttgagaataccccttcgttgtgcttatttgttaaggagtccctgcgttttcattaattcaacccgcagtccatggtgactatgctctgtgtcgtgggaatcttctgtgttc

SEQ ID NO: 13801 - DNA, 437 bp, Zea Mays
cgaatgatggcgcttggccccaccacgccgcccgccataaagagtacaagacaaccaagcgactacgagcacgcgtggctttagcccatggtagaacacttagttttaccattgtccatcgttggctaaccccgatccttggcctataaaaggaggctggcacttggacgcacggacggaccccaaacgagaagacgcctagaaagactgacgaaccgaaggaggacccagaggtcggagacccatcgctaagccaagatttagctaggactccactttgtaatcacatccaccacgaataatagacatgggagcctctcctccctctctcatccgcttgtaacccatactacgagttttgatcatcaacgatgccggtagcgcaagtcgttgatgactggaagtagggatgttctacgagaactagtataaatatt

SEQ ID NO: 13802 - DNA, 974 bp, Zea Mays
ggctaccgacaaggagcagtaccacaacaacttcggttgttatggattcattgctcgatccaatgcaagccatccagttcctacattccaaaaaatggcctggggcctggatggaagaatggtattatgtaatgaatgatctgattgaacgagaggacattaaggaaatcatccaacgccccatctagtctcgatttggcctttggagaccgaaggtgacaatcgatcagaatgatgaagcatgccaaaaggcttttagcaatgtctgtgccttcattggcacaagggatatagttcaagagcacatagcgtatagaatatggtcacttgtagaaaactgggatatgccgaaggatactattgccgagtcaactgaatgtgggttggtccgattgaagtataccttcagattcagagaccggtttgatgagccaaatgatgattggctaaaaagtattgaggctatcagcgacgaactacttggagcatatagcagggcagaagatgatgccttttccgcagccttcgggggccaggggaagaaaggattgaacagggtatttgatgcgattggcttcgtataccctgattaccgctacccgctgcgagggcaaggaaaaaagagaaagactgccgcttcgaccaccacagttgtgccgaagggcaagaagatgaaggtcctgacccatcggccgcgctacattgaaccgactgtggtgcctgaacttggcgaaggggcctcttcaactgtcgaagcaggacaagttgctccaattgtgcaaaacgttgaagagccaattgtagtgccgaagatgcctacagtcgggccgatcgaagctaaggaggataaggccgaagagctaaaggcggaagaaacaatgaaaatgccagaaattgctagccctccagcagaggcaaaactgtcgaaggtgcaaaaggctcctgtcgcaactcctaaaagaaggaggatggcc

SEQ ID NO: 13803 - DNA, 374 bp, Zea Mays
cgcgggattagtggacggggaccccagaattgctcactggaggaaaaacaccaccgtggacagcacctcgccgtggccgtacccctgaactccattccctcggtaagaaatctgtccctcgtgttcgtcttgacttccacatggtaaatctcgattcaatttgatgcttagcgcccagggaacaccgattcgacctcaccggagctcgattgagtgagaatcgagggcggcaccgccgtctcggttggtcggaggaaggagataggacgtgatccattgatttatcagtcaacagctcggattagaagccagcaaataacccttcgcttgaatagatcctaaccgtagatcctggatccgatggtctacgtagt

SEQ ID NO: 13804 - DNA, 350 bp, Zea Mays
gtttgattcagtcgtagcttcttccctgggcgcgtaggaggggtgcgagcacgaagatttttctactatcggttccttctctaaccacaaacgccatgcttagctagctgagcaagttaggaggaccaaaggagagatgaagattaaagaaattgctttggggttgttggatactctttggagtttggatgactgaaaaggatgaactgattaaattggcagtagcagtaaaccatagcagctacattggacctcaatcccttgttgcaacacctctctctctcttacttttctggaccggaagacaagcgtggctcatgtatgagtctgaagcccaacacagatagttt

SEQ ID NO: 13805 - DNA, 289 bp, Zea Mays
ccgaggttggattgttgaaggagaagggtctgactgccgaggctgtggtcgccgattttgtttttaagaacattcagccactaaaagacagagcgtacccagcttatctgtatcgtggcctcactgattcgacctgggttaccaacagaaggattcctactgtggatctggtaagccggcttgaaatgattcttagaggcaaggtgtcgaatatcagtgctcctgttgcatattcagcctggaatctgcctccttccaaggctttcatcaattttgtgtcaaatcctcc

SEQ ID NO: 13806 - DNA, 390 bp, Zea Mays
gtggttcatgcaggactcgggccggatagtgccgggagggtaaaaagatcggaaggggagtagatttggtcgcggagtgaagcttatcacctgcgcctgtagccgtgcgacgtggtcggaccgctggtgtcgccgtggtacttcgacgaccccaattacgccatgtcgtagcccttttaccatgtagtagtaatcatggcgcgcttggacttaccatttcaagagctgttgcaccggcaagcaccacgactaagccaccagtgacttttccctctctccggccgccgcgcgtctttctaaaaattagccaccaccgctgatggaacctataaattgccaccccagtgagctccgctaagtaatcacacacccagtgcaaccgcccgtgcc
